United States Patent Application Publication US 2022/0096574 A1 - sequence listing, part 10

SEQ ID NO: 46502 - protein, 155 aa, Hyphomonadaceae bacterium
  misc_feature (1)..(155): tr|A0A354TXT5|A0A354TXT5_9RHOB NADPH-dependent 7-cyano- 7-deazaguanine reductase OS=Hyphomonadaceae bacterium O X=2026748 GN=queF PE=3 SV=1
MSQNDIYTGLDQLGEKVDAAATPEQAELERVQNPHPDMLYCARFVAPEFTSLCPVTGQPDFAHIVIDYAPDEFLVESKSLKLFLQSFRNHGAFHEDCTLYIAKRLTELLAPKWFRIAGYWYPRGGIPIDVFWQSGEIPSGLWVPETGVAPYRGRG

SEQ ID NO: 46503 - protein, 155 aa, Hyphomonas adhaerens
  misc_feature (1)..(155): tr|A0A069E0X7|A0A069E0X7_9RHOB NADPH-dependent 7-cyano- 7-deazaguanine reductase OS=Hyphomonas adhaerens MHS-3 OX=1280949 GN=queF PE=3 SV=1
MSDNPIYQNLGQLGQHTAQPQSPEEAQLERVPNPHAGTLYLTRFVAPEFTSLCPVTGQPDFAHLVIDYAPGDWLVESKSLKLYLTSFRNHGAFHEDCTVSIGKRIFEFTEAKWLRISGYWYPRGGIPIDVFWQSGEVPAGLYVPDTGVASYRGRG

SEQ ID NO: 46504 - protein, 155 aa, Hyphomonas adhaerens
  misc_feature (1)..(155): tr|A0A3B9GX96|A0A3B9GX96_9RHOB NADPH-dependent 7-cyano- 7-deazaguanine reductase OS=Hyphomonas adhaerens OX=810 29 GN=queF PE=3 SV=1
MSDNPIYQNLGQLGQHTAQPQSPEEAKLERVPNPHAGTLYLTRFVAPEFTSLCPVTGQPDFAHLVIDYAPGDWLVESKSLKLYLTSFRNHGAFHEDCTVSIGKRVFEFTEAKWLRISGYWYPRGGIPIDVFWQSGEVPKGLYVPDTGVASYRGRG

SEQ ID NO: 46505 - protein, 54 aa, Hyphomonas atlantica
  misc_feature (1)..(54): tr|A0A356W4W2|A0A356W4W2_9RHOB NADPH-dependent 7-cyano- 7-deazaguanine reductase QueF (Fragment) OS=Hyphomonas atlantica OX=1280948 GN=DD728_07510 PE=4 SV=1
ADNPIYQGLGQLGQQTDQPQSPETAELERVANPHADTLYLTRFVAPEFTSLCPV

SEQ ID NO: 46506 - protein, 155 aa, Hyphomonas atlantica
  misc_feature (1)..(155): tr|A0A059E571|A0A059E571_9RHOB NADPH-dependent 7-cyano- 7-deazaguanine reductase OS=Hyphomonas atlantica OX=128 0948 GN=queF PE=3 SV=1
MADNPIYQGLGQLGQQTDQPQSPETAELERVANPHADTLYLTRFVAPEFTSLCPVTGQPDFAHLVIDYAPGDWLVESKSLKLYLTSFRNHGAFHEECTVSIGKKIFDFTEAKWLRISGYWYPRGGIPIDVFWQSGEVPAGLYVPDTGVASYRGRG

SEQ ID NO: 46507 - protein, 155 aa, Hyphomonas beringensis
  misc_feature (1)..(155): tr|A0A062TTL9|A0A062TTL9_9RHOB NADPH-dependent 7-cyano- 7-deazaguanine reductase OS=Hyphomonas beringensis OX=1 280946 GN=queF PE=3 SV=1
MADNPIYQNLGQLGQHTAQPQSPEEAELERVPNPHAGELYLTRFVAPEFTSLCPVTGQPDFAHLVIDYAPGDWLVESKSLKLYLTSFRNHGAFHEECTVSIGKKIFDFTEAKWLRISGYWYPRGGIPIDVFWQSGEVPAGLYVPDTGVASYRGRG

SEQ ID NO: 46508 - protein, 155 aa, Hyphomonas chukchiensis
  misc_feature (1)..(155): tr|A0A062UPA8|A0A062UPA8_9RHOB NADPH-dependent 7-cyano- 7-deazaguanine reductase OS=Hyphomonas chukchiensis OX= 1280947 GN=queF PE=3 SV=1
MPDNPIYSGLDQLGQQTAAPQSPEEAQLERVPNPHAGTLYLTRFVAPEFTSLCPVTGQPDFAHLVIDYAPGDWLVESKSLKLYLTSFRNHGAFHEDCTVSIGKRIFDFTEAKWLRISGYWYPRGGIPIDVFWQSGEVPKGLYVPDTGVASYRGRG

SEQ ID NO: 46509 - protein, 155 aa, Hyphomonas hirschiana
  misc_feature (1)..(155): tr|A0A059FWK7|A0A059FWK7_9RHOB NADPH-dependent 7-cyano- 7-deazaguanine reductase OS=Hyphomonas hirschiana VP5 O X=1280951 GN=queF PE=3 SV=1
MADNPIYQKLGQLGQHTVQPASPEEAQLERVENPHSGTLYLTRFVAPEFTSLCPVTGQPDFAHLVIDYAPGPWLVESKSLKLYLTSFRNHGAFHEECTVSIGKKIFDFTEATWLRISGYWYPRGGIPIDVFWQSGDVPKGLYVPDTGVASYRGRG

SEQ ID NO: 46510 - protein, 155 aa, Hyphomonas jannaschiana
  misc_feature (1)..(155): tr|A0A059FIG7|A0A059FIG7_9RHOB NADPH-dependent 7-cyano- 7-deazaguanine reductase OS=Hyphomonas jannaschiana VP2 OX=1280952 GN=queF PE=3 SV=1
MSDNPIYQNLGQLGQQTAQPQSPEEAELERVPNPHAGTLYLTRFVAPEFTSICPVTGQPDFAHLVIDYAPGEWLVESKSLKLYLTSFRNHGAFHEDCTVSIGKRIFDFTEAKWLRISGYWYPRGGIPIDVFWQSGEVPAGLYVPETGVASYRGRG

SEQ ID NO: 46511 - protein, 155 aa, Hyphomonas johnsonii
  misc_feature (1)..(155): tr|A0A059FTZ7|A0A059FTZ7_9RHOB NADPH-dependent 7-cyano- 7-deazaguanine reductase OS=Hyphomonas johnsonii MHS-2 OX=1280950 GN=queF PE=3 SV=1
MADNPIYEGLGQLGQHVPAPQSPDEAQLERVPNPHAGTLFLTRFVAPEFTSLCPVTGQPDFAHLVIDYAPGDWLVESKSLKLYLTSFRNHGAFHEDCTVSIGKRIFDFTEASWLRISGYWYPRGGIPIDVFWQSGAVPEGLHVPDTGVAPYRGRG

SEQ ID NO: 46512 - protein, 155 aa, Hyphomonas neptunium; identical to SEQ ID NO: 46509
  misc_feature (1)..(155): sp|Q0C137|QUEF_HYPNA NADPH-dependent 7-cyano-7-deazagua nine reductase OS=Hyphomonas neptunium (strain ATCC 154 44) OX=228405 GN=queF PE=3 SV=1

SEQ ID NO: 46513 - protein, 155 aa, Hyphomonas oceanitis
  misc_feature (1)..(155): tr|A0A059G6F2|A0A059G6F2_9RHOB NADPH-dependent 7-cyano- 7-deazaguanine reductase OS=Hyphomonas oceanitis SCH89 OX=1280953 GN=queF PE=3 SV=1
MPDNPIYSGLDQLGQQTAAPQSPEEAQLERVPNPHTGTLYLTRFVAPEFTSLCPVTGQPDFAHLVIDYAPGDWLVESKSLKLYLTSFRNHGAFHEDCTVSIGKRIFDFTHATWLRISGYWYPRGGIPIDVFWQSGEVPKGLYVPDTGVASYRGRG

SEQ ID NO: 46514 - protein, 155 aa, Hyphomonas polymorpha
  misc_feature (1)..(155): tr|A0A062VKX5|A0A062VKX5_9RHOB NADPH-dependent 7-cyano- 7-deazaguanine reductase OS=Hyphomonas polymorpha PS728 OX=1280954 GN=queF PE=3 SV=1
MADNPIYQKLGQLGQHTAQPQSPEEAQLERVENPHSDTLYLTRFVAPEFTSLCPVTGQPDFAHLVIDYAPGPWLVESKSLKLYLTSFRNHGAFHEECTVSIGKRIFEFTEAKWLRISGYWYPRGGIPIDVFWQSGDVPKGLYVPETGVASYRGRG

SEQ ID NO: 46515 - protein, 155 aa, Hyphomonas sp.
  misc_feature (1)..(155): tr|A0A259LLF5|A0A259LLF5_9RHOB NADPH-dependent 7-cyano- 7-deazaguanine reductase OS=Hyphomonas sp. 34-62-18 OX= 1970392 GN=queF PE=3 SV=1
MADNPIYQKLGQLGQQTAQPQTPEEAQLERVENPHADTLYLTRFVAPEFTSLCPVTGQPDFAHLVIDYAPGPWLVESKSLKLYLTSFRNHGAFHEECTVSIGKRIFEFTEAKWLRISGYWYPRGGIPIDVFWQSGDVPKGLYVPETGVASYRGRG

SEQ ID NO: 46516 - protein, 155 aa, Hyphomonas sp.
  misc_feature (1)..(155): tr|A0A2D8EKE8|A0A2D8EKE8_9RHOB NADPH-dependent 7-cyano- 7-deazaguanine reductase OS=Hyphomonas sp. OX=87 GN=que F PE=3 SV=1
MADNPIYQGLDQLGQQTHQPQNPEDAQLERVPNPHAGTLYLTRFVAPEFTSLCPVTGQPDFAHLVIDYAPGEWLVESKSLKLYLTSFRNHGAFHEDCTVSIGKKIFDFTEATWLRISGYWYPRGGIPIDVFWQSGEVPAGLHVPDTGVASYRGRG

SEQ ID NO: 46517 - protein, 164 aa, Ideonella sakaiensis
  misc_feature (1)..(164): tr|A0A0K8P8D3|A0A0K8P8D3_IDESA NADPH-dependent 7-cyano- 7-deazaguanine reductase OS=Ideonella sakaiensis (strai n NBRC 110686 / TISTR 2288 / 201-F6) OX=1547922 GN=queF PE=3 SV=1
MPRKPAPPASAPAPATAVGRREAPATPPTRPSRRLDVFPNPSPQRDYLIQFQAPEFTCHCPLTGQPDFAHLAFEIVPDRLCIELKSLKLYLWSFREQGAFHEAVTNTLLDDVVQAIDPRFARLTARWYVRGGIYTNVVAEHRRKGWKPPAPVLLATLPTATGLG

SEQ ID NO: 46518 - protein, 112 aa, Ideonella sp.
  misc_feature (1)..(112): tr|A0A523Q461|A0A523Q461_9BURK NADPH-dependent 7-cyano- 7-deazaguanine reductase OS=Ideonella sp. MAG2 OX=20830 17 GN=queF PE=3 SV=1
MPEFTCHCPLTGQPDFAHFTIDMVADKLCVELKSLKMYMWSFRDEGAFHEKVTNDILGKIVATTQPRYVRITARWYVRGGIYTNVVVEHRKKGFKGDSVIPAPNLPTATGLR

SEQ ID NO: 46519 - protein, 148 aa, Ideonella sp.
  misc_feature (1)..(148): tr|A0A437RK12|A0A437RK12_9BURK NADPH-dependent 7-cyano- 7-deazaguanine reductase OS=Ideonella sp. KYPY4 OX=1862 385 GN=queF PE=3 SV=1
MARKTPPSPPERAKPATPPSAPGKELQAFPNPAPERDYLIHFDVPEFTCLCPLTGQPDFAHFKIDIVADRFCVETKSLKQYFWSYRNEGAFHEKVTNTIVSDIVKAIAPRYVRIHADWFVRGGIRTLVTVEHRQKGWKPAPKVDLPGA

SEQ ID NO: 46520 - protein, 274 aa, Idiomarina abyssalis
  misc_feature (1)..(274): tr|A0A370QD43|A0A370QD43_9GAMM NADPH-dependent 7-cyano- 7-deazaguanine reductase OS=Idiomarina abyssalis OX=861 02 GN=queF PE=3 SV=1
MPKKDALDHLSLGQHTDYPNEYDPKQLQPVPRSLNREPIGLKDKLPFSGVDLWTGYEVSWLNSNGLPQVAVGYFAVPAESPNLVESKSFKLYLNSFNDSRFETWEQVQQLMETDLSACAGAPVKVKLKQVSELEGESVATFPGHCIDDQNISISHYDYQPSLLATEQNETEEELHSHLLKSNCLITNQPDWGSVYIHYQGPKLDRAALLAYLVSFRRHNEFHEQCVERIYQDLKALGMKKLTVYARYTRRGGLDINPFRSDFEPALQMQRMARQ

SEQ ID NO: 46521 - protein, 239 aa, Idiomarina aestuarii
  misc_feature (1)..(239): tr|A0A2T4CTI8|A0A2T4CTI8_9GAMM NADPH-dependent 7-cyano- 7-deazaguanine reductase (Fragment) OS=Idiomarina aestu arii OX=624146 GN=C9988_03445 PE=3 SV=1
MTNPLGHLSLGQPTQYPDQYDATLLQAVPRQLNREPLGLNAEQLPFTGVDYWNAYEMSWLNQRGVPQVAIVECQVPIVSPNLIESKSFKLYLNSFNESRWESWQQVQDQLKQDLSHCAGATVQVQLIGLKTASADGFVDLPGLCIDQVDVTITQYHYEPQLLRSVNSGTIVEETLHSHLLKSNCLITNQPDWGSVLIRYRGRQVDHAALLQYIVSFRNHNEFHEQCVERIFVDMKQQLQ

SEQ ID NO: 46522 - protein, 34 aa, Idiomarina aestuarii
  misc_feature (1)..(34): tr|A0A2T4CSG8|A0A2T4CSG8_9GAMM NADPH-dependent 7-cyano- 7-deazaguanine reductase QueF (Fragment) OS=Idiomarina aestuarii OX=624146 GN=queF PE=4 SV=1
LTVYARYTRRGGLDINPFRSDFETAPRQQRLVRQ

SEQ ID NO: 46523 - protein, 276 aa, Idiomarina aquatica
  misc_feature (1)..(276): tr|A0A4R6P2I6|A0A4R6P2I6_9GAMM NADPH-dependent 7-cyano- 7-deazaguanine reductase OS=Idiomarina aquatica OX=1327 752 GN=queF PE=3 SV=1
MPNDNPLQHLNLGQSTDYPSAYDAAQLRAVPRALNRQTIGINDNNLPFVGDDFWTGYELSWLNNNGLPQVAVGYFTVPANSPNLVESKSFKLYLNSFNESRFADWQQVEKLMREDLSQCAGAPVEVELKPISAVTHATIDDLPGDLIDEQDITITAYNYDPGLLQITGNDPTEQHFKSHLLKSNCLITNQPDWGSVYIHGVGPGLDTASLLRYLISFRRHNEFHEQCVERIFQDLTRLGFQKLSVYARYTRRGGLDINPFRSNFEKAPAVGRLARQ

SEQ ID NO: 46524 - protein, 280 aa, Idiomarina aquimaris
  misc_feature (1)..(280): tr|A0A432XQH2|A0A432XQH2_9GAMM NADPH-dependent 7-cyano- 7-deazaguanine reductase OS=Idiomarina aquimaris OX=641 841 GN=queF PE=3 SV=1
MKHSSAEHPLAHLNLGQATTYPEQYNAGLLQPVPRQLNRTPIGIDEGQELPFHGTDYWTGYELSWLQENGLPQVAIGYFEVPADSPHLIESKSFKLYLNSFNASHWPSWTDVEQAIARDLSRCAGAPVQVKLMPLRAPQHQIADWQATSIDDASVAIDSYDYNPELLQAAGHETVTETLYTDLLKSNCLITNQPDWGSLFVHYQGQAIDHASLLRYIVSFRNHNEFHEQCVERIFMDLSQRFALEKLSVYARYTRRGGLDINPFRSNFEAAPNMNRLSRQ

SEQ ID NO: 46525 - protein, 280 aa, Idiomarina atlantica
  misc_feature (1)..(280): tr|A0A094JAG4|A0A094JAG4_9GAMM NADPH-dependent 7-cyano- 7-deazaguanine reductase OS=Idiomarina atlantica OX=151 7416 GN=queF PE=3 SV=1
MKQGTHDNPLAHLNLGQATAYPEHYDASLLQPVARQLNRTPIGIVEASKLPFFGHDEWTGYEISWLQPNGLPQVAIAQFIVPCTSPNLIESKSFKLYLNSFNQSQWPSWEAVAAQMTIDLSACAGAAVTVKLLQLNDAQHLVGQWQGQCLDNPSVAISTYDYAPDLLRHASHERVTEQLYSDLLKSNCLITNQPDWGSLYISYTGRAIDHAALLQYIVSFRNHNEFHEQCVERIFMDLTQRLDLDHLSVYARYTRRGGLDINPYRATEDTAPNRMRLSRQ

SEQ ID NO: 46526 - protein, 276 aa, Idiomarina baltica
  misc_feature (1)..(276): tr|A0A348WR97|A0A348WR97_9GAMM NADPH-dependent 7-cyano- 7-deazaguanine reductase OS=Idiomarina baltica OX=19089 2 GN=queF PE=3 SV=1
MQKNDPLAHLNLGKATDYPTTYDPSQLHAVARELNRTPIGITQKLPFDGQDDWTGYEVSWLNNRGLPQVAIAEFSVPCDSPHLIESKSFKLYLNSFNESRFEDWQTVADIMQHDLSTCAGANVLVSLSSLDELSGTPISGLPGACIDEQDIEVSTYDYQPDLLTVDTSIIESISVHSHLLKSNCLITNQPDWGSVYIHGVGPRLDRASLLRYLISFRRHNEFHEQCVERIFIDLQRLGFTQLTVYARYTRRGGLDINPFRSNFEKAPPSGQRLARQ

SEQ ID NO: 46527 - protein, 276 aa, Idiomarina donghaiensis
  misc_feature (1)..(276): tr|A0A432XM24|A0A432XM24_9GAMM NADPH-dependent 7-cyano- 7-deazaguanine reductase OS=Idiomarina donghaiensis OX= 519452 GN=queF PE=3 SV=1
MNESLAHLNLGQPTAYPTQYDASLLQGVPRQLNRTPIGLAEGQPLPFHGDDIWHGYELSWLNSNGLPQVAVAEFRVPATSTNLIESKSFKLYLNSFNDSRWPSWHAVSEQLSIDLSQCAGAPVGVQLSTVQQAQRKAFGDLPGHCIDDQPIEITSYEYSPELLKLSSHDIVEETLHSHLLKSNCLITNQPDWGSVLIRYRGPAVDHAALLRYIVSFRHHNEFHEQCVERLYMDIKERLQPEQLTVYARYTRRGGLDINPFRSDFEPTPESVRLSRQ

SEQ ID NO: 46528 - protein, 276 aa, Idiomarina fontislapidosi
  misc_feature (1)..(276): tr|A0A432YBT5|A0A432YBT5_9GAMM NADPH-dependent 7-cyano- 7-deazaguanine reductase OS=Idiomarina fontislapidosi O X=263723 GN=queF PE=3 SV=1
MQTSDPLAHLNLGKATDYPTTYDPSQLQPVARELNRTPIGVTEDLPFTGHDDWTGYEVSWLNSKGLPQVAIAEFSVPCDSPHLIESKSFKLYLNSFNESRFDDWQTVADVMQHDLSACAGADVMVSLSSLDEYTNLPIGDLPGTCIDNQDIEIDTYDYQPALLKVEPQVVESLTVHSHLLKSNCLITNQPDWSSVYIHGTGPQLDHASLLRYLVSFRRHNEFHEQCVERIFMDLQRLGFSKLTVYARYTRRGGLDINPFRSNFETAPPSGQRLARQ

SEQ ID NO: 46529 - protein, 280 aa, Idiomarina halophila
  misc_feature (1)..(280): tr|A0A432Y050|A0A432Y050_9GAMM NADPH-dependent 7-cyano- 7-deazaguanine reductase OS=Idiomarina halophila OX=144 9799 GN=queF PE=3 SV=1
MKQTPAEHPLAHLELGQATQYPEHYDAGLLKAVPRQLNRTPIGLAEHTPLPFHGDDYWTAYEISWLLPNGLPQVAIGYFTVPCTSPNLIESKSFKLYLNSLNGSQWTSWDEVKATLQRDLSDCAGAAVEVQLVELDHARHSVGEWTAESIDNNDLAISNYDYTPSVLQHAGDARVTEQLRSHLLKSNCLITNQPDWGSLYIHYQGRVIDRAALLRYIVSFRNHNEFHEQCVERIFMDLSQRLDIEKLTVYARYTRRGGLDINPFRSNFETAPAMTRLSRQ

SEQ ID NO: 46530 - protein, 280 aa, Idiomarina homiensis
  misc_feature (1)..(280): tr|A0A432Y4G2|A0A432Y4G2_9GAMM NADPH-dependent 7-cyano- 7-deazaguanine reductase OS=Idiomarina homiensis OX=364 198 GN=queF PE=3 SV=1
MKHSSAEHPLAHLNLGQATAYPERYDASLLQAVPRQLNRTPIGILAGAALPFKGTDYWTGYELSWLQQNGLPQVAIGYFEVPADSPNLIESKSFKLYLNSFNASRWENWEDVQQTLSRDLTECAGAPVTVHLHPLHAEQHQIGHWHATSIDDTGVSIDCYDYNPELLQPASHEHVTETLYTDLLKSNCLITNQPDWGSLFIHYRGQAIDHASLLRYIVSFRNHNEFHEQCVERIFMDLSQRLVIEQLSVYARYTRRGGLDINPFRSNFEAAPNMNRLSRQ

SEQ ID NO: 46531 - protein, 277 aa, Idiomarina indica
  misc_feature (1)..(277): tr|A0A1G6AF81|A0A1G6AF81_9GAMM NADPH-dependent 7-cyano- 7-deazaguanine reductase OS=Idiomarina indica OX=115901 7 GN=queF PE=3 SV=1
MKNPTLDHLNLGQPTVYPEHYDAALLQAVPRQLNRTPIGLAEGQPLPFQGDDIWHGYELSWLDQKGLPQVAVAEFRVPCHSPNLIESKSFKLYLNSYNDTRWASWEQVQEQLTVDLSACAGAPVTVVLNTLAQAQRQAFGELPGHCLDHQELTIDCYQYRPELLQLASTDMVEETLHSHLLKSNCLITNQPDWGSVLIRYRGPAIDHAALLRYIISFRQHNEFHEQCVERIYMDIKTRLKPSELTVYARYTRRGGLDINPFRSDFEPTPQSARLCRQ

SEQ ID NO: 46532 - protein, 280 aa, Idiomarina insulisalsae
  misc_feature (1)..(280): tr|A0A432YC96|A0A432YC96_9GAMM NADPH-dependent 7-cyano- 7-deazaguanine reductase OS=Idiomarina insulisalsae OX= 575789 GN=queF PE=3 SV=1
MKQSSAEHSLAHLSLGQATHYPEHYDASLLQPVPRQLNRTPIGIAEQAPLPFHGTDFWTGYELSWLNPGGMPQVAIGYFQVPATSPNLIESKSFKLYLNSFNATKWQSWQEVEERLVSDLTSCAGAPVQVQLRAPDAAGHEVGRLSGSSLDDQQISISSYDYNPELLQHASNEHVTERLYTHLLKSNCLITNQPDWGSLAIHYHGRAIDHGALLRYIVSFRNHNEFHEQCVERIFMDLTQRLDIDKLSVYARYTRRGGLDINPFRSNFETAPELTRLSRQ

SEQ ID NO: 46533 - protein, 274 aa, Idiomarina loihiensis
  misc_feature (1)..(274): sp|Q5QW08|QUEF_IDILO NADPH-dependent 7-cyano-7-deazagua nine reductase OS=Idiomarina loihiensis (strain ATCC BA A-735 / DSM 15497 / L2-TR) OX=283942 GN=queF PE=3 SV=1
MPKKDALDHLSLGQHTDYPNEYDPKQLQPVPRSLNREPIGLKDKLPFSGVDLWTGYEISWLNANGLPQVAVGYFAVPAESPNLIESKSFKLYLNSFNDSRFDTWEYVQQLMETDLSACAGTPVKVKLKQLSELEGESVATFPGHCIDDQNISISHYDYQPSLLATEQHETEEALHSHLLKSNCLITNQPDWGSVYIHYQGPKLDRAALLAYLVSFRRHNEFHEQCVERIYQDLKALGMKKLTVYARYTRRGGLDINPFRSDFEPALQMQRMARQ

SEQ ID NO: 46534 - protein, 274 aa, Idiomarina loihiensis; identical to SEQ ID NO: 46533
  misc_feature (1)..(274): tr|A0A349C2P4|A0A349C2P4_9GAMM NADPH-dependent 7-cyano- 7-deazaguanine reductase OS=Idiomarina loihiensis OX=13 5577 GN=queF PE=3 SV=1

SEQ ID NO: 46535 - protein, 276 aa, Idiomarina marina
  misc_feature (1)..(276): tr|A0A432YK59|A0A432YK59_9GAMM NADPH-dependent 7-cyano- 7-deazaguanine reductase OS=Idiomarina marina OX=502366 GN=queF PE=3 SV=1
MKQELAHLNLGQPTQYPTHYDASLLQAVPRQLNRTPIGLEEGASLPFHGDDIWHGYELSWLNSLGVPQVAIAEFRVPCTSSNLIESKSFKLYLNSFNESRWNSWAEVQEQLAIDLSNCAGTSVAVRLDTLQQAQRMAFGDLPGHCIDEQSIEIDCYDYNPELLQLSSNNTVSETLHSHLLKSNCLITNQPDWGSVLIRYHGPAIDHAALLRYIISFRHHNEFHEQCVERLYMDIKSRLKPSQLTVYARYTRRGGLDINPFRSDFEPTPQSVRLSRQ

SEQ ID NO: 46536 - protein, 277 aa, Idiomarina maritima
  misc_feature (1)..(277): tr|A0A317QB84|A0A317QB84_9GAMM NADPH-dependent 7-cyano- 7-deazaguanine reductase OS=Idiomarina maritima OX=5194 53 GN=queF PE=3 SV=1
MNQPLAHLNLGQPTQYPTAYDASLLQAVPRQLNRTPIGLPEAQPLPFHGDDIWHGYELSWLNQQGLPQVALAEFRVACNSPNLIESKSFKLYLNSFNDSRFASWQQVETQLSHDLSACAQAPVKVKLMTVQQAQQQAFADLPGQCIDNQDITIDTYNYAPELLQPNAQTQQVSEILHSHLLKSNCLITNQPDWGSVLISYRGRQIDQAALLRYLVSFRHHNEFHEQCVERIFMDIKRQLQPEQLTVYARYTRRGGLDINPFRSDFETTPTSVRLSRQ

SEQ ID NO: 46537 - protein, 276 aa, Idiomarina maritima
  misc_feature (1)..(276): tr|A0A1I6GGU6|A0A1I6GGU6_9GAMM NADPH-dependent 7-cyano- 7-deazaguanine reductase OS=Idiomarina maritima OX=5194 53 GN=queF PE=3 SV=1
MKHELAHLNLGQPTQYPTHYDASLLQAVPRQLNRTPIGLAEGAEIPFHGDDIWHGYELSWLNAQGLPQVAIAEFRVPCTSKNLIESKSFKLYLNSFNESRWAHWQDVQEQLALDLSHCAGAPVSVRLNTVQQAQRMPFGELPGHCIDEQNIAIECYDYNPELLQLSSTKIVSETLHSHLLKSNCLITNQPDWGSVLIRYHGPAIDHAALLRYIVSFRHHNEFHEQCVERLYMDIKTRLKPTQLTVYARYTRRGGLDINPFRSDFEPTPQSVRLSRQ

SEQ ID NO: 46538 - protein, 276 aa, Idiomarina piscisalsi
  misc_feature (1)..(276): tr|A0A432YVT1|A0A432YVT1_9GAMM NADPH-dependent 7-cyano- 7-deazaguanine reductase OS=Idiomarina piscisalsi OX=10 96243 GN=queF PE=3 SV=1
MPKKDALGHLSLGQQTEYPSQYDSTQLQAVPRSLNREPIGISGELPFSGVDQWTGYELSWLNTKGLPQVAIGYFEVPAASPNLIESKSFKLYLNSFNDSRFDTWSDVQNIMKKDLSACAGDSVSVQLTPLSRVAHEAIADFQGECIDTQDIDIEHYDYRPELLKLEDNAEEVEEKLHSHLLKSNCLITNQPDWGSVSIHYQGPKIDRAALLAYLVSFRGHNEFHEQCVERIFQDILALGVKKLSVYARYTRRGGLDINPFRSNFEPAPQMQRMARQ

SEQ ID NO: 46539 - protein, 277 aa, Idiomarina planktonica
  misc_feature (1)..(277): tr|A0A1Y6EW25|A0A1Y6EW25_9GAMM NADPH-dependent 7-cyano- 7-deazaguanine reductase OS=Idiomarina planktonica OX=1 323738 GN=queF PE=3 SV=1
MHSTDDLNHLQLGQTTTYPTTFDPSLLLAVPRALNRDPIGIAANELPFHGTDYWNAYELSWLNSNGLPQVAVAEFSVPVTSPNLIESKSFKLYLNSLNEQRWPNWQQVEQQLGQDLSACAGAPVSVQLHALQSNQAPQFGLLQGHCIDDQDISIDCYDYNPDLLQLNPQAAVVREQLYSHLLKSNCLITNQPDWGSVYINYEGPQLNTESLLRYLVSFRRHNEFHEQCVERIFMDLRRVGISKLTVYARYTRRGGLDINPFRSNFEQPPAQQRLIRQ

SEQ ID NO: 46540 - protein, 274 aa, Idiomarina ramblicola
  misc_feature (1)..(274): tr|A0A432YYW6|A0A432YYW6_9GAMM NADPH-dependent 7-cyano- 7-deazaguanine reductase OS=Idiomarina ramblicola OX=26 3724 GN=queF PE=3 SV=1
MPKKDALDHLSLGQSTNYPSQYDPKQLRPVPRSLNREPIGLKGKLPFSGVDLWTGYEISWLNLNGLPQVAVGYFEVPAESPNLVESKSFKLYLNSFNDSRFDSWESVQKLMEDDLSSCAGAAVKVSLKTLSELTGESIACMPGSCIDSQDLTISHYDYQPSLLAAEDGETEEKLHSHLLKSNCLITNQPDWGSVYIHYMGPKLDRAALLAYLVSFRRHNEFHEQCVERIYQDLKALGMKKLTVYARYTRRGGLDINPFRSDFEPALQMQRMARQ

SEQ ID NO: 46541 - protein, 276 aa, Idiomarina salinarum
  misc_feature (1)..(276): tr|A0A094J0V8|A0A094J0V8_9GAMM NADPH-dependent 7-cyano- 7-deazaguanine reductase OS=Idiomarina salinarum OX=435 908 GN=queF PE=3 SV=1
MKQPLGHLSLGRPTDYPTAFDAGLLQAVPRQLNRSAIGLNEMSELPFQGQDYWTGYELSWLNARGMPQVAVGEFVIPATSPSLVESKSFKLYLNSFNNCQWADWDAVRDQLQQDLSACAGATVQVKLLTVQQAQQQPFTELPGDCLDNQDIAITEYDYNAGLLAHSDDNEVTETLHSHLLKSNCLITNQPDWGSVMIRYRGKTIDRAALLRYIVSFRHHNEFHEQCVERLFVDLKTQLDIKQLTVYARYTRRGGLDINPFRSDFETAPAPGRLSRQ

SEQ ID NO: 46542 - protein, 281 aa, Idiomarina sediminum
  misc_feature (1)..(281): tr|A0A432Z8A6|A0A432Z8A6_9GAMM NADPH-dependent 7-cyano- 7-deazaguanine reductase OS=Idiomarina sediminum OX=431 675 GN=queF PE=3 SV=1
MKQSPADHPLAHLELGQATEYPEHYDANLLKPVPRQLNRTPIGIASGQQLPFHGDDYWTGYELSWLLPNGLPQVAIGYFKVPASSPNLIESKSFKLYLNSFNASQWPSWQAVVQTLETDLSACAGGPVRVQLQPVDHVNAHQVGQFSGHSIDATDVAISTYDYAPELLQHAGHERVTEVLYSDLLKSNCLITNQPDWGSVYIHYQGRAIDRAALLRYIVSFRNHNEFHEQCVERIFMDLTQRLDIDKLSVYARYTRRGGLDINPFRSNFEAAPELTRLSRQ

SEQ ID NO: 46543 - protein, 278 aa, Idiomarina seosinensis
  misc_feature (1)..(278): tr|A0A432ZH65|A0A432ZH65_9GAMM NADPH-dependent 7-cyano- 7-deazaguanine reductase OS=Idiomarina seosinensis OX=2 81739 GN=queF PE=3 SV=1
MPKNNSLDHLKLGQATEYPTQYDASQLMAVPRSLNREPIGISQHNPLPFHGLDYWTGYEISWLNKKGLPQVAVGYFTVPADSPNLIESKSFKLYLNSFNESRFEDWAEVTASMQTDLSACAGATVEVSLKPVTAISNEVIDDLPGELIDQQDITIDSYDYDPQLLCIDDDGATHELSVKSHLLKSNCLITNQPDWGSVYIHGFGPQLDRASLLRYLVSFRRHNEFHEQCVERIFQDLSQLGFNKLSVYARYTRRGGLDINPFRSNFEEAPATGRLARQ

SEQ ID NO: 46544 - protein, 64 aa, Idiomarina sp.
  misc_feature (1)..(64): tr|A0A2D8HUG1|A0A2D8HUG1_9GAMM NADPH-dependent 7-cyano- 7-deazaguanine reductase QueF (Fragment) OS=Idiomarina sp. OX=1874361 GN=queF PE=4 SV=1
YLVSFRRHNEFHEQCVERIYQDLKALGMKKLTVYARYTRRGGLDINPFRSDFEPALQMQRMARQ

SEQ ID NO: 46545 - protein, 276 aa, Idiomarina sp.
  misc_feature (1)..(276): tr|A0A1S2T025|A0A1S2T025_9GAMM NADPH-dependent 7-cyano- 7-deazaguanine reductase OS=Idiomarina sp. MD25a OX=188 9913 GN=queF PE=3 SV=1
MQKSDPLAHLNLGKATDYPTTYDPSQLHAVARELNRTPIGITQPLPFNGQDDWTGYEVSWLNTKGLPQVAIAEFSVPCDSPNLIESKSFKLYLNSFNESRFEDWQTVADIMQHDLSACAGAEVMVSLSSLNEYTHTPIADFPGECIDAQDIEIDTYDYQPNLLEVDPQVVESVNLHSHLLKSNCLITNQPDWGSVFIHGTGPRIDKASLLRYLISFRRHNEFHEQCVERIFMDLHRLGFTQLTVFARYTRRGGLDINPFRSNFEKAPPLGQRLARQ

SEQ ID NO: 46546 - protein, 277 aa, Idiomarina tainanensis; identical to SEQ ID NO: 46536
  misc_feature (1)..(277): tr|A0A368V441|A0A368V441_9GAMM NADPH-dependent 7-cyano- 7-deazaguanine reductase OS=Idiomarina tainanensis OX=5 02365 GN=queF PE=3 SV=1

SEQ ID NO: 46547 - protein, 277 aa, Idiomarina taiwanensis
  misc_feature (1)..(277): tr|A0A432ZNR9|A0A432ZNR9_9GAMM NADPH-dependent 7-cyano- 7-deazaguanine reductase OS=Idiomarina taiwanensis OX=3 37250 GN=queF PE=3 SV=1
MENPLEHLALGQATAYPTAFDPGLLAPVPRQLNRQPLGIDGQNLPFHGIDYWNAYELSWLNEAGLPQVAIAEIAVAVDSINLIESKSFKLYLNSFNESRWSSWSAVAKQLQTDLSNCAEGQVEVKLHSLQQAPQQHIQQFSGICLDEQQLSINEYDYNPELLALQDNPQTVTETLYSDLLKSNCLITNQPDWGSVLIRYQGPAIDHAALLRYLISFRRHNEFHEQCVERIFSDIKTRLKPEKLSVYARYTRRGGLDINPFRSDFEEPPSEQERLVRQ

SEQ ID NO: 46548 - protein, 278 aa, Idiomarina tyrosinivorans
  misc_feature (1)..(278): tr|A0A432ZRN1|A0A432ZRN1_9GAMM NADPH-dependent 7-cyano- 7-deazaguanine reductase OS=Idiomarina tyrosinivorans O X=1445662 GN=queF PE=3 SV=1
MAKHQVMDKLSLGKQTQYPTEYDASQLHPVPRSINRQSIGIDNDNALPFSGGDLWNGYELSWLNTKGLPQVAVGRFWVPADSPNLIESKSFKLYLNSFNESRFDDWQTVTELMVSDLSACAGATVNVQLFSLNQLEGSQLSALPGHCIDQQDITIDQYDYDQTLLTLQPDAQPVSETLHSHLLKSNCLITHQPDWGSVVIRYQGPALDQQALLKYLVSFRRHDEFHEQCVERIFQDILALGMDKLTVYANYTRRGGLDINPFRSNFEQPQPWLRLPRQ

SEQ ID NO: 46549 - protein, 276 aa, Idiomarina woesei; identical to SEQ ID NO: 46527
  misc_feature (1)..(276): tr|A0A0K6GWJ6|A0A0K6GWJ6_9GAMM NADPH-dependent 7-cyano- 7-deazaguanine reductase OS=Idiomarina woesei OX=138108 0 GN=queF PE=3 SV=1

SEQ ID NO: 46550 - protein, 303 aa, Idiomarina xiamenensis
  misc_feature (1)..(303): tr|K2KAK2|K2KAK2_9GAMM NADPH-dependent 7-cyano-7-deazag uanine reductase OS=Idiomarina xiamenensis 10-D-4 OX=74 0709 GN=queF PE=3 SV=1
MANANELMQQLKLGKHTDYPEHYSADWLQAVPRQINRDSIGLHAATKLPFHGVDDWTGYELSWLNQLGVPQVAVARFRVPADSPNLIESKSFKLYLNSFNEQQWQDWQSVTDTMIRDLSACAGAPVTVKLFSLAEFTQQPIQNLPGQSIDDCLNAHPDQPTAAPISTYDYQPTLLAGAADLTSDVVSETLHSHLLKSNCLITNQPDWGSLLIRYRGPKIDRQALLRYLISFRRHNEFHEQCVERIFTDLMHYCGCQQLTVYARYTRRGGLDINPFRSNVATSAAENADDNAAEPLLVQRLCRQ

SEQ ID NO: 46551 - protein, 276 aa, Idiomarina zobellii
  misc_feature (1)..(276): tr|A0A1G7LCA8|A0A1G7LCA8_9GAMM NADPH-dependent 7-cyano- 7-deazaguanine reductase OS=Idiomarina zobellii OX=8610 3 GN=queF PE=3 SV=1
MPKKDALGHLSLGQQTEYPSQYDSSQLQAVPRSLNREPIGISGELPFSGVDQWTGYELSWLNAKGLPQVAIGYFEVPAASPNLVESKSFKLYLNSFNESRFDTWGDVQSIMKKDLSACAGDSVSVQLTPLSRVAHEAIADFQGECIDSQDIDIEHYDYRPELLKLEDNAKEVEEKLHSHLLKSNCLITNQPDWGSVFIHYQGPKINKAALLAYLVSFRGHNEFHEQCVERIFQDILALGVKKLSVYARYTRRGGLDINPFRSNFEPAPQMQRLARQ

SEQ ID NO: 46552 - protein, 276 aa, Idiomarinaceae bacterium
  misc_feature (1)..(276): tr|A0A2D7YMS5|A0A2D7YMS5_9GAMM NADPH-dependent 7-cyano- 7-deazaguanine reductase OS=Idiomarinaceae bacterium OX =1898113 GN=queF PE=3 SV=1
MPNDNPLQHLNLGQSTDYPSAYDAAQLRAVPRALNRQPIGINDNNLPFVGDDFWTGYELSWLNNNGLPQVAVGYFTVPANSPNLVESKSFKLYLNSFNESRFADWQQVEKLMREDLSQCAGAPVAVELKPISAVTHATIDDLPGDLIDEQDITITAYDYDPGLLQITGNDTTEQHFKSHLLKSNCLITNQPDWGSVYIHGVGPGLDTASLLRYLISFRRHNEFHEQCVERIFQDLTRLGFEKLSVYARYTRRGGLDINPFRSNFEKAPAVGRLARQ

SEQ ID NO: 46553 - protein, 276 aa, Idiomarinaceae bacterium; identical to SEQ ID NO: 46526
  misc_feature (1)..(276): tr|A0A2E6UA64|A0A2E6UA64_9GAMM NADPH-dependent 7-cyano- 7-deazaguanine reductase OS=Idiomarinaceae bacterium OX =1898113 GN=queF PE=3 SV=1

SEQ ID NO: 46554 - protein, 156 aa, Ignatzschineria cameli
  misc_feature (1)..(156): tr|A0A2U2APR5|A0A2U2APR5_9GAMM NADPH-dependent 7-cyano- 7-deazaguanine reductase OS=Ignatzschineria cameli OX=2 182793 GN=queF PE=3 SV=1
MTDKKEQLENLTLLGNQATVYPTEYTPTILETFKNAHPGREYFVNFHCPEFTTLCPMTNQPDFATIYISYVPTIEMVESKSLKLYLFSFRNHGSFHEDCVNIIMDDLIELMDPLYIEVRGEFTPRGGISIHPYANYGKADTRWEEIATQRLANFQF

SEQ ID NO: 46555 - protein, 156 aa, Ignatzschineria indica
  misc_feature (1)..(156): tr|A0A2U2AI07|A0A2U2AI07_9GAMM NADPH-dependent 7-cyano- 7-deazaguanine reductase OS=Ignatzschineria indica OX=4 72583 GN=queF PE=3 SV=1
MSNKKEQLENLTLLGNQATIYPTEYTPQILETFKNAHPDREYFVNFHCPEFTTLCPMTNQPDFATIYISYVPTIEMVESKSLKLYLFSFRNHGSFHEDCVNIIMDDLIKLMDPLYIEVRGEFTPRGGISIHPYANYGKAGTQWEAVATQRLANFQF

SEQ ID NO: 46556 - protein, 156 aa, Ignatzschineria sp.; identical to SEQ ID NO: 46555
  misc_feature (1)..(156): tr|A0A256CHE9|A0A256CHE9_9GAMM NADPH-dependent 7-cyano- 7-deazaguanine reductase OS=Ignatzschineria sp. F8392 O X=1980117 GN=queF PE=3 SV=1

SEQ ID NO: 46557 - protein, 157 aa, Ignatzschineria ureiclastica
  misc_feature (1)..(157): tr|A0A2U2ACW2|A0A2U2ACW2_9GAMM NADPH-dependent 7-cyano- 7-deazaguanine reductase OS=Ignatzschineria ureiclastic a OX=472582 GN=queF PE=3 SV=1
MTTDKKTQLENLTLLGNQATIYPTEYSPAILETFKNAHPEREYFVNFHCPEFTTLCPLTNQPDFATIYISYVPTIEMVESKSLKLYLFSFRNHGSFHEDCVNIILNDLVTLMDPLYLEVRGEFTPRGGISIHPYANYGKAGTRWEAVAQSRLENFQF

SEQ ID NO: 46558 - protein, 125 aa, Ignavibacteria bacterium
  misc_feature (1)..(125): tr|A0A2M7MLY2|A0A2M7MLY2_9BACT NADPH-dependent 7-cyano- 7-deazaguanine reductase OS=Ignavibacteria bacterium CG _4_10_14_3_um_filter_37_18 OX=1974037 GN=queF PE=3 SV=1
MNSKQKILVLFPNPNPERNYKIIHTAHEFTSVCPVTGQPDFGKITLEYIAEGLCVELKSYKLYLQSFRNDGIYFEAVTNKILNDLVELMQPRYMKITSDFNMRGGISSVIEAVYQSPNFSFLSNE

SEQ ID NO: 46559 - protein, 120 aa, Ignavibacteria bacterium
  misc_feature (1)..(120): tr|A0A1G0PGF5|A0A1G0PGF5_9BACT NADPH-dependent 7-cyano- 7-deazaguanine reductase OS=Ignavibacteria bacterium GW B2_35_6b OX=1798424 GN=queF PE=3 SV=1
MNDKTKLLETFPNPNPERDYTIIHTAPEFTSVCPKTGHPDFATMILEYIPDELCVELKSYKYYLNSFRNDGIYFEAVTNKILNDLVEVLKPRFMRLTAEFNTRGGISSIVEVEYEKAIEL

SEQ ID NO: 46560 - protein, 124 aa, Ignavibacteriae bacterium
  misc_feature (1)..(124): tr|A0A2G6E441|A0A2G6E441_9BACT NADPH-dependent 7-cyano- 7-deazaguanine reductase OS=Ignavibacteriae bacterium O X=2026749 GN=queF PE=3 SV=1
MKDQKKILEVFENEYQNRDYSIEHTAPEFTSVCPKTGQPDFGTIILEYIPDKLCIELKSYKIYLNSYRNEGIYYESVVNKIMDDLVAVCKPRYMNITAEFNTRGGISSIIEVEYEKEEEINSLN

SEQ ID NO: 46561 - protein, 113 aa, Ignavibacteriae bacterium
  misc_feature (1)..(113): tr|A0A2N1V665|A0A2N1V665_9BACT NADPH-dependent 7-cyano- 7-deazaguanine reductase OS=Ignavibacteriae bacterium H GW-Ignavibacteriae-4 OX=2013811 GN=queF PE=3 SV=1
MNNLETFENPRPGRYFSITHENPEFTSVCPMTGLPDFGNIIVNYVPDQLCVELKSLKYYFLAYRDKGIFYEEITNQILDDLVAVCAPLEMEIISEWGTRGGMTSTIVASYIKE

SEQ ID NO: 46562 - protein, 125 aa, Ignavibacteriales bacterium
  misc_feature (1)..(125): tr|A0A2M7ZFM9|A0A2M7ZFM9_9BACT NADPH-dependent 7-cyano- 7-deazaguanine reductase OS=Ignavibacteriales bacterium CG_4_9_14_3_um_filter_34_10 OX=1974044 GN=queF PE=3 SV =1
MMNEKQKILITFPNPNTQRDYTIIHVAPEFTSVCPVTGQPDFGTITLEYIADKLCVELKSYKFYLQSFRNDGIYFEAVTNRILNDLDETLKPRYIKITAKFNTRGGIYSEIIAENRRKKLKKKFI

SEQ ID NO: 46563 - protein, 119 aa, Ignavibacteriales bacterium
  misc_feature (1)..(119): tr|A0A2M7I270|A0A2M7I270_9BACT NADPH-dependent 7-cyano- 7-deazaguanine reductase OS=Ignavibacteriales bacterium CG12_big_fil_rev_8_21_14_0_65_30_8 OX=1974046 GN=queF PE=3 SV=1
MEEKLKLLEVFDNTHPDREYTVIHEAPEFTSVCPKTGQPDFATITIEYIPDKLCVELKSLKLYLNSYRNDGIYFENVTNKILDDLVKVTKPRYMLVIADFNVRGGIASTIEAEYFKEQN

SEQ ID NO: 46564 - protein, 127 aa, Ignavibacterium album
  misc_feature (1)..(127): tr|I0AG94|I0AG94_IGNAJ NADPH-dependent 7-cyano-7-deazag uanine reductase OS=Ignavibacterium album (strain DSM 1 9864 / JCM 16511 / NBRC 101810 / Mat9-16) OX=945713 GN= queF PE=3 SV=1
MNDKRKILEVFENKYPDRDYTITHVAPEFTSLCPKTGQPDFATITIEYIPDLLCVELKSLKLYFHSYRNDGIFYESLTNQILDDLVAVVKPRYMRITAEFNVRGGISSVVEAEYYSDDYYDEDISFS

SEQ ID NO: 46565 - protein, 128 aa, Ilumatobacter fluminis
  misc_feature (1)..(128): tr|A0A4R7HZ63|A0A4R7HZ63_9ACTN NADPH-dependent 7-cyano- 7-deazaguanine reductase OS=Ilumatobacter fluminis OX=4 67091 GN=queF PE=3 SV=1
MSEQTEKLTVLGNTVRHAIEHVEVFPAPPNVSVVRFTNDELNSMCPVTEQPDLSTVVIEYEPDAWCIESKSLKLYLWGFRDRAVFAEALAAEIAGEVMTTASPRWVKVTLTQRPRGGIEIQVVSELNR

SEQ ID NO: 46566 - protein, 123 aa, Ilumatobacter sp.
  misc_feature (1)..(123): tr|A0A2E3TTA4|A0A2E3TTA4_9ACTN NADPH-dependent 7-cyano- 7-deazaguanine reductase OS=Ilumatobacter sp. OX=196749 8 GN=queF PE=3 SV=1
MELTVLGNTVRHAIDHVEVFAAPENISTVTFTNDELTSMCPITEQPDLSTVVIDYVPGEWCVESKSLKLYLWGFRKRAVFAEALAAEIAGEIMLTAKPERVTVTLTQRPRGGIEVKAVSELTG

SEQ ID NO: 46567 - protein, 129 aa, Imhoffiella purpurea
  misc_feature (1)..(129): tr|W9VJT9|W9VJT9_9GAMM NADPH-dependent 7-cyano-7-deazag uanine reductase OS=Imhoffiella purpurea OX=1249627 GN= queF PE=3 SV=1
MPSVPSKSLEIFPNPQPERDYTIRIRVPEFTCLCPKTGQPDFAELTLEYVPDRQCVELKSLKTYVWSYRDEGAFHEAVTNRILDDLVEATRPRFMRLTADFNVRGGIYTTVVAEHRAADWQPPAPVSLP

SEQ ID NO: 46568 - protein, 139 aa, Immundisolibacter cernigliae
  misc_feature (1)..(139): tr|A0A1B1YQF6|A0A1B1YQF6_9GAMM NADPH-dependent 7-cyano- 7-deazaguanine reductase OS=Immundisolibacter cerniglia e OX=1810504 GN=queF PE=3 SV=1
MASSRPVRSKKSQAAGSALETFANPHPGRDYTVRMRCPEFTCLCPKTGQPDFATIHIDFVPDRLCVELKSLKLYLWSFRDQGAFHEAVTGSILDDLVGAMAPRFLRVTAEFLVRGGIYTSVVAEHRMPGWTPAAPVLLP

SEQ ID NO: 46569 - protein, 160 aa, Inhella sp.
  misc_feature (1)..(160): tr|A0A3S2V4E2|A0A3S2V4E2_9BURK NADPH-dependent 7-cyano- 7-deazaguanine reductase OS=Inhella sp. CCP-18 OX=24998 51 GN=queF PE=3 SV=1
MATTKKKTPPASQRQKPTNPPSKPSKELQVFPNPAPQRDYLLQFQVPEFTCHCPLTGQPDFAHFTIEMVADEWCVELKSLKMYMWSYRDEGAFHEAVTNKILDDIVKVTNPRFARIKARWYVRGGIYTNIVAEHRKKGWKPATPVEFPAFPMESGLLAGG

SEQ ID NO: 46570 - protein, 130 aa, Inmirania thermothiophila
  misc_feature (1)..(130): tr|A0A3N1Y0A5|A0A3N1Y0A5_9GAMM NADPH-dependent 7-cyano- 7-deazaguanine reductase OS=Inmirania thermothiophila O X=1750597 GN=queF PE=3 SV=1
MSTRPSKNLETFPNPEPGRDYTIRIRAPEFTCLCPKTGQPDFATLLIEYVPDRLCVELKSLKLYIWSYRDEGHFHEAVTNRILDDLVAAVQPRFMRLTAEFNVRGGIWTTVVAEHRAEGWRPPEPVTLPG

SEQ ID NO: 46571 - protein, 158 aa, Inquilinus limosus
  misc_feature (1)..(158): tr|A0A0A0CY96|A0A0A0CY96_9PROT NADPH-dependent 7-cyano- 7-deazaguanine reductase OS=Inquilinus limosus MP06 OX= 1398085 GN=queF PE=3 SV=1
MARKSKAQGTEALTQLGQATALPESPEDAVLETVPNPRPKQLYLVRFTAPEFTSLCPITGQPDFAHLVIDYAPAAKIVESKSLKLFLGSFRNHGAFHEDCTVYVAERLIKAMKPRWLRIGGYWYPRGGIPIDVFYQSGPAPEGLWLPDQGVPTYRGRG

SEQ ID NO: 46572 - protein, 156 aa, Inquilinus limosus
  misc_feature (1)..(156): tr|A0A211ZRQ7|A0A211ZRQ7_9PROT NADPH-dependent 7-cyano- 7-deazaguanine reductase OS=Inquilinus limosus OX=17167 4 GN=queF PE=3 SV=1
MARKAKGTEALTQLGQATALPASPEAAVLETVPNPRPKQLYLVRFTAPEFTSLCPITGQPDFAHLVIDYAPAAKIVESKSLKLFLGSFRNHGAFHEDCTVYVAERLIKAMKPRWLRIGGYWYPRGGIPIDVFYQSGPAPDGLWLPDQGVPPYRGRG

SEQ ID NO: 46573 - protein, 154 aa, Insolitispirillum peregrinum
  misc_feature (1)..(154): tr|A0A1N7MMX7|A0A1N7MMX7_9PROT NADPH-dependent 7-cyano- 7-deazaguanine reductase OS=Insolitispirillum peregrinu m OX=80876 GN=queF PE=3 SV=1
MTNSDPSGLTQLGTHTALPDDPERAVLETVPNPHPDTRYVTRFTQPEFTSLCPVTGQPDFAHLVIDFIPNQRLVESKSLKLFLGSFRNHGAFHEDCTVYIGKRIAAAIEPHWLRIGGYWYPRGGMPIDVFWQTGEAPAGVWIPEQGVAGYRGRG

SEQ ID NO: 46574 - protein, 167 aa, Intestinibacter bartlettii
  misc_feature (1)..(167): tr|B0A667|B0A667_9FIRM NADPH-dependent 7-cyano-7-deazag uanine reductase OS=Intestinibacter bartlettii DSM 1679 5 OX=445973 GN=queF PE=3 SV=1
MLETGRQNKELEGLSLLGNQGTKYKFGYDPDILEVFDNKHPNNDYFVKFNCPEFTSLCPITGQPDFATIYISYIPGEKMVESKSLKLYLFSFRNHGDFHEDCMNIIMKDLIKLMAPKYIEVWGKFTPRGGISIDPYCNYGIPGTKYEKMAEHRMMNHDLYPEKVDNR

SEQ ID NO: 46575 - protein, 275 aa, Iodobacter fluviatilis
  misc_feature (1)..(275): tr|A0A377Q9R8|A0A377Q9R8_9NEIS NADPH-dependent 7-cyano- 7-deazaguanine reductase OS=Iodobacter fluviatilis OX=5 37 GN=queF PE=3 SV=1
MSDVEHSPLGKTVSYITEYEPSLLFPISRTGKREEIGVGETLPFMGMDIWNGYELSWLNSRGKPQVAIAIFNIPASSPNIIESKSFKLYLNSFNQTKLETREALQNLLQADLSAAAGANIGVQLIGPEQFHQQRLAELDGYCIDNLDIEVDQYAPQVGLLKCDGGDTTITESLTSNLLKSNCLVTGQPDWASIQISYTGKPINRESLLRYLISFRNHNEFHEQCVERIFVDIMRDCAPMKLSVYARYTRRGGLDINPYRCNFSGPLPSNLRGARQ

SEQ ID NO: 46576 - protein, 275 aa, Iodobacter sp.
  misc_feature (1)..(275): tr|A0A3S8ZR52|A0A3S8ZR52_9NEIS NADPH-dependent 7-cyano- 7-deazaguanine reductase OS=Iodobacter sp. H11R3 OX=249 6266 GN=queF PE=3 SV=1
MSDVEHSPLGKTVSYITEYDPSLLFPISRAGKRQEIGLGETLPFMGMDIWNGYELSWLNSRGKPQVAIAIFNIPASSPNIIESKSFKLYLNSFNQTKLETREALQSLLQADLSTATGTNIGVQLIIPEQFHQQRLTELDGYCIDNLDIEVDQYSPLAGLLKCDSGETTITESLTSNLLKSNCLVTGQPDWASIQISYTGKPINRESLLRYLISFRNHNEFHEQCVERIFVDIMRDCAPIKLAVYARYTRRGGLDINPYRCNFSGPLPSNLRGARQ

SEQ ID NO: 46577 - protein, 275 aa, Iodobacter sp.
  misc_feature (1)..(275): tr|A0A2G3JCV1|A0A2G3JCV1_9NEIS NADPH-dependent 7-cyano- 7-deazaguanine reductase OS=Iodobacter sp. BJB302 OX=15 06510 GN=queF PE=3 SV=1
MSDVELSPLGKTVSYITEYEPSLLFPISRTGKREEIGVGETLPFMGMDIWNGYELSWLNSRGKPQVAIAIFNIPASSPNIIESKSFKLYLNSFNQTKLETREALQKLLQADLSAAAGANVSVQLIGPEQFHQQRLAELDGYCIDNLDIEVNQYAPQAGLLKCDNGDTTITESLTSNLLKSNCLVTGQPDWASIQISYTGKPINRESLLRYLISFRNHNEFHEQCVERIFVDIMRDCAPMKLAVYARYTRRGGLDINPYRCNFSGPLPGNLRGARQ

SEQ ID NO: 46578 - protein, 117 aa, Isosphaera pallida
  misc_feature (1)..(117): tr|E8QY67|E8QY67_ISOPI NADPH-dependent 7-cyano-7-deazag uanine reductase OS=Isosphaera pallida (strain ATCC 436 44 / DSM 9630 / IS1B) OX=575540 GN=queF PE=3 SV=1
MSASLLETFPNQFPNREYEVEITCPEFTAVCPKTGQPDFGTIIIRYVPGDKVLELKSLKLYLFSYRDRGIFYEHSINTILDDLVRVVQPRRMTVVGDFRPRGGITSKITAQHQAQAG

SEQ ID NO: 46579 - protein, 115 aa, Isosphaeraceae bacterium
  misc_feature (1)..(115): tr|A0A432MMR0|A0A432MMR0_9BACT NADPH-dependent 7-cyano- 7-deazaguanine reductase OS=Isosphaeraceae bacterium GM 2012 OX=2080755 GN=queF PE=3 SV=1
MSLETFPNQFPGREYEIEIVCPEFTAVCPKTGQPDFGTITITYVPADLCVELKSLKLYLQGYRNRGIYYEHSINVILDDLVAACQPRRMTVVGQFTPRGGISSRITSRFEDARPR

SEQ ID NO: 46580 - protein, 277 aa, Izhakiella australiensis
  misc_feature (1)..(277): tr|A0A1S8YSD1|A0A1S8YSD1_9ENTR NADPH-dependent 7-cyano- 7-deazaguanine reductase OS=Izhakiella australiensis OX =1926881 GN=queF PE=3 SV=1
MHMKTAEITLLGKNTSYVQDYTPDLLESLPRSRGRDEISIKQENLPFSGFDLWTGFELSWLNGKGKPIVAIAEFFIPASSDNLIESKSFKLYLNSFNQTKFATPEKVHSTLEKDLSQAAGSKVQVKLYINLNHYPAITTDIPDECIDHLDINIDNYEFNPDYLINATSEEIVSETLTSNLLKSNCLVTNQPDWGSVIIRYEGKKIDREKLLRYLISFRTHNEFHEQCVERIFTDLNHYCHPEKLTIFARYTRRGGLDINPFRSNFETSLPVDRLIRQ

SEQ ID NO: 46581 - protein, 281 aa, Izhakiella australiensis
  misc_feature (1)..(281): tr|A0A1S8YKF0|A0A1S8YKF0_9ENTR NADPH-dependent 7-cyano- 7-deazaguanine reductase OS=Izhakiella australiensis OX =1926881 GN=queF PE=3 SV=1
MSSYQQHQALQSLTLGKPTAYQDRYDPALLQAVPRAMNREPLGLQADSLPFHGADIWTLYELSWLNARGLPQVAVGEVTLDARSVNLIESKSFKLYLNSFNQTKFSSWGEVRATLERDLSACAGGDVSIALFRVQEIEGQPLGHFSGVCIDEQDIAIERYQFDAGYLQHAAGEEIAEEQLVSHLLKSNCLITNQPDWGSVQISYRGPRIDREALLRYLVSFRHHNEFHEQCVERIFNDIQRFCHPEQLSVYARYTRRGGLDINPWRSNGSFQPSHSRLVRQ

SEQ ID NO: 46582 - protein, 281 aa, Izhakiella capsodis
  misc_feature (1)..(281): tr|A0A1I4W8U7|A0A1I4W8U7_9ENTR NADPH-dependent 7-cyano- 7-deazaguanine reductase OS=Izhakiella capsodis OX=1367 852 GN=queF PE=3 SV=1
MSSYQQHQALQSLRLGKPTAYLDRYDPALLQAVPRAMNRDPLGLRADSLPFHGADIWTLYELSWLNKRGLPLVAVGEVTLDASSLNLIESKSFKLYLNSFNQTKFSSMDEVRVTLERDLRACAGGDVSVTLFRVQEIEGQPLGHFSGQCIDEQDIAIDDYRFNADYLQNAVGQKIVEEQLVSHLLKSNCLITNQPDWGSVQIYYRGPQIDREALLRYLVSFRHHNEFHEQCVERIFSDIQRFCQPELLSVYARYTRRGGLDINPWRSNVSFQPTHTRLARQ

SEQ ID NO: 46583 - protein, 281 aa, Izhakiella sp.
  misc_feature (1)..(281): tr|A0A4P8YCL0|A0A4P8YCL0_9ENTR NADPH-dependent 7-cyano- 7-deazaguanine reductase OS=Izhakiella sp. KSNA2 OX=257 9935 GN=queF PE=3 SV=1
MSDYDNHQALSGLTLGKTTEYRDTLDAALLQAVPRSLNRDPLGLRAESLPFHGADIWTLYELSWLNERGLPQVAVGHVSINADSPNLIESKSFKLYLNSFNQTRFADWQQVRDTLARDLSACAQGEVEVSLYKLHQLEGEAIARFDGECIDDLPITINDYDFNADWLDQAASGDIVEETLVSHLLKSNCLITHQPDWGSVQIRYRGPRIDREKLLRYLVSFRRHNEFHEQCVERIFSDIQRYCQPEQLSVYARYTRRGGLDINPWRSNVPFQPATGRLVRQ

SEQ ID NO: 46584 - protein, 153 aa, Jannaschia faecimaris
  misc_feature (1)..(153): tr|A0A1H3T117|A0A1H3T117_9RHOB NADPH-dependent 7-cyano- 7-deazaguanine reductase OS=Jannaschia faecimaris OX=12 44108 GN=queF PE=3 SV=1
MQTIYSDLQQLGGKTELPDSPETAMLERVQNPQADIDYCVRFTAPEFTSLCPMTGQPDFAHLVIDYVPGDWLVESKSLKLFLGSFRNHGAFHEDCTISIARRLADELSPRWLRIGGYWYPRGGIPIDVFWQTGAIPEGVWIPDQGVPPYRGRG

SEQ ID NO: 46585 - protein, 280 aa, Janthinobacterium agaricidamnosum
  misc_feature (1)..(280): tr|A0A3G2E362|A0A3G2E362_9BURK NADPH-dependent 7-cyano- 7-deazaguanine reductase OS=Janthinobacterium agaricida mnosum OX=55508 GN=queF PE=3 SV=1
MTTTNDLAEQSPLGKSSAYHTDYAPELLFPIPRQGKRDELELHGTLPFFGLDIWNAYELSWLNQRGKPQVAIAKVSAPADSPNIIESKSFKLYLNSFNQTKLDSPQALLALLQQDLSNGFGAPVQVELTLQEDFGKLKMGEFDGVLLDRLDLEITQYTPSPLLLKAALDEAPVEEKLVSHLLKSNCLVTGQPDWGSVQIVYAGPQIDQESLLRYLIGFREHNEFHEQCVERIFVDILRQCKPQKLSVYARYTRRGGLDINPWRSNFSTGAMPGNLRNARQ

SEQ ID NO: 46586 - protein, 277 aa, Janthinobacterium agaricidamnosum
  misc_feature (1)..(277): tr|W0V9I4|W0V9I4_9BURK NADPH-dependent 7-cyano-7-deazag uanine reductase OS=Janthinobacterium agaricidamnosum N BRC 102515 = DSM 9628 OX=1349767 GN=queF PE=3 SV=1
MTNTADLSPLGKNAAYRSDYAPELLFPIPRQGKRDELALHGTLPFFGLDIWNAYELSWLNLRGKPQVAIARISAPADSPNIIESKSFKLYLNSFNQTRLASPDALLALLQQDLSKGFGAAVQIQLTLQEDFAKLEMGELDGVLLDRLDIEVNQYRPSPQLLKAALDDAPVQEKLVSHLLKSNCLVTGQPDWGSVQIEYAGPQIDQESLLRYLIGFREHNEFHEQCVERIFVDILRQCQPQKLAVYARYTRRGGLDINPWRSNFSTSAPPSNLRCARQ

SEQ ID NO: 46587 - protein, 280 aa, Janthinobacterium lividum
  misc_feature (1)..(280): tr|A0A5C4NI01|A0A5C4NI01_9BURK NADPH-dependent 7-cyano- 7-deazaguanine reductase OS=Janthinobacterium lividum O X=29581 GN=queF PE=3 SV=1
MTTTNDLAEQSPLGKSSAYRTDYAPELLFPIPRQGKRDELELHGTLPFFGLDIWNAYELSWLNQRGKPQVAVAKVSAPADSPNIIESKSFKLYLNSFNQTKLDSPEALLALLKQDLSNGFGAPVQVELTLQEDFGKLKMGEFDGVLLDRLDLEITQYTPSPLLLKAALDEAPVEEKLVSHLLKSNCLVTGQPDWGSVQIDYAGPQIDQESLLRYLIGFREHNEFHEQCVERIFVDILRQCKPQKLSVYARYTRRGGLDINPWRSNFSTGTMPGNLRNARQ

SEQ ID NO: 46588 - protein, 280 aa, Janthinobacterium lividum
  misc_feature (1)..(280): tr|A0A1S1U0F3|A0A1S1U0F3_9BURK NADPH-dependent 7-cyano- 7-deazaguanine reductase OS=Janthinobacterium lividum O X=29581 GN=queF PE=3 SV=1
MTTTNDLAERSPLGKSSAYRSDYAPELLFPIPRQGKRDELELHGTLPFFGLDIWNAYELSWLNQRGKPQVAIAKVSAPADSPNIIESKSFKLYLNSFNQTKLDSPEALLTLLKQDLSNGFGAPVQVELTLQEDFGKLKMGEFDGVLLDRLDLEITQYTPSPLLLKAAFDDAPVEEKLVSHLLKSNCLVTGQPDWGSVQIAYAGPQIDQESLLRYLIGFREHNEFHEQCVERIFVDILRQCKPQKLSVYARYTRRGGLDINPWRSNYSTGAMPGNLRNARQ

SEQ ID NO: 46589 - protein, 280 aa, Janthinobacterium sp.
  misc_feature (1)..(280): tr|A0A1S6F1M6|A0A1S6F1M6_9BURK NADPH-dependent 7-cyano- 7-deazaguanine reductase OS=Janthinobacterium sp. LM6 O X=1938606 GN=queF PE=3 SV=1
MTTTNDLAELSPLGKSSAYRTDYAPELLFPIPRQGKRDELELHGTLPFFGLDIWNAYELSWLNQRGKPQVAIAKVSAPADSPNIIESKSFKLYLNSFNQTKLDSPEALLILLKQDLSKGFGAPVQVELTLQEDFGKLKMGEFDGVLLDRLDLEITQYTPSPQLLRAAFDDAPVEEKLVSHLLKSNCLVTGQPDWGSVQIEYAGPQIDQESLLRYLIGFREHNEFHEQCVERIFVDILRQCKPQKLSVYARYTRRGGLDINPWRSNFSTGAMPGNLRNARQ

SEQ ID NO: 46590 - protein, 277 aa, Janthinobacterium sp.
  misc_feature (1)..(277): tr|A0A349L3C9|A0A349L3C9_9BURK NADPH-dependent 7-cyano- 7-deazaguanine reductase OS=Janthinobacterium sp. OX=18 71054 GN=queF PE=3 SV=1
MTNTADLSPLGKSAAYRSDYAPELLFPIPRQGKRDELALHGTLPFFGLDIWNAYELSWLNLRGKPQVAIARVTVPADSPNIVESKSFKLYLNSFNQTRLADPEALRALLTQDLSQGFGAPVQVALTLQEAFSEQKMGELEGLLLDRLDVEITHYTPSPLMLTAALDEAPVEEKLVSHLLKSNCLVTGQPDWGSVQIHYAGPQINQESLLKYLIGFREHNEFHEQCVERIFMDILRQCAPQRLAVYARYTRRGGLDINPWRSNFSTATPPSNLRCARQ

SEQ ID NO: 46591 - protein, 280 aa, Janthinobacterium svalbardensis
  misc_feature (1)..(280): tr|A0A290X3A6|A0A290X3A6_9BURK NADPH-dependent 7-cyano- 7-deazaguanine reductase OS=Janthinobacterium svalbarde nsis OX=368607 GN=queF PE=3 SV=1
MTTTNDLAELSPLGKSSAYRSDYAPELLFPIPRQGKRDELELHGTLPFFGLDIWNAYELSWLNQRGKPQVAIAKVSAPADSPNIIESKSFKLYLNSFNQTKLDSPEALLTLLKQDLSNGFGAPVQVELTLQEDFGKLKMGEFDGVLLDRLDLEITQYTPSPLLLKAAFDDAPVEEKLVSHLLKSNCLVTGQPDWGSVQIAYAGPQIDQESLLRYLIGFREHNEFHEQCVERIFVDILRQCKPQKLSVYARYTRRGGLDINPWRSNFSTGTMPGNLRNARQ

SEQ ID NO: 46592 - protein, 275 aa, Jeongeupia sp.
  misc_feature (1)..(275): tr|A0A1D9BAE1|A0A1D9BAE1_9NEIS NADPH-dependent 7-cyano- 7-deazaguanine reductase OS=Jeongeupia sp. USM3 OX=1906 741 GN=queF PE=3 SV=1
MSNEHHSPLGKAVSYKAEYDPSLLFAIPRSGKRDEIGIGATLPFMGVDIWNAYELSWLNMRGKPQIALAVFEIPASSPNIIESKSFKLYLNSFNQTRLASAEALAELLRHDLGDAVGATVRVELIEPEAFDRQRLGELDGYCIDNLDIEVGSYTPQPGLLHCDEADSPVDEVLTSSLLKSNCLVTGQPDWASVQIRYVGQPINRESLLKYLISFRNHNEFHEQCVERIFVDIQRACAPLKLSVYARYTRRGGLDINPYRSNFNAPQPSNARTARQ

SEQ ID NO: 46593 - protein, 165 aa, Jeotgalibacillus alimentarius
  misc_feature (1)..(165): tr|A0A0C2W3X2|A0A0C2W3X2_9BACL NADPH-dependent 7-cyano- 7-deazaguanine reductase OS=Jeotgalibacillus alimentari us OX=135826 GN=queF PE=3 SV=1
MSGRNEKELEGVNLLGEMNVEYSFDYNPGVLEAFDNKHVNRDYFVKFNCPEFTSLCPKTNQPDFATIYISYIPDQKMVESKSLKLYLFSFRNHGDFHEDCMNIIMNDLIELMDPRYIEVWGKFTPRGGISIDPYTNYGKPGTKYEEMAYHRLMNHDMYPEKIDNR

SEQ ID NO: 46594 - protein, 165 aa, Jeotgalibacillus campisalis
  misc_feature (1)..(165): tr|A0A0C2VSZ5|A0A0C2VSZ5_9BACL NADPH-dependent 7-cyano- 7-deazaguanine reductase OS=Jeotgalibacillus campisalis OX=220754 GN=queF PE=3 SV=1
MSGRSDKELEGVNLLGNQGTEYAFNYAPEVLESFDNKHAGRDYFVKFNCPEFTSLCPKTNQPDFATIYISYIPDQKMVESKSLKLYLFSFRNHGDFHEDCMNIIMNDLIELMDPRYIEVWGKFTPRGGISIDPYTNYGKPGTKYEEMAFHRLMNHDMYPETVDNR

SEQ ID NO: 46595 - protein, 165 aa, Jeotgalibacillus malaysiensis
  misc_feature (1)..(165): tr|A0A0B5APF0|A0A0B5APF0_9BACL NADPH-dependent 7-cyano- 7-deazaguanine reductase OS=Jeotgalibacillus malaysiens is OX=1508404 GN=queF PE=3 SV=1
MSGRNEKELEGVNLLGEMNVPYSFDYAPEVLEAFDNKHVNRDYFVKFNCPEFTSLCPKTNQPDFATIYISYIPDQKMVESKSLKLYLFSFRNHGDFHEDCMNIIMNDLIELMDPRYIEVWGKFTPRGGISIDPYTNYGKPGTKYEEMAYHRLMNHDMYPEKIDNR

SEQ ID NO: 46596 - protein, 165 aa, Jeotgalibacillus marinus; identical to SEQ ID NO: 44220
  misc_feature (1)..(165): tr|A0A0M0L1B7|A0A0M0L1B7_9BACL NADPH-dependent 7-cyano- 7-deazaguanine reductase OS=Jeotgalibacillus marinus OX =86667 GN=queF PE=3 SV=1

SEQ ID NO: 46597 - protein, 165 aa, Jeotgalibacillus proteolyticus
  misc_feature (1)..(165): tr|A0A2S5G7C6|A0A2S5G7C6_9BACL NADPH-dependent 7-cyano- 7-deazaguanine reductase OS=Jeotgalibacillus proteolyti cus OX=2082395 GN=queF PE=3 SV=1
MSGRSDKELEGVSLLGNQGTEYSFNYAPQVLESFDNKHAGRDYFVKFNCPEFTSLCPKTNQPDFATIYISYIPDQKMVESKSLKLYLFSFRNHGDFHEDCMNIIMNDLIELMHPRYIEVWGKFTPRGGISIDPYTNYGKPGTKYEEMAFHRLMNHDMYPETVDNR

SEQ ID NO: 46598 - protein, 165 aa, Jeotgalibacillus salarius
  misc_feature (1)..(165): tr|A0A4Y8LBH3|A0A4Y8LBH3_9BACL NADPH-dependent 7-cyano- 7-deazaguanine reductase OS=Jeotgalibacillus salarius O X=546023 GN=queF PE=3 SV=1
MTGRNEKELEGVNLLGEMNVPYSFDYAPEVLEAFDNKHVNRDYFVKFNCPEFTSLCPKTNQPDFATIYISYIPDQRMVESKSLKLYLFSFRNHGDFHEDCMNIIMNDLIKLMDPRYVEVWGKFTPRGGISIDPYVNYGKPGTKYEEMAFHRLMNHDMYPETIDNR

SEQ ID NO: 46599 - protein, 165 aa, Jeotgalibacillus soli
  misc_feature (1)..(165): tr|A0A0C2S2N5|A0A0C2S2N5_9BACL NADPH-dependent 7-cyano- 7-deazaguanine reductase OS=Jeotgalibacillus soli OX=88 9306 GN=queF PE=3 SV=1
MSGRSDKELEGVTLLGNQGVKYSFDYAPEVLESFDNKHQGRDYFVKFNCPEFTSLCPITSQPDFATIYISYIPDVKMVESKSLKLYLFSFRNHGDFHEDCMNIIMNDLIELMDPRYIEVWGKFTPRGGISIDPYTNYGKPGTKYEEMAFHRLMHHDMYPETVDNR

SEQ ID NO: 46600 - protein, 165 aa, Jeotgalibacillus sp.
  misc_feature (1)..(165): tr|A0A4R5XHJ7|A0A4R5XHJ7_9BACL NADPH-dependent 7-cyano- 7-deazaguanine reductase OS=Jeotgalibacillus sp. S-D1 O X=2552189 GN=queF PE=3 SV=1
MSGRSEKELEGVNLLGNQGVNYSFDYAPEVLESFENKHQGRDYFVKFNCPEFTSLCPITSQPDFATIYISYIPDVKMVESKSLKLYLFSFRNHGDFHEDCMNIIMNDLIELMDPRYIEVWGKFTPRGGISIDPYTNYGKPGTKYEEMAYHRLMNHDMYPETVDNR

SEQ ID NO: 46601 - protein, 165 aa, Jeotgalibacillus sp.
  misc_feature (1)..(165): tr|A0A4Y8LJE6|A0A4Y8LJE6_9BACL NADPH-dependent 7-cyano- 7-deazaguanine reductase OS=Jeotgalibacillus sp. R-1-5s -1 OX=2555897 GN=queF PE=3 SV=1
MSGRNEKELEGVNLLGNQGVEYSFNYSPDVLEAFENKHVNRDYFVKFNCPEFTSLCPKTNQPDFATIYISYIPDQKMVESKSLKLYLFSFRNHGDFHEDCMNIILNDLVELMDPRYIEVWGKFTPRGGISIDPYTNYGKPGTKYEEMAYHRLMNHDMYPEKIDNR

SEQ ID NO: 46602 - protein, 162 aa, Jeotgalicoccus halophilus
  misc_feature (1)..(162): tr|A0A1G9BR41|A0A1G9BR41_9STAP NADPH-dependent 7-cyano- 7-deazaguanine reductase OS=Jeotgalicoccus halophilus O X=586411 GN=queF PE=3 SV=1
MTEDYSKDLSLLGNQDVEYSFDYNPGILETFDNGHPGRDYFVKFNCPEFTTLCPMTGQPDFATLYISYVPDLKMVESKALKLYLFSFRNHGGFHENSVNMIVDDLVELMDPKYIEVWGKFTPRGGISIDPYVNYGKPGTKYEQMADHRLMNHDMYPEKIDNR

SEQ ID NO: 46603 - protein, 162 aa, Jeotgalicoccus halotolerans
  misc_feature (1)..(162): tr|A0A3E0B0C6|A0A3E0B0C6_9STAP NADPH-dependent 7-cyano- 7-deazaguanine reductase OS=Jeotgalicoccus halotolerans OX=157227 GN=queF PE=3 SV=1
MTDDYSKDLSLLGNQNVEYKFNYNPEILETFENGHIGRDYFVKFNCPEFTTLCPMTGQPDFATIYISYIPDVKMVESKALKLYLFSFRNHGGFHENSMNMIMDDLIKLMDPKYIEVWGKFTPRGGISIDPYVNYGRPGTKYEEMADHRMMNHDLYPEKIDNR

SEQ ID NO: 46604 - protein, 162 aa, Jeotgalicoccus nanhaiensis
  misc_feature (1)..(162): tr|A0A4Y9HL26|A0A4Y9HL26_9STAP NADPH-dependent 7-cyano- 7-deazaguanine reductase OS=Jeotgalicoccus nanhaiensis OX=568603 GN=queF PE=3 SV=1
MTEDYSKDLSLLGNQNVEYKFDYNPEILETFENGHIGRDYFVKFNCPEFTTLCPMTGQPDFATIYISYIPDVKMVESKALKLYLFSFRNHGGFHENSMNMIMDDLIKLMDPKYIEVWGKFTPRGGISIDPYVNYGRPGTKYEEMADHRMMNHDLYPEKIDNR

SEQ ID NO: 46605 - protein, 162 aa, Jeotgalicoccus saudimassiliensis
  misc_feature (1)..(162): tr|A0A078M3M6|A0A078M3M6_9STAP NADPH-dependent 7-cyano- 7-deazaguanine reductase OS=Jeotgalicoccus saudimassili ensis OX=1461582 GN=queF PE=3 SV=1
MTEDYSKDLSLLGNQNVEYKFDYNPEILETFENGHPGRDYFVKFNCPEFTTLCPMTGQPDFATIYISYIPDVKMVESKALKLYLFSFRNHGGFHENSINMIVDDLVELMDPKYIEVWGKFTPRGGISIDPYVNYGRPGTKYETMADHRMMNHDMYPETVDNR

SEQ ID NO: 46606 - protein, 162 aa, Jeotgalicoccus sp.
  misc_feature (1)..(162): tr|A0A358JW33|A0A358JW33_9STAP NADPH-dependent 7-cyano- 7-deazaguanine reductase OS=Jeotgalicoccus sp. OX=18716 19 GN=queF PE=3 SV=1
MTEDYSKDLSLLGNQNVEYKFDYNPEILETFENGHIGRDYFVKFNCPEFTTLCPMTGQPDFATIYISYIPDVKMVESKALKLYLFSFRNHGGLHENSVNMIVDDLVELMDPKYIEVWGKFTPRGGISIDPYVNYGRPGTKYEQMAEHRMMNHDMYPEKIDNR

SEQ ID NO: 46607 - protein, 154 aa, Jhaorihella thermophila
  misc_feature (1)..(154): tr|A0A1H5TT81|A0A1H5TT81_9RHOB NADPH-dependent 7-cyano- 7-deazaguanine reductase OS=Jhaorihella thermophila OX= 488547 GN=queF PE=3 SV=1
MPKTDVSGLTQLGAKVDAPASPEEAVLEKVPASHAGTDYVVRFTAPEFTSICPMTGQPDFAHIVIDYIPGDWLVESKSLKLYLHSFRNHGAFHEDCSIDIGKRLVDLLDPKWLRIGAYWYPRGGIPIDVFWQTGEPPEGVWIPDQGVAPYRGRG

SEQ ID NO: 46608 - protein, 152 aa, Jiella sp.
  misc_feature (1)..(152): tr|A0A4Y8RF38|A0A4Y8RF38_9RHIZ NADPH-dependent 7-cyano- 7-deazaguanine reductase OS=Jiella sp. CBS5Q-3 OX=25583 62 GN=queF PE=3 SV=1
MQPGNLSQLGRAAAPAASPDDAVLETVPYTRGDGPPAIVRFTCAEFTSLCPVTGQPDFAHIVIDYAPDARLVESKSLKLFLTSFRNHGAFHEDCTVMIARRVVEATKPLWLRIGGYWYPRGGIPIDVFWQTGPAPDGVYLPEQGVPPYRGRG

SEQ ID NO: 46609 - protein, 148 aa, Kaistia sp.
  misc_feature (1)..(148): tr|A0A1E4C2U5|A0A1E4C2U5_9RHIZ NADPH-dependent 7-cyano- 7-deazaguanine reductase OS=Kaistia sp. SCN 65-12 OX=16 60103 GN=queF PE=3 SV=1
MTTSVLGRPAEIPLDPASAVLDRVPNPHPDIDYLIRFTVPEFTALCPITGQPDFAHLVIDYVADQWMIESKSLKLFMFSYRNHGAFHEATTVEIGKRLVEALAPRWLRIGGYWYPRGGIPIDVFWQTGTAPATLWLPEQGVPGYRGRG

SEQ ID NO: 46610 - protein, 281 aa, Kalamiella piersonii
  misc_feature (1)..(281): tr|A0A3A9IW15|A0A3A9IW15_9GAMM NADPH-dependent 7-cyano- 7-deazaguanine reductase OS=Kalamiella piersonii OX=236 4647 GN=queF PE=3 SV=1
MSLYEKDQALSNLTLGKPTAYHDQYDPSLLQAVPRSLNRTPLGLMPDSLPFTGADIWTLYELSWLNSKGVPQVALGEVVLNATSEHLIESKSFKLYLNSFNQTRFADWGEVRQTLERDLSACAQGDVSVALFRLSEVEGQPIGQFSGYCIDEQDIEIADYSFNADYLADAAGSEVVEETLVSHLLKSNCLITNQPDWGSVMIRYKGPRIDREALLRYLISFRQHNEFHEQCVERIFNDVLRFCQPQQLTVYARYTRRGGLDINPWRSNVPFTPGYSRLARQ

SEQ ID NO: 46611 - protein, 164 aa, Kandleria vitulina
  misc_feature (1)..(164): tr|A0A0R2HIC4|A0A0R2HIC4_9FIRM NADPH-dependent 7-cyano- 7-deazaguanine reductase OS=Kandleria vitulina DSM 2040 5 OX=1410657 GN=queF PE=3 SV=1
MSRTKEEMKDVTFLGNQNTKYPTDYDPSVLQSFDNKHPGREYFVKFNCPEFTSLCPITGQPDFATVYISYVPNIKMVESKSLKLYLFSFRNHGDFHEDCMNIIMNDLIKLMDPLYIEVWGKFTPRGGISIDPYCNYGKKGTRWEEVAWQRLTHHDLYPEKVDNR

SEQ ID NO: 46612 - protein, 164 aa, Kandleria vitulina; identical to SEQ ID NO: 46611
  misc_feature (1)..(164): tr|A0A1H2QB69|A0A1H2QB69_9FIRM NADPH-dependent 7-cyano- 7-deazaguanine reductase OS=Kandleria vitulina OX=1630 GN=queF PE=3 SV=1

SEQ ID NO: 46613 - protein, 273 aa, Kangiella geojedonensis
  misc_feature (1)..(273): tr|A0A0F6TRG6|A0A0F6TRG6_9GAMM NADPH-dependent 7-cyano- 7-deazaguanine reductase OS=Kangiella geojedonensis OX= 914150 GN=queF PE=3 SV=1
MNHDDIPLGKDVGYPEQYDPSLLFPVARQLKRDELGLKGSLPFHGSDFWNAYEMSWLNAKGKPQVAIGVFEFAHDTVNIIESKSFKLYLNSYNQTRFEHWEAVLESLQHDLSKAAEGTVSVQLFTLEQYRQQVAITEPESVLIDEIDVEVSNYDYQPSALMAQGEVVQESLQSDLLKSNCLITSQPDWATVLIDYRGPKIDRESLLKYLISFRNHNEFHEQCVERIFVDLMKYCQPQELTVYARYTRRGGLDINPFRTNTTAHKAQNIRLVRQ

SEQ ID NO: 46614 - protein, 278 aa, Kangiella koreensis
  misc_feature (1)..(278): tr|C7RA26|C7RA26_KANKD NADPH-dependent 7-cyano-7-deazag uanine reductase OS=Kangiella koreensis (strain DSM 160 69 / KCTC 12182 / SW-125) OX=523791 GN=queF PE=3 SV=1
MQNNDTTNQIPLGKQVEYPSQYQPELLFPVARQLKRVEIDIQGQLPFHGTDIWNAYELSWLNAKGKPQVAIAVFEFDCTSTNIIESKSFKLYLNSLNQSRFADWQAVEKTVTNDLSKAAETSVSVRLFKVEEYNLSVPVKEWQGILLDDLDIEINDYQYQPELLKLQSDEVVSESLYSHLLKSNCLITSQPDWASILIEYKGPKIHQESLLKYLISFRNHNEFHEQCVERVFTDIMRYCKPSELTVYARYTRRGGLDINPWRSNVSGKICHNQRHARQ

SEQ ID NO: 46615 - protein, 283 aa, Kangiella profundi
  misc_feature (1)..(283): tr|A0A2K9AL07|A0A2K9AL07_9GAMM NADPH-dependent 7-cyano- 7-deazaguanine reductase OS=Kangiella profundi OX=15619 24 GN=queF PE=3 SV=1
MQNHDLSKERSSQEIPLGKQVEYPSQYQPELLFPVARQLKRDEINIQGQLPFHGTDIWNAYELSWLNSKGKPQVAIAVFEFDCASTNIIESKSFKLYLNSLNQTRFTDWPTVEKTLTEDLSKAAGATVSVKLYEVEAYNQSVPVNEWQGILLDEQDIEVNSYQYDPELLEVDSEEETSESLYSHLLKSNCLITSQPDWASILIEYKGPKINHESLLKYLISFRNHNEFHEQCVERVFTDILRHCKPSELTVYARYTRRGGLDINPWRSNVKAKLCSNQRHSRQ

SEQ ID NO: 46616 - protein, 273 aa, Kangiella sediminilitoris
  misc_feature (1)..(273): tr|A0A1B3BC93|A0A1B3BC93_9GAMM NADPH-dependent 7-cyano- 7-deazaguanine reductase OS=Kangiella sediminilitoris O X=1144748 GN=queF PE=3 SV=1
MTDKTIPLGKEVSYPEEYDASLLFPVARQVKRDELGLDKKLPFHGSDFWNGYELSWLNKKGKPQVAIGVFEFAHDTANIVESKSFKLYLNSFNQARFQSWEEVEKRLHHDLTKAANGEIQVSLYSLSDYQQKFPVIQPEAMLIDELDIEVKDYDYDANLLKTDTGVVSEMLQSDLLKSNCLITSQPDWATVFIEYKGQQINHESLLRYLISFRNHNEFHEQCVERIFTDIMDLCQPEELTVYARYTRRGGLDINPWRSNAKGHTGKNSRLVRQ

SEQ ID NO: 46617 - protein, 274 aa, Kangiella sp.
  misc_feature (1)..(274): tr|A0A3D8UNI5|A0A3D8UNI5_9GAMM NADPH-dependent 7-cyano- 7-deazaguanine reductase OS=Kangiella sp. HD9-110m-PIT- SAG07 OX=2283595 GN=queF PE=3 SV=1
MMNDTNIPLGKEVSYPEVYDPSLLFPVARQFKRDELGLSDDLPFHGSDYWNAYEMSWLNGKGKPQVAIGIFEFAHNTVNIVESKSFKLYLNSYNQTRFDSWQHVLSRLQADLSQAADGQVSIQLLALEQYQSQVPIVSRDAVLIDELDVEINEYDYQPGLLKSSTEIVTERLQSDLLKSNCLITSQPDWASVLIDYTGPKIEHEALLKYLISFRNHNEFHEQCVERIFVDIMQHCQPQELTVYARYTRRGGLDINPFRTNVAGQNAKNIRLIRQ

SEQ ID NO: 46618 - protein, 145 aa, Kangiella sp.
  misc_feature (1)..(145): tr|A0A2G2KSZ9|A0A2G2KSZ9_9GAMM 7-cyano-7-deazaguanine r eductase OS=Kangiella sp. OX=1920245 GN=COA86_18045 PE= 4 SV=1
MTTKTKTYEAITSSLLLALPNPSSADYEIKIKIPEFTFLGVGNQPDFAQIFLTFYPGDKIIELKALKQYVYQLRDIVVSYERLINIIYDQLMETFVPDRLRLVMNCNPRGGISSHLTIDSDWKSRGGEDKYKDWLGANDEWMRLD

SEQ ID NO: 46619 - protein, 277 aa, Kangiella spongicola
  misc_feature (1)..(277): tr|A0A318D205|A0A318D205_9GAMM NADPH-dependent 7-cyano- 7-deazaguanine reductase OS=Kangiella spongicola OX=796 379 GN=queF PE=3 SV=1
MSSRLNPLGKDVAYPDTYDAGLLFPVARQLKRDELGLANGLPFHGGDFWNAYEMSWLNAKGKPQVAIGVFEFAHDSVNIIESKSFKLYLNSFNQTRFESWEKVSSVLRTDLEAAAEGAVSVKLFTLKEYHQQTPIIQPEAILIDELDVEITDYDYAPSLLRVDEGSGSGVVKESLQSDLLKSNCLITSQPDWATILIDYKGPRICHEALLKYLISFRNHNEFHEQCVERVFVDIMQYCQPKELTVYARYTRRGGLDINPWRSNVMSSFLRNQRFSRQ

SEQ ID NO: 46620 - protein, 273 aa, Kangiellaceae bacterium
  misc_feature (1)..(273): tr|A0A2E2VNZ9|A0A2E2VNZ9_9GAMM NADPH-dependent 7-cyano- 7-deazaguanine reductase OS=Kangiellaceae bacterium OX= 2026751 GN=queF PE=3 SV=1
MDWKESLALGKATDYVSTYTPSLLQAVPRQYNREHLGISANNLPFKGHDLWHGYEVSWLNNKGKPQVALLKLTVPCDTPNIVESKSFKLYLNSLNQSRFGSVEQVSECIAADIQQVVGGAVTVILGPVHDTRWQSYPNIDGCCLDGLDIEVDAYQYEPGLLKRGVEKVSEVLYSHLFKSNCLVTHQPDWATVVIDYQGTEIDHESLLRYLISYRMHNEFHEQCVERIYSDIMQRLKPEYLMVQALFTRRGGLDICPVRASALDFSPMSRQIRQ

SEQ ID NO: 46621 - protein, 279 aa, Kerstersia gyiorum
  misc_feature (1)..(279): tr|A0A171KSP8|A0A171KSP8_9BURK NADPH-dependent 7-cyano- 7-deazaguanine reductase OS=Kerstersia gyiorum OX=20650 6 GN=queF PE=3 SV=1
MSHTPLPGATLLGQSVSYPDHYDPTVLHAIPREAARQALGYAAVLPFQGADIWRAYELSWLNARGKPLVATASFVIPADSPNLIESKSFKLYLNSHNQARHASAATLQELLARDLSRVAQAPVQVALQLEAGDMATPPLAELSGQCIDGLDIDIERYDPAPELLACRPDAGTIEETLVSRLLRSNCPVTSQPDWGSVQIQYRGPAMDHAALLRYIVSYRTHTGFHEQCVEQIFRDIMAQCRPEQLRVHACYTRRGGLDINPWRGTHGMPAPDAARTPRQ

SEQ ID NO: 46622 - protein, 273 aa, Ketobacter alkanivorans
  misc_feature (1)..(273): tr|A0A2K9LKS3|A0A2K9LKS3_9GAMM NADPH-dependent 7-cyano- 7-deazaguanine reductase OS=Ketobacter alkanivorans OX= 1917421 GN=queF PE=3 SV=1
MSDQLNGPLGQSSAYPDQYDPAQLHAIPRKLGRLEIGVDEDSLPFHGEDVWNAYELSWLNPKGKPVVALMFMVVPANSPNIVESKSLKLYLGSYNQTVMASVRQVTDKIAEDIGKVVGAKVRIELTELAWQGKFEVVSLPGRCIDDLDVDVSAYEVDSSLLTTEDHFVQVQLHSHLLRSCCPVTGQPDWASVLIEYSGNRICEEGLLKYLISFRSNQEFHEQCVERIFMDISRQCKPEKLSVYARYTRRGGIDINPFRSSDPRSMANLRLVRQ

SEQ ID NO: 46623 - protein, 271 aa, Ketobacter sp.
  misc_feature (1)..(271): tr|A0A3F2V7C0|A0A3F2V7C0_9GAMM NADPH-dependent 7-cyano- 7-deazaguanine reductase OS=Ketobacter sp. OX=2083498 G N=queF PE=3 SV=1
MIEHGPLGQKSEHPQQYNPGVLFAIPRRLGRLEIGIGSELPFKGADIWNAYEVSWLTPKGKPVVAVMEMKVPADSSHIVESKSLKLYLGSFNQTGFSGFADVEQCIVKDVSEVVGAPVQVTLLPLTAAHSFTIESMPGRCVDELDIVADEYSVNARLLRVNPDENVNEQLHSHLLRSCCPVTGQPDWGSVLIGYQGNKIDEASLLRYLVSFRNNQEFHEQCVERIYLDIMQQCSPRALSVYARYTRRGGIDINPFRSSEEVDTRNLRLVRQ

SEQ ID NO: 46624 - protein, 273 aa, Ketobacter sp.; identical to SEQ ID NO: 43839
  misc_feature (1)..(273): tr|A0A3L8BM68|A0A3L8BM68_9GAMM NADPH-dependent 7-cyano- 7-deazaguanine reductase OS=Ketobacter sp. OX=2083498 G N=queF PE=3 SV=1

SEQ ID NO: 46625 - protein, 155 aa, Kiloniella litopenaei
  misc_feature (1)..(155): tr|A0A0M2R7T3|A0A0M2R7T3_9PROT NADPH-dependent 7-cyano- 7-deazaguanine reductase OS=Kiloniella litopenaei OX=15 49748 GN=queF PE=3 SV=1
MTEESIYSNLTQLGGDSKLPDSPEEAVMERVANPQKGSGYVVRFTAPEFTSLCPITGQPDFAHLMIDYVPGDWLVESKSLKLFLGSFRNHGAFHEDCTVSIGKRIEELLEPKWLRIGGYWYPRGGIPIDVFYQSGPAPEGIWIPDQGVPPYRGRG

SEQ ID NO: 46626 - protein, 155 aa, Kiloniella spongiae
  misc_feature (1)..(155): tr|A0A0H2MJD5|A0A0H2MJD5_9PROT NADPH-dependent 7-cyano- 7-deazaguanine reductase OS=Kiloniella spongiae OX=1489 064 GN=queF PE=3 SV=1
MTEESIYSKLTQLGGDSKLPDSPEEAVMERVANPQKGSGYVVRFTAPEFTSLCPITGQPDFAHLMIDYVPGDWLVESKSLKLFLGSFRNHGAFHEDCTVSIGKRIEELLEPKWLRIGGYWYPRGGIPIDVFYQSGPVPEGIWIPDQGVPPYRGRG

SEQ ID NO: 46627 - protein, 157 aa, Kingella denitrificans
  misc_feature (1)..(157): tr|F0F1A0|F0F1A0_9NEIS NADPH-dependent 7-cyano-7-deazag uanine reductase OS=Kingella denitrificans ATCC 33394 O X=888741 GN=queF PE=3 SV=1
MSRNTEELHGITLLGNQKTEYRSDYAPEVLEAFDNKHQGNDYFVKFVCPEFTSLCPMTGQPDFATIVIRYIPDVKMVESKSLKLYLFSFRNHGDFHEDCVNIIMKDLIALMNPKYIEVFGEFTPRGGIAIHPFANYGRAGTPFEQMARERLFRHDMQ

SEQ ID NO: 46628 - protein, 157 aa, Kingella kingae
  misc_feature (1)..(157): tr|F5S9U4|F5S9U4_9NEIS NADPH-dependent 7-cyano-7-deazag uanine reductase OS=Kingella kingae ATCC 23330 OX=88732 7 GN=queF PE=3 SV=1
MSRNQQELNGITLLGNQKTQYPSNYAPEVLESFDNKHPSNDYFVKFVCPEFTSLCPITGQPDFATIVIRYIPDIKMVESKSLKLYLFSFRNHGDFHEDCINIIMKDLIQLMNPKYIEVFGEFTPRGGIAIHPFANYGRENTPFEQLARERLFQHDMQ

SEQ ID NO: 46629 - protein, 157 aa, Kingella negevensis
  misc_feature (1)..(157): tr|A0A238T9E1|A0A238T9E1_9NEIS NADPH-dependent 7-cyano- 7-deazaguanine reductase OS=Kingella negevensis OX=1522 312 GN=queF PE=3 SV=1
MSRNAEELNGVTLLGNQKTQYPTDYAPEMLESFDNKHPTNDYFVKFVCPEFTSLCPITGQPDFATITIRYIPDVKMVESKSLKLYLFSFRNHGDFHEDCVNIIMKDLIKLMNPKYIEVYGDFTPRGGISIMPFANYGRENTPFEQMARERLFKHEMQ

SEQ ID NO: 46630 - protein, 157 aa, Kingella oralis
  misc_feature (1)..(157): tr|C4GMN4|C4GMN4_9NEIS NADPH-dependent 7-cyano-7-deazag uanine reductase OS=Kingella oralis ATCC 51147 OX=62974 1 GN=queF PE=3 SV=1
MSRSSQELGGITLLGGQKTEYRADYAPEVLEAFDNKHPDNDYFVKFVCPEFTSLCPITGQPDFATIVIRYIPDVKMVESKSLKLYLFSFRNHGDFHEDCVNVIMKDLIALMNPKYIEVHGIFTPRGGIAIHPFANYGRLGTAFEQIARERLFGHDRQ

SEQ ID NO: 46631 - protein, 156 aa, Kingella potus
  misc_feature (1)..(156): tr|A0A377R0T0|A0A377R0T0_9NEIS NADPH-dependent 7-cyano- 7-deazaguanine reductase OS=Kingella potus OX=265175 GN =queF PE=3 SV=1
MTRSSDELRGLSLLGGSTQYPDRYAPEVLEAFDNKHPDNDYFVKFVCPEFTSLCPMTGQPDFATIVIRYIPDMKMVESKSLKLYLFGFRNHGDFHEDCVNIIMKDLISLMNPKYIEVSGIFTPRGGIAIHPFANYGRPETPFAAMAYERLSRHDMQ

SEQ ID NO: 46632 - protein, 179 aa, Kinneretia asaccharophila
  misc_feature (1)..(179): tr|A0A4R6N3L8|A0A4R6N3L8_9BURK NADPH-dependent 7-cyano- 7-deazaguanine reductase OS=Kinneretia asaccharophila O X=582607 GN=queF PE=3 SV=1
MAKTPSTAKPAAPKTTAAAKPIKASKAAKPAPKMREMPPNPPSRPSKELHVFPNPAPERDYVIQFQVPEFTCHCPLTGQPDFAHFTIDMIADKFCVELKSLKMYFWSYRDEGAFHEKVTNTILEDIVKVTNPRFIRITAKWYVRGGIYTNVVVEHRKKGWKPQPKVDLPAHSFESGLLR

SEQ ID NO: 46633 - protein, 136 aa, Kiritimatiella glycovorans
  misc_feature (1)..(136): tr|A0A0G3EJQ2|A0A0G3EJQ2_9BACT NADPH-dependent 7-cyano- 7-deazaguanine reductase OS=Kiritimatiella glycovorans OX=1307763 GN=queF PE=3 SV=1
MNKQRYEELKHLGAGEKSYPDTPDRAILETFSNEHPDRVYWITFDSDEFTSLCPVTGQPDFGSIRIEYVPADRCIESKSLKLYLFSFRQVGSFYEDVINRIYSDLHAVLEPRRLVVRGRFTARGGITSTVRVDSAE

SEQ ID NO: 46634 - protein, 138 aa, Kiritimatiellaceae bacterium
  misc_feature (1)..(138): tr|A0A520SSB3|A0A520SSB3_9BACT NADPH-dependent 7-cyano- 7-deazaguanine reductase OS=Kiritimatiellaceae bacteriu m OX=2026752 GN=queF PE=3 SV=1
MSDQERLSQLTLLKKGELKYPMNPDEAELQTFENLNKERNFWITFKTPEFTSLCPLTGQPDFAHITIDYVPDELIVESKSLKLYLFSFRQTGTFYEEIVNRIYTDLYALLQPRKMIVEAEFTPRGGITSIVKIDSTEA

SEQ ID NO: 46635 - protein, 138 aa, Kiritimatiellaceae bacterium
  misc_feature (1)..(138): tr|A0A2E0R4M3|A0A2E0R4M3_9BACT NADPH-dependent 7-cyano- 7-deazaguanine reductase OS=Kiritimatiellaceae bacteriu m OX=2026752 GN=queF PE=3 SV=1
MSDEKRLSQLTLLKKGELKYPMNPDEAELQTFENLNKERNFWITFKTPEFTSLCPLTGQPDFAHITIDYIPDEVIVESKSLKLYLFSFRQTGTFYEEIVNRVYSDLDQLLSPRKLIVEAEFTPRGGITSIVKVDSSEA

SEQ ID NO: 46636 - protein, 281 aa, Klebsiella aerogenes
  misc_feature (1)..(281): tr|A0A0F0PQB2|A0A0F0PQB2_KLEAE NADPH-dependent 7-cyano- 7-deazaguanine reductase OS=Klebsiella aerogenes OX=548 GN=queF PE=3 SV=1
MSSYDNHQALAGLTLGKSTDYRDTYDASLLQGVPRSLNRDPLGLHADNLPFHGADIWTLYELSWLNAKGLPQVAVGYVELSDTTINLVESKSFKLYLNSFNQTRFADWQEVQATLTRDLSACAQGEVKVSLYRLDELEGQPVAHLHGTCIDDQDIEIDNYQFSADYLQDAASGKVVEETLVSHLLKSNCLITHQPDWGSVQIQYRGPKIDREKLLRYLVSFRHHNEFHEQCVERIFNDVLRFCRPESLSVYARYTRRGGLDINPWRSNGEFVPATGRLARQ

SEQ ID NO: 46637 - protein, 280 aa, Klebsiella aerogenes
  misc_feature (1)..(280): tr|A0A145RTW7|A0A145RTW7_KLEAE NADPH-dependent 7-cyano- 7-deazaguanine reductase OS=Klebsiella aerogenes OX=548 GN=queF PE=3 SV=1
MSYENHQALTGLTLGKSTDYRDTYDASLLQGVPRSLNRDPLGLHADALPFVGGDIWTLYELSWLNARGLPQVAVGHVELDYASVNLVESKSFKLYLNSFNQTKFNSWDEVQQTLERDLSACAQGNVTVSLYRLHELEGQPIAHFHGTCIDDQDIDVESYEFSTDYLENAAGGKVVDETLVSHLLKSNCLITHQPDWGSVQIQYRGPQIDREKLLRYLVSFRHHNEFHEQCVERIFNDIQRFCQPEKLSVYARYTRRGGLDINPWRTNTDFVPATGRLVRQ

SEQ ID NO: 46638 - protein, 281 aa, Klebsiella grimontii
  misc_feature (1)..(281): tr|A0A4R4DIA8|A0A4R4DIA8_9ENTR NADPH-dependent 7-cyano- 7-deazaguanine reductase OS=Klebsiella grimontii OX=205 8152 GN=queF PE=3 SV=1
MSSYDNHQALTGLTLGKSTDYRDTYDASLLQGVPRSLNRDPLDLHADNLPFHGADIWTLYELSWLNAKGLPQVAVGHVELSDTTVNLVESKSFKLYLNSFNQTRFADWQAVEATLARDLSACAQGEVKVSLYRLDELEGQPVAHLHGTCIDDQDIEIDNYQFSADYLQDAATGKVVEETLVSHLLKSNCLITHQPDWGSVQIQYRGAKIDREKLLRYLVSFRHHNEFHEQCVERIFNDIQRFCQPEALSVYARYTRRGGLDINPWRSNTDFVPATGRLARQ

SEQ ID NO: 46639 - protein, 281 aa, Klebsiella grimontii
  misc_feature (1)..(281): tr|A0A5D1Z4K0|A0A5D1Z4K0_9ENTR NADPH-dependent 7-cyano- 7-deazaguanine reductase OS=Klebsiella grimontii OX=205 8152 GN=queF PE=3 SV=1
MSSYDNHQALAGLTLGKSTDYRDTYDASLLQGVPRSLNRDPLDLHADNLPFHGADIWTLYELSWLNAKGLPQVAVGHVELSDTTVNLVESKSFKLYLNSFNQTRFADWQAVEATLARDLRACAQGEVKVSLYRLDELEGQPVAHLHGTCIDDQDIEIDNYQFSADYLQDAACGKVVEETLVSHLLKSNCLITHQPDWGSVQIQYRGAKIDREKLLRYLVSFRHHNEFHEQCVERIFNDIQRFCQPEALSVYARYTRRGGLDINPWRSNTDFVPATGRLARQ

SEQ ID NO: 46640 - protein, 281 aa, Klebsiella michiganensis
  misc_feature (1)..(281): tr|A0A2J4ZH97|A0A2J4ZH97_9ENTR NADPH-dependent 7-cyano- 7-deazaguanine reductase OS=Klebsiella michiganensis OX =1134687 GN=queF PE=3 SV=1
MSSYDNHQALAGLTLGKSTDYRDTYDASLLQGVPRNLNRDPLDLHADNLPFHGADIWTLYELSWLNAKGLPQVAVGHVELSDTTVNLVESKSFKLYLNSFNQTRFADWQAVEATLARDLSACAQGEVKVALYRLDELEGQPVAHLHGTCIDDQDIEIDNYQFSADYLQDAAAGKVVEETLVSHLLKSNCLITHQPDWGSVQIQYRGAKIDREKLLRYLVSFRHHNEFHEQCVERIFNDIQRFCQPEALSVYARYTRRGGLDINPWRSNTDFVPATGRLARQ

SEQ ID NO: 46641 - protein, 281 aa, Klebsiella michiganensis
  misc_feature (1)..(281): tr|A0A249WK46|A0A249WK46_9ENTR NADPH-dependent 7-cyano- 7-deazaguanine reductase OS=Klebsiella michiganensis OX =1134687 GN=queF PE=3 SV=1
MSSYDNHQALAGLTLGKSTDYRDTYDASLLQGVPRSLNRDPLDLHADNLPFHGADIWTLYELSWLNAKGLPQVAVGHVELSDTTVNLVESKSFKLYLNSFNQTRFADWQAVEATLARDLSACAQGEVKVALYRLDELEGQPVAHLHGTCIDDQDIEIDNYQFSADYLQDAAAGKVVEETLVSHLLKSNCLITHQPDWGSVQIQYRGAKIDREKLLRYLVSFRHHNEFHEQCVERIFNDIQRFCQPEALSVYARYTRRGGLDINPWRSNTDFVPATGRLARQ

SEQ ID NO: 46642 - protein, 281 aa, Klebsiella oxytoca
  misc_feature (1)..(281): tr|A0A181XLI1|A0A181XLI1_KLEOX NADPH-dependent 7-cyano- 7-deazaguanine reductase OS=Klebsiella oxytoca OX=571 G N=queF_2 PE=3 SV=1
MSSYQDHQALSGLTLGKPTAYCDRYDATLLQAVPRSMNREPLGLYPDNLPFHGADIWTLYELSWLNANGLPQVAVGEISLNADSLNLIESKSFKLYLNSFNQTPFADWETVRSTLQRDLSACAQGEVSVTLFSVEQLEGSPIARLAGDCIDQQDIRIDNYEFNADYLQNAAGEEVVEECLVSHLLKSNCLITHQPDWGSVQISYRGGKIDREALLRYLVSFRHHNEFHEQCVERIFNDLMRYCRPQSLTVYARYTRRGGLDINPWRSNVAFAPEHGRLARQ

SEQ ID NO: 46643 - protein, 281 aa, Klebsiella oxytoca
  misc_feature (1)..(281): tr|A0A2U4DQA4|A0A2U4DQA4_KLEOX NADPH-dependent 7-cyano- 7-deazaguanine reductase OS=Klebsiella oxytoca OX=571 G N=queF PE=3 SV=1
MSSYDNHQALAGLTLGKSTDYRDTYDASLLQGVPRSLNRDPLGLHADSLPFHGADIWTLYELSWLNAKGLPQVAVGHVELSDTTVNLVESKSFKLYLNSFNQTRFADWQEVEATLARDLSACAQGEVKVSLYRLDELEGQPVAHLHGTCIDDQDIEIDNYQFSADYLQDAAGGKVVEETLVSHLLKSNCLITHQPDWGSVQIRYRGAKIDREKLLRYLVSFRHHNEFHEQCVERIFSDIQRFCQPEALSVYARYTRRGGLDINPWRSNTDFVPAIGRLARQ

SEQ ID NO: 46644 - protein, 281 aa, Klebsiella pneumoniae
  misc_feature (1)..(281): sp|A6TD67|QUEF_KLEP7 NADPH-dependent 7-cyano-7-deazagua nine reductase OS=Klebsiella pneumoniae subsp. pneumoni ae (strain ATCC 700721 / MGH 78578) OX=272620 GN=queF P E=3 SV=1
MSSYDNHQALAGLTLGKSTDYRDTYDASLLQGVPRSLNRDPLGLHADNLPFHGADIWTLYELSWLNGKGLPQVAVGHVELPDTSLNLVESKSFKLYLNSFNQTRFASWQDVAETLTRDLSACAQGKVKVSLYRLDELEGQPIARLHGTCIDDQDIEIDNYQFSADYLQGAASGKIVEETLVSHLLKSNCLITHQPDWGSVQIQYRGAKIDREQLLRYLVSFRHHNEFHEQCVERIFNDILRFCQPESLSVYARYTRRGGLDINPWRSNGDFSPATGRLARQ

SEQ ID NO: 46645 - protein, 281 aa, Klebsiella pneumoniae
  misc_feature (1)..(281): tr|A0A422WR37|A0A422WR37_KLEPN NADPH-dependent 7-cyano- 7-deazaguanine reductase OS=Klebsiella pneumoniae subsp . pneumoniae OX=72407 GN=queF PE=3 SV=1
MSSYDNKQALAGLTLGKSTDYRDTYDASLLQGVPRSLNRDPLGLHADNLPFHGADIWTLYELSWLNGKGLPQVAVGHVELPDTSLNLVESKSFKLYLNSFNQTRFASWQDVAETLTRDLSACAQGKVKVSLYRLDELEGQPIARLHGTCIDDQDIEIDNYQFSADYLQGAASGKIVEETLVSHLLKSNCLITHQPDWGSVQIQYRGAKIDREQLLRYLVSFRHHNEFHEQCVERIFNDILRFCQPESLSVYARYTRRGGLDINPWRSNGDFSPATGRLARQ

SEQ ID NO: 46646 - protein, 281 aa, Klebsiella quasipneumoniae
  misc_feature (1)..(281): tr|A0A222V9A0|A0A222V9A0_9ENTR NADPH-dependent 7-cyano- 7-deazaguanine reductase OS=Klebsiella quasipneumoniae OX=1463165 GN=queF PE=3 SV=1
MSSYDNHQALAGLTLGKSTDYRDTYDASLLQGVPRSLNRDPLGLHADNLPFHGADIWTLYELSWLNGKGLPQVAVGHVELPDTTVNLVESKSFKLYLNSFNQTRFASWQEVEETLTRDLSACAQGEVKVSLYRLDELEGQPIAHLHGACIDDQDIEIDNYQFSADYLQGAASGKIVEETLVSHLLKSNCLITHQPDWGSVQIQYRGAKIDREQLLRYLVSFRHHNEFHEQCVERIFNDILRFCQPESLSVYARYTRRGGLDINPWRSNGDFSPATGRLARQ

SEQ ID NO: 46647 - protein, 281 aa, Klebsiella quasipneumoniae; identical to SEQ ID NO: 46646
  misc_feature (1)..(281): tr|A0A5C6IHS1|A0A5C6IHS1_9ENTR NADPH-dependent 7-cyano- 7-deazaguanine reductase OS=Klebsiella quasipneumoniae subsp. similipneumoniae OX=1463164 GN=queF PE=3 SV=1

SEQ ID NO: 46648 - protein, 281 aa, Klebsiella quasivariicola
  misc_feature (1)..(281): tr|A0A223U6W7|A0A223U6W7_9ENTR NADPH-dependent 7-cyano- 7-deazaguanine reductase OS=Klebsiella quasivariicola O X=2026240 GN=queF PE=3 SV=1
MSSYDNHQALAGLTLGKSTDYRDTYDASLLQGVPRSLNRDPLGLHADNLPFHGADIWTLYELSWLNAKGLPQVAVGHVELPDTSVNLVESKSFKLYLNSFNQTRFASWQDVAETLTRDLSACAQGEVKVSLYRLDELEGQPIAHLHGTCIDDQDIEIDNYQFSADYLQGAASGKIVEETLVSHLLKSNCLITHQPDWGSVQIQYRGAKIDREQLLRYLVSFRHHNEFHEQCVERIFNDILRFCQPESLSVYARYTRRGGLDINPWRSNGDFSPATGRLARQ

SEQ ID NO: 46649 - protein, 281 aa, Klebsiella sp.
  misc_feature (1)..(281): tr|A0A3G5CYU6|A0A3G5CYU6_9ENTR NADPH-dependent 7-cyano- 7-deazaguanine reductase OS=Klebsiella sp. P1CD1 OX=226 7618 GN=queF PE=3 SV=1
MSSYDNHQALAGLTLGKSTDYRDTYDASLLQGVPRSLNRDPLGLHADNLPFHGADIWTLYELSWLNGKGLPQVAVGHVELPDTSVNLVESKSFKLYLNSFNQTRFASWQDVAETLTRDLSACAQGEVKVALYRLDELEGQPIAHLHGACIDDQDIEIDNYQFSTNYLQGAASGKIVEETLVSHLLKSNCLITHQPDWGSVQIQYRGAKIDREQLLRYLVSFRHHNEFHEQCVERIFNDILRFCQPESLSVYARYTRRGGLDINPWRSNGDFSPATGRLARQ

SEQ ID NO: 46650 - protein, 281 aa, Klebsiella sp.; identical to SEQ ID NO: 46641
  misc_feature (1)..(281): tr|J8W7W3|J8W7W3_9ENTR NADPH-dependent 7-cyano-7-deazag uanine reductase OS=Klebsiella sp. OBRC7 OX=936565 GN=q ueF PE=3 SV=1

SEQ ID NO: 46651 - protein, 281 aa, Klebsiella variicola
  misc_feature (1)..(281): tr|A0A0B7GFY9|A0A0B7GFY9_KLEVA NADPH-dependent 7-cyano- 7-deazaguanine reductase OS=Klebsiella variicola OX=244 366 GN=queF PE=3 SV=1
MSSYDNHQALAGLTLGKSTDYRDTYDASLLQGVPRSLNRDPLGLHADNLPFHGADIWTLYELSWLNGKGLPQVAVGHVELPDTSVNLVESKSFKLYLNSFNQTRFASWQDVAETLTRDLSACAQGEVKVALYRLDELEGQPIAHLHGACIDDQDIEIDNYQFSTDYLQGAASGKIVEETLVSHLLKSNCLITHQPDWGSVQIQYRGAKIDREQLLRYLVSFRHHNEFHEQCVERIFNDILRFCQPESLSVYARYTRRGGLDINPWRSNGDFSPATGRLARQ

SEQ ID NO: 46652 - protein, 281 aa, Klebsiella variicola; identical to SEQ ID NO: 46649
  misc_feature (1)..(281): tr|A0A4U2WD77|A0A4U2WD77_KLEVA NADPH-dependent 7-cyano- 7-deazaguanine reductase OS=Klebsiella variicola OX=244 366 GN=queF PE=3 SV=1

SEQ ID NO: 46653 - protein, 281 aa, Kluyvera ascorbata
  misc_feature (1)..(281): tr|A0A3N2SA08|A0A3N2SA08_9ENTR NADPH-dependent 7-cyano- 7-deazaguanine reductase OS=Kluyvera ascorbata OX=51288 GN=queF PE=3 SV=1
MSSYENHQALSGLTLGKTTDYRDTYDASLLQGVPRSLNRDPLGLHADTLPFHGADIWTLYELSWLNAKGLPQVAVGHVELSHATVNLVESKSFKLYLNSFNQTRFDSWEAVQQTLERDLCACAEGHVTVALYRIDELEGQPIAHFHGSCIDNQDIEIESYEFNADYLDGAAGEKVVQETLVSHLLKSNCLITHQPDWGSVQIQYRGPQIDREKLLRYLVSFRHHNEFHEQCVERIFNDILRFCAPESLSVYARYTRRGGLDINPWRSNGEFVPAIGRLVRQ

SEQ ID NO: 46654 - protein, 281 aa, Kluyvera ascorbata
  misc_feature (1)..(281): tr|A0A2T2Y3Y7|A0A2T2Y3Y7_9ENTR NADPH-dependent 7-cyano- 7-deazaguanine reductase OS=Kluyvera ascorbata OX=51288 GN=queF PE=3 SV=1
MSSYDNHQALAGLTLGKTTDYRDTYDASLLQGVPRSLNRDPLGLHADSLPFHGADIWTLYELSWLNAKGLPQVAVGHVELSHETENLVESKSFKLYLNSFNQTRFACWQDVQETLERDLSACAQGKVTVALYRLDEIEGQPIAHFHGSCIDDQDIEIDSYQFNADYLDGAAGEKVVEETLVSHLLKSNCLITHQPDWGSVQIQYRGPKIDREKLLRYLVSFRHHNEFHEQCVERIFNDILRFCAPESLSVYARYTRRGGLDINPWRSNAEFVPAIGRLVRQ

SEQ ID NO: 46655 - protein, 281 aa, Kluyvera cryocrescens
  misc_feature (1)..(281): tr|A0A2X3DV48|A0A2X3DV48_KLUCR NADPH-dependent 7-cyano- 7-deazaguanine reductase OS=Kluyvera cryocrescens OX=58 0 GN=queF PE=3 SV=1
MSSYENHQALSGLTLGKTTDYRDTYDANLLQGVPRSLNRDPLGLHADSLPFHGADIWTLYELSWLNAKGLPQVAVGHVELSHETVNLVESKSFKLYLNSFNQTRFANWEAVQETLERDLSACAQGNVTVALYRLDEVEGQPIAHFHGNCIDDQDIEIESYQFNAEYLKGAAGHKVVQETLVSHLLKSNCLITHQPDWGSVQIQYRGPQIDREKLLRYLVSFRHHNEFHEQCVERIFNDILRFCAPESLSVYARYTRRGGLDINPWRSNSDFAPAIGRLVRQ

SEQ ID NO: 46656 - protein, 281 aa, Kluyvera georgiana
  misc_feature (1)..(281): tr|A0A248KHU7|A0A248KHU7_9ENTR NADPH-dependent 7-cyano- 7-deazaguanine reductase OS=Kluyvera georgiana OX=73098 GN=queF PE=3 SV=1
MSSYDNHQALAGLTLGKTTDYRDTYDASLLQGVPRSLNRDPLGLHADSLPFHGADIWTLYELSWLNAKGLPQVAVGHVELSHDTVNLVESKSFKLYLNSFNQTRFARWEDVQETLQRDLSACAEGNVTVALYRLDEIEGQPIAHFHGSCIDDQDIEIDNYQFNADYLDGAAGQKVVQETLVSHLLKSNCLITHQPDWGSVQIQYRGPQIDREKLLRYLVSFRHHNEFHEQCVERIFNDILRFCAPESLSVYARYTRRGGLDINPWRANGEFVPAIGRLVRQ

SEQ ID NO: 46657 - protein, 281 aa, Kluyvera georgiana
  misc_feature (1)..(281): tr|A0A1B7K5H7|A0A1B7K5H7_9ENTR NADPH-dependent 7-cyano- 7-deazaguanine reductase OS=Kluyvera georgiana ATCC 516 03 OX=1354264 GN=queF PE=3 SV=1
MSSYDNHQALAGLTLGKTTDYRDTYDASLLQGVPRSLNRDPLGLHADSLPFHGADIWTLYELSWLNAKGLPQVAVGHVELSHATVNLVESKSFKLYLNSFNQTRFASWQAVQETLQRDLSACAQGNVTVALYRLDEIEGQPIAHFHGSCIDDQDIEIDNYQFNADYLDGAAGQKVVQETLVSHLLKSNCLITHQPDWGSVQIQYRGPQIDREKLLRYLVSFRHHNEFHEQCVERIFNDILRFCAPESLSVYARYTRRGGLDINPWRANGEFVPAIGRLVRQ

SEQ ID NO: 46658 - protein, 281 aa, Kluyvera intermedia
  misc_feature (1)..(281): tr|A0A3S4F8A5|A0A3S4F8A5_KLUIN NADPH-dependent 7-cyano- 7-deazaguanine reductase OS=Kluyvera intermedia OX=6164 8 GN=queF PE=3 SV=1
MSSYENHQALSGLTLGKTTDYRDTYDASLLQGVPRSLNRNPLGLHADSLPFHGGDIWTLYELSWLNAKGLPQVAVGHVELSHTTVNLVESKSFKLYLNSFNQTRFASWEAVQETLERDLSTCAQGKVTVALYRLDEVEGQPIAHFHGSCIDGQDIEIDNYQFNADYLDGAAGQKVVQETLVSHLLKSNCLITHQPDWGSVQIQYRGPQIDREKLLRYLVSFRHHNEFHEQCVERIFNDILRFCAPESLSVYARYTRRGGLDINPWRSNTEFVPAIGRLVRQ

SEQ ID NO: 46659 - protein, 281 aa, Kluyvera intermedia
  misc_feature (1)..(281): tr|A0A1X0X404|A0A1X0X404_KLUIN NADPH-dependent 7-cyano- 7-deazaguanine reductase OS=Kluyvera intermedia OX=6164 8 GN=queF PE=3 SV=1
MSSYDNHQALSGLTLGKTTDYRDRYDASLLQGVPRSLNRDPLGLKAESLPFHGADIWTLYELSWLNARGLPQVAVGHVELNYASINLVESKSFKLYLNSFNQTRFASWDEVRDTLERDLSACAQGDVTVALYRLDEIEGQPIAHFHGSCIDDQDIVIDNYAFDANLLTDAASGKVIEETLVSHLLKSNCLITHQPDWGSVQIQYRGPKIDREKLLRYLVSFRHHNEFHEQCVERIFTDIQRFCQPESLSVYARYTRRGGLDINPWRTNTPFIPATGRLVRQ

SEQ ID NO: 46660 - protein, 281 aa, Kluyvera sp.
  misc_feature (1)..(281): tr|A0A2T3X9K7|A0A2T3X9K7_9ENTR NADPH-dependent 7-cyano- 7-deazaguanine reductase OS=Kluyvera sp. Nf5 OX=2116543 GN=queF PE=3 SV=1
MSSYDNHQALSGLTLGKTTDYRDRYDASLLQGVPRSLNRDPLGLKAENLPFQGADIWTLYELSWLNANGLPQVAVGHVELNYASINLVESKSFKLYLNSFNQTRFASWDEVRETLERDLSACAQGEVSVALYRLDEIEGQPIAHFHGTCIDDQDIVIDNYDFDAALLTDAASGKVVEETLVSHLLKSNCLITHQPDWGSVQIQYRGPKIDREKLLRYLVSFRHHNEFHEQCVERIFTDIQRFCQPESLSVYARYTRRGGLDINPWRTNTRFIPATGRLVRQ

SEQ ID NO: 46661 - protein, 159 aa, Komagataeibacter cocois
  misc_feature (1)..(159): tr|A0A365YZA6|A0A365YZA6_9PROT NADPH-dependent 7-cyano- 7-deazaguanine reductase OS=Komagataeibacter cocois OX= 1747507 GN=queF PE=3 SV=1
MTSPTPSDDGSQVLTQLGRNTAQPASPEEAVLERVPAPDPDKRYVVRFTAPEFTSLCPVTGQPDFAHIVIDYIPGKWIVESKSLKLFLTSFRNHGAFHEKCSMQIATTLVDLLDPVWLRIGAYWYPRGGMPIDVFWQTGTPPEGTWIPSQDVPGYRGRG

SEQ ID NO: 46662 - protein, 159 aa, Komagataeibacter europaeus
  misc_feature (1)..(159): tr|A0A0M0EI62|A0A0M0EI62_KOMEU NADPH-dependent 7-cyano- 7-deazaguanine reductase OS=Komagataeibacter europaeus OX=33995 GN=queF PE=3 SV=1
MNTRPTHDDGSQFLTQLGQNTRQPNSPEEARLERVPAPERGRNYVVRFTAPEFTSLCPVTGQPDFAHIVIDYIPDEWIVESKSLKLFLTSFRNHGAFHEKCSVQIATTLVDLLKPVWLRIGAYWYPRGGMPIDVFWQTGAPPEGVWIPAQDVPGYRGRG

SEQ ID NO: 46663 - protein, 159 aa, Komagataeibacter europaeus
  misc_feature (1)..(159): tr|A0A0D6Q359|A0A0D6Q359_KOMEU NADPH-dependent 7-cyano- 7-deazaguanine reductase OS=Komagataeibacter europaeus NBRC 3261 OX=1234669 GN=queF PE=3 SV=1
MNTRPTHDDGSQFLTQLGQNTRQPNSPEEARLERVPAPERGRNYVVRFTAPEFTSLCPVTGQPDFAHIVIDYIPDEWIVESKSLKLFLTSFRNHGAFHEKCSVQIATTLVDLLKPVWLRIGAYWYPRGGMPIDVFWQTGAPPEGVWISAQDVPGYRGRG

SEQ ID NO: 46664 - protein, 165 aa, Komagataeibacter hansenii
  misc_feature (1)..(165): tr|A0A318Q6T8|A0A318Q6T8_KOMHA NADPH-dependent 7-cyano- 7-deazaguanine reductase OS=Komagataeibacter hansenii O X=436 GN=queF PE=3 SV=1
MPMTSSPPPAGTPDDGSQLLTQLGRNTTQPASPEDAILERVPAPDADRRYVVRFTAPEFTSLCPVTGQPDFAHIVIDYIPRAWIVESKSLKLFLTSFRNHGSFHEKCSMQIATTLVDLLDPVWLRIGAYWYPRGGMPIDVFWQTGAPPEGTWIPAQDVPGYRGRG

SEQ ID NO: 46665 - protein, 165 aa, Komagataeibacter hansenii; identical to SEQ ID NO: 46664
  misc_feature (1)..(165): tr|D5QJ04|D5QJ04_KOMHA NADPH-dependent 7-cyano-7-deazag uanine reductase OS=Komagataeibacter hansenii ATCC 2376 9 OX=714995 GN=queF PE=3 SV=1

SEQ ID NO: 46666 - protein, 159 aa, Komagataeibacter intermedius
  misc_feature (1)..(159): tr|A0A0N0MGJ9|A0A0N0MGJ9_9PROT NADPH-dependent 7-cyano- 7-deazaguanine reductase OS=Komagataeibacter intermediu s AF2 OX=1458464 GN=queF PE=3 SV=1
MNTRPTTDDGSQFLTQLGQNSQQPNSPEEARLERVPAPQRGRNYVVRFTAPEFTSLCPVTGQPDFAHIVIDYIPDEWIVESKSLKLFLTSFRNHGAFHEQCSMQIATTLVDVLKPVWLRIGAYWYPRGGMPIDVFWQTGAPPEGVWIPAQDVPGYRGRG

SEQ ID NO: 46667 - protein, 163 aa, Komagataeibacter maltaceti
  misc_feature (1)..(163): tr|A0A2S3W375|A0A2S3W375_9PROT NADPH-dependent 7-cyano- 7-deazaguanine reductase OS=Komagataeibacter maltaceti OX=1203393 GN=queF PE=3 SV=1
MSSPTPPAARPDDGSQALTQLGHTTAQPTSPENAVLERVPAPDADRRYVVRFTAPEFTSLCPVTGQPDFAHIIIDYIPRDWIVESKSLKLFLTSFRNHGAFHEKCSMQIATTLVDLLDPVWLRIGAYWYPRGGMPIDIFWQTGTPPEGTWIPAQDVPGYRGRG

SEQ ID NO: 46668 - protein, 163 aa, Komagataeibacter medellinensis
  misc_feature (1)..(163): tr|G2I6S4|G2I6S4_KOMMN NADPH-dependent 7-cyano-7-deazag uanine reductase OS=Komagataeibacter medellinensis (str ain NBRC 3288 / BCRC 11682 / LMG 1693 / Kondo 51) OX=63 4177 GN=queF PE=3 SV=1
MDPFMNTRPIPDDGSRSLTQLGQNATQPSSPEEARLERVPAPERGQHYVIRFTAPEFTSLCPVTGQPDFAHIVIDYIPDEWIVESKSLKLFLTSFRNHGAFHEKCSMQIALTLVDLLKPVWLRIGAYWYPRGGIPIDIFWQTGTAPDGVWVPAQDVPGYRGRG

SEQ ID NO: 46669 - protein, 159 aa, Komagataeibacter nataicola
  misc_feature (1)..(159): tr|A0A1U9RQK2|A0A1U9RQK2_9PROT NADPH-dependent 7-cyano- 7-deazaguanine reductase OS=Komagataeibacter nataicola OX=265960 GN=queF PE=3 SV=1
MTSSPTQDDGSQFLTQLGQNSAQPASPEEARLERVPAPDRGRRYVVRFTAPEFTSLCPVTGQPDFAHIVIDYIPDEWIVESKSLKLFLTSFRNHGAFHERCSMQIATTLVDLLQPVWLRIGAYWYPRGGMPIDVFWQTSTPPEGVWIPAQDVPGYRGRG

SEQ ID NO: 46670 - protein, 159 aa, Komagataeibacter oboediens
  misc_feature (1)..(159): tr|A0A318QUZ9|A0A318QUZ9_9PROT NADPH-dependent 7-cyano- 7-deazaguanine reductase OS=Komagataeibacter oboediens OX=65958 GN=queF PE=3 SV=1
MNTRPTPDDGSQFLTQLGQNSRQPNSPEDARLERVPAPQRGRNYVVRFTAPEFTSLCPVTGQPDFAHIVIDYIPDEWIVESKSLKLFLTSFRNHGAFHEQCSMQIATTLVDVLKPVWLRIGAYWYPRGGMPIDVFWQTGAPPEGVWIPAQDVPGYRGRG

SEQ ID NO: 46671 - protein, 159 aa, Komagataeibacter pomaceti
  misc_feature (1)..(159): tr|A0A318QC59|A0A318QC59_9PROT NADPH-dependent 7-cyano- 7-deazaguanine reductase OS=Komagataeibacter pomaceti O X=2021998 GN=queF PE=3 SV=1
MTSPTPPDDGSQALTQLGRSTAQPASPEEAVLERVPAPDPDKRYVVRFTAPEFTSLCPVTGQPDFAHIVIDYIPGKWIVESKSLKLFLTSFRNHGAFHEKCSMQIATTLVDLLDPVWLRIGAYWYPRGGMPIDVFWQTGTPPEGTWIPAQDVPGYRGRG

SEQ ID NO: 46672 - protein, 159 aa, Komagataeibacter rhaeticus
  misc_feature (1)..(159): tr|A0A070ABY7|A0A070ABY7_9PROT NADPH-dependent 7-cyano- 7-deazaguanine reductase OS=Komagataeibacter rhaeticus AF1 OX=1432055 GN=queF PE=3 SV=1
MNNPSSPDDGSRLLTQLGQNTAQPASPEEAELERVPAPERGRHYVVRFTAPEFTSLCPVTGQPDFAHIVIDYIPDEWIVESKSLKLFLTSFRNHGAFHEKCSMQIALTLVDLLRPVWLRIGAYWYPRGGMPIDVFWQTGTPPDGVWIPSQDVPGYRGRG

SEQ ID NO: 46673 - protein, 159 aa, Komagataeibacter rhaeticus
  misc_feature (1)..(159): tr|A0A181CDS1|A0A181CDS1_9PROT NADPH-dependent 7-cyano- 7-deazaguanine reductase OS=Komagataeibacter rhaeticus OX=215221 GN=queF PE=3 SV=1
MNNPSPPDDGSRLLTQLGQNTAQPASPEEAELERVPAPERGRHYVVRFTAPEFTSLCPVTGQPDFAHIVIDYIPDEWIVESKSLKLFLTSFRNHGAFHEKCSMQIALTLVDLLRPVWLRIGAYWYPRGGMPIDVFWQTGTPPDGVWIPSQDVPGYRGRG

SEQ ID NO: 46674 - protein, 200 aa, Komagataeibacter saccharivorans
  misc_feature (1)..(200): tr|A0A347WBB1|A0A347WBB1_9PROT NADPH-dependent 7-cyano- 7-deazaguanine reductase OS=Komagataeibacter saccharivo rans OX=265959 GN=queF PE=3 SV=1
MPPPICKSGENHMPPTRISVDARPDLTASATHLLPPADGCPMNTRPTTDDGSQFLTQLGQNTTQPASPEEARLERVPAPERGRHYVVRFTAPEFTSLCPVTGQPDFAHIVIDYIPDEWIVESKSLKLFLTSFRNHGAFHEKCSVQIATTLVDLLKPVWLRIGAYWYPRGGMPIDVFWQTSTPPEGVWIPAQDVPGYRGRG

SEQ ID NO: 46675 - protein, 159 aa, Komagataeibacter sp.
  misc_feature (1)..(159): tr|A0A371Z0T1|A0A371Z0T1_9PROT NADPH-dependent 7-cyano- 7-deazaguanine reductase OS=Komagataeibacter sp. AV 382 OX=2301223 GN=queF PE=3 SV=1
MNTRPTSDDGSQFLTQLGQHTAQPASPEEARLERVPAPERGRNYVVRFTAPEFTSLCPVTGQPDFAHIVIDYIPDEWIVESKSLKLFLTSFRNHGAFHEKCSVQIATTLVDLLKPVWLRIGAYWYPRGGMPIDVFWQTGAPPEGVWIPAQDVPGYRGRG

SEQ ID NO: 46676 - protein, 159 aa, Komagataeibacter sp.
  misc_feature (1)..(159): tr|A0A4P5NQ25|A0A4P5NQ25_9PROT NADPH-dependent 7-cyano- 7-deazaguanine reductase OS=Komagataeibacter sp. MSKU9 OX=1932662 GN=queF PE=3 SV=1
MNTRPTPDDGSQFLTQLGQNTRQPNSPEEARLERVPAPERGRNYVVRFTAPEFTSLCPVTGQPDFAHIVIDYIPDEWIVESKSLKLFLTSFRNHGAFHEKCSVQIATTLVELLKPVWLRIGAYWYPRGGMPIDVFWQTGAPPAGVWIPAQDVPGYRGRG

SEQ ID NO: 46677 - protein, 159 aa, Komagataeibacter sucrofermentans
  misc_feature (1)..(159): tr|A0A318QS97|A0A318QS97_9PROT NADPH-dependent 7-cyano- 7-deazaguanine reductase OS=Komagataeibacter sucroferme ntans OX=1053551 GN=queF PE=3 SV=1
MTANSTPDDGSQFLTQLGQNSAQPASPEEARLERVPAPDRGRHYVVRFTAPEFTSLCPVTGQPDFAHIVIDYIPDEWIVESKSLKLFLTSFRNHGAFHERCSMQIAITLVDLLKPVWLRIGAYWYPRGGMPIDVFWQTGAPPEGVWIPAQDVPGYRGRG

SEQ ID NO: 46678 - protein, 159 aa, Komagataeibacter swingsii
  misc_feature (1)..(159): tr|A0A2V4RLC2|A0A2V4RLC2_9PROT NADPH-dependent 7-cyano- 7-deazaguanine reductase OS=Komagataeibacter swingsii O X=215220 GN=queF PE=3 SV=1
MNTRPTPDDGSQFLTQLGQNTRQPNSPEEARLERVPAPERGRNYVVRFTAPEFTSLCPVTGQPDFAHIVIDYIPDEWIVESKSLKLFLTSFRNHGAFHEKCSVQIATTLVDLLKPVWLRIGAYWYPRGGMPIDVFWQTGAPPEGVWIPAQDVPGYRGRG

SEQ ID NO: 46679 - protein, 170 aa, Komagataeibacter xylinus
  misc_feature (1)..(170): tr|A0A2D3HAJ5|A0A2D3HAJ5_KOMXY NADPH-dependent 7-cyano- 7-deazaguanine reductase OS=Komagataeibacter xylinus OX =28448 GN=queF PE=3 SV=1
MHPYSRADGSLHEQPVPPDDGSRLLTQLGQNTAQPASPEEAELERVPAPERGRHYVVRFTAPEFTSLCPVTGQPDFAHIVIDYIPDEWIVESKSLKLFLTSFRNHGAFHEKCSMQIALTLVDLLRPVWLRIGAYWYPRGGMPIDVFWQTGTPPDGVWIPSQDVPGYRGRG

SEQ ID NO: 46680 - protein, 159 aa, Komagataeibacter xylinus
  misc_feature (1)..(159): tr|A0A318PM46|A0A318PM46_KOMXY NADPH-dependent 7-cyano- 7-deazaguanine reductase OS=Komagataeibacter xylinus OX =28448 GN=queF PE=3 SV=1
MTSSPSQDDGSQFLTQLGQNSAQPASPEEARLERVPAPDRGRRYVVRFTAPEFTSLCPVTGQPDFAHIVIDYIPDEWIVESKSLKLFLTSFRNHGAFHERCSMQIATTLVDLLKPVWLRIGAYWYPRGGMPIDVFWQTGTPPEGVWIPAQDVPGYRGRG

SEQ ID NO: 46681 - protein, 154 aa, Kordiimonadales bacterium
  misc_feature (1)..(154): tr|A0A5A7N693|A0A5A7N693_9PROT NADPH-dependent 7-cyano- 7-deazaguanine reductase OS=Kordiimonadales bacterium J CM 17846 OX=1236968 GN=queF PE=3 SV=1
MSNNIYENLSQLGGSASQPEKPEDAILETVANPRPGSDYLVRFTCPEFTSLCPVTGQPDFAHLVIDYAPARLLVESKSLKLYLSSFRNHQAFHEDCTVGIAERLIEELQPKWLRLGGYWYPRGGIPIDVFFQSGKPPLGLWIPDTGVQPYRGRG

SEQ ID NO: 46682 - protein, 154 aa, Kordiimonadales bacterium
  misc_feature (1)..(154): tr|A0A5A7NML9|A0A5A7NML9_9PROT NADPH-dependent 7-cyano- 7-deazaguanine reductase OS=Kordiimonadales bacterium J CM 17843 OX=1236965 GN=queF PE=3 SV=1
MSNDIYENLSQLGGSSPMPASPEEATLETVPNPRPGSDYLVRFTCPEFTSLCPVTGQPDFAHLVLDYVPARLLVESKSLKLYLHSFRNHPGFHEDCTVGIAERLIEELQPKWLRLGGYWYPRGGIPIDVFFQSGKPPQNLWIPDHGVQPYRGRG

SEQ ID NO: 46683 - protein, 154 aa, Kordiimonas lacus
  misc_feature (1)..(154): tr|A0A1G6VM07|A0A1G6VM07_9PROT NADPH-dependent 7-cyano- 7-deazaguanine reductase OS=Kordiimonas lacus OX=637679 GN=queF PE=3 SV=1
MTKEIYQGLEQLGAKSDAPQTPEEAVLEYVKNPRPKSDYCVRFTCPEFTSLCPVTGQPDFAHLVLDYVPGDSLVESKSLKLFLQSFRNHAAFHEDCTVGIAERLVEEMKPKWLRFGGYWYPRGGIPIDVFYQTGEAPKGVWIPEQDVPTYRGRG

SEQ ID NO: 46684 - protein, 154 aa, Kordiimonas sp.
  misc_feature (1)..(154): tr|A0A2E1CXS4|A0A2E1CXS4_9PROT NADPH-dependent 7-cyano- 7-deazaguanine reductase OS=Kordiimonas sp. OX=1970157 GN=queF PE=3 SV=1
MTNTHYDGLSQLGQKTDLPTTPEAAVLEKIPNPHPDVAYNVRFSCPEFTSLCPVTGQPDFAHLVIDYIPAEYLIESKSLKLYLHSFRNHAGFHEKCTVGIAKRLIETLSPLWLRIGGYWYPRGGMPIDVFYQTGQIPEKVWIPEQGVSNYRGRG

SEQ ID NO: 46685 - protein, 132 aa, Koribacter versatilis
  misc_feature (1)..(132): tr|Q1IQL7|Q1IQL7_KORVE NADPH-dependent 7-cyano-7-deazag uanine reductase OS=Koribacter versatilis (strain Ellin 345) OX=204669 GN=queF PE=3 SV=1
MPKQPAYTAEHAAAGLDANFPEIEVWPNQFPNYEIEIDVPEFTSVCPKTGLPDFGTLWIRYMPNKSCLELKSLKEYLFTYRNLGIFQENIVNRVLNDVVKATKPVWAEVRGVFNARGGIGTTVVARYPRPKK

SEQ ID NO: 46686 - protein, 281 aa, Kosakonia arachidis
  misc_feature (1)..(281): tr|A0A1I6XHW4|A0A1I6XHW4_9ENTR NADPH-dependent 7-cyano- 7-deazaguanine reductase OS=Kosakonia arachidis OX=5519 89 GN=queF PE=3 SV=1
MSSYDNHQALASLTLGKTTDYRDTYDASLLQGVPRSLNRDPLGLTAGNLPFQGADIWTLYELSWLNAKGLPQVAVGHVELDYASMNLVESKSFKLYLNSFNQTRFASWDAVRETLQRDLSACAQGNVSVTLYRIDELEGQPIAHFHGACIDDQDIQIENYAFDAAWLTGAASGKVVEETLVSHLLKSNCLITHQPDWGSVQIQYRGPKIDREKLLRYLVSFRHHNEFHEQCVERIFTDIQRFCQPEKLSVYARYTRRGGLDINPWRTNTDFIPATGRLVRQ

SEQ ID NO: 46687 - protein, 281 aa, Kosakonia cowanii
  misc_feature (1)..(281): tr|A0A3R5ZKY3|A0A3R5ZKY3_9ENTR NADPH-dependent 7-cyano- 7-deazaguanine reductase OS=Kosakonia cowanii OX=208223 GN=queF PE=3 SV=1
MSSYDNHQALSSLTLGKTTDYRDTYDASLLQGVPRSLNRDPLGLKADNLPFHGADIWTLYELSWLNANGLPQVAVGQVELDYASLNLVESKSFKLYLNSFNQTRFASWDEVRSTLQRDLSACAQGAVSVTLYRVDELEGQPVAHFAGLCIDDQDIAIDNYEFDAALLTDAAHGEVVEETLVSHLLKSNCLITHQPDWGSVQIQYRGAQIDREKLLRYLVSFRHHNEFHEQCVERIFTDIQRFCQPESLSVYARYTRRGGLDINPWRSNTDFVPATGRLARQ

SEQ ID NO: 46688 - protein, 281 aa, Kosakonia oryzae
  misc_feature (1)..(281): tr|A0A1T5G2P9|A0A1T5G2P9_9ENTR NADPH-dependent 7-cyano- 7-deazaguanine reductase OS=Kosakonia oryzae OX=497725 GN=queF PE=3 SV=1
MSSYDNHQALAGLTLGKTTDYRDTYDASLLQGVPRSLNRDPLGLTAGNLPFHGTDIWTLYELSWLNAKGLPQVAVGHVELDYASVNLVESKSFKLYLNSFNQTRFASWDEVRDTLQRDLSACAQGSVSVALYRIDELEGQPIAHFHGTCIDEQDIEIESYAFDAAWLTDAASGKVVDETLVSHLLKSNCLITHQPDWGSVQIQYRGPKIDREKLLRYLVSFRHHNEFHEQCVERIFTDIQRFCQPEKLSVYARYTRRGGLDINPWRTNTDFIPATGRLVRQ

SEQ ID NO: 46689 - protein, 281 aa, Kosakonia oryzendophytica
  misc_feature (1)..(281): tr|A0A1C4AW26|A0A1C4AW26_9ENTR NADPH-dependent 7-cyano- 7-deazaguanine reductase OS=Kosakonia oryzendophytica O X=1005665 GN=queF PE=3 SV=1
MSSYDNHQALSGLTLGKTTSYRDTYDATLLQGVPRSLNRDPLGLTANNLPFRGADIWTLYELSWLNAKGLPQVAVGHVELDYASLNLVESKSFKLYLNSFNQTRFASWDEVRATLERDLSACAQGLVTVALYRLDELEGQPVAHFHGTCIDDQDIAVDNYAFDAALLTDAASGKVVEETLVSHLLKSNCLITHQPDWGSVQIQYRGPKIDREKLLRYLVSFRHHNEFHEQCVERIFTDIQRFCQPEKLSVYARYTRRGGLDINPWRTNTDFIPATGRLVRQ

SEQ ID NO: 46690 - protein, 281 aa, Kosakonia oryziphila
  misc_feature (1)..(281): tr|A0A1C4DSK7|A0A1C4DSK7_9ENTR NADPH-dependent 7-cyano- 7-deazaguanine reductase OS=Kosakonia oryziphila OX=100 5667 GN=queF PE=3 SV=1
MSSYDNHQALAGLTLGKTTDYRDTYDASLLQGVPRSLNRDPLGLTAGNLPFQGADIWTLYELSWLNAKGLPQVAVGHVELDYASVNLVESKSFKLYLNSFNQTRFASWDEVRETLQRDLSACAQGNVSVALYRIDELEGQPIAHFHGTCIDDQDIEIENYTFDAAWLTGAASGKVVEETLVSHLLKSNCLITHQPDWGSVQIQYRGPKIDREKLLRYLVSFRHHNEFHEQCVERIFTDIQRFCHPEKLSVYARYTRRGGLDINPWRTNTDFIPATGRLVRQ

SEQ ID NO: 46691 - protein, 281 aa, Kosakonia radicincitans; identical to SEQ ID NO: 46688
  misc_feature (1)..(281): tr|A0A1V0LIJ5|A0A1V0LIJ5_9ENTR NADPH-dependent 7-cyano- 7-deazaguanine reductase OS=Kosakonia radicincitans DSM 16656 OX=1177180 GN=queF PE=3 SV=1

SEQ ID NO: 46692 - protein, 281 aa, Kosakonia radicincitans
  misc_feature (1)..(281): tr|A0A5C1PF10|A0A5C1PF10_9ENTR NADPH-dependent 7-cyano- 7-deazaguanine reductase OS=Kosakonia radicincitans OX= 283686 GN=queF PE=3 SV=1
MSSYDNHQALAGLTLGKTTDYRDTYDASLLQGVPRSLNRDPLGLTAGNLPFHGTDIWTLYELSWLNAKGLPQVAVGHVELDYASVNLVESKSFKLYLNSFNQTRFASWDEVRDTLQRDLSACAQGSVSVALYRIDELEGQPIAHFHGTCIDEQDIEIESYAFDAAWLTNAASGKVVDETLVSHLLKSNCLITHQPDWGSVQIQYRGPKIDREKLLRYLVSFRHHNEFHEQCVERIFTDIQRFCQPEKLSVYARYTRRGGLDINPWRTNTDFIPATGRLVRQ

SEQ ID NO: 46693 - protein, 281 aa, Kosakonia sp.
  misc_feature (1)..(281): tr|A0A3G9BPB6|A0A3G9BPB6_9ENTR NADPH-dependent 7-cyano- 7-deazaguanine reductase OS=Kosakonia sp. CCTCC M201809 2 OX=2492396 GN=queF PE=3 SV=1
MSSYDNHQALSGLTLGKTTDYRDTYDASLLQGVPRSLNRDPLGLKADNLPFHGADIWTLYELSWLNANGLPQVAVGQVELDYASLNLVESKSFKLYLNSFNQTRFASWDEVRSTLQRDLSACAQGAVSVTLYRVDELEGEPVARFAGLCIDDQDIAIDNYEFDAALLTDAASDEVVEETLVSHLLKSNCLITHQPDWGSVQIQYRGSQIDREKLLRYLVSFRHHNEFHEQCVERIFTDIQRFCQPESLSVYARYTRRGGLDINPWRSNTDFVPATGRLARQ

SEQ ID NO: 46694 - protein, 281 aa, Kosakonia sp.
  misc_feature (1)..(281): tr|A0A4R0HG94|A0A4R0HG94_9ENTR NADPH-dependent 7-cyano- 7-deazaguanine reductase OS=Kosakonia sp. WCHEs120001 O X=2529380 GN=queF PE=3 SV=1
MSSYDNHQALAGLTLGKTTDYRDTYDASLLQGVPRSLNRDPLGLKAESLPFRGADIWTLYELSWLNAKGLPQVAVGHVELDHASINLVESKSFKLYLNSFNQTRFASWQEVHDTLQRDLSACAQGHVSVVLYRIDELEGQPVAHFHGTCIDDQDIAIESYDFDAALLTDAASGKVVEETLVSHLLKSNCLITHQPDWGSVQIQYHGAKIDREKLLRYLVSFRHHNEFHEQCVERIFTDIQRFCQPEKLSVYARYTRRGGLDINPWRTNTDFVPATGRLVRQ

SEQ ID NO: 46695 - protein, 128 aa, Kosmotoga arenicorallina
  misc_feature (1)..(128): tr|A0A182C7N9|A0A182C7N9_9BACT NADPH-dependent 7-cyano- 7-deazaguanine reductase OS=Kosmotoga arenicorallina S3 04 OX=1453497 GN=queF PE=3 SV=1
MPEAEGKIFNFESKEKIRADFLEAVPFDGREEYVKIETEEFSAVCPFSGLPDIAKVTIEYYPEGGKIVELKSLKYYFISFRNVGVYQEEATKIIYEDLKKLLQTNRIKVTMVYNIRGGILTTTSMGTL

SEQ ID NO: 46696 - protein, 130 aa, Kosmotoga pacifica
  misc_feature (1)..(130): tr|A0A0G2ZD63|A0A0G2ZD63_9BACT NADPH-dependent 7-cyano- 7-deazaguanine reductase OS=Kosmotoga pacifica OX=13303 30 GN=queF PE=3 SV=1
MPKAEGKIFTFEGKDKIRADFLEAVPFDGPEEYIKIETDEFSAVCPFSGLPDIAKVTIEYYPEGGKIVELKSLKYYFISFRNVGVYQEEATKIVYEDLKKLLETNRIKVTMIYNIRGGILTTTSIGSLDK

SEQ ID NO: 46697 - protein, 156 aa, Kozakia baliensis
  misc_feature (1)..(156): tr|A0A1D8UXE7|A0A1D8UXE7_9PROT NADPH-dependent 7-cyano- 7-deazaguanine reductase OS=Kozakia baliensis OX=153496 GN=queF PE=3 SV=1
MTTSQNDLDALSQLGKHAVPPDSPEKATLERVPSPHRGRQYVVRFTAPEFTSLCPVTGQPDFAHIVIDYIPNEWIVESKSLKLYLTSFRNHGAFHEDCSVTIATKLVEVLSPVWLRIGAYWYPRGGIPIDVFWQTGAPPENVWIPAQDVPGYRGRG

SEQ ID NO: 46698 - protein, 156 aa, Krasilnikovia cinnamomea
  misc_feature (1)..(156): tr|A0A4Q7ZIL8|A0A4Q7ZIL8_9ACTN NADPH-dependent 7-cyano- 7-deazaguanine reductase OS=Krasilnikovia cinnamomea OX =349313 GN=queF PE=3 SV=1
MSDIKNLTLLGAASTSYTYEEPASNQLETFDYQSSATQAVGFITSEFTSLCPKTGQPDFARIEIVYVPRRRGIESKSLKLYLFRYRNHGAFHEDCISKILRDVVEAIEPWYIKVIGDFTPRGGIAIKPVSVFYAPTANRNEIDTTIRNYHQATFNR

SEQ ID NO: 46699 - protein, 139 aa, Kroppenstedtia eburnea; identical to SEQ ID NO: 45617
  misc_feature (1)..(139): tr|A0A1N7Q267|A0A1N7Q267_9BACL NADPH-dependent 7-cyano- 7-deazaguanine reductase OS=Kroppenstedtia eburnea OX=7 14067 GN=queF PE=3 SV=1

SEQ ID NO: 46700 - protein, 147 aa, Ktedonobacter racemifer
  misc_feature (1)..(147): tr|D6TZN5|D6TZN5_9CHLR NADPH-dependent 7-cyano-7-deazag uanine reductase OS=Ktedonobacter racemifer DSM 44963 O X=485913 GN=queF PE=3 SV=1
MENEQQRVPGRYGFDEIKSNRLEPWPNAYPESKYVVHFEIPEFTCLCPRSGFPDFATIIIDYVPGPSVVELKSLKLYINSYRERQISHEASANEILNDLVTLLSPRWMRVVGDFTVRGNIKTIIFAEHEESGYNGPRPEYRRYQQYV

SEQ ID NO: 46701 - protein, 146 aa, Ktedonobacter sp.
  misc_feature (1)..(146): tr|A0A1Q6YXP9|A0A1Q6YXP9_9CHLR NADPH-dependent 7-cyano- 7-deazaguanine reductase OS=Ktedonobacter sp. 13_2_20CM _53_11 OX=1805233 GN=queF PE=3 SV=1
MDEQHNRIPGRYGRDEIEESQLEIWPNAYPERDYVIHLEIPEFTCLCPRSGFPDFATITADYVPDQQVVELKSLKLYINTYRNRQISHETAANTILNDLVALLSPRWMRVVADFTVRGNIKTIIFAEHSTSGYQGPHPEYRRYFSG

SEQ ID NO: 46702 - protein, 146 aa, Ktedonobacter sp.; identical to SEQ ID NO: 46701
  misc_feature (1)..(146): tr|A0A1Q7UR64|A0A1Q7UR64_9CHLR NADPH-dependent 7-cyano- 7-deazaguanine reductase OS=Ktedonobacter sp. 13_1_20CM _4_53_11 OX=1805225 GN=queF PE=3 SV=1

SEQ ID NO: 46703 - protein, 146 aa, Ktedonobacterales bacterium
  misc_feature (1)..(146): tr|A0A4V0Z0G7|A0A4V0Z0G7_9CHLR NADPH-dependent 7-cyano- 7-deazaguanine reductase OS=Ktedonobacterales bacterium SCAWS-G2 OX=2509675 GN=queF PE=3 SV=1
MQESERVMGSYGLEEIKANKLEPWPNPHPERDYVTHFEIPEFTCLCPRSGFPDFATIVIDYVPGPSVVELKSLKLYINGYRNRQISHEDATNVILDDLVALLSPRWMRVVGDFTVRGNIKTVIFTEYAQPDYQGPRPEYRRYLTAL

SEQ ID NO: 46704 - protein, 166 aa, Kurthia sp.
  misc_feature (1)..(166): tr|A0A433RXN4|A0A433RXN4_9BACL NADPH-dependent 7-cyano- 7-deazaguanine reductase OS=Kurthia sp. 3B1D OX=1562256 GN=queF PE=3 SV=1
MTQRTDEQGLSDLTLLGNQHTNYAFNYAPEVLEAVDNLHAERDFFVKFNCPEFTSLCPMTKQPDFATVYISYIPDKKMVESKSLKLYLFSFRNHGDFHEDCMNKIMDDLINLLEPRYIEVWGKFTPRGGLSIDPWCNYGRPGTKYEDMAMHRLMNHDMYPEKVDNR

SEQ ID NO: 46705 - protein, 274 aa, Kushneria avicenniae
  misc_feature (1)..(274): tr|A0A1I1IQS3|A0A1I1IQS3_9GAMM NADPH-dependent 7-cyano- 7-deazaguanine reductase OS=Kushneria avicenniae OX=402 385 GN=queF PE=3 SV=1
MSDDLKDAPLGQASAYITEYDPSLLYPIARNINRASLDLDEDDLPFEGEDEWQAFELSWLTPTGKPVVAIARFRVPADSMNLIESKSWKLYLNSFNQTRFASSVEVRRVLRQDLSRVVDAEVEVTLFGVDDMALAPGRLPGLCLDDLEVEVDTYQPDPELIITDSEIVEETVHSHLLKSNCPVTGQPDWGSVLIRYRGPALDHHALLAYIISFREHQEFHEHCVERMFMDILREAEPDQLLVMARYVRRGGLDISPWRALPGETPIKTLRLMRQ

SEQ ID NO: 46706 - protein, 274 aa, Kushneria indalinina
  misc_feature (1)..(274): tr|A0A3D9DUN3|A0A3D9DUN3_9GAMM NADPH-dependent 7-cyano- 7-deazaguanine reductase OS=Kushneria indalinina DSM 14 324 OX=1122140 GN=queF PE=3 SV=1
MSDDLKDAPLGHTSAYITEYDPSLLYPIARSANRASLDLDEDDLPFEGEDEWQAFELSWLTPTGKPVVAIARFRVPADSTWLIESKSWKLYLNSFNQTRFASSVEVRRVLRQDLSRVVDAEVEVTLFGVDDMALAPGRLPGLCLDDLEVEVDTYQPDPELIITDNEIVEETVHSHLLKSNCPVTGQPDWGSVLIRYRGPALDHHALLAYIISFREHQEFHEHCVERMFMDILREAEPDQLLVMARYVRRGGLDISPWRSLPGETPIKTLRLMRQ

SEQ ID NO: 46707 - protein, 274 aa, Kushneria konosiri
  misc_feature (1)..(274): tr|A0A2Z2HE88|A0A2Z2HE88_9GAMM NADPH-dependent 7-cyano- 7-deazaguanine reductase OS=Kushneria konosiri OX=69882 8 GN=queF PE=3 SV=1
MSDDLKDAPLGQTSAYITEYDPTLLYPIARSANRASLDLDEDDLPFEGEDEWQAFELSWLTPTGKPVVAIARFRVPASSTYLIESKSWKLYLNSFNQTRFASSVEVRRVLRQDLSQVVDAEVEVTLFGVDDMALAPGRLPGICLDDLEVEVDTYQPDPELIITDNEIVEETVHSHLLKSNCPVTGQPDWGSVLIRYRGPALDHHALLAYIISFREHQEFHEHCVERMFMDILREAEPDQLLVMARYVRRGGLDISPWRAMPGETPIKTLRLMRQ

SEQ ID NO: 46708 - protein, 274 aa, Kushneria marisflavi
  misc_feature (1)..(274): tr|A0A240USN5|A0A240USN5_9GAMM NADPH-dependent 7-cyano- 7-deazaguanine reductase OS=Kushneria marisflavi OX=157 779 GN=queF PE=3 SV=1
MSDDLKDAPLGQTSAYITEYDPTLLYPIARSVNRASLDLDEDDLPFEGEDEWQAFELSWLTPTGKPVVAIARFRVPASSTHLIESKSWKLYLNSFNQTRFASSVEVRRVLRQDLSRVVDAEVEVTLFGVDDMALAPGRLPGICLDDLDVEVDTYQPDPELIITDNEIIEETVHSHLLKSNCPVTGQPDWGSVLIRYRGPALDHHALLAYIISFREHQEFHEHCVERMFMDILREAEPDQLLVMARYVRRGGLDISPWRAMPGETPIKTLRLMRQ

SEQ ID NO: 46709 - protein, 274 aa, Kushneria phyllosphaerae
  misc_feature (1)..(274): tr|A0A2R8CNU3|A0A2R8CNU3_9GAMM NADPH-dependent 7-cyano- 7-deazaguanine reductase OS=Kushneria phyllosphaerae OX =2100822 GN=queF PE=3 SV=1
MSDDLKDAPLGQTSAYITEYDPSLLFPIARSVNRASLDLDEDDLPFEGEDEWQAFELSWLTPTGKPVVAIARFRVPASSTHLIESKSWKLYLNSFNQTRFASSVEVRRVLRQDLSRVVDAEVEVTLFGVDDMALAPGRLPGLCLDDLEVEVDTYQPDPELIITDNEIVEETVHSHLLKSNCPVTGQPDWGSVLIRYRGPALDHHALLAYIISFREHQEFHEHCVERMFMDILREAEPDQLLVMARYVRRGGLDISPWRALPGETPIKTLRLMRQ

SEQ ID NO: 46710 - protein, 275 aa, Kushneria sinocarnis
  misc_feature (1)..(275): tr|A0A420WTF4|A0A420WTF4_9GAMM NADPH-dependent 7-cyano- 7-deazaguanine reductase OS=Kushneria sinocarnis OX=595 502 GN=queF PE=3 SV=1
MSDELLDGAPLGQASAYPDHYDAALLYAIDRATTREALDIDEDELPFEGEDEWQAFELSWLEPRGKPVVAIARFRVPAESPRLIESKSWKLYLNSFNQQRFASSVEVRRTLKRDLTEATGAEVEVTLFGVDDAALAPARLPGRCLDELDIEIDTFTPEPSFLITGDEVVEETLHSHLLKSNCPVTGQPDWGSVLIRYRGPVLDHHGLLAYIVSFRNHQDFHEHCVERMFTDIMREANPERLLVMARYVRRGGLDINPWRATPGEQPPETLRLTRQ

SEQ ID NO: 46711 - protein, 275 aa, Kushneria sp.
  misc_feature (1)..(275): tr|A0A1S1NUQ2|A0A1S1NUQ2_9GAMM NADPH-dependent 7-cyano- 7-deazaguanine reductase OS=Kushneria sp. YCWA18 OX=657 387 GN=queF PE=3 SV=1
MSDELLEGAPLGQSSAYPDHYDPALLYPIERAVTRETLDIDEDELPFEGEDEWQAFELSWLEPRGKPVVAIARFRVPAESPRLIESKSWKLYLNSFNQQRFASSVEVRRALKRDLSEAAGAEVEVTLFGVDDAALAPARMPGQCLDELDIEIDTFTPEPAFLITGDEVVEETLHSHLLKSNCPVTGQPDWGSVLIRYRGPVLDHHGLLAYIVSFRNHQDFHEHCVERMFTDIMREANPERLLVMARYVRRGGLDINPWRATPGEQPPEALRLTRQ

SEQ ID NO: 46712 - protein, 141 aa, Kyrpidia spormannii
  misc_feature (1)..(141): tr|A0A2K8N868|A0A2K8N868_9BACL NADPH-dependent 7-cyano- 7-deazaguanine reductase OS=Kyrpidia spormannii OX=2055 160 GN=queF PE=3 SV=1
MSTTPSKELEVVPNPHPDRDYEVRIECPEFTALCPKTGQPDFAVIYFRYIPGPSIVELKSLKLYLWSFRDEGHFHEDVTNRILKDFVAAAQPRWLEVIGEFNVRGGIYTTVRAVYQDPGWTPDPSVAQSLAAPAWPRRRSG

SEQ ID NO: 46713 - protein, 141 aa, Kyrpidia tusciae
  misc_feature (1)..(141): tr|D5WSL9|D5WSL9_KYRT2 NADPH-dependent 7-cyano-7-deazag uanine reductase OS=Kyrpidia tusciae (strain DSM 2912 / NBRC 15312 / T2) OX=562970 GN=queF PE=3 SV=1
MSTKPSKELEVVPNPHPDRDYEVRIECPEFTALCPKTGQPDFAVIYFRYIPGPWIVELKSLKLYLWSFRDEGHFHEDVTNRILKDFVTAAQPRWLEVIGEFNVRGGIYTTVRAVYQDPGWTPDPSVAQSLVAPAWPRRRSG

SEQ ID NO: 46714 - protein, 155 aa, Labrenzia aggregata
  misc_feature (1)..(155): tr|A0NZ72|A0NZ72_LABAI NADPH-dependent 7-cyano-7-deazag uanine reductase OS=Labrenzia aggregata (strain ATCC 25 650 / DSM 13394 / JCM 20685 / NBRC 16684 / NCIMB 2208 / IAM 12614) OX=384765 GN=queF PE=3 SV=1
MSDKSIYENLTQLGSSTELPDDPDKAVLEKVPNPQAGTGYMVRFVAPEFTSLCPITGAPDFAHLVIDYVPRDFLVESKSLKLFLGSFRNHGAFHEDCTVSIGKRLVDLLDPEWLRIGGYWYPRGGIPIDVFYQTGPAPDGVWIPDQGVAPYRGRG

SEQ ID NO: 46715 - protein, 155 aa, Labrenzia aggregata
  misc_feature (1)..(155): tr|A0A0M6Y8Z9|A0A0M6Y8Z9_9RHOB NADPH-dependent 7-cyano- 7-deazaguanine reductase OS=Labrenzia aggregata OX=1873 04 GN=queF PE=3 SV=1
MSDKSIYKNLTQLGSSTELPDDPDKAVLEKVPNPQAGTGYMVRFVAPEFTSLCPITGAPDFAHLVIDYVPRDFLVESKSLKLFLGSFRNHGAFHEDCTVSIGKRLVDLLDPEWLRIGGYWYPRGGIPIDVFYQTGPAPDGVWIPDQGVAPYRGRG

SEQ ID NO: 46716 - protein, 155 aa, Labrenzia alba
  misc_feature (1)..(155): tr|A0A0M6ZVC0|A0A0M6ZVC0_9RHOB NADPH-dependent 7-cyano- 7-deazaguanine reductase OS=Labrenzia alba OX=311410 GN =queF PE=3 SV=1
MSDKSIYENLTQLGASTDLPGDPDEAVLEKVPNPQAGTGYMVRFVAPEFTSLCPITGAPDFAHLVIDYVPEEFLVESKSLKLFLGSFRNHGAFHEDCTVSIGKRLVDLLDPQWLRIGGYWYPRGGIPIDVFYQTGPAPDGVWIPDQGVQSYRGRG

SEQ ID NO: 46717 - protein, 155 aa, Labrenzia alba
  misc_feature (1)..(155): tr|A0A0M6Z2E0|A0A0M6Z2E0_9RHOB NADPH-dependent 7-cyano- 7-deazaguanine reductase OS=Labrenzia alba OX=311410 GN =queF PE=3 SV=1
MSDKSIYENLTQLGTSTELPDDPEKAVLEKVPNPQAGTKYMVRLAAPEFTSLCPITGAPDFAHLVIDYVPKDFLVESKSLKLFLGSFRNHGAFHEDCTVSIGKRLVDLLDPEWLRIGGYWYPRGGIPIDVFYQTGPAPDGVWIPEQGVAPYRGRG

SEQ ID NO: 46718 - protein, 155 aa, Labrenzia alexandrii
  misc_feature (1)..(155): tr|A0A5E8GTH7|A0A5E8GTH7_LABAD NADPH-dependent 7-cyano- 7-deazaguanine reductase OS=Labrenzia alexandrii (strai n DSM 17067 / NCIMB 14079 / DFL-11) OX=244592 GN=queF P E=3 SV=1
MSDKSIYENLTQLGASTELPDSPENAVLEKVPNPQAGTKYMVRFVSPEFTSLCPLTSAPDFAHLVIDYVPKDFLVESKSLKLFLGSFRNHGAFHEDCTVSIGKRLVDLLDPEWLRIGGYWYPRGGIPIDVFYQTGPAPEEVWIPEQGVQPYRGRG

SEQ ID NO: 46719 - protein, 155 aa, Labrenzia alexandrii
  misc_feature (1)..(155): tr|A0A0M7AJV4|A0A0M7AJV4_9RHOB NADPH-dependent 7-cyano- 7-deazaguanine reductase OS=Labrenzia alexandrii OX=388 408 GN=queF PE=3 SV=1
MSDKSIYENLTQLGASTELPDSPENAVLEKVPNPQAGTKYMVRFVAPEFTSLCPLTSAPDFAHLVIDYVPKDFLVESKSLKLFLGSFRNHGAFHEDCTVSIGKRLVDLLDPEWLRIGGYWYPRGGIPIDVFYQTGPAPEEVWIPEQGVQPYRGRG

SEQ ID NO: 46720 - protein, 154 aa, Labrenzia sp.
  misc_feature (1)..(154): tr|A0A163TYY1|A0A163TYY1_9RHOB NADPH-dependent 7-cyano- 7-deazaguanine reductase OS=Labrenzia sp. OB1 OX=156120 4 GN=queF PE=3 SV=1
MSEDIYSNLKQLGGETRIPESPEAAELERVPNPQADVAYNVRFTAPEFTSLCPMTGQPDFAHLVIDYVPGSWLVESKSLKLFLTSFRNHGAFHEDCTISIARRLADFLDPQWLRIGGYWYPRGGIPIDVFWQTGPMPDGVWIPDQGVPPYRGRG

SEQ ID NO: 46721 - protein, 155 aa, Labrenzia sp.; identical to SEQ ID NO: 46714
  misc_feature (1)..(155): tr|U7FQI4|U7FQI4_9RHOB NADPH-dependent 7-cyano-7-deazag uanine reductase OS=Labrenzia sp. C1B10 OX=1397530 GN=q ueF PE=3 SV=1

SEQ ID NO: 46722 - protein, 155 aa, Labrenzia suaedae
  misc_feature (1)..(155): tr|A0A1M7N4N3|A0A1M7N4N3_9RHOB NADPH-dependent 7-cyano- 7-deazaguanine reductase OS=Labrenzia suaedae OX=735517 GN=queF PE=3 SV=1
MSDKSIYENLTQLGSSTALPQTPEDAVLEKVPNPQAGTGYMVRFVAPEFTSLCPITGAPDFAHLVIDYVPGDFLVESKSLKLFLGSFRNHGAFHEDCTVSIGKRLVDLLNPQWLRIGGYWYPRGGIPIDVFYQTGPAPEGVWIPDQGVPPYRGRG

SEQ ID NO: 46723 - protein, 153 aa, Labrys neptuniae
  misc_feature (1)..(153): tr|A0A5C1WPI7|A0A5C1WPI7_9RHIZ NADPH-dependent 7-cyano- 7-deazaguanine reductase OS=Labrys neptuniae OX=376174 GN=queF PE=3 SV=1
MQSFDPSTLQLGSDSKIPASPEEARLDRVPNPQADTLYLARFTCPEFTSLCPVTGQPDFAHLVIDYAPKDWLVESKSLKLYLTSFRNHGAFHEDCTVAVGRRLVELLEPHWLRIGGYWYPRGGIPIDVFWQTGKPPEELWLPDQGVPTYRGRG

SEQ ID NO: 46724 - protein, 153 aa, Labrys okinawensis
  misc_feature (1)..(153): tr|A0A2S9QBK8|A0A2S9QBK8_9RHIZ NADPH-dependent 7-cyano- 7-deazaguanine reductase OS=Labrys okinawensis OX=34691 1 GN=queF PE=3 SV=1
MPSFDPSTLQLGSESKIPSSPEEARLDRVPNPQADTLYLARFTCPEFTSLCPVTGQPDFAHLVIDYAPKDWLVESKSLKLYLTSFRNHGAFHEDCTVAVGRRLVDLLEPRWLRIGGYWYPRGGIPIDVFWQTGKPPEELWLPDQGVPSYRGRG

SEQ ID NO: 46725 - protein, 162 aa, Laceyella sacchari
  misc_feature (1)..(162): tr|A0A4R4AI93|A0A4R4AI93_LACSH NADPH-dependent 7-cyano- 7-deazaguanine reductase OS=Laceyella sacchari OX=37482 GN=queF PE=3 SV=1
MSEKRQELQLHALGAKTDYVFQYNPDVLETFDNKHPGTDYFVKFNCPEFTSLCPITNQPDFATIYISYVPDQKLVESKSLKLYLFSYRNHGDFHENCIVTIMKDLIEKMDPKYIEVWGKFLPRGGISIDPYANYGKPGTRWERIAEQRLAQHDLYPERVDNR

SEQ ID NO: 46726 - protein, 162 aa, Laceyella sacchari
  misc_feature (1)..(162): tr|A0A2I7SV42|A0A2I7SV42_LACSH NADPH-dependent 7-cyano- 7-deazaguanine reductase OS=Laceyella sacchari OX=37482 GN=queF PE=3 SV=1
MSEKRQELQLHALGAKTDYVFQYNPDVLETFDNKHPDTDYFVKFNCPEFTSLCPITNQPDFATIYISYVPDQKLVESKSLKLYLFSYRNHGDFHENCIVTIMKDLIKKMDPKYIEVWGKFLPRGGISIDPYANYGKPGTRWERIAEQRLAQHDLYPERVDNR

SEQ ID NO: 46727 - protein, 162 aa, Laceyella sediminis; identical to SEQ ID NO: 46725
  misc_feature (1)..(162): tr|A0A2T0YHU3|A0A2T0YHU3_9BACL NADPH-dependent 7-cyano- 7-deazaguanine reductase OS=Laceyella sediminis OX=5730 74 GN=queF PE=3 SV=1

SEQ ID NO: 46728 - protein, 166 aa, Lachnobacterium bovis
  misc_feature (1)..(166): tr|A0A1H3LQT3|A0A1H3LQT3_9FIRM NADPH-dependent 7-cyano- 7-deazaguanine reductase OS=Lachnobacterium bovis DSM 1 4045 OX=1122142 GN=queF PE=3 SV=1
MSTLRKKEEMKDVTLLGNKNVKYAMDYAPEVLETFDNKHPENDYFVKFNCPEFTSLCPITSQPDFATIYISYVPDKKMVESKSLKLYLFSFRNHGDFHEDCMNIIMKDLIKLMDPKYIEVWGKFTPRGGISIDPYCNYGKKGTVWEKVAFDRLVNHDMYPEKVDNR

SEQ ID NO: 46729 - protein, 166 aa, Lachnobacterium bovis
  misc_feature (1)..(166): tr|A0A1H9UNB0|A0A1H9UNB0_9FIRM NADPH-dependent 7-cyano- 7-deazaguanine reductase OS=Lachnobacterium bovis OX=14 0626 GN=queF PE=3 SV=1
MSSSRKKEEMKDVTLLGNRNVKYAMDYAPEVLETFDNKHPENDYFVKFNCPEFTSLCPITSQPDFATIYISYVPDKKMVESKSLKLYLFSFRNHGDFHEDCMNIIMKDLVKLMDPKYIEVWGKFTPRGGISIDPYCNYGKKGTVWEKVAFDRLVNHDLYPEKIDNR

SEQ ID NO: 46730 - protein, 165 aa, Lachnoclostridium sp.
  misc_feature (1)..(165): tr|A0A1Y4NKU8|A0A1Y4NKU8_9FIRM NADPH-dependent 7-cyano- 7-deazaguanine reductase OS=Lachnoclostridium sp. An169 OX=1965569 GN=queF PE=3 SV=1
MSGRSKEELSGVSLLGNQKVSYPMDYAPEMLETFPNKHPENDYFVKFNCPEFTSLCPMTGQPDFATIYISYVPGERMVESKSLKLYLFSFRNHGDFHEDCVNIIMKDLIRLMDPKYIEVWGKFTPRGGISIDPYCNYGKPGTCWEKVAFERLTHHDLYPEKVDNR

SEQ ID NO: 46731 - protein, 160 aa, Lachnoclostridium sp.
  misc_feature (1)..(160): tr|A0A3B9K4F7|A0A3B9K4F7_9FIRM NADPH-dependent 7-cyano- 7-deazaguanine reductase OS=Lachnoclostridium sp. OX=20 28282 GN=queF PE=3 SV=1
MRENEGLTKLGTHQTSYKMDYAPEVLETFSNKHPDNDYFVKFNCPEFTSLCPITGQPDFATIYISYVPGERMVESKSLKLYLFSFRNHGDFHEDVVNIIMKDLIKLMDPKYIEVWGKFLPRGGLSIDPYCNYGKPGTKWEDVAWERLKSHDLYPERVDNR

SEQ ID NO: 46732 - protein, 166 aa, Lachnospira multipara
  misc_feature (1)..(166): tr|A0A1H5UEA9|A0A1H5UEA9_9FIRM NADPH-dependent 7-cyano- 7-deazaguanine reductase OS=Lachnospira multipara OX=28 051 GN=queF PE=3 SV=1
MSTTRKPEERENVTLLGQAGVKYKSDYAPEVLETFVNKHPGNDYFVKFNCPEFTSLCPITGQPDFATIYISYVPGELMVESKSLKLYLFSFRNHGDFHEDCVNIIMKDLIKLMDPKYIEVWGKFTPRGGISIDPYCNYGKKGTKWEEVAFDRLTHHDMYPEKVDNR

SEQ ID NO: 46733 - protein, 160 aa, Lachnospira pectinoschiza
  misc_feature (1)..(160): tr|A0A174YRM5|A0A174YRM5_9FIRM NADPH-dependent 7-cyano- 7-deazaguanine reductase OS=Lachnospira pectinoschiza O X=28052 GN=queF PE=3 SV=1
MSREDEGLKQLGNKTKYSMDYAPGVLETFENKHPDNDYFVKFNCPEFTSLCPITGQPDFATIYISYIPDKLMVESKSLKLYLFSFRNHGDFHEDCVNIIMKDLIRLMQPRYIEVWGKFTPRGGISIDPYCNYGKEGTAFEDMAKQRLLWHDMNPEKVDNR

SEQ ID NO: 46734 - protein, 166 aa, Lachnospira pectinoschiza; identical to SEQ ID NO: 46732
  misc_feature (1)..(166): tr|A0A1G9WWE2|A0A1G9WWE2_9FIRM NADPH-dependent 7-cyano- 7-deazaguanine reductase OS=Lachnospira pectinoschiza O X=28052 GN=queF PE=3 SV=1

SEQ ID NO: 46735 - protein, 164 aa, Lachnospiraceae bacterium
  misc_feature (1)..(164): tr|A0A1H2V064|A0A1H2V064_9FIRM NADPH-dependent 7-cyano- 7-deazaguanine reductase OS=Lachnospiraceae bacterium K HCPX20 OX=1855375 GN=queF PE=3 SV=1
MESDKRERGSLTQLGSQGTKYATDYDPSLLESFDNKHPGNDYFVKFNCPEFTSLCPITGQPDFATIYISYVPDVKMVESKSLKLYLFSFRNHGDFHEDCVNKIMKDLIALMDPKYIEVWGKFTPRGGISIDPYCNYGKKGTKWEEVAFDRLAHHDMYPEKVDNR

SEQ ID NO: 46736 - protein, 156 aa, Lachnospiraceae bacterium; identical to SEQ ID NO: 45768
  misc_feature (1)..(156): tr|R9J5B5|R9J5B5_9FIRM NADPH-dependent 7-cyano-7-deazag uanine reductase OS=Lachnospiraceae bacterium 3-1 OX=39 7288 GN=queF PE=3 SV=1

SEQ ID NO: 46737 - protein, 165 aa, Lachnotalea glycerini
  misc_feature (1)..(165): tr|A0A255M7V5|A0A255M7V5_9FIRM NADPH-dependent 7-cyano- 7-deazaguanine reductase OS=Lachnotalea glycerini OX=17 63509 GN=queF PE=3 SV=1
MTGRIKEETTGITHLGNQGTKYQMDYNPSVLETFVNKHQENDYFVKFNCPEFTSLCPITGQPDFASIAISYVPNVRMVESKSLKLYLFSFRNHGDFHEDCINIIMKDLIALMEPKYIEVWGRFTPRGGISIDPYCNYGQAATKWEEIAFKRLAYHDLNTNKTDII

SEQ ID NO: 46738 - protein, 278 aa, Lacimicrobium alkaliphilum
  misc_feature (1)..(278): tr|A0A0U3AIB5|A0A0U3AIB5_9ALTE NADPH-dependent 7-cyano- 7-deazaguanine reductase OS=Lacimicrobium alkaliphilum OX=1526571 GN=queF PE=3 SV=1
MTDAHTPASLTHLSLGKTSEYIDQYSPQLLQPVPRSLNREELGIVQRQPFTGVDIWNGYELSWLNPKGKPCVAVLQAYVPASSPNLIESKSFKLYLNSFNQWKVRDSEELQQILIQDLSQCAGADVEVKLYSLDDIQAFQIHAGEGELLDNLDIEVDQYHPEPGILQCGDSVVQRQHISHLLKSNCLITQQPDWGSVSIHYQGREIFADSLLRYLITFRQHNEFHEQCVERIFCDILRQCQPEKLSVYARYTRRGGLDISPFRSNFEANPQFERLIRQ

SEQ ID NO: 46739 - protein, 174 aa, Lactobacillus aquaticus
  misc_feature (1)..(174): tr|A0A0R2CVS4|A0A0R2CVS4_9LACO NADPH-dependent 7-cyano- 7-deazaguanine reductase OS=Lactobacillus aquaticus DSM 21051 OX=1423725 GN=queF PE=3 SV=1
MKNIHHSRTSNELAGVTELGSNETHYSSDYDPSVLETFVNKHPQNDYLVTFDGYEFTSLCPKTGQPDFANVFISYIPTEKMVESKSLKLYLFSFRNHGDFHEDCMNIILDDLYKLMNPKYIEVLGLFTPRGGISIYPFVNRVNPDFETEELRNLAFQRKLNFLGNIQNYGRAIR

SEQ ID NO: 46740 - protein, 174 aa, Lactobacillus capillatus
  misc_feature (1)..(174): tr|A0A0R1MGU7|A0A0R1MGU7_9LACO NADPH-dependent 7-cyano- 7-deazaguanine reductase OS=Lactobacillus capillatus DS M 19910 OX=1423731 GN=queF PE=3 SV=1
MENKHHSRTANELTGVTELGSTETKYATDYDPSVLETFINKHPQNDYLVTFDGYEFTSLCPKTGQPDFANVFISYIPTEKMVESKSLKLYLFSFRNHGDFHEDCMNIILDDLYKLMNPKYIEVLGLFTPRGGISIYPFVNRVNPTFKTAELQQLAFQRKLQFLGNVQSYGRSIR

SEQ ID NO: 46741 - protein, 175 aa, Lactobacillus hordei
  misc_feature (1)..(175): tr|A0A0R1MQA1|A0A0R1MQA1_9LACO NADPH-dependent 7-cyano- 7-deazaguanine reductase OS=Lactobacillus hordei DSM 19 519 OX=1423759 GN=queF PE=3 SV=1
MNKTTSPSRKPSELEGVTQLGNQHTSYPQDYTPQVLETFINKHPENDYLVTFDGYEFTSLCPKTGQPDFANVFISYIPTEKMVESKSLKLYLFSFRNHGDFHEDCMNIILNDLYKLMNPKYIEVFGLFTPRGGISIYPFVNRVNPSFSNNEIEQLAFQRKLQFLGNIQNYGRSIR

SEQ ID NO: 46742 - protein, 175 aa, Lactobacillus hordei
  misc_feature (1)..(175): tr|A0A3S6QVR3|A0A3S6QVR3_9LACO NADPH-dependent 7-cyano- 7-deazaguanine reductase OS=Lactobacillus hordei OX=468 911 GN=queF PE=3 SV=1
MNKTTSPSRKPSELEGVTQLGNQHTSYPQDYTPQVLETFINKHPENDYLVTFDGYEFTSLCPKTGQPDFANVFISYIPTEKMVESKSLKLYLFSFRNHGDFHEDCMNIILDDLYKLMNPKYIEVFGLFTPRGGISIYPFVNRVNPSFSNNEIEQLAFQRKLQFLGNIQNYGRSIR

SEQ ID NO: 46743 - protein, 175 aa, Lactobacillus mali
  misc_feature (1)..(175): tr|J0L2Z3|J0L2Z3_9LACO NADPH-dependent 7-cyano-7-deazag uanine reductase OS=Lactobacillus mali KCTC 3596 = DSM 20444 OX=1046596 GN=queF PE=3 SV=1
MNKTTSPSRMPSEMEDITQLGKQHTSYPQDYTPQVLETFINKHPENDYLVTFDGYEFTSLCPKTGQPDFANVFISYIPTEKMVESKSLKLYLFSFRNHGDFHEDCMNIILDDLYKLMNPKYIEVFGLFTPRGGISIYPFVNRVNPDFSNNEIEQLAFQRKLQFLGNIQNYGRSIR

SEQ ID NO: 46744 - protein, 175 aa, Lactobacillus mali; identical to SEQ ID NO: 46743
  misc_feature (1)..(175): tr|A0A0R2FHT8|A0A0R2FHT8_9LACO NADPH-dependent 7-cyano- 7-deazaguanine reductase OS=Lactobacillus mali OX=1618 GN=queF PE=3 SV=1

SEQ ID NO: 46745 - protein, 177 aa, Lactobacillus satsumensis
  misc_feature (1)..(177): tr|A0A0R1UV86|A0A0R1UV86_9LACO NADPH-dependent 7-cyano- 7-deazaguanine reductase OS=Lactobacillus satsumensis D SM 16230 = JCM 12392 OX=1423801 GN=queF PE=3 SV=1
MSKNTTTQSSRTKTEFGHVSHLGSTHTAYAADYDPTLLETFVNKHPENDYLVSFDAYEFTSLCPKTGQPDFAKVYLSYIPTQNMVESKSLKLYLFSFRNHGDFHEDCMNIILNDLYQLMNPKYIEVLGLFTPRGGISIYPFVNRVNPEFETPELKELAFQRKVNVLNQLPQYKNFVR

SEQ ID NO: 46746 - protein, 174 aa, Lactobacillus sucicola
  misc_feature (1)..(174): tr|A0A023CXK8|A0A023CXK8_9LACO NADPH-dependent 7-cyano- 7-deazaguanine reductase OS=Lactobacillus sucicola DSM 21376 = JCM 15457 OX=1423806 GN=queF PE=3 SV=1
MAHTHHSRTPNELAGVTELGCNKTQYPNDYDPSVLETFINKHPQNDYLVTFDGYEFTSLCPKTGQPDLANVFISYIPTEKMVESKSLKLYLFSFRNHGDFHEDCMNIILDDLYKLMNPKYIEVLGLFTPRGGISIYPFVNRVNPAFETEELRNLAFQRKLQFLSNVPSYGRAIR

SEQ ID NO: 46747 - protein, 174 aa, Lactobacillus uvarum
  misc_feature (1)..(174): tr|A0A0R1PWW6|A0A0R1PWW6_9LACO NADPH-dependent 7-cyano- 7-deazaguanine reductase OS=Lactobacillus uvarum DSM 19 971 OX=1423812 GN=queF PE=3 SV=1
MKKTHHSRTSNELAGVTELGSNETHYSDDYDPSVLETFVNKHPQNDYLVTFDGYEFTSLCPKTGQPDFANVFISYIPTEKMVESKSLKLYLFSFRNHGDFHEDCMNIILDDLYKLMNPKYIEVLGLFTPRGGISIYPFVNRVNPAFETEELSNLAFQRKLHFLGNVQSYGRAIR

SEQ ID NO: 46748 - protein, 176 aa, Lactobacillus vini
  misc_feature (1)..(176): tr|A0A0R2CD64|A0A0R2CD64_9LACO NADPH-dependent 7-cyano- 7-deazaguanine reductase OS=Lactobacillus vini DSM 2060 5 OX=1133569 GN=queF PE=3 SV=1
MQKFNSFTSRTPQEFGNVSQLGNKQTKYPQDYDPSVLETFVNKHPDHDYLVSFDAYEFTSLCPKTGQPDFAKVYLSYIPTQKMVESKSLKLYLFGFRNHGDFHEDCMNIILNDLNRLMDPKYIEVFGLFTPRGGISIYPFVNRVNPKYETDELKQLAFHRKLQFLNQLPTYKNAVR

SEQ ID NO: 46749 - protein, 117 aa, Lacunisphaera limnophila
  misc_feature (1)..(117): tr|A0A1D8AUP9|A0A1D8AUP9_9BACT NADPH-dependent 7-cyano- 7-deazaguanine reductase OS=Lacunisphaera limnophila OX =1838286 GN=queF PE=3 SV=1
MADKSILETFPNPAPKRDFLIEHTHHEFTSLCPMTGHPDFADITVRYVADKTCVELKSLKLYFHAYRNKGIFFEGATNQICDDIGAALKPRSLTIIANWKARGGFSSRVTCEWKKKR

SEQ ID NO: 46750 - protein, 117 aa, Lacunisphaera sp.
  misc_feature (1)..(117): tr|A0A4Q1C7V2|A0A4Q1C7V2_9BACT NADPH-dependent 7-cyano- 7-deazaguanine reductase OS=Lacunisphaera sp. TWA-58 OX =2508720 GN=queF PE=3 SV=1
MADPKILETFPNPAPHRDFLIEHTHHEFTSVCPMTGHPDFADITVSYVADKKCVELKSLKLYFHAFRNEGIFFEAVTNKICDDLGNALKPRSLKIISKWKARGGFSSVVTAEWKKKK

SEQ ID NO: 46751 - protein, 286 aa, Lampropedia cohaerens
  misc_feature (1)..(286): tr|A0A0U1Q172|A0A0U1Q172_9BURK NADPH-dependent 7-cyano- 7-deazaguanine reductase OS=Lampropedia cohaerens OX=16 10491 GN=queF PE=3 SV=1
MAAPTPTDAATVLGRDVSYPTQYDPTLLHPIPRLAARQQLGIGLQRLPFVGADTWTAFELSWLGPRGKPQVAIAQFTFPSETANIIESKSLKLYLNSLNHTRFEDAAAVRETLRRDLSEAAWRGSASSAAVGVRLIEPAEFAAEQVAELDGLDLDRLDVDCEDYLPQPQWLRSAAGEPAVTETLTSRLLKSNCPVTGQPDWASIQIRYHGAPIDQAGLLRYIVSFRNHTGFHENCVERIFVDIWQRCQPVHLAVYARYTRRGGLDINPFRANAPQALPLNRRTARQ

SEQ ID NO: 46752 - protein, 283 aa, Lampropedia hyalina
  misc_feature (1)..(283): tr|A0A1M5DC30|A0A1M5DC30_9BURK NADPH-dependent 7-cyano- 7-deazaguanine reductase OS=Lampropedia hyalina DSM 161 12 OX=1122156 GN=queF PE=3 SV=1
MSDPLHHAPLGKTTIYPSQYDPGLLCPIPRLAQRQALGIGLARLPFVGADFWTAFELSWLNPRGKPQVALAQFTFPCETPHIIESKSFKLYLNSFNQSVFENSEQVRECLRRDLGEAAWRGSDAGASIGVQLIDPAAFDQEAVQELDGLDLDRLDVECSRYEPAPELLRSHRDQAQVSETLTSRLLKSNCPVTGQPDWASLQIRYHGFPIDQACLLQYIVSYRNHNGFHEDCVERIFVDIWQRCQPSQLSVYARYTRRGGLDINPLRSSSPGRMPPSIRTARQ

SEQ ID NO: 46753 - protein, 284 aa, Lampropedia puyangensis
  misc_feature (1)..(284): tr|A0A4S8EXK5|A0A4S8EXK5_9BURK NADPH-dependent 7-cyano- 7-deazaguanine reductase OS=Lampropedia puyangensis OX= 1330072 GN=queF PE=3 SV=1
MPVTATDLPLGKEVAYPQTYQPQLLCPIPRLAQRQALGIGLDRLPFMGADVWTAFELSWLNARGKPQVAIAHLTFPCETPNIVESKSLKLYLNSLNNSVFADKAAVRDCIRKDLSEAAWRGSPLPTGSIGVRIIEPASFDAEPIHELSGLDLDRLDVECSHYTPQPNLLFSQQEQSHTTETLTSRLLKSNCPVTGQPDWASLQISYSGHPIDQAGLLQYIVSFRNHTGFHENCVEQIFIDIWQRCAPLELSVQARYTRRGGLDINPLRSSKPHALPANIRTARQ

SEQ ID NO: 46754 - protein, 293 aa, Lampropedia sp.
  misc_feature (1)..(293): tr|A0A4S5BKE2|A0A4S5BKE2_9BURK NADPH-dependent 7-cyano- 7-deazaguanine reductase OS=Lampropedia sp. YIM MLB12 O X=2562762 GN=queF PE=3 SV=1
MAAPHDSTGPAGASDASLPLGKDVAYPSSYQPDLLFPIPRQIQRDSLGVGTQRLPFVGADNWTAFELSWLNLRGKPQVALAHLTFPCETTNIVESKSLKLYLNSLNQARFADAAAVRDCLRKDLSEAAWRGSGQTSSIGVRVIEAEDFDAEPVQELSGLDLDRLDIECEHYTPRPDLLRSDHSRAHVSETLTSRLLKSNCPVTGQPDWASVQISYSGPPIDQASLLQYIVSFRNHTGFHENCVEQMFIDIWQRCAPLQLSIQARYTRRGGLDINPFRSSNPQTLPANIRTARQ

SEQ ID NO: 46755 - protein, 143 aa, Laribacter hongkongensis
  misc_feature (1)..(143): tr|A0A248LHY1|A0A248LHY1_9NEIS NADPH-dependent 7-cyano- 7-deazaguanine reductase OS=Laribacter hongkongensis OX =168471 GN=queF PE=3 SV=1
MNLHDELKSLGSGKTEYRYDQPDAALLERFPNPYNRPEINPNQVSGKLNITCPEFTSLCPITGQPDFATIVIDMEPAEWCVESKSLKLYLGSFRMHGEFHEACICRICNDLVNLLHPKWIRVEGRFTPRGGIPLWPVAEWNAA

SEQ ID NO: 46756 - protein, 143 aa, Laribacter hongkongensis
  misc_feature (1)..(143): tr|C1D6K7|C1D6K7_LARHH NADPH-dependent 7-cyano-7-deazag uanine reductase OS=Laribacter hongkongensis (strain HL HK9) OX=557598 GN=queF PE=3 SV=1
MNLHDELKSLGSGKTEYRYDQPDAALLERFPNPYNRPEINPNQVSGKLNITCPEFTSLCPITGQPDFAIIVIDMEPAEWCVESKSLKLYLGSFRMHGEFHEACICRICNDLVNLLHPKWIRVEGRFTPRGGIPLWPVAEWNAA

SEQ ID NO: 46757 - protein, 156 aa, Lautropia mirabilis
  misc_feature (1)..(156): tr|E7RZV6|E7RZV6_9BURK NADPH-dependent 7-cyano-7-deazag uanine reductase OS=Lautropia mirabilis ATCC 51599 OX=8 87898 GN=queF PE=3 SV=1
MRTPEDLQGITHLGSQKTQYRSDYAPEVLEAFDNKHPDNDYFVKFVCPEFTSLCPITGQPDFATIVIRYIPGQKMVESKSLKLYLFSFRNHGDFHEDCVNVIMKDLIKLMQPKYIEVFGEFTPRGGIAIHPFANHGQPGTSFEQLARERLFAYDRP

SEQ ID NO: 46758 - protein, 156 aa, Lautropia sp.
  misc_feature (1)..(156): tr|A0A426FM19|A0A426FM19_9BURK NADPH-dependent 7-cyano- 7-deazaguanine reductase OS=Lautropia sp. KCOM 2505 OX= 2490857 GN=queF PE=3 SV=1
MRTPSELHGITHLGSQGTEYRADYAPDVLEAFDNKHPDNDYFVKFVCPEFTGLCPITGQPDFATIIIRYIPAQKMVESKSLKLYLFSFRNHGDFHEDCINIIMKDLIALMDPKYIEVFGEFTPRGGIAIHPFANYGKPGTRFEELARERLFFHDQQ

SEQ ID NO: 46759 - protein, 142 aa, Lautropia sp.
  misc_feature (1)..(142): tr|A0A3B8R9E2|A0A3B8R9E2_9BURK NADPH-dependent 7-cyano- 7-deazaguanine reductase OS=Lautropia sp. OX=2053568 GN =queF PE=3 SV=1
MTSSRPSNKLDRFPNPQSARDYVIHMEIPEFTCLCPLTGQPDFAVFELDYIPNDWCVELKALKMFMWSYRDQGAFHEAVTNEILDALVALIAPRYMRLTSRWYVRGGIYTTIAAEHRKRGWKAPTPVALAPLKSEPVRPFSH

SEQ ID NO: 46760 - protein, 169 aa, Lawsonia intracellularis
  misc_feature (1)..(169): tr|Q1MS80|Q1MS80_LAWIP NADPH-dependent 7-cyano-7-deazag uanine reductase OS=Lawsonia intracellularis (strain PH E/MN1-00) OX=363253 GN=folE PE=3 SV=1
MTEITHSGDQTTHLKILGKGSIGHQGPPSSSLLETFGNLYPHRPYVITIAFPEYTSLCPVTGQPDFGTIVVEYIPHERCIESKSFKLYLIAFRNHQTFMETVTNTILEDMVTVLDPLWCRVKGLFEPRGATHLHVFAEHIKEVEEKEKQEALHTVIFNWKQQYLPHSWK

SEQ ID NO: 46761 - protein, 137 aa, Lebetimonas natsushimae
  misc_feature (1)..(137): tr|A0A292Y9P2|A0A292Y9P2_9PROT NADPH-dependent 7-cyano- 7-deazaguanine reductase OS=Lebetimonas natsushimae OX= 1936991 GN=queF PE=3 SV=1
MNELKYGEKEIIEFNPQNLEIWPNKNKKNYLIKITLPEFMCKCPRSGYPDFATVYLEYIPDEWVVELKALKLYINSFMNRYISHEDSANEIFDTLYNKLKPKYMKITMDFNPRGNVHTVIEIDSERIEKYENNGTKE

SEQ ID NO: 46762 - protein, 280 aa, Leclercia adecarboxylata
  misc_feature (1)..(280): tr|A0A4U9IGX7|A0A4U9IGX7_9ENTR NADPH-dependent 7-cyano- 7-deazaguanine reductase OS=Leclercia adecarboxylata OX =83655 GN=queF PE=3 SV=1
MSYENHDALSGLTLGKSTAYRDTYDASLLQGVPRSLNRDPLGLKADALPFHGGDIWTLYELSWLNARGLPQVAVGHVELDYTSVNLVESKSFKLYLNSFNQTRFDSWEAVQHTLERDLSACAQGKVTVALYRIDELEGQPIAHFHGTCIDEQDIEIDNYQFDTAWLENAASGKVVEETLVSHLLKSNCLITHQPDWGSVQIQYRGAKIDREKLLRYLVSFRNHNEFHEQCVERIFNDILQFCQPETLSVYARYTRRGGLDINPWRSNSDFVPAIGRLVRQ

SEQ ID NO: 46763 - protein, 280 aa, Leclercia adecarboxylata
  misc_feature (1)..(280): tr|A0A3E1ZSP2|A0A3E1ZSP2_9ENTR NADPH-dependent 7-cyano- 7-deazaguanine reductase OS=Leclercia adecarboxylata OX =83655 GN=queF PE=3 SV=1
MSYENHDALSGLTLGKSTAYRDTYDASLLQGVPRSLNRDPLGLKADALPFHGGDIWTLYELSWLNARGLPQVAVGHVELDYTSVNLVESKSFKLYLNSFNQTRFDSWEAVQRTLERDLSACAQGKVTVALYRIDELKGQPIAHFHGTCIDEQDIEIDNYQFDTAWLENAASGKVVEETLVSHLLKSNCLITHQPDWGSVQIQYRGAKIDREKLLRYLVSFRNHNEFHEQCVERIFNDILQFCQPETLSVYARYTRRGGLDINPWRSNSDFVPAIGRLVRQ

SEQ ID NO: 46764 - protein, 280 aa, Leclercia sp.
  misc_feature (1)..(280): tr|A0A345C6S3|A0A345C6S3_9ENTR NADPH-dependent 7-cyano- 7-deazaguanine reductase OS=Leclercia sp. W17 OX=228230 9 GN=queF PE=3 SV=1
MSYENHDALSGLTLGKSTAYRDIYDASLLQGVPRSLNRDPLGLKADALPFHGGDIWTLYELSWLNARGLPQVAVGHVELDYTSVNLVESKSFKLYLNSFNQTRFESWEAVQRTLERDLSACAQGKVTVALYRIDELEGQPIAHFHGTCIDDQDIEIDNYQFDTAWLEKSASGKVVEETLVSHLLKSNCLITHQPDWGSVQIQYRGAKIDREKLLRYLVSFRNHNEFHEQCVERIFNDILRFCQPESLSVYARYTRRGGLDINPWRSNTDFVPAIGRLVRQ

SEQ ID NO: 46765 - protein, 280 aa, Leclercia sp.; identical to SEQ ID NO: 45884
  misc_feature (1)..(280): tr|A0A0J6MHA5|A0A0J6MHA5_9ENTR NADPH-dependent 7-cyano- 7-deazaguanine reductase OS=Leclercia sp. LK8 OX=162821 0 GN=queF PE=3 SV=1

SEQ ID NO: 46766 - protein, 416 aa, Legionella adelaidensis
  misc_feature (1)..(416): tr|A0A0W0R4N7|A0A0W0R4N7_9GAMM NADPH-dependent 7-cyano- 7-deazaguanine reductase OS=Legionella adelaidensis OX= 45056 GN=queF PE=3 SV=1
MKYYKIKDISRVTALSVRSLQYYDDIGLLKPSLRTDAGYRLYSERDLIRLQQVVTLKFLGFSLTAIRKILEGPEFEVLNSMHIQAEALKEKAAHINEAARLTTYIASQLEAGEHVNWHSALQIVNILESNRMSEALEKRYQMKPEQSELGKSSNYDSQYNPERLFAIPREAKRKEIGVNPENLPFYGFDCWNHYEVSWLNAKGKPVVAIAEIIYDCSTPNLIESKSLKLYFNSFNNTHFKDSEELKLTVERDLSSRLGGEAHVRILSLKDEELATLQAAPSGECIDDLDVTCSIYLVEPAYLSVEDKKVEEILYSDLLKSNCLVTNQPDWGSVQIAYTGQKINREGLLKYLVSFRNHNEFHEQCIERIFVDIMNRCKPEKLTVYGRYTRRGGLDINPYRTTEKVNMQGLNYRLVRQ

SEQ ID NO: 46767 - protein, 416 aa, Legionella anisa
  misc_feature (1)..(416): tr|A0A2Z3KRK8|A0A2Z3KRK8_9GAMM NADPH-dependent 7-cyano- 7-deazaguanine reductase OS=Legionella anisa OX=28082 G N=queF PE=3 SV=1
MKYYQIKEISQMTSLTIRSLQYYDEIGLLKPTKRSMSGYRLYSETDLIRLQQITTLKFLGFSLSTIKKIMDNPHFDVMTSMGIQARELTEKAARINEAASLLTYISSQVEMNQAVNWKSTAKIIEILELNTMNDHVLQKYQSEAEQSELGKKSAYDETYNPDRLYPIPRAGKRQEIGVDPVQLPFYGFDCWNHYEVSWLNAKGKPMVAIAELFYDCSSPNLIESKSLKLYFNSFNNTRIQSVSELENTIKKDLQERVGAEVWVHVHLLEATTQFAAQQPLKGESLDDLDIECSIYLVEPSFLSVGDEIVEETLFSNLLKSNCLVTNQPDWGSVQITYKGKKINREGLLKYLVSYRNHNEFHEQCIERIFVDIMNYCMPEKLTVYGRYTRRGGLDINPYRSTEKTSFAGKNVRLVRQ

SEQ ID NO: 46768 - protein, 416 aa, Legionella beliardensis
  misc_feature (1)..(416): tr|A0A378I423|A0A378I423_9GAMM NADPH-dependent 7-cyano- 7-deazaguanine reductase OS=Legionella beliardensis OX= 91822 GN=queF PE=3 SV=1
MKYYQIKDISRRTSLTVRSLQYYDEIGLLKPSKRSAVGYRLYSEKDLLLLQQITTLKYLGFSLKQIKKIMSNPSFDVIKSLGIQAQELREQAAKINEAASLLDYIASQAEMKQPINWQSITKIIEILELNTMNNHVVNKYQMLHKESELGKKSDYDSTYNPSRLYPIPRAGKRQEIGIDPASLPFVGFDCWNHYEVSWLNEKGKPIVGIAEIIYDCNSPKLIESKSLKLYFNSFNNMKINSKLELESIIQNDLEKRIESEVLIKIYSLEEARQFTTIQPFTGESLDVLDVECSVYLVEPNFLSTSHELVEEILYSDLLKSNCLVTNQPDWGSVQIAYKGRKINREGLLKYLISFRNHNEFHEQCIERIFVDLMKYCKPEKLTVYGRYTRRGGLDINPYRSTEKTSINDKNFRLIRQ

SEQ ID NO: 46769 - protein, 285 aa, Legionella birminghamensis
  misc_feature (1)..(285): tr|A0A378IAS2|A0A378IAS2_9GAMM NADPH-dependent 7-cyano- 7-deazaguanine reductase OS=Legionella birminghamensis OX=28083 GN=queF PE=3 SV=1
MSLLLGKKYQSQPDESELGQSSQYDTHYNPDRLFAVSREGKRSEIGVDSSSLPFYGFDCWNHYEVSWLNEKGKPVVALAEIIYDCETPNIIESKSLKLYFNSFNNTRIKDSETLRQIVARDLSARIGGKVDVRILSLKDKELSFIQSMPAGECIDELDVTCSVYLVEPNYLFTEGEKVEEVLYSDLLKSNCLVTKQPDWGSVQIAYTGKQINREGLLKYLISFRNHNEFHEQCIERIFVHILNRCKPEKLTVYGRYTRRGGLDINPYRSTEKTVVKGLNQRLVRQ

SEQ ID NO: 46770 - protein, 276 aa, Legionella brunensis
  misc_feature (1)..(276): tr|A0A0W0SLL3|A0A0W0SLL3_9GAMM NADPH-dependent 7-cyano- 7-deazaguanine reductase OS=Legionella brunensis OX=294 22 GN=queF PE=3 SV=1
MKAFDNLEKSPLGRTVNYSNRYDNSLLFRICRKEKRRDIGLSQTLPFYGEDIWNAYELSWLNPKGKPIVALATIIVPADSSYIFESKSLKLYLNSLNSTCFASEQEIRTIIENDLSNLVNKRITVALGSLEDSRLHVINLPTGINIDHRDIETYCYYYTQEFLSTSGEYVIETLHSNLLRSNCPITNQPDWGTIFINYEGQQINHDGLLKYIISLRENHEFHEHCIERIFNDILKKCSPNKLSVYARYTRRGGIDINPWRSTPGFNVETNFRLVRQ

SEQ ID NO: 46771 - protein, 277 aa, Legionella brunensis
  misc_feature (1)..(277): tr|A0A0W0SD57|A0A0W0SD57_9GAMM NADPH-dependent 7-cyano- 7-deazaguanine reductase OS=Legionella brunensis OX=294 22 GN=queF PE=3 SV=1
MSENQLHSSPLGQKTVYIETYNNSLLFPISRQPKRDAVGIYEQSLPFHGYDLWTAFELSWLNEKGKPVVAVADIIIPCDSPNLIESKSFKLYLNSFNNTHFSSKEIVQKTLVHDLSKVVGREVSVAIYYPTSFDNSQIGRLEGFCLDDLDINCSEYRVNSTLLKTVDEEVQNITLYSHLLKSNCPVTGQPDWGSVVIKYSGLRIDNETLLQYLVSFRNHNEFHEQCVERIFMDLMKYCHPAKLTVYARYTRRGGLDINPIRSNEMIEPPTNTRLYRQ

SEQ ID NO: 46772 - protein, 416 aa, Legionella busanensis
  misc_feature (1)..(416): tr|A0A378JNH3|A0A378JNH3_9GAMM NADPH-dependent 7-cyano- 7-deazaguanine reductase OS=Legionella busanensis OX=19 0655 GN=queF PE=3 SV=1
MKYYQVKEVSRMTSLTVRSLQYYDEIGLLRPTKRSVSGYRLYSEKDLLILQQIITLKYLGFSLEEIKKCIENPNFNLNASLKIQADELHAKAAQINEAASLLTYIASQIEMGSLVNWQSTAKIIEILELNKMSDQILSKYEAINNESELGKKSDYDLTYNPDRLYPIPRAGKRQEIGINSSALPFFGFDCWNHYEVSWLNEKGKPMVGVAEIIYDCRSPKLIESKSLKLYFNSFNNTKIKDKFALESIVKNDLEKRIDAEVSVTIYSLAEARQFKVIESCEGETIDNLDVECSIYQVEPSFLSVTDEEVEEILYSDLLKSNCLVTNQPDWGSVQIAYKGKKINREALLKYLISFRNHNEFHEQCIERIFVDIMTYCKPEQLTVYGRYTRRGGLDINPYRSTENTLHDGKNKRLIRQ

SEQ ID NO: 46773 - protein, 416 aa, Legionella cherrii
  misc_feature (1)..(416): tr|A0A0W0S4T7|A0A0W0S4T7_9GAMM NADPH-dependent 7-cyano- 7-deazaguanine reductase OS=Legionella cherrii OX=28084 GN=queF PE=3 SV=1
MRYYQIKEISQLTSLTVRSLQYYDEIGLLKPTKRLENGYRLYSEMDLMRLQQITTLKFLGFSLSTIKKIMENPNFDVMTSIGIQARELTEKAARINEAASLLTYISSQMEMNQPVNWKSTAKIIEILELNTMNDEVLQQYQSDAEQSELGKKSAYDETYNPNRLYPIPRAGKRQEIGVDPTRLPFYGFDCWNHYEVSWLNAKGKPMVGIAELFYECSSPNLIESKSLKLYFNSFNNTRIPSVSELENTIKKDLQERVGAEVWVKIHHVDSFDQCSIQQSLVGDSLDQLDIECSVYLVEPAFLSVGNEIVEETLYSNLLKSNCLVTNQPDWGSVQIAYKGKQINREGLLKYLVSYRNHNEFHEQCIERIFVDIMNYCKPEQLTVYGRYTRRGGLDINPYRSTEKTSFIGKNLRLIRQ

SEQ ID NO: 46774 - protein, 416 aa, Legionella cincinnatiensis
  misc_feature (1)..(416): tr|A0A378IGR5|A0A378IGR5_9GAMM NADPH-dependent 7-cyano- 7-deazaguanine reductase OS=Legionella cincinnatiensis OX=28085 GN=queF PE=3 SV=1
MKFYRIKEMSQMTALTIRSLQYYDDIGLLKPTKRSDNGYRFYSEQDLIRLQQITTLKFFGFSLSTIKKIIENPNFDILTSVIIQARELKEKATRINEAASLLNYISSQMEMNQPVNWKSTAKIIEILELNNMNDLVLKKYQAVEEKSELGKKSNYDDTYNPNRLYPIPRAGKRHEIGIDPAQLPFYGFDCWNHYEVSWLNPKGKPMVAIAELYYDCSSPNLIESKSLKLYFNSFNNTRIQNTSELENIIKRDLQERVEAEVWVNIHLLGNANQFTVQPSFIGECLDELDIECSVYLVEPSFLSVSNEIVEETLYSNLLKSNCLVTNQPDWGSIQISYKGKKINREGLLQYLVSFRNHNEFHEQCIERIFVDIMNRCQPELLTVYGRYTRRGGLDINPYRSTEKNSFLGKNVRLVRQ

SEQ ID NO: 46775 - protein, 284 aa, Legionella clemsonensis
  misc_feature (1)..(284): tr|A0A222P5G3|A0A222P5G3_9GAMM NADPH-dependent 7-cyano- 7-deazaguanine reductase OS=Legionella clemsonensis OX= 1867846 GN=queF PE=3 SV=1
MNDAVFKKYSSVSELELGKKSDYDATYNPNRLYPIPRVGKRQEIGIDPFKLPFFGFDCWNHYEVSWLNEKGKPMIGIGEIFYDCNSPKLIESKSLKLYFNSFNNTKIKNIEHLENTIKKDLEERIEAPVFVTIYPLEQAKQFAVTQTLAGESIDNLDIECSVYEVEPSFLTVENVMVEEVLYSDLLKSNCLVTHQPDWGSVQIAYKGRKINREGLLKYLVSFRNHNEFHEQCIERIFVDIMSLCKPEILTVYGRYTRRGGLDINPYRSTGSVVFDKQNLRLIRQ

SEQ ID NO: 46776 - protein, 278 aa, Legionella donaldsonii
  misc_feature (1)..(278): tr|A0A378J613|A0A378J613_9GAMM NADPH-dependent 7-cyano- 7-deazaguanine reductase OS=Legionella donaldsonii OX=4 5060 GN=queF_1 PE=3 SV=1
MIMARINNLENSPLGKKTVYSTRYDKSLLFSITRRERRQEIKIPSILPFQGEDIWNAYEFSWLNGKGKPVIALATFIVPAESPRIFESKSLKLYLHSFNASRFNSEREVSKILCKDLSEVVGVPVLVTLQHWEYSPLATILLPAGINLDHYDLSTNRYTYAPEFLETAPFFDKELLYSNLLKSNCPITSQPDWATIFIRYEGRKIKHEGLLKYIISLRNHDEFHEHCVERIFMDILNHCKPEKLLVYARYTRRGGIDINPQRATLGFALPENLRQPRQ

SEQ ID NO: 46777 - protein, 276 aa, Legionella donaldsonii
  misc_feature (1)..(276): tr|A0A378JF86|A0A378JF86_9GAMM NADPH-dependent 7-cyano- 7-deazaguanine reductase OS=Legionella donaldsonii OX=4 5060 GN=queF_2 PE=3 SV=1
MSEDYLHASPLGRRSAYIDNYDNSLLFPIARQTKREGIGVGLSLPFTGYDIWTAFELSWLNQKGKPVVAIADIIMPCESVNLIESKSLKLYLNSFNNTIFDSAETVRETIASDLSKAAGSVVQVVLYKAEGFIEAPIGQLEGLCLDELDISCSEYKVNPQLLNVSTEKVENIALYSHLLKSNCLMTGQPDWGSIAITYSGPRISNESLLQYLVSFRNHNEFHEQCVERIFMDLMTYCQPDELTVYARYTRRGGLDINPIRSTKPVVPPANIRLYRQ

SEQ ID NO: 46778 - protein, 253 aa, Legionella drancourtii
  misc_feature (1)..(253): tr|G9EJC3|G9EJC3_9GAMM NADPH-dependent 7-cyano-7-deazag uanine reductase OS=Legionella drancourtii LLAP12 OX=65 8187 GN=queF PE=3 SV=1
MFAIPRDAKRKEIGVDPNELPFYGFDCWNHYEVSWLNEKGKPIVALAEIIYDCATVYLIESKSLKLYFNSFNNTQFKNSEEVKLAIERDLAKRVGGEVQVRILSLKEKEPAMIEAVSQGECIDDLDVTCSVYLVEPEYLFVEDKQIEEVLYSDLLKSNCLVTNQPDWGSVQIAYTGKQINREGLLKYLVSFRNHNEFHEQCIERIFVDIMHRCKPEKLTVYGRYTRRGGLDINPYRSTEKVESQGLNLRLIRQ

SEQ ID NO: 46779 - protein, 265 aa, Legionella drozanskii
  misc_feature (1)..(265): tr|A0A0W0SMI9|A0A0W0SMI9_9GAMM NADPH-dependent 7-cyano- 7-deazaguanine reductase OS=Legionella drozanskii LLAP- 1 OX=1212489 GN=queF PE=3 SV=1
MAEIKEVNDSSLGKKTFYEPYYNPNKLFPISRKTQRDELSISSTPPFFGYDSWNHYEVSWLNEKGKPIFALAEIIYSCHSPFLIESKSLKLYFNSFNNTKFSSLQAVQRQIIYDIEEKIGARVAVQINPFRREETLYFEGKCLDELDVDCSIYTVTPSLLTVEKTQVNEKLYSNLLKSNCLVTNQPDWASVQIIYSGKKINHAGLLRYLVSFRNHNEFAEHCIERIFMDVMRFCQPEELTVFGRYSRRGGLAVNPFRTTKKELKL

SEQ ID NO: 46780 - protein, 276 aa, Legionella drozanskii
  misc_feature (1)..(276): tr|A0A0W0SQ62|A0A0W0SQ62_9GAMM NADPH-dependent 7-cyano- 7-deazaguanine reductase OS=Legionella drozanskii LLAP- 1 OX=1212489 GN=queF PE=3 SV=1
MAVDDLTSSPLGQRSIYIDNYDDTLLFPISRQPKRDAIAIRHPLPFKGYDIWTAFELSWLNEKCKPVVAVADIIIPCDSPNIIESKSFKLYLNSFNNTRFSSPELVRDLIQRDLSKAAGLPVEVIMYSPQEFTNSPIGQFDGFYLDELDIVCSEYKVNAELLQTSQVYVNNYSAYSHLLKSNCPVTGQPDWGSVSINYSGPQIEPNTLLQYLVSFRNHNEFHEQCVERIFMDIMARCQPEELTVYARYTRRGGLDINPIRSTNLIAPPRNSRLYRQ

SEQ ID NO: 46781 - protein, 416 aa, Legionella erythra
  misc_feature (1)..(416): tr|A0A0W0TPY5|A0A0W0TPY5_LEGER NADPH-dependent 7-cyano- 7-deazaguanine reductase OS=Legionella erythra OX=448 G N=queF PE=3 SV=1
MRYYQIKEISRLTSLSVRSLQYYDERGLLKPSKRSDAGYRLYSDADLLRLQQIVTLKYLGFSLNEIKKTLNDPQFDIQKSLVVQARLLAEKARQLKEASALLTYIASQREAQQAVNWRSTAEIIAILELSNMNNGVDKYNNQADDSELGRKSEYDASYNPQRLYPIPRAGKRREIGINPAHELPFYGFDGWNHYEVSWLNEKGKPIVAVAEIDYDCRTPMLIESKSLKLYFNSFNNTRFKSLTDVVNIIKSDLEQRVQGDVRVAVHPLGSGVILPLYERFNGECIDHLDVACSTYTVEPSFLTATGEPVEETLYSDLLKSNCLVTNQPDWGSVQISYKGQKINREGLLKYLVSFRNHNEFHEQCIERIFIDIMRQCQPDELTVYGRYTRRGGLDINPYRSTKQPVRQGLNFRLPRQ

SEQ ID NO: 46782 - protein, 416 aa, Legionella fallonii
  misc_feature (1)..(416): tr|A0A098G953|A0A098G953_9GAMM NADPH-dependent 7-cyano- 7-deazaguanine reductase OS=Legionella fallonii LLAP-10 OX=1212491 GN=queF PE=3 SV=1
MKEYKIKEISKLTSLSIRTLQYYDDIDLLKPSRRSEADYRLYSEDDLLRLQQITTLKYLGCSLAAIRNIIQHPGFNLKKSLALQATVLAEQAQKINEASALLNYIAAQINAGHPVNWYSTTQIIHILESSTMSKELKNNYQNMANQSELGQKSEYDATYNPERLYAIPRAPKRKEINLDPITLSFHGFDCWNHYEVSWLNPKGKPMVAIAVISYDCHSPFIIESKSLKLYFNSFNNHVFSDVQAVEQTVRQDLSRCIDAEATVSITPLTDLKNQTLHSSFSGTCLDTLDIECSSYMVDSSFLTTSNEQVEEVLYSDLLKSNCLVTNQPDWGSVQIAYKGKKLNHEGLLKYLVSFRNHNEFHEQCIERIFTDIMTLCQPESLTVYGRYTRRGGLDINPFRSTEPCSIGDKNIRLIRQ

SEQ ID NO: 46783 - protein, 278 aa, Legionella feeleii
  misc_feature (1)..(278): tr|A0A0W0TZV2|A0A0W0TZV2_9GAMM NADPH-dependent 7-cyano- 7-deazaguanine reductase OS=Legionella feeleii OX=453 G N=queF_2 PE=3 SV=1
MIMARINNLENSPLGKKTVYSSSYDKSLLFGITRRERGQEINIPPILPFHGEDIWNAYEFSWLNCKGKPVIALATFIVPAESPRIFESKSLKLYLHSFNASRFNHESQVSAILCNDLSEVAGAPVLVTLQNWEYSSLAKIFLPVGINLDHNDLSTDRYTYAPEFLEASPFFDKELLYSNLLKSNCPITSQPDWATLFIHYEGRKIKHEGLLKYIISLRNHDEFHEHCVERIFMDILNHCKPEKLLVYARYTRRGGIDINPQRATPGFALPENLRQPRQ

SEQ ID NO: 46784 - protein, 276 aa, Legionella feeleii
  misc_feature (1)..(276): tr|A0A378ISD5|A0A378ISD5_9GAMM NADPH-dependent 7-cyano- 7-deazaguanine reductase OS=Legionella feeleii OX=453 G N=queF_1 PE=3 SV=1
MSEHYLHASPLGRRSAYIDNYDNSLLFPIARQTKREGIGIGLSLPFTGYDIWTAFELSWLNQKGKPVVAVADIIMPCESVNLIESKSLKLYLNSFNNTIFDSAETVQETIASDLSKAAGSVVQVVLYKAEGFIEAPIGQLEGLCLDELDISCSEYKVNPRLLNVSTEKVENVVLYSHLLKSNCLMTGQPDWGSIAITYSGPRISNESLLRYLVSFRNHNEFHEQCVERIFMDLMAYCQPDELTVYARYTRRGGLDINPIRSTKPVAPPANIRLYRQ

SEQ ID NO: 46785 - protein, 285 aa, Legionella geestiana
  misc_feature (1)..(285): tr|A0A0W0TU94|A0A0W0TU94_9GAMM NADPH-dependent 7-cyano- 7-deazaguanine reductase OS=Legionella geestiana OX=450 65 GN=queF PE=3 SV=1
MPDFSHPPVINAAEDSELGKKSLYESAYNPHKLFPIPRAGKRQEIGILSDKLPFYGFDRWNHYEVSWLNPKGKPMVGIAEIIYDCHTPCIIESKSLKLYFNSFNNTTIADAKTLEAIVREDLEARVQGPVSVKIHALSRFAERAMLAHFEGESIDALDVSCSVYQVEPAFLAAGLNTVEEVLCSDLLKSNCLVTHQPDWGSVQIAYKGPQIDREGLLKYLVSFREHNEFHEQCIERIFIDILNRCKPQVLTVTGFYTRRGGLDINPCRSTEPDFQPVDTLRLVRQ

SEQ ID NO: 46786 - protein, 415 aa, Legionella gratiana
  misc_feature (1)..(415): tr|A0A378JCI4|A0A378JCI4_9GAMM NADPH-dependent 7-cyano- 7-deazaguanine reductase OS=Legionella gratiana OX=4506 6 GN=queF PE=3 SV=1
MKYYQIKEISQMTSLSIRSLQYYDEVGLLKPTKRSDSGYRLYSEADLLILQQIITLKFLGFSLSTIKEILANPNFNLAESMSLQARELSEKANKINEAASLLTYIASQLEINQPINWQSSAKIIEILELNTMNDAVLKKYQSVNKSELGKKSDYDSTYNPNRLYPILRAGKRQEIGIDPANPPFVGFDCWNHYEVSWLNEKGKPMIGIGEIFYDCNSPKLIESKSLKLYFNSFNNTQIKSIDELENTIKKDLEARIEAPVLVTIYPLQQAKQYSVSQMLTGECIDHLDVECSVYLVEPSFLSVHDVVVEESLYSDLLKSNCLVTNQPDWGSVQITYKGKKINREGLLKYLVSFRNHNEFHEQCIERIFVDIMNYCKPEVLTVYGRYTRRGGLDINPYRSTKNSAFDRKNIRLVRQ

SEQ ID NO: 46787 - protein, 278 aa, Legionella hackeliae
  misc_feature (1)..(278): tr|A0A0A8UT69|A0A0A8UT69_LEGHA NADPH-dependent 7-cyano- 7-deazaguanine reductase OS=Legionella hackeliae OX=449 GN=queF PE=3 SV=1
MSEKQLESSPLGQKTVYIETYNNTLLFPISRQPKRDAIGIMAQQNLPFKGYDLWTAFELSWLNEKGKPVVAVADIVIPCDSPNLIESKSFKLYLNSFNNTHFSSVESVQQTIIHDLSKVAGRQVSVTIYSPEDFNNSKISHFEGFCLDEMDINCNEYRVNSKLLKAHHDKVENSSLYSHLLKSNCPVTGQPDWGSVAINYSGHRIDNEALLQYLVSFRNHNEFHEQCVERIFMDIMHYCQPTELTVYARYTRRGGLDINPIRSNKEIKQPVNIRLYRQ

SEQ ID NO: 46788 - protein, 282 aa, Legionella israelensis
  misc_feature (1)..(282): tr|A0A516N1B9|A0A516N1B9_9GAMM NADPH-dependent 7-cyano- 7-deazaguanine reductase OS=Legionella israelensis OX=4 54 GN=queF PE=3 SV=1
MNDMLKYQSANESELGKKSAYESSYNPNRLYPIPRMSKRQEIGIDPVHLPFVGFDCWNHYEVSWLNKKGKPMVGIGEIIYDCHSPKLIESKSLKLYFNSFNNTKIRSISELENIIQKDLEKCTGSPVFIKIYPLEQAKKFALSQSLSGECIDHLDVECSVYLVEPSFLTVHDEMVEETLYSDLLKSNCLVTHQPDWGSIQIAYKGQKINREGLLKYLVSYRNHNEFHEQCIERIFVDIMNHCKPEILTVYGRYTRRGGLDINPYRSTASTSVERKNTRLIRQ

SEQ ID NO: 46789 - protein, 282 aa, Legionella israelensis
  misc_feature (1)..(282): tr|A0A0W0VMR6|A0A0W0VMR6_9GAMM NADPH-dependent 7-cyano- 7-deazaguanine reductase OS=Legionella israelensis OX=4 54 GN=queF PE=3 SV=1
MNDMLKYQSANESELGKKSAYESSYNPNRLYPIPRMSKRQEIGIDPVHLPFVGFDYWNHYEVSWLNKKGKPMVGIGEIIYDCHSPKLIESKSLKLYFNSFNNTKIRSISELENIIQKDLEKCTGSPVFIKIYPLEQAKKFALSQSLSGECIDHLDVECSVYLVEPSFLTVHDEMVEETLYSDLLKSNCLVTHQPDWGSIQIAYKGQKINREGLLKYLVSYRNHNEFHEQCIERIFVDIMNHCKPEILTVYGRYTRRGGLDINPYRSTVGTSVERKNTRLIRQ

SEQ ID NO: 46790 - protein, 285 aa, Legionella jamestowniensis
  misc_feature (1)..(285): tr|A0A0W0UKC0|A0A0W0UKC0_9GAMM NADPH-dependent 7-cyano- 7-deazaguanine reductase OS=Legionella jamestowniensis OX=455 GN=queF PE=3 SV=1
MNDAVLKKYSAVSESELGKKSDYDSAYNPSRLYPIPRAGKRQEMGVDPVNPPFFGFDCWNHYEVSWLNEKGKPMVGIGEIFYDCNSPKLIESKSLKLYFNSFNNTRINHITDLENTIKKDLEERIEAPVSVNIYPLEEAKQFTVTQTLTGECIDHLDVACSVYIVEPSFLSVEEIVVEEVLYSDLLKSNCLVTNQPDWGSVQIAYKGKQINREGLLKYLVSYRNHNEFHEQCIERIFVDIMKHCQPEMLTVYGRYTRRGGLDINPYRSTENTVFDKQKNIRLIRQ

SEQ ID NO: 46791 - protein, 278 aa, Legionella jordanis
  misc_feature (1)..(278): tr|A0A0W0VFK5|A0A0W0VFK5_9GAMM NADPH-dependent 7-cyano- 7-deazaguanine reductase OS=Legionella jordanis OX=456 GN=queF PE=3 SV=1
MSDKELYSSPLGQKTTYVETYNSSLLFPISRGPKREDIGINNQQLPFYGYDLWTAYELSWLNNKGKPVVAVADILIPCDSPNLIESKSLKLYLNSFNNSHFDSTETVVQTLVNDLSKSAGSPVNVTIFPPEHFSLSRIEDMNGFCLDELDVRCDEYQVNSSLLTIEGESVVNDYSVYSHLLKSNCPVTGQPDWGTLAITYSGPRINNDSLLKYIVSFRNHNEFHEQCVERIFTDLMTHCQAKELCVYARYTRRGGLDINPIRSSSYIAPPRNIRLYRQ

SEQ ID NO: 46792 - protein, 277 aa, Legionella lansingensis
  misc_feature (1)..(277): tr|A0A0W0VPD3|A0A0W0VPD3_9GAMM NADPH-dependent 7-cyano- 7-deazaguanine reductase OS=Legionella lansingensis OX= 45067 GN=queF PE=3 SV=1
MFEKELHFSPLGQKTVYIETYNNSLLFPISRQPKRDAIGVSSQALPFHGYDLWTAFELSWLNEKGKPVVAVADIIIPCDSPNLIESKSFKLYLNSFNNTHFSSAVAVQETLVHDLSKVAGEDVKVSIYHPESFESCTIGHMEGICLDDLDISCNEYRVNSSMLKTSTEIVENVSLYSHLLKSNCPVTGQPDWGSIAITYSGPRVDNEALLQYLVSFRNHNEFHEQCVERIFIDLMTYCHPDKLTVYARYTRRGGLDINPIRSNQAIKPPSNIRLYRQ

SEQ ID NO: 46793 - protein, 152 aa, Legionella lansingensis
  misc_feature (1)..(152): tr|A0A0W0V741|A0A0W0V741_9GAMM NADPH-dependent 7-cyano- 7-deazaguanine reductase OS=Legionella lansingensis OX= 45067 GN=queF PE=4 SV=1
MTEVFATYKDIDSSILIGLPNPAKEAYEIKIKVPEFTFLGMKQQPDFATIFLTMYPNEKIIELRSLKNYVYQLRSIVISYERLINVVYDHLYTTYKPARLRLVMNFNPRGGISSKLTIDSDWKIRGGADIYSKWNEHDNSWINEYDSSWINV

SEQ ID NO: 46794 - protein, 280 aa, Legionella londiniensis
  misc_feature (1)..(280): tr|A0A0W0VJR9|A0A0W0VJR9_9GAMM NADPH-dependent 7-cyano- 7-deazaguanine reductase OS=Legionella londiniensis OX= 45068 GN=queF PE=3 SV=1
MVKDDHCKEASNSPLGKKITYVSEYAPELLFPIPRKGKRDEIKVPEPLPFFGFDTWNAYEVSWLNPKGKPQNAIVQFDISCHSVNLIESKSFKLYLNSFNNTRLVSVDELRARLLKDIKRAVDGDVLITLHTLDDLLSQKIETFEGTCLDFLDIEPDSYQVNPQLLSAKENRKVKETLYSHLLKSNCLVTGQPDWGSIQISYTGAKIDEAGLLKYLISFRNHNEFHEQCVERIFMDIQTYCKPSELIVTARYTRRGGLDINPTRSSIPISPVKNIRMARQ

SEQ ID NO: 46795 - protein, 416 aa, Legionella longbeachae
  misc_feature (1)..(416): tr|D3HPN3|D3HPN3_LEGLN NADPH-dependent 7-cyano-7-deazag uanine reductase OS=Legionella longbeachae serogroup 1 (strain NSW150) OX=661367 GN=queF PE=3 SV=1
MKFYQIKEISQMTALSIRSLQYYDDIGLLKPAKRSASGYRLYSDQDLIRLQQITTLKFLGFSLSTTKKIIENPNFDLMTSMPIQARELKEKAARINEVASLLNYISSQMEMNQPVNWKSTAKIIEILELNNMNDLVLKKYQDVEEKSELGKKSIYDDSYNPNRLYPIPRSGKRQEIGIEPTQLPFYGFDCWNHYEVSWLNAKGKPMVAIAEIYYDCSSPNLIESKSLKLYFNSFNNTRIQNVSELQNIVKRDLQERIEAEVGVNIYLLDNVNQFAIQPSFIGECIDDLDIECSVYHVEPSFLSVGTESVTETLYSNLLKSNCLVTNQPDWGSIQISYKGKKISREGLLRYLVSFRNHNEFHEQCIERIFVDIMNRCQPELLTVYGRYTRRGGLDINPYRSTEKNLFPGTNVRLVRQ

SEQ ID NO: 46796 - protein, 285 aa, Legionella longbeachae
  misc_feature (1)..(285): tr|A0A378KZZ8|A0A378KZZ8_LEGLO NADPH-dependent 7-cyano- 7-deazaguanine reductase OS=Legionella longbeachae OX=4 50 GN=queF PE=3 SV=1
MNDLVFEKHSIGNTLELGKTSDYESTYNPNRLYPIPRAAKRQDIGIDPAHPPFLGFDCWNHYEVSWLNEKGKPVVAIAEIVYDCNSPMLIESKSLKLYFNSFNNTIFKSIEELENIIKRDLETRINADVLVCIHPLTRAQVITLQDSFTGESIDDLDVECSVYMVEPSFLSVSNEDVEEVLYSDLLKSNCLVTNQPDWGSVQIAYKGKKINREGLLKYLVSYRNHNEFHEQCIERIFVDIMTHCKPESLTVYGRYTRRGGLDINPYRSTERALFENSKNTRLIRQ

SEQ ID NO: 46797 - protein, 415 aa, Legionella maceachernii
  misc_feature (1)..(415): tr|A0A0W0VYY1|A0A0W0VYY1_9GAMM NADPH-dependent 7-cyano- 7-deazaguanine reductase OS=Legionella maceachernii OX= 466 GN=queF PE=3 SV=1
MNYYQIKEISQMTSLSIRSLQYYDEVGLLKPTKRSDSGYRLYSEADLLILQQIITLKFLGFSLSTIKEIIGNPNFNLAASMSLQARELSEKANKINEAASLLTYIASQLEINQPINWQSSAKIIEILELNTMSDPVLKKYQAASESELGKKSDYDSTYNPNRLYPISRAGKRQEIGIDPVHPPFVGFDCWNHYEVSWLNAKGKPMVGIGEIFYDCNSPKLIESKSLKLYFNSFNNTKIKSISELENTIKKDLEVRIEAPVLVKIYLLEQAKHYTVSQIPKGECIDHLDVECSVYLVEPSFLSVHDVVVEERLYSDLLKSNCLVTNQPDWGSIQIAYKGKKINREGLLKYLVSFRNHNEFHEQCIERIFVDIMNYCKPEVLTVYGRYTRRGGLDINPYRSTENSAFDRENIRLVRQ

SEQ ID NO: 46798 - protein, 284 aa, Legionella maceachernii
  misc_feature (1)..(284): tr|A0A0W0W4L3|A0A0W0W4L3_9GAMM NADPH-dependent 7-cyano- 7-deazaguanine reductase OS=Legionella maceachernii OX= 466 GN=queF PE=3 SV=1
MNNSVLNKYQSVNESELGKKSAYDSTYNPDRLYPIPRAGKRQEIGIDPANPPFVGFDCWNHYEVSWLNEKGKPLVGIGEIFYDCNSPKLIESKSLKLYFNSFNNTRIKNIDALENTIKKDLEERIEAPVLVKIYPLEQAKQSSISSALKGECLDHLDVECSIYLIEPAFLSVDDIVVEEVLYSNLLKSNCLITHQPDWGSVQIAYKGKKINREGLLKYLISYRNHNEFHEQCIERIFVDIMNYCKPEQLTVYGRYTRRGGLDINPYRTTGNTAFDKENNRLVRQ

SEQ ID NO: 46799 - protein, 276 aa, Legionella massiliensis
  misc_feature (1)..(276): tr|A0A078L384|A0A078L384_9GAMM NADPH-dependent 7-cyano- 7-deazaguanine reductase OS=Legionella massiliensis OX= 1034943 GN=queF_1 PE=3 SV=1
MTNFSSLKDSPLGKTSKSAANYDKSLLFALDRSENRRELDLVSPLPFHGSDIWNLYELSWLNLQGKPIVAMARLTVPADSPRIFESKSLKLYLNSLHNLRFANGDELCKLIVADLSELCGTNLMLSLEPLTALSSSPLSSPEGLNLDDYDIHTDCYSYHPQFLSSSEKFCEEILYSNLLRSNCPITNQPDWATLVIRYEGRQIDHPGLLKYIISLREHNEFHEHCIERIFVDLMKHCGPENLLVSARYTRRGGIDINPQRATLAYGLEGNRRLIRQ

SEQ ID NO: 46800 - protein, 276 aa, Legionella massiliensis
  misc_feature (1)..(276): tr|A0A078KWM9|A0A078KWM9_9GAMM NADPH-dependent 7-cyano- 7-deazaguanine reductase OS=Legionella massiliensis OX= 1034943 GN=queF_2 PE=3 SV=1
MSAQDLSSSPLGQRSIYIDNYDDTLLFPISRQPKRDAIAVSLPLPFKGYDIWTAFELSWLNEKCKPVVAIGDIIIPCNSPNIIESKSFKLYLNSFNNTRFASVDVVRDLIKRDLSKAAGAEVEVLIYLANDFANAKIAQFEGIYLDDLDISYSAYKVKADILVTDEQRVENCSVYSHLLKSNCPVTGQPDWGSISINYSGPRINNESLLQYLVSFRNHNEFHEQCVERIFMDVMERCQPETLTVYARYTRRGGLDINPIRSSEAIEPPLNLRLYRQ

SEQ ID NO: 46801 - protein, 280 aa, Legionella moravica
  misc_feature (1)..(280): tr|A0A378K2G7|A0A378K2G7_9GAMM NADPH-dependent 7-cyano- 7-deazaguanine reductase OS=Legionella moravica OX=3996 2 GN=queF PE=3 SV=1
MEFELEQNRKLELGKKSDYEAHYNADKLFPIPREGKRLEIGINPEQLPFWGFDAWNHYEVSWLNSKGKPVVAVAEIVYDCHSPNIIESKSLKLYFNTFNNTRFDSIADVEHTVINDLSHSLKSDVHVRINQLGNAHTTGLQNAFNGETIDSLDISCSVYSVDPSFLTVEEEQVEEVLYSDLLKSNCLVTYQPDWGSVQINYKGPKINREGLLRYIVSFRNHNEFHEQCIERIFVDIMAQCAPQELTVYGRYTRRGGLDINPYRSTIKPDLNAKNIRLVRQ

SEQ ID NO: 46802 - protein, 261 aa, Legionella nautarum
  misc_feature (1)..(261): tr|A0A0W0WN97|A0A0W0WN97_9GAMM NADPH-dependent 7-cyano- 7-deazaguanine reductase OS=Legionella nautarum OX=4507 0 GN=queF PE=3 SV=1
MKEENDSLLGKSTVYEPYYNPEQLFSISRRAQREELGISSTPPFFGCDKWNHYELSWLNEKGKPIFALAEIIYSCHSPFLIESKSLKLYFNSFNNTKFASSEAVQRQIINDLEKKIAAKVIVKINPFHGEEIQPFEGICLDELDVACSIYTVDPLLLTVEKALVKEQLYSNLLKSNCLVTNQPDWASVQIIYSGKKINHAGLLRYLVSFRNHNEFAEHCIERIFMDIMRFCKPEELTVFGRYSRRGGLAINPLRTTKKSYY

SEQ ID NO: 46803 - protein, 276 aa, Legionella nautarum
  misc_feature (1)..(276): tr|A0A0W0WUE1|A0A0W0WUE1_9GAMM NADPH-dependent 7-cyano- 7-deazaguanine reductase OS=Legionella nautarum OX=4507 0 GN=queF PE=3 SV=1
MIVDDLTSSPLGQRSIYIDNYDDTLLFPISRQPKREAIDIRQPLPFKGYDIWTAFELSWLNEKCKPVVAVADIIIPCDSPNIIESKSFKLYLNSFNNTRFSSPELVREIIQRDLSKVAGLTVEVLMYSPQEFANSPIGQFEGFYLDELDIGCSEYKVNAELLQTSQVYVNNYSVYSHLLKSNCPVTGQPDWGSVLINYSGPQIDANRLLQYLVSFRNHNEFHEQCVERIFMDIRSRCQPEELTVYARYTRRGGLDINPIRSTNIIAPPRNSRLYRQ

SEQ ID NO: 46804 - protein, 285 aa, Legionella oakridgensis; identical to SEQ ID NO: 46796
  misc_feature (1)..(285): tr|A0A0W0WXZ2|A0A0W0WXZ2_9GAMM NADPH-dependent 7-cyano- 7-deazaguanine reductase OS=Legionella oakridgensis OX= 29423 GN=queF PE=3 SV=1

SEQ ID NO: 46805 - protein, 195 aa, Legionella oakridgensis
  misc_feature (1)..(195): tr|W0BEA6|W0BEA6_9GAMM QueF_N domain-containing protein OS=Legionella oakridgensis ATCC 33761 = DSM 21215 OX=1 268635 GN=Loa_01490 PE=4 SV=1
MELGKTSDYESTYNPNRLYPIPRAAKRQDIGIDPAHPPFLGFDCWNHYEVSWLNEKGKPVVAIAEIVYDCNSPMLIESKSLKLYFNSFNNTIFKSIEELENIIKRDLETRINADVLVCIHPLTRAQVITLQDSFTGESIDDLDVECSVYMVEPSFLSVSNEDVEEVLYSDLLKSNCLVTNQPDWGSVQIAYKGKK

SEQ ID NO: 46806 - protein, 416 aa, Legionella parisiensis
  misc_feature (1)..(416): tr|A0A1E5JQE6|A0A1E5JQE6_9GAMM NADPH-dependent 7-cyano- 7-deazaguanine reductase OS=Legionella parisiensis OX=4 5071 GN=queF PE=3 SV=1
MKYYQIKEISHMTSLTIRSLQYYDEIGLLKPTKRSISGYRLYSEADLIRLQQITTLKFLGFSLSTIKKIMENPHFDLMMSIGIQARELTEKAARINEAASLLTYISSQMEMNQPVNWKSTAKIIEILELNTMNDQILQKYQSEAEQSELGKKSAYDETYNPDRLYPIPRAGKRQEIGVDPVQLPFYGFDCWNHYEVSWLNARGKPMVAIAELFYDCSSPNLIESKSLKLYFNSFNNTRIQNVRELENTIKKDLQERIGAEVGVHVHLLESTSQFAIQQPLIGELLDDLDIECSIYLVEPSFLTVSDEIVEETLFSNLLKSNCLVTDQPDWGSVQITYKGKKINREGLLKYLVSYRNHNEFHEQCIERIFVDIMNYCKPEKLTVYGRYTRRGGLDINPYRSTEKSTFAGKNLRLVRQ

SEQ ID NO: 46807 - protein, 415 aa, Legionella pneumophila; identical to SEQ ID NO: 46797
  misc_feature (1)..(415): tr|A0A128SHH2|A0A128SHH2_LEGPN NADPH-dependent 7-cyano- 7-deazaguanine reductase OS=Legionella pneumophila OX=4 46 GN=queF_1 PE=3 SV=1

SEQ ID NO: 46808 - protein, 285 aa, Legionella pneumophila
  misc_feature (1)..(285): tr|A0A128Z452|A0A128Z452_LEGPN NADPH-dependent 7-cyano- 7-deazaguanine reductase OS=Legionella pneumophila OX=4 46 GN=queF PE=3 SV=1
MNKELESIYQNIANQSELGQTANYDSYYNPKRLYPIPRAPKRQEINLDPNSTTFYGFDCWNHYEVSWLNSKGKPVVAMAVISYDCHSPCIIESKSLKLYFNSLNNSTFPDVETVVQTISKDLSYCIGSEVAVNVYPLSEIASQTIYAAFDGVCLDKLDIECSVYHVMPDFLSTSSELVEEVLYSDLLKSNCLVTNQPDWGSVQIIYKGKKINHEGLLKYLISFRNHNEFHEQCIERIFADIMRFCQPESLTVYGRYTRRGGLDINPIRSTEPCAFDGQNIRLIRQ

SEQ ID NO: 46809 - protein, 278 aa, Legionella quateirensis
  misc_feature (1)..(278): tr|A0A378KY29|A0A378KY29_9GAMM NADPH-dependent 7-cyano- 7-deazaguanine reductase OS=Legionella quateirensis OX= 45072 GN=queF PE=3 SV=1
MEFELEHQLELGKKSEYEAQYNADKLFPIPREGKRLEIGINPDQLPFWGFDTWNHYEVSWLNAKGKPIVAVAEIVYDCHSPNIIESKSLKLYFNTFNNTQFDSIADVERTIINDLSQRLKSEVSVTIQQLGNSKTIAFQNSFDGESIDSLDIACSVYSVDPSLLTVEDHLVEETLYSDLLKSNCLVTYQPDWGSVQISYKGPKINREGLLKYIVSFRNHNEFHEQCIERIFVDIMNQCKPEKLTVYGRYTRRGGLDINPYRSTIKPEPNAKNIRLVRQ

SEQ ID NO: 46810 - protein, 284 aa, Legionella quinlivanii
  misc_feature (1)..(284): tr|A0A0W0XU17|A0A0W0XU17_9GAMM NADPH-dependent 7-cyano- 7-deazaguanine reductase OS=Legionella quinlivanii OX=4 5073 GN=queF PE=3 SV=1
MNELSMENYKIPQESELGQSSEYDDHYNPERLFAIARAPKRREIGIEPKVLPFYGFDCWNHYEVSWLNEKGKPVVAIAEIIYDCATPNIIESKSLKLYFNSFNNTRFKDNEAVKQIVKQDLEQCVEGDVQVRILSLTDSGYNHIELSAAGECLDDLDVTCSVYQVEPGYLCTETLRVEEILYSDLLKSNCLVTNQPDWATVQIAYTGKQINREGLLKYLVSFRNHNEFHEQCIERIFADIMNRCQPEKLTVYGRYTRRGGLDINPYRSTEKLNSKELNFRLVRQ

SEQ ID NO: 46811 - protein, 284 aa, Legionella quinlivanii
  misc_feature (1)..(284): tr|A0A364LLR3|A0A364LLR3_9GAMM NADPH-dependent 7-cyano- 7-deazaguanine reductase OS=Legionella quinlivanii OX=4 5073 GN=queF PE=3 SV=1
MNELSVENYKNPQQSELGQSSEYDDHYNPERLFAIARAPKRKEIGIDPMALPFYGFDCWNHYEVSWLNEKGKPVVAIAEIIYDCATPNIIESKSLKLYFNSFNNTRFKDNEAVKQIVKQDLAQRVGGDVQVRILGLTESGYNHIEPSAAGECLDDLDVACSVYLVEPNFLYTEDQRVEEILYSDLLKSNCLVTNQPDWATVQIAYTGMKIDREGLLKYLVSFRNHNEFHEQCIERIFADIMNRCQPEKLTVYGRYTRRGGLDINPYRSTEKLRSQALNFRLIRQ

SEQ ID NO: 46812 - protein, 284 aa, Legionella rubrilucens
  misc_feature (1)..(284): tr|A0A0W0XZH7|A0A0W0XZH7_9GAMM NADPH-dependent 7-cyano- 7-deazaguanine reductase OS=Legionella rubrilucens OX=4 58 GN=queF PE=3 SV=1
MNPVKEQYNHAADASELGRKSDYDASYNPLRLYPIPRAGKRQEIGIHPEQLPFYGFDCWNHYEVSWLNEKGKPIVAMAEIDYDCRTPMLVESKSLKLYFNSFNNTRFKSLAEVVNTIKNDLEQRVQGEVRVAVHPLGSGMILPLYEHFNGDCIDHLDVECSTYTVEPSFLTATGEWVEETLYSDLLKSNCLVTNQPDWGSVQISYKGKKINREGLLQYLVSFRNHNEFHEQCIERIFIDIMRQCQPDELTVYGRYTRRGGLDINPYRSTKQPVRQGLNFRLPRQ

SEQ ID NO: 46813 - protein, 416 aa, Legionella sainthelensi
  misc_feature (1)..(416): tr|A0A0W0YNY8|A0A0W0YNY8_9GAMM NADPH-dependent 7-cyano- 7-deazaguanine reductase OS=Legionella sainthelensi OX= 28087 GN=queF PE=3 SV=1
MKFYQIKQISQMTALTIRSLQYYDDIGLLKPAKRTASGYRLYSEQDLIRLQQITTLKFLGFSLSTIRKIIENPNFDVIASVIIQARELKEKAARINEAASLLNYISSQMAMNQPVNWKSTAKIIEILELNNMNDLVLKKYKTLEEESELGRKSSYDDAYNPNRLYPIARAGKRQEIGINPSQLPFYGFDCWNHYEVSWLNAKGKPMVAIAELYYDCSSPYLIESKSLKLYFNSFNNTRIPNANELQNIVKRDLQERIGAEVWVNIYLLDNVKQFAIQPSFMGECIDELDVECSVYLVEPSFLSVSDETIEETLYSNLLKSNCLVTNQPDWGSIQISYRGKKINREGLLQYLVSFRNHNEFHEQCIERIFVDIMNRCQPELLTVYGRYTRRGGLDINPYRSTEKNLFLGKNIRLPRQ

SEQ ID NO: 46814 - protein, 416 aa, Legionella sainthelensi
  misc_feature (1)..(416): tr|A0A2H5FJR9|A0A2H5FJR9_9GAMM NADPH-dependent 7-cyano- 7-deazaguanine reductase OS=Legionella sainthelensi OX= 28087 GN=queF PE=3 SV=1
MKFYQIKQISQMTALTIRSLQYYDDIGLLKPSKRTASGYRLYSEQDLIRLQQITTLKFLGFSLSTIKKIIENPNFDVIASVIIQARELKEKAARINEAASLLNYISSQMEMNQPVNWKSTAKIIEILELNNMNDLVLKKYQTLEEESELGKKSNYDDAYNPNRLYPIARAGKRQEIGINPSQLPFHGFDCWNHYEVSWLNAKGKPMVAIAELYYDCSSPYLIESKSLKLYFNSFNSTRIPHVNELQNIVKRDLQERIGAEVWVNIYLLDNVKQFAIQPSFIGECIDELDVECSVYLVEPSFLSVCDETIEETLYSNLLKSNCLVTNQPDWGSIQISYKGKKINREGLLQYLVSFRNHNEFHEQCIERIFVDIMNRCQPEVLTVYGRYTRRGGLDINPYRSTEKNLFLGKNIRLVRQ

SEQ ID NO: 46815 - protein, 416 aa, Legionella santicrucis
  misc_feature (1)..(416): tr|A0A0W0Z1P1|A0A0W0Z1P1_9GAMM NADPH-dependent 7-cyano- 7-deazaguanine reductase OS=Legionella santicrucis OX=4 5074 GN=queF PE=3 SV=1
MKFYQIKEISQMTSLTIRSLQYYDDIGLLKPAKRSDSGYRFYSEQDLIRLQQITTLKFLGFSLSTIKKIIENPNFDIMTSVIIQARELKEKAARINEAASLLNYISSQMEMNQPVNWKSTAKIIEILELNNMNDLVLKKYQAVEEKSELGKKSNYDDIYNPNRLYPIPRDGKRHEIGIDPAQLPFYGFDCWNHYEVSWLNPKGKPMVAIAELYYDCSSPNLIESKSLKLYFNSFNNTRIQNISELENIIKKDLQERVGADVAVNIYLLDNATQFVVQPSFVGECLDDLDVECSVYLVEPSFLSISNEVVEETLYSNLLKSNCLVTNQPDWGSIQISYKGKKINREGLLQYLVSFRNHNEFHEQCIERIFVDIMNRCQPELLTVYGRYTRRGGLDINPYRSTEKNPFLGKNVRLVRQ

SEQ ID NO: 46816 - protein, 277 aa, Legionella shakespearei
  misc_feature (1)..(277): tr|A0A0W0Z880|A0A0W0Z880_9GAMM NADPH-dependent 7-cyano- 7-deazaguanine reductase OS=Legionella shakespearei DSM 23087 OX=1122169 GN=queF PE=3 SV=1
MSLENAHLELGKKSEYKAIYNAEKLFPIPRAEKRIEIGIDPQSPPFYGFDAWNHYEVSWLDAKGKPVVATAEIIYDCHTPNIIESKSLKLYFNTFNNTQFASVADVENTVIKDLSHNVEGEVTVAIQQLRKGAVLPLDTSFKGECIDDLDVTCSMYSVDPSLLTTEDEVVEEVLSSDLLKSNCLVTYQPDWGSVQIEYKGPKINREGLLKYIVSFRNHNEFHEQCIERIFVDIMAQCKPQELTVYGRYTRRGGLDINPYRSTKKPSLAVKNLRLLRQ

SEQ ID NO: 46817 - protein, 229 aa, Legionella sp.
  misc_feature (1)..(229): tr|A0A1Q4D7L5|A0A1Q4D7L5_9GAMM NADPH-dependent 7-cyano- 7-deazaguanine reductase QueF (Fragment) OS=Legionella sp. 40-6 OX=1895903 GN=BGO90_08120 PE=4 SV=1
MNHADEKLEYESELGQKSTYDATYNPQRLYPISRESKRQELGIDSTKLPFYGYDCWNHYEVSWLNPKGKPVVAIAEIIYDCQSPKIIESKSLKLYFNSFNNAKMTSFGAVEELVKKDLQERLDTEVLVKLTPLSQSPLQQIASSFSGECLDELDITCDIYQVEPLFLKTSEEEVTEVLYSDLLKSNCLVTQQPDWGSVQISYSGKKIDREGLLKYLVSFRNHNEFHEQC

SEQ ID NO: 46818 - protein, 284 aa, Legionella sp.
  misc_feature (1)..(284): tr|A0A1Q3U6U3|A0A1Q3U6U3_9GAMM NADPH-dependent 7-cyano- 7-deazaguanine reductase OS=Legionella sp. 39-23 OX=189 5902 GN=queF PE=3 SV=1
MSDPVLKKYQAASESELGKKSDYDSTYNPNRLYPIPRAGKRQEIGIDPAHPPFVGFDCWNHYEVSWLNEKGKPVVGIGEIFYDCNSPKLIESKSLKLYFNSFNNTKIKSIDELENTIKKDLEARVESPVLVKIYSLEQASQYAASQMLTGECIDHLDVECFVYLVEPSFLSVQDVVVEEQLYSDLLKSNCLVTNQPDWGSVYIAYKGKKIDREGLLKYLVSYRNHNEFHEQCIERIFVDIMNYCKPEVLTVYGRYTRRGGLDINPYRSSKNNTFDRKNIRLIRQ

SEQ ID NO: 46819 - protein, 281 aa, Legionella spiritensis
  misc_feature (1)..(281): tr|A0A0W0Z817|A0A0W0Z817_LEGSP NADPH-dependent 7-cyano- 7-deazaguanine reductase OS=Legionella spiritensis OX=4 52 GN=queF PE=3 SV=1
MSEQYQGQTSDSELGKKSEYDDTYNPDRLYPIARSGKRSEIGIDPNRLPFYGFDCWNHYEVSWLNDKGKPVVAIAEILYNCSSPFLIESKSLKLYFNSLNNTKFKHKREVEVMIKDDLEQRVQSDVAVTIHELGQYSGWSMSEAFQGVCLDALDIECSTYQVDPSLLSASGDSVEEVLYSDLLKSNCLVTGQPDWGSVQIAYRGQQIHREGLLQYIVSFRNHNEFHEQCIERIFVDVMKRCHPEELTVYGRYTRRGGLDINPLRSSRPVSWPNRNIRLLRQ

SEQ ID NO: 46820 - protein, 416 aa, Legionella steelei
  misc_feature (1)..(416): tr|A0A0W0ZM43|A0A0W0ZM43_9GAMM NADPH-dependent 7-cyano- 7-deazaguanine reductase OS=Legionella steelei OX=94703 3 GN=queF PE=3 SV=1
MKYYQIKEISQMTSLTIRSLQYYDEIGLLKPTKRSDSGYRLYCERDLIRLQQITTLKFLGFSLSTIKKIIESPGFDVAASVGIQARELTEKAARINEAASLLTYISSQLEMNQSVNWKSTAKIIEILELNTMNDQVLQKYQAEAEQSELGKKSAYDDTYNPNRLYPIPRAGKRQEIGVDPSKLPFYGFDCWNHYEVSWLNAKGKPMVAIAELFYECNSPNLIESKSLKLYFNSFNNTRIHSVSELENTIKRDLQERVGAEVWVNIHLLDSTNQFAIQPSFAGDLLDDLDIECSIYHVEPSFLFVSEELVEESLYSNLLKSNCLVTNQPDWGSVQIAYKGKKINREGLLKYLVSFRNHNEFHEQCIERIFVDIMNYCQPEQLTVYGRYTRRGGLDINPYRSTEKSSFVGKNLRLVRQ

SEQ ID NO: 46821 - protein, 415 aa, Legionella steigerwaltii
  misc_feature (1)..(415): tr|A0A378PGP3|A0A378PGP3_9GAMM NADPH-dependent 7-cyano- 7-deazaguanine reductase OS=Legionella steigerwaltii OX =460 GN=queF_2 PE=3 SV=1
MNYYQIKEISQMTSLSIRSLQYYDEVGLLKPTKRSDSGYRLYSEADLLILQQIITLKFLGFSLSTIKEIIGNPNFNLAASMSLQARELSEKANKINEAASLLTYIASQLEINQPINWQSSAKIIEILELNTMSDPVLKKYQAASESELGKKSDYDSTYNPNRLYPIPRAGKRQEIGIDPAHPPFVGFDCWNHYEVSWLNEKGKPVVGIGEIFYDCNSPKLIESKSLKLYFNSFNNTKIKSIDELENTIKKDLEARVESPVLVKIYSLEQASQYAASQMLTGECIDHLDVECFVYLVEPSFLSVQDVVVEEQLYSDLLKSNCLVTNQPDWGSVYIAYKGKKIDREGLLKYLVSYRNHNEFHEQCIERIFVDIMNYCKPEVLTVYGRYTRRGGLDINPYRSSKNNTFDRKNIRLIRQ

SEQ ID NO: 46822 - protein, 416 aa, Legionella steigerwaltii
  misc_feature (1)..(416): tr|A0A378L654|A0A378L654_9GAMM NADPH-dependent 7-cyano- 7-deazaguanine reductase OS=Legionella steigerwaltii OX =460 GN=queF_1 PE=3 SV=1
MKYYQIKEISQMTSLTIRSLQYYDEIDLLKPAKRSEGGYRLYSEMDLIRLQQITTLKFLGFSLSTIKKIMENPSFDVMTSIGIQARELTEKAARINEAASLLNYISSQMEMNQPVNWKSTAKIIEILELNTMNDQVLQQYQSEAEKSELGKKSSYDETYNPNRLYPIPRAGKRQEIGVDPTQLPFHGFDCWNHYEVSWLNAKGKPMVAIAELFYECNSPNLIESKSLKLYFNSFNNTRIQSVNELERIIKNDLQERVGAEVWINIHPLNSSNQFELQQSFAGDSLDLLDIECSVYLVEPSFLSVGDEMVEETLYSNLLKSNCLVTNQPDWGSVQITYKGKRINREGLLRYLVSYRNHNEFHEQCIERIFVDIMNYCKPEKLTVYGRYTRRGGLDINPYRSTEKTSFTDKNLRLVRQ

SEQ ID NO: 46823 - protein, 415 aa, Legionella taurinensis
  misc_feature (1)..(415): tr|A0A3A5L182|A0A3A5L182_9GAMM NADPH-dependent 7-cyano- 7-deazaguanine reductase OS=Legionella taurinensis OX=7 0611 GN=queF PE=3 SV=1
MRYYQIKEISRLTSLSVRSLQYYDERGLLKPSKRSDAGYRLYSDADLLRLQQIVTLKYLGFSLNEIKKTLNDPQFDIQKSLVVQARLLAEKARQLKEASALLTYIAAQREAKQAVNWRSTAEIIAILELSSMNPVKEQYNHAADASELGRKSDYDASYNPLRLYPIPRAGKRQEIGIHPEQLPFYGFDCWNHYEVSWLNEKGKPIVAMAEIDYDCRTPMLVESKSLKLYFNSFNNTRFKSLAEVVNTIKNDLEQRVQGEVRVAVHPLGSGMTLPLYEHFNGECIDNLDVECSIYTVEPSFLTVTGEWVEETLYSDLLKSNCLVTNQPDWGSVQISYKGQKINREGLLQYLVSFRNHNEFHEQCIERIFIDIMRQCQPEELTVYGRYTRRGGLDINPYRSTKQPVRQGLNFRLPRQ

SEQ ID NO: 46824 - protein, 416 aa, Legionella tucsonensis
  misc_feature (1)..(416): tr|A0A0W0ZZN6|A0A0W0ZZN6_9GAMM NADPH-dependent 7-cyano- 7-deazaguanine reductase OS=Legionella tucsonensis OX=4 0335 GN=queF PE=3 SV=1
MKYYQIKEISQMTSLTIRSLQYYDEICLLKPTKRSISGYRLYSETDLIRLQQITTLKFLGFSLSMIKKIMENPHFDVMTSIGIQARELTEKAMRINEAASLLTYISTQMEMNQQVNWKSTAKIIEILELNTMNDRVLQKYQSEAEQSELGKKSAYDETYNPDRLYPIPRAGKRQEIGVDPVQLPFYGFDCWNHYEVSWLNAKGKPMVAIAELFYDCSSPNLIESKSLKLYFNSFNNTRIQNVNELENTIKKDLQKCVGAEVWVHIHLLEETIEFAVQKPLIGESLDELDIECSIYLVEPSFLSISDEIVEETLFSNLLKSNCLVTSQPDWGSVQITYEGKKINREGLLKYLISYRNHNEFHEQCIERIFVDIMNYCKPEKLTVYGRYTRRGGLDINPYRSTEKTSFAGKNVRLARQ

SEQ ID NO: 46825 - protein, 211 aa, Legionella wadsworthii
  misc_feature (1)..(211): tr|A0A378LUC4|A0A378LUC4_9GAMM GTP cyclohydrolase OS=Le gionella wadsworthii OX=28088 GN=queF PE=4 SV=1
MVAIAELLYDCSSPNIIESKSLKLYFNSFNNTRINNVETLKDTITKDLQERVGAEVVVKIYPLDAANQHAVQPSLDGESLDHLDIECSEYLVDPSTLTASDELVEESLFSNLLKSNCLVTNQPDWGSVQIIYKGKKINREGLLKYIISYRNHNEFHEQCIERIFIDIMNYCKPEKLTVYGRYTRRGGLDINPYRSTEKTSFAGKNLRLVRQ

SEQ ID NO: 46826 - protein, 285 aa, Legionella waltersii
  misc_feature (1)..(285): tr|A0A0W1AN03|A0A0W1AN03_9GAMM NADPH-dependent 7-cyano- 7-deazaguanine reductase OS=Legionella waltersii OX=669 69 GN=queF PE=3 SV=1
MDTSISKNTLEQANDSALGKTVIYDQDYNPSLLFPISRSGKRQEIGIDPQNIPFYGLDYWNHYEVSWLNSKGKPEVAIAEIAYDCSSPNIVESKSLKLYFNSFNNSRFASASEVKAIVQQDLEKAIASAVSVKLLMLDNSSTAHLDKNFKGECIDELDIECSIYTVHPEFLSVGTELVEETLYSNLLKSNCLVTNQPDWGSVQIQYKGNQINREGLLKYLVSFRNHNEFHEQCIERIYVDIMRYCKPVELTVYGRYTRRGGLDINPYRSSKSVGLKGINLRLVRQ

SEQ ID NO: 46827 - protein, 416 aa, Legionella worsleiensis
  misc_feature (1)..(416): tr|A0A0W1AKB6|A0A0W1AKB6_9GAMM NADPH-dependent 7-cyano- 7-deazaguanine reductase OS=Legionella worsleiensis OX= 45076 GN=queF PE=3 SV=1
MKYYQIKEISRMTSLTARSLQYYDEIGLLQPAKRSDSGYRLYSETDLLQLQQIITLKFLGFSLSAIKKILDNPSFDVMVSIAIQARELREKALKLNEASSLLTYIASQMDAKQPVNWNSTAKIIEILEVNTMNDQLLKKYQTSASHTELGKQSQYDSSYNPDRLYAIPRAGKRKEIGIDPDQLPFSGFDCWNHYEVSWLNEKGKPMVAIAELFYDCNSPYLIESKSLKLYFNSFNNTKFNSMNDVEKTVAKDLQERVGREVWVAIYPLSHSKNNALLPSFEGECLDDLDITCSVYMVDPNFLSVSDETVEEILYSDLLKSNCLVTNQPDWGSVQIEYKGKKINREGLLKYLISFRNHNEFHEQCIERIFMDIMRLCQPESLTVYGRYTRRGGLDINPYRSTEKSIMDGKNFRLVRQ

SEQ ID NO: 46828 - protein, 280 aa, Legionella worsleiensis
  misc_feature (1)..(280): tr|A0A0W1AFF9|A0A0W1AFF9_9GAMM NADPH-dependent 7-cyano- 7-deazaguanine reductase OS=Legionella worsleiensis OX= 45076 GN=queF PE=3 SV=1
MEFELEQNRKLELGKKSDYEAHYNADKLFPIPREGKRLEIGINPEQLPFWGFDAWNHYEVSWLNSKGKPVVAVAEIVYDCHSPNIIESKSLKLYFNTFNNTRFDSIADVEHTIINDLSHSLKSDVHVRINQLGNAHTTGLQNAFNGESIDSLDISCSVYSVDPSFLTVEEEQVEEVLYTDLLKSNCLVTYQPDWGSVQIHYKGPKINKEGLLRYIVSFRNHNEFHEQCIERIFVDIMKQCKPQELTVYGRYTRRGGIDINPYRSTQKPDFNVQNIRLIRQ

SEQ ID NO: 46829 - protein, 280 aa, Legionellaceae bacterium
  misc_feature (1)..(280): tr|A0A2E5YA17|A0A2E5YA17_9GAMM NADPH-dependent 7-cyano- 7-deazaguanine reductase OS=Legionellaceae bacterium OX =2026753 GN=queF PE=3 SV=1
MSKIDVSFRENLELGRQSSTDLTYNPARLLPIERTHNRQTIGITTADLPFKGQDYWNHYEVSWLNQKGKPQVGIGEISYDCRSPKLIESKSLKLYFNSLNQTSFDDIATLERIICQDLELCLETPVSVRIHTLENSSNFSSIQNFDGVCLDTLDIACTTYEVEPNFLTTESLYIEESVYSNLLKSNCLVTHQPDWGSVQISYKGRQINHEGLLQYLVSFRNHNEFHEHCIERIFMDILKRCQPEELTVYGRYTRRGGIDINPYRTTKHRADVNNQRFIRQ

SEQ ID NO: 46830 - protein, 277 aa, Legionellales bacterium
  misc_feature (1)..(277): tr|A0A1G0X3Q2|A0A1G0X3Q2_9GAMM NADPH-dependent 7-cyano- 7-deazaguanine reductase OS=Legionellales bacterium RIF CSPHIGHO2_12_FULL_37_14 OX=1798568 GN=queF PE=3 SV=1
MQTKAEQSELGRSASYDAHYNPERLFAIPRAAKRKEIGINPNLLPFYGFDCWNHYEVSWLNEKGKPMVAVAEIIYDCKTPFLVESKSLKLYFNSFNNTKFSNAEDIRQTVEKDLSLCLLGDVQVRILSLADKPLLEIHAALEGECIDSLDVTCSTYLVDPSYLSVEENKVEEVLCSDLLKSNCLVTNQPDWGSVQISYTGKQINKAGLLQYLVSFRNHNEFHEQCIERIFVDIMQFCKPEKLSVYGRYTRRGGLDINPYRSTEKIAAEGLNYRLVRQ

SEQ ID NO: 46831 - protein, 280 aa, Legionellales bacterium; identical to SEQ ID NO: 46829
  misc_feature (1)..(280): tr|A0A3D0RB26|A0A3D0RB26_9GAMM NADPH-dependent 7-cyano- 7-deazaguanine reductase OS=Legionellales bacterium OX= 2026754 GN=queF PE=3 SV=1

SEQ ID NO: 46832 - protein, 154 aa, Leisingera aquaemixtae
  misc_feature (1)..(154): tr|A0A0N7M594|A0A0N7M594_9RHOB NADPH-dependent 7-cyano- 7-deazaguanine reductase OS=Leisingera aquaemixtae OX=1 396826 GN=queF PE=3 SV=1
MSDSIYSNLKQLGGDTIVPQSPEEAELERVQNPQADVAYNVRFTAPEFTSLCPMTGQPDFAHLVIDYVPGDWLVESKSLKLFLTSFRNHGAFHEDCTVSIARRLADFLEPQWLRIGGYWYPRGGIPIDVFWQTGPMPEGVWIPDQGVPPYRGRG

SEQ ID NO: 46833 - protein, 154 aa, Leisingera methylohalidivorans
  misc_feature (1)..(154): tr|V9VS05|V9VS05_9RHOB NADPH-dependent 7-cyano-7-deazag uanine reductase OS=Leisingera methylohalidivorans DSM 14336 OX=999552 GN=queF PE=3 SV=1
MSDSIYSNLKQLGGDTILPASPQEAELERVQNPQADVAYNVRFTAPEFTSLCPMTGQPDFAHLVIDYVPGEWLVESKSLKLFLTSFRNHGAFHEDCTVSIARRLADFLEPQWLRIGGYWYPRGGIPIDVFWQTGPMPEGVWIPDQGVPPYRGRG

SEQ ID NO: 46834 - protein, 154 aa, Leisingera sp.
  misc_feature (1)..(154): tr|A0A0B4BYW3|A0A0B4BYW3_9RHOB NADPH-dependent 7-cyano- 7-deazaguanine reductase OS=Leisingera sp. ANG-Vp OX=15 77896 GN=queF PE=3 SV=1
MSDSIYSNLKQLGGDTIVPQSPEQAELERVQNPQGDVAYNVRFTAPEFTSLCPMTGQPDFAHLVIDYVPGEWLVESKSLKLFLTSFRNHGAFHEDCTVSIARRLADFLEPQWLRIGGYWYPRGGIPIDVFWQTGPMPEGVWIPDQGVPPYRGRG

SEQ ID NO: 46835 - protein, 154 aa, Leisingera sp.
  misc_feature (1)..(154): tr|A0A481PL29|A0A481PL29_9RHOB NADPH-dependent 7-cyano- 7-deazaguanine reductase OS=Leisingera sp. NJS204 OX=25 08307 GN=queF PE=3 SV=1
MSDSIYSNLKQLGGDTVVPASPEQAELERVQNPQSDTAYNVRFTAPEFTSLCPMTGQPDFAHLVIDYVPGEWLVESKSLKLFLTSFRNHGAFHEDCTVSIARRLADFLQPQWLRIGGYWYPRGGIPIDVFWQTGPMPEGVWIPDQGVPPYRGRG

SEQ ID NO: 46836 - protein, 280 aa, Lelliottia amnigena
  misc_feature (1)..(280): tr|A0A3S5XU04|A0A3S5XU04_LELAM NADPH-dependent 7-cyano- 7-deazaguanine reductase OS=Lelliottia amnigena OX=6164 6 GN=queF PE=3 SV=1
MSYENHQALTGLTLGKTTDYRDTYDASLLQGVPRSLNRDPLGLSADALPFVGGDIWTLYELSWLNARGLPQVAVGHVELDYASVNLVESKSFKLYLNSFNQTRFDSWDDVQHTLERDLSACAQGNVTVALYRLNELEGQPIAHFHGACIDDQDIEIDNYEFSTDYLENATGGNVVEETLVSHLLKSNCLITHQPDWGSVQIQYRGPKIDREKLLRYLVSFRHHNEFHEQCVERIFNDIQRFCQPEKLSVYARYTRRGGLDINPWRTNTDFAPAIGRLVRQ

SEQ ID NO: 46837 - protein, 280 aa, Lelliottia amnigena
  misc_feature (1)..(280): tr|A0A1A9FF97|A0A1A9FF97_LELAM NADPH-dependent 7-cyano- 7-deazaguanine reductase OS=Lelliottia amnigena OX=6164 6 GN=queF PE=3 SV=1
MTDENHQALTGLTLGKSTDYRDTYDASLLQGVPRSLNRDPLGLRANALPFTGGDIWTLYELSWLNARGLPQVAVGHVELDYASVNLVESKSFKLYLNSFNQTRFDSWEEVQRTMERDLSACAQGKVTVALYRIHELEGQPIAHFHGACIDDQAIEIDSYAFSTAYLENAADGKVVEETLVSHLLKSNCLITHQPDWGSVQIQYRGPKIDREKLLRYLVSFRHHNEFHEQCVERIFNDIQRFCQPETLSVYARYTRRGGLDINPWRTNTDFVPATGRLVRQ

SEQ ID NO: 46838 - protein, 280 aa, Lelliottia nimipressuralis; identical to SEQ ID NO: 45883
  misc_feature (1)..(280): tr|A0A1J5VQF1|A0A1J5VQF1_9ENTR NADPH-dependent 7-cyano- 7-deazaguanine reductase OS=Lelliottia nimipressuralis OX=69220 GN=queF PE=3 SV=1

SEQ ID NO: 46839 - protein, 280 aa, Lelliottia nimipressuralis
  misc_feature (1)..(280): tr|A0A2L2JG93|A0A2L2JG93_9ENTR NADPH-dependent 7-cyano- 7-deazaguanine reductase OS=Lelliottia nimipressuralis OX=69220 GN=queF PE=3 SV=1
MSYENHQALTGLTLGKSTDYRDTYDASLLQGVPRSLNRDPLGLHADALPFVGGDIWTLYELSWLNARGLPQVAVGHVELDYASVNLVESKSFKLYLNSFNQTKFNSWEDVQHTLERDLSACAQGKVSVSLYRLHELEGQPVAHFNGTCIDDQDIEVENYEFSADYLENAASGKVVEETLVSHLLKSNCLITHQPDWGSVQIQYRGPKIDREKLLRYLVSFRHHNEFHEQCVERIFSDIQRFCQPEKLSVYARYTRRGGLDINPWRTNTDFVPATGRLVRQ

SEQ ID NO: 46840 - protein, 280 aa, Lelliottia sp.
  misc_feature (1)..(280): tr|A0A2S5C9K5|A0A2S5C9K5_9ENTR NADPH-dependent 7-cyano- 7-deazaguanine reductase OS=Lelliottia sp. 7254-16 OX=2 080842 GN=queF PE=3 SV=1
MSYENHQALSGLTLGKTTAYRDTYDASLLQGVPRSLNRDPLGLKVDTLPFVGGDIWTLYELSWLNARGLPQVAVGHVELDYASLNLVESKSFKLYLNSFNQTQFDSWEDVQRTLERDLSACAQGKVTVALYRLNELEGQPVAHFHGTCIDDQDITIESYEFSTDYLHNAAGEKVVEETLVSHLLKSNCLITHQPDWGSVQIQYRGPKIDREKLLRYLVSFRHHNEFHEQCVERIFNDIQRFCHPEKLSVYARYTRRGGLDINPWRTNTDFVPATGRLVRQ

SEQ ID NO: 46841 - protein, 284 aa, Leminorella grimontii
  misc_feature (1)..(284): tr|A0A085HMV0|A0A085HMV0_9GAMM NADPH-dependent 7-cyano- 7-deazaguanine reductase OS=Leminorella grimontii ATCC 33999 = DSM 5078 OX=1005999 GN=queF PE=3 SV=1
MSHNYENHQALSGLTLGKETGYVDRYDAALLQPVPRSLNREPLGLLPENLPFTGADIWTLYELSWLNASGVPQVAVGEVRIDANSLNLIESKSFKLYLNSFNQTHFDSWKDVEHTLRRDLSLCAQGDVDIRLFKLAELENAPIGAFAGECIDEQDIVIDSYDFNDRLLENAAARGAPLVEETLVSHLLKSNCLITHQPDWGSLQISYRGPKIDREALLRYVVSFRHHNEFHEQCVERIFHDIQRYCRPEALTVYARYTRRGGLDINPYRTNRPFTPSVQRLARQ

SEQ ID NO: 46842 - protein, 284 aa, Leminorella grimontii; identical to SEQ ID NO: 46841
  misc_feature (1)..(284): tr|A0A485A8C4|A0A485A8C4_9GAMM NADPH-dependent 7-cyano- 7-deazaguanine reductase OS=Leminorella grimontii OX=82 981 GN=queF PE=3 SV=1

SEQ ID NO: 46843 - protein, 285 aa, Leminorella richardii
  misc_feature (1)..(285): tr|A0A2X4UAW5|A0A2X4UAW5_9GAMM NADPH-dependent 7-cyano- 7-deazaguanine reductase OS=Leminorella richardii OX=15 8841 GN=queF PE=3 SV=1
MTHHYQDNQALSELTLGKETRYIDRYDAALLQPVPRSLNREPLGLKQGSLPFTGADIWTLYELSWLNAGGVPQVAVGEVRVNADSQNLIESKSFKLYLNSFNQTRFDSWRDIEYTLRRDLSGCAQGDVDVRLFTLSELENTPVGTLSGECIDGQDITINDYDFNERLLENAVKPGSTETVEETLVSHVLKSNCLITHQPDWGSLQIHYCGPKIDREALLRYIVSFRHHNEFHEQCVERIFHDIQRYCHPKALTVYARYTRRGGLDINPYRTNQPFTPSTLRLARQ

SEQ ID NO: 46844 - protein, 164 aa, Lentibacillus amyloliquefaciens
  misc_feature (1)..(164): tr|A0A0U4FR93|A0A0U4FR93_9BACI NADPH-dependent 7-cyano- 7-deazaguanine reductase OS=Lentibacillus amyloliquefac iens OX=1472767 GN=queF PE=3 SV=1
MTERRDDLQDLTQLGNQGTSYQFNYTPDVLEAIDNLHPDRDYFVKFNCPEFTTLCPQTGQPDFATVYISYIPDQKIVESKSLKLYLFSFRNHGDFHEDCINIIMNDLIDLLDPRYIEVWGKFTPRGGISIDPYCNYGKPGTKYEQMADHRLMNHDLYPEKVDNR

SEQ ID NO: 46845 - protein, 162 aa, Lentibacillus halodurans
  misc_feature (1)..(162): tr|A0A1I0YFE1|A0A1I0YFE1_9BACI NADPH-dependent 7-cyano- 7-deazaguanine reductase OS=Lentibacillus halodurans OX =237679 GN=queF PE=3 SV=1
MEGRRDEDLQDLSQLGSQGTAYQFDYTPDVLETFDNKHPDRDYFVKFNCPEFTTLCPKTGQPDFGIVYISYIPERKMVESKSLKLYLFSFRNHGDFHEDSMNIIMNDLIDLMDPRYIEVWGKFTPRGGISIDPYCNYGKPDTRFEEMAAHRLMNHDLYPAYN

SEQ ID NO: 46846 - protein, 165 aa, Lentibacillus persicus
  misc_feature (1)..(165): tr|A0A1I1YM74|A0A1I1YM74_9BACI NADPH-dependent 7-cyano- 7-deazaguanine reductase OS=Lentibacillus persicus OX=6 40948 GN=queF PE=3 SV=1
MKNRHDPNLQNLSQLGSQGTAYQFDYTPDVLETFENQHPERDYFVKFNCPEFTTLCPKTGQPDFGTVYISYIPDEKMVESKSLKLYLFSFRNHGDFHEDSMNIIMNDLIELMEPRYIEVWGKFTPRGGISIDPYCNYGKPGTKYEKMADHRLINHDLYPEKVDNR

SEQ ID NO: 46847 - protein, 165 aa, Lentibacillus sp.
  misc_feature (1)..(165): tr|A0A4V1UYG3|A0A4V1UYG3_9BACI NADPH-dependent 7-cyano- 7-deazaguanine reductase OS=Lentibacillus sp. SSKP1-9 O X=2510307 GN=queF PE=3 SV=1
MTGRHEENLEDLSLLGNQGTVYQFDYTPEVLETFENKHPDRDYFVKFNCPEFTTLCPKTNQPDFGTVYISYIPDANMVESKSLKLYLFSFRNHGDFHEDCMNIIMNDLIDLMDPRYIEVWGKFTPRGGISIDPFCNYGKPGTRFEEMAAHRLMNHDLYPEKVDNR

SEQ ID NO: 46848 - protein, 139 aa, Lentisphaera araneosa
  misc_feature (1)..(139): tr|A6DL68|A6DL68_9BACT NADPH-dependent 7-cyano-7-deazag uanine reductase OS=Lentisphaera araneosa HTCC2155 OX=3 13628 GN=queF PE=3 SV=1
MSEKERLNDLTLLSKNENNYFTSPDDAPLEVFDNLYVGRDYKITFNCPEFTALCPVTSQPDFGKITITYIADKKCVESKSLKMYLFAFRNHNSFHEEVVNRILEDIVAVCDPREITVYGEFMPRGGISLDIEASHKKES

SEQ ID NO: 46849 - protein, 278 aa, Lentisphaerae bacterium
  misc_feature (1)..(278): tr|A0A1G0WEM6|A0A1G0WEM6_9BACT NADPH-dependent 7-cyano- 7-deazaguanine reductase QueF OS=Lentisphaerae bacteriu m GWF2_38_69 OX=1798570 GN=A2X47_06610 PE=4 SV=1
MSQTINNSLLGKSSDYSLRYEPGILFPVPRLESRKDLNCNLNPLPFTGYDIWSAYELSYLNIKGKPQCFLGFIIFPYNTENIIESKSLKLYLNSLSEKKFKNNKEFANLITKDLSNVSKGNVIIKIFTENDFISANIAKFEGTCLDVADIEFSDYKINKKLVCLENDNLTNETLYTNLFKSNCPVTGQPDWASVQVSYFGKTISRENLLRYLVSYRTHSAFHENCVENIFCDIMESCNPEKLTVYARFTRRGGLDINPIRTNDSERTLPCIKTRLFRQ

SEQ ID NO: 46850 - protein, 181 aa, Lentisphaerae bacterium
  misc_feature (1)..(181): tr|A0A1V5UZR3|A0A1V5UZR3_9BACT NADPH-dependent 7-cyano- 7-deazaguanine reductase OS=Lentisphaerae bacterium ADu rb.Bin242 OX=1852900 GN=queF PE=3 SV=1
MVKYFSRICFANLHYNVILWEKYGMPNGKGIPMTQKKKSPASAEPHASLTLLNRSHTEYPDSPGKARIETFSNAYPERNYVITFDCPEFTSLCPVTNQPDFGHIVIRYVADRLCLESKALKLYLFSFRNHHSFHEEAVNRILTDLRKACSPRWMEVTGDFMPRGGIAIHVCAEEGDSSLKK

SEQ ID NO: 46851 - protein, 144 aa, Lentisphaerales bacterium
  misc_feature (1)..(144): tr|A0A524MQL7|A0A524MQL7_9BACT NADPH-dependent 7-cyano- 7-deazaguanine reductase OS=Lentisphaerales bacterium O X=2448604 GN=queF PE=3 SV=1
MAKRKRQTSGRLSLLGKSVTPVPASPQEATLEAFENKSRQRDYIVRFDCPEFTSLCPITGQPDFGSITIEYVPARLCLESKSLKLYLFAYRNEGIFHEEVVNRILRDVVKAIKPRSARIEGTFRPRGGISITVRAAYPTAEGLN

SEQ ID NO: 46852 - protein, 145 aa, Lentisphaeria bacterium
  misc_feature (1)..(145): tr|A0A352N230|A0A352N230_9BACT NADPH-dependent 7-cyano- 7-deazaguanine reductase OS=Lentisphaeria bacterium OX= 2053569 GN=queF PE=3 SV=1
MKKLDSRRFARLTQLKASRTSFPGNPQNANVEVFENLFPERNYEIEFVCPEFTSLCPVTGQPDFGEISVKYIPDRLCVESKSLKLFLFSFRNFNTFHEEAVNIIADRINEACSPRWLQVSGRFHPRGGISINVKVEKTRKGFRHK

SEQ ID NO: 46853 - protein, 147 aa, Lentisphaeria bacterium
  misc_feature (1)..(147): tr|A0A3D1UW59|A0A3D1UW59_9BACT NADPH-dependent 7-cyano- 7-deazaguanine reductase OS=Lentisphaeria bacterium OX= 2053569 GN=queF PE=3 SV=1
MQTSAGKKALPHSSLTLLNRNHTEYPDSPDKAKIETFDNAYPQRNYVITFDCPEYSSLCPVTNQPDYGHITVRYIADKKCIESKALKLYLFSFRNFNTFHEESVNRILTDLVKACRPRWMEVTGDFMPRGGIAIHVRAEEGDSSLVK

SEQ ID NO: 46854 - protein, 143 aa, Leptolyngbya antarctica
  misc_feature (1)..(143): tr|A0A2W4WKU9|A0A2W4WKU9_9CYAN NADPH-dependent 7-cyano- 7-deazaguanine reductase OS=Leptolyngbya antarctica OX= 268115 GN=queF PE=3 SV=1
MTIAPAPTSQYGDRAIHQAAIEPLEKWPNPSENVYTIHLEHPEFTALCPRSGYPDFGTIVVDYCPGPWVVELKAFKLYINSFRDQRVSHEAVANAIADRLWEELQPRGLRVIGDYTRRGGVKTVIAVKKGSCNEFEPYTANAL

SEQ ID NO: 46855 - protein, 131 aa, Leptolyngbya boryana
  misc_feature (1)..(131): tr|A0A1Z4JI44|A0A1Z4JI44_LEPBY NADPH-dependent 7-cyano- 7-deazaguanine reductase OS=Leptolyngbya boryana NIES-2 135 OX=1973484 GN=queF PE=3 SV=1
MTQAQDHPEVKYGERLIEEGSLITFPNPRPGRRYTINITLPEFTCKCPFSGYPDFATIYVSYVPDQRVVELKAIKLYINSYRDRYISHEEAANQILDDIVAACDPLEISIKADYTPRGNVHTVVEVTHTKV

SEQ ID NO: 46856 - protein, 131 aa, Leptolyngbya boryana; identical to SEQ ID NO: 46855
  misc_feature (1)..(131): tr|A0A024F9G5|A0A024F9G5_LEPBY NADPH-dependent 7-cyano- 7-deazaguanine reductase OS=Leptolyngbya boryana OX=118 4 GN=orf131 PE=3 SV=1

SEQ ID NO: 46857 - protein, 135 aa, Leptolyngbya foveolarum
  misc_feature (1)..(135): tr|A0A2W4U7X5|A0A2W4U7X5_9CYAN NADPH-dependent 7-cyano- 7-deazaguanine reductase OS=Leptolyngbya foveolarum OX= 47253 GN=queF PE=3 SV=1
MTTQDISKTASDDPTLYGERAIEAGSLITFPNPRPGREYTIDITLPEFTCKCPFSGYPDFATIHIHYVPDEKVVELKAIKLYINSYRDRHISHEESINLIMDDFVAACDPRSVTIKGDFLPRGNVHTVIEVAHQK

SEQ ID NO: 46858 - protein, 145 aa, Leptolyngbya frigida
  misc_feature (1)..(145): tr|A0A2T1DZQ4|A0A2T1DZQ4_9CYAN NADPH-dependent 7-cyano- 7-deazaguanine reductase OS=Leptolyngbya frigida ULC18 OX=2107698 GN=queF PE=3 SV=1
MIHPETQPFSTAEFETQAQTSEPKYGERHIAQGELITFPNPRIGRRYDIHITLPEFTCKCPFSGYPDFATIYLSYVPNQRVVELKAIKLYINSYRDRYISHEESVNQILDDFVAACDPLEVKIKGDFLPRGNVHTVIEVTHQKDA

SEQ ID NO: 46859 - protein, 139 aa, Leptolyngbya sp.
  misc_feature (1)..(139): tr|K9F2S6|K9F2S6_9CYAN NADPH-dependent 7-cyano-7-deazag uanine reductase OS=Leptolyngbya sp. PCC 7375 OX=102129 GN=queF PE=3 SV=1
MTDTTFPKATPTEKIKYGERAIEENHLITFPNPRPGRQYDVNITLPEFTCKCPFSGYPDFATIYITYTPNEKVVELKAIKLYINGYRDRYISHEESINQIMDDFIAAADPLKFKIKGDFQPRGNVHTTVEIAYEKPTTV

SEQ ID NO: 46860 - protein, 143 aa, Leptolyngbya sp.
  misc_feature (1)..(143): tr|A0A2W7A2F5|A0A2W7A2F5_9CYAN NADPH-dependent 7-cyano- 7-deazaguanine reductase OS=Leptolyngbya sp. OX=47254 G N=queF PE=3 SV=1
MTIAPAPTSQYGDRAIHQAAIEPLEKWPNPSENVYTIHLEHPEFTALCPRSGYPDFGTIVVDYCPGPWVVELKAFKLYINSFRDQRVSHETVANAIADRLWEELQPRGLRVIGDYTRRGGVKTVIAVKKGNCNEFEPYTANAL

SEQ ID NO: 46861 - protein, 125 aa, Leptolyngbya valderiana
  misc_feature (1)..(125): tr|A0A166TII6|A0A166TII6_9CYAN NADPH-dependent 7-cyano- 7-deazaguanine reductase OS=Leptolyngbya valderiana BDU 20041 OX=322866 GN=queF PE=3 SV=1
MPDPSLLEAFPTPVDTPFTVEHVAEEFTSLCPKTGHPDFGEVVVVFQPAAGSSGGLCVELKSLKVYLQSFRNEGIFYEAVTNRIRDDLCELMQPTWLRVTTHWRGRGGIRSVIKADHGTVPPNVA

SEQ ID NO: 46862 - protein, 147 aa, Leptolyngbya valderiana
  misc_feature (1)..(147): tr|A0A166TKT5|A0A166TKT5_9CYAN NADPH-dependent 7-cyano- 7-deazaguanine reductase OS=Leptolyngbya valderiana BDU 20041 OX=322866 GN=queF PE=3 SV=1
MSDLHSVSNSISENETAETATEVKYGEREIQEGKLITFPNPRVGRRYEIQITLPEFTCKCPFSGYPDFATIEITYVPDERVVELKAIKLYINSYRDRYISHEESANQILDDFVAACDPLEVRLKADFSPRGNVHTVIEVQHVKGDSL

SEQ ID NO: 46863 - protein, 133 aa, Leptonema illini
  misc_feature (1)..(133): tr|H2CH62|H2CH62_9LEPT NADPH-dependent 7-cyano-7-deazag uanine reductase OS=Leptonema illini DSM 21528 OX=92956 3 GN=queF PE=3 SV=1
MDLHLSETYDGKQDHIRDLVLPDIEVFQNIYSDRDYRIELEFPEFTAICPKTGLPDFGVVYLSYVPDQHCLELKSLKEYFFAYRNIGIFHENVVNRICEDVAHACKPRELDVRAVYNVRGGITTTVSTSYKAK

SEQ ID NO: 46864 - protein, 133 aa, Leptospira adleri
  misc_feature (1)..(133): tr|A0A2M9YU95|A0A2M9YU95_9LEPT NADPH-dependent 7-cyano- 7-deazaguanine reductase OS=Leptospira adleri OX=202318 6 GN=queF PE=3 SV=1
METINPETYDGRQDHIPALKTPEIESFTNVYEGKDYTIDFTVPEFTAVCPKTGLPDFGIIEISYVPTNRCIELKSFKEYILSYRNVGIFHEFVVNKILDDLVKAIDPKYLKVIGDYNPRGGIKTIVTREYKRA

SEQ ID NO: 46865 - protein, 133 aa, Leptospira alexanderi
  misc_feature (1)..(133): tr|V6HZ34|V6HZ34_9LEPT NADPH-dependent 7-cyano-7-deazag uanine reductase OS=Leptospira alexanderi serovar Manha o 3 str. L 60 OX=1049759 GN=queF PE=3 SV=1
METNHPETYDGRQDHIPSLKTPEIESFTNVYEGKDYTIDFTVPEFTAVCPKTGLPDFGVIFISYIPTGRCIELKSFKEYILSYRNVGIFHEFLVNKIMEDLIAAIDPKYLKVIGDYNPRGGIKTVVTREYSKT

SEQ ID NO: 46866 - protein, 183 aa, Leptospira alstonii
  misc_feature (1)..(183): tr|M6D4L6|M6D4L6_9LEPT NADPH-dependent 7-cyano-7-deazag uanine reductase OS=Leptospira alstonii serovar Sichuan str. 79601 OX=1218565 GN=queF PE=3 SV=1
MSVLPTEINYGNFLLDIHSTLLEDFDTNSRSGKRIFVVEKSKSLVIKELSMETNHPETYDGRQDHIPALKTPEIESFTNVYEGKDYTIDFTVPEFTAVCPKTGLPDFGVIFISYIPTSRCIELKSFKEYILSYRNVGIFHEFLVNKILEDLIAAIDPKYLKVIGDYNARGGIKTIVTREYTKA

SEQ ID NO: 46867 - protein, 180 aa, Leptospira alstonii
  misc_feature (1)..(180): tr|T0FPZ9|T0FPZ9_9LEPT NADPH-dependent 7-cyano-7-deazag uanine reductase OS=Leptospira alstonii serovar Pingcha ng str. 80-412 OX=1218564 GN=queF PE=3 SV=1
MPTEINYGNFLLDIHSTLLEDFDTNSRSGKRIFVVEKSKSLVIKELSMETNHPETYDGRQDHIPALKTPEIESFTNVYEGKDYTIDFTVPEFTAVCPKTGLPDFGVIFISYIPTSRCIELKSFKEYILSYRNVGIFHEFLVNKILEDLIAAIDPKYLKVIGDYNARGGIKTIVTREYTKA

SEQ ID NO: 46868 - protein, 137 aa, Leptospira andrefontaineae
  misc_feature (1)..(137): tr|A0A4R9H2I7|A0A4R9H2I7_9LEPT NADPH-dependent 7-cyano- 7-deazaguanine reductase OS=Leptospira andrefontaineae OX=2484976 GN=queF PE=3 SV=1
MSHQQESIGISAYEGRQDHIPSLKLPEIESFANVYEGKDYTIDFTIPEFTAVCPKTGLPDFGVIEISYIPKAKCIELKSLKEYILAYRNLGIFHENVVNHILEDLIQSVDPKYIKVKGDYNLRGGIKTIVTREYTSK

SEQ ID NO: 46869 - protein, 133 aa, Leptospira bandrabouensis
  misc_feature (1)..(133): tr|A0A4Z1ARK7|A0A4Z1ARK7_9LEPT NADPH-dependent 7-cyano- 7-deazaguanine reductase OS=Leptospira bandrabouensis O X=2484903 GN=queF PE=3 SV=1
MSEKKSESSYEDKQDHIPSWKTPEIEWFANVYAGKEYNIEFTIPEFTAVCPKTGLPDFGTIYIDYIPRDKCVELKSLKEYMMSYRNIGIFHENVVNKILEDFVSAVDPMYVKVVGDYNVRGGVKTIVKREYKA

SEQ ID NO: 46870 - protein, 133 aa, Leptospira barantonii
  misc_feature (1)..(133): tr|A0A5F2BV78|A0A5F2BV78_9LEPT NADPH-dependent 7-cyano- 7-deazaguanine reductase OS=Leptospira barantonii OX=20 23184 GN=queF PE=3 SV=1
METNHPETYDGRQDHIPSLKTPEIESFTNVYGGKDYTIDFTVPEFTAVCPKTGLPDFGVIYVSYIPTQRCIELKSFKEYILSYRNVGIFHEFLVNKIMEDLISSIDPKYLKVIGDYNARGGIKTVVTREYKKA

SEQ ID NO: 46871 - protein, 133 aa, Leptospira barantonii
  misc_feature (1)..(133): tr|A0A2M9YX84|A0A2M9YX84_9LEPT NADPH-dependent 7-cyano- 7-deazaguanine reductase OS=Leptospira barantonii OX=20 23184 GN=queF PE=3 SV=1
METNHPETYDGRQDHIPSLKTPEIESFTNVYEGKDYTIDFTVPEFTAVCPKTGLPDFGVIYVSYIPTQRCIELKSFKEYILSYRNVGIFHEFLVNKIMEDLISSIDPKYLKVIGDYNARGGIKTVVSREYKKA

SEQ ID NO: 46872 - protein, 133 aa, Leptospira biflexa
  misc_feature (1)..(133): tr|B0SR20|B0SR20_LEPBP NADPH-dependent 7-cyano-7-deazag uanine reductase OS=Leptospira biflexa serovar Patoc (s train Patoc 1 / ATCC 23582 / Paris) OX=456481 GN=queF P E=3 SV=1
MSEKKSESSYEDKQDHIPAWTTPAIEWFANVYAGKEYNIEFTIPEFTAVCPKTGLPDFGTIYIEYIPREKCAELKSLKEYMMAYRNVGIFHENVVNKILEDFVKAIDPLYAKVIGDYNVRGGVKTVVKREYKA

SEQ ID NO: 46873 - protein, 133 aa, Leptospira biflexa; identical to SEQ ID NO: 46872
  misc_feature (1)..(133): tr|A0A5F2CB66|A0A5F2CB66_LEPBI NADPH-dependent 7-cyano- 7-deazaguanine reductase OS=Leptospira biflexa OX=172 G N=queF PE=3 SV=1

SEQ ID NO: 46874 - protein, 133 aa, Leptospira borgpetersenii
  misc_feature (1)..(133): tr|A0A0E3BNB3|A0A0E3BNB3_LEPBO NADPH-dependent 7-cyano- 7-deazaguanine reductase OS=Leptospira borgpetersenii s erovar Ballum OX=280505 GN=queF PE=3 SV=1
MKTNHPESYDGRQDHIPSLKTPEIESFTNVYEGKDYTIDFTVPEFTAVCPKTGLPDFGVIYVSYIPTKRCIELKSFKEYILSYRNVGVFHEFLVNKIMEDLIAAIDPKYLKVIGDYNARGGIKTVVTREYNKI

SEQ ID NO: 46875 - protein, 133 aa, Leptospira borgpetersenii
  misc_feature (1)..(133): tr|M6WAD2|M6WAD2_LEPBO NADPH-dependent 7-cyano-7-deazag uanine reductase OS=Leptospira borgpetersenii serovar P omona str. 200901868 OX=1192866 GN=queF PE=3 SV=1
MKTNHPETYDGRQDHIPSLKTPEIESFTNVYEGKDYTIDFTVPEFTAVCPKTGLPDFGVIYVSYVPTKRCIELKSFKEYILSYRNVGVFHEFLVNKIMEDLIAAIDPKYLKVIGDYNARGGIKTVVTREYNKI

SEQ ID NO: 46876 - protein, 133 aa, Leptospira bourretii
  misc_feature (1)..(133): tr|A0A4R9IM36|A0A4R9IM36_9LEPT NADPH-dependent 7-cyano- 7-deazaguanine reductase OS=Leptospira bourretii OX=248 4962 GN=queF PE=3 SV=1
MSEKKSESSYEDKQDHIPSWKTPEIEWFANVYAGKEYNIEFTIPEFTAVCPKTGLPDFGTIYIDYIPRDKCVELKSLKEYMMSYRNIGIFHENVVNKILEDFVLAVNPIYVKVVGDYNVRGGVKTIVKREYKA

SEQ ID NO: 46877 - protein, 133 aa, Leptospira bouyouniensis
  misc_feature (1)..(133): tr|A0A4R9HJA5|A0A4R9HJA5_9LEPT NADPH-dependent 7-cyano- 7-deazaguanine reductase OS=Leptospira bouyouniensis OX =2484911 GN=queF PE=3 SV=1
MSEKKSESSYEDKQDHIPSWSTPPIDWFANVYAGKEYNIEFTIPEFTAVCPKTGLPDFGTIYIEYIPRDKCVELKSLKEYMMAYRNVGIFHENVVNKILEDFVGAVDPMYVKVIGDYNVRGGVKTVVKREYKA

SEQ ID NO: 46878 - protein, 133 aa, Leptospira brenneri
  misc_feature (1)..(133): tr|A0A5F1Z3Z0|A0A5F1Z3Z0_9LEPT NADPH-dependent 7-cyano- 7-deazaguanine reductase OS=Leptospira brenneri OX=2023 182 GN=queF PE=3 SV=1
MSEKKSESSYEDKQDHIPSWKTPEIEWFANVYAGKEYNIEFTIPEFTAVCPKTGLPDFGSIFIEYIPRERCVELKSLKEYMMAYRNVGIFHENVVNKILEDFVAAVDPIYVKVVGDYNVRGGVKTIVKREYKA

SEQ ID NO: 46879 - protein, 133 aa, Leptospira brenneri
  misc_feature (1)..(133): tr|A0A2M9Y2B4|A0A2M9Y2B4_9LEPT NADPH-dependent 7-cyano- 7-deazaguanine reductase OS=Leptospira brenneri OX=2023 182 GN=queF PE=3 SV=1
MSEKKSESSYEDKQDHIPSWKTPEIEWFANVYAGKEYNIEFTIPEFTAVCPKTGLPDFGSIFIEYIPRERCVELKSLKEYMMAYRNVGIFHENVVNKILEDFVSAVDPIYVKVVGDYNVRGGVKTIVKREYKA

SEQ ID NO: 46880 - protein, 139 aa, Leptospira broomii
  misc_feature (1)..(139): tr|T0G9T4|T0G9T4_9LEPT NADPH-dependent 7-cyano-7-deazag uanine reductase OS=Leptospira broomii serovar Hurstbri dge str. 5399 OX=1049789 GN=queF PE=3 SV=1
MDDRQQETGASSYDGRQDHIPTLKLPEIESFANVYEGKDYTIDFTIPEFTAVCPKTGLPDFGTIEISYVPRDRCIELKSLKEYILAFRNLGIFHENVVNRILEDLVKSVEPKFVRVKGDYNLRGGIKTVVTREYRLEGN

SEQ ID NO: 46881 - protein, 133 aa, Leptospira congkakensis
  misc_feature (1)..(133): tr|A0A4Z1AHN0|A0A4Z1AHN0_9LEPT NADPH-dependent 7-cyano- 7-deazaguanine reductase OS=Leptospira congkakensis OX= 2484932 GN=queF PE=3 SV=1
MSEKKSESSYEDKQDHIPSWKTPEIEWFANVYAGKEYNIEFTIPEFTAVCPKTGLPDFGSIFIEYIPRERCVELKSLKEYMMSYRNVGIFHENVVNKILEDFVQAVDPLYVKVVGDYNVRGGVKTIVKREFKA

SEQ ID NO: 46882 - protein, 133 aa, Leptospira dzianensis
  misc_feature (1)..(133): tr|A0A5F2BTB2|A0A5F2BTB2_9LEPT NADPH-dependent 7-cyano- 7-deazaguanine reductase OS=Leptospira dzianensis OX=24 84905 GN=queF PE=3 SV=1
METTHPETYDGRQDHIPGLKTPEIESFTNVYEGKDYTIDFTVPEFTAVCPKTGLPDFGVIYVSYIPTKRCIELKSFKEYILSYRNVGIFHEFLVNKIMEDLIQAVEPKYLKVIGDYNARGGIKTIVTREYSKD

SEQ ID NO: 46883 - protein, 133 aa, Leptospira dzianensis
  misc_feature (1)..(133): tr|A0A5F2E3P1|A0A5F2E3P1_9LEPT NADPH-dependent 7-cyano- 7-deazaguanine reductase OS=Leptospira dzianensis OX=24 84905 GN=queF PE=3 SV=1
METTHPETYDGRQDHIPGLKTPEIESFTNVYEGKDYTIDFTVPEFTAVCPKTGLPDFGVIYVSYIPTKRCIELKSFKEYILSYRNVGIFHEFLVNKIMEDLIQAVEPKYLKVIGDYNARGGIKTVVTREYSKA

SEQ ID NO: 46884 - protein, 137 aa, Leptospira dzoumogneensis
  misc_feature (1)..(137): tr|A0A4Z1ABT1|A0A4Z1ABT1_9LEPT NADPH-dependent 7-cyano- 7-deazaguanine reductase OS=Leptospira dzoumogneensis O X=2484904 GN=queF PE=3 SV=1
MSNQQESIGISAYEGRQDHIPSLKLPEIESFANVYEGKDYTIDFTIPEFTAVCPKTGLPDFGVIEISYIPKAKCIELKSLKEYILAYRNLGIFHENVVNHILEDLVQSVDPKYIKVKGDYNLRGGIKTIVTREYTSK

SEQ ID NO: 46885 - protein, 133 aa, Leptospira ellinghausenii
  misc_feature (1)..(133): tr|A0A2P2DB71|A0A2P2DB71_9LEPT NADPH-dependent 7-cyano- 7-deazaguanine reductase OS=Leptospira ellinghausenii O X=1917822 GN=queF PE=3 SV=1
MSEKKSESSYEDKQDHIPSWTTPPIEWFANVYVGREYNIEFTIPEFTAVCPKTGLPDFGTIFIEYIPREKCAELKSLKEYMMSYRNVGIFHENVVNKILEDFVKAVDPIYVKVIGDYNVRGGVKTVVKREYKA

SEQ ID NO: 46886 - protein, 133 aa, Leptospira elllisii
  misc_feature (1)..(133): tr|A0A2N0BGJ5|A0A2N0BGJ5_9LEPT NADPH-dependent 7-cyano- 7-deazaguanine reductase OS=Leptospira elllisii OX=2023 197 GN=queF PE=3 SV=1
METTNPETYDGRQDHIPALKTPEIESFTNVYGGKDYTIDFTVPEFTAVCPKTGLPDFGTIYVSYVPTDRCVELKSFKEYILSYRNVGIFHEFVVNKILDDLVQAIDPKYLKVIGDYNARGGIKTIVTREYVKA

SEQ ID NO: 46887 - protein, 139 aa, Leptospira fainei; identical to SEQ ID NO: 46880
  misc_feature (1)..(139): tr|S3V1F0|S3V1F0_9LEPT NADPH-dependent 7-cyano-7-deazag uanine reductase OS=Leptospira fainei serovar Hurstbrid ge str. BUT 6 OX=1193011 GN=queF PE=3 SV=1

SEQ ID NO: 46888 - protein, 139 aa, Leptospira fletcheri
  misc_feature (1)..(139): tr|A0A4R9GLC2|A0A4R9GLC2_9LEPT NADPH-dependent 7-cyano- 7-deazaguanine reductase OS=Leptospira fletcheri OX=248 4981 GN=queF PE=3 SV=1
MDDRQQETGASSYEGRQEHIPTLKLPDIESFANVYEGKDYTIDFTIPEFTAVCPKTGLPDFGTIEISYIPSDKCVELKSLKEYILAYRNLGIFHENVVNRILEDFVKSVRPKYVKVRGDYNLRGGIKTVVTREFRSEAG

SEQ ID NO: 46889 - protein, 139 aa, Leptospira fluminis
  misc_feature (1)..(139): tr|A0A4R9GKD5|A0A4R9GKD5_9LEPT NADPH-dependent 7-cyano- 7-deazaguanine reductase OS=Leptospira fluminis OX=2484 979 GN=queF PE=3 SV=1
MDDRQQETGASSYEGRQEHIPTLKLPDIESFANVYEGKDYTIDFTIPEFTAVCPKTGLPDFGTIEISYVPSDRCVELKSLKEYILAYRNLGIFHENVVNRILEDLIKSVRPKYARVRGDYNLRGGIKTVVTREFRSEAD

SEQ ID NO: 46890 - protein, 133 aa, Leptospira gomenensis
  misc_feature (1)..(133): tr|A0A5F1YCR2|A0A5F1YCR2_9LEPT NADPH-dependent 7-cyano- 7-deazaguanine reductase OS=Leptospira gomenensis OX=24 84974 GN=queF PE=3 SV=1
METNNPETYDGRQDHIPALKTPEIESFTNVYGGRDYTIDFTVPEFTAVCPKTGLPDFGTIYVSYVPTDRCVELKSFKEYILSYRNVGIFHEFVVNKILDDLVKAIDPKSLKVIGDYNARGGIKTIVTREYKKA

SEQ ID NO: 46891 - protein, 137 aa, Leptospira haakeii
  misc_feature (1)..(137): tr|A0A2N0BXB5|A0A2N0BXB5_9LEPT NADPH-dependent 7-cyano- 7-deazaguanine reductase OS=Leptospira haakeii OX=20231 98 GN=queF PE=3 SV=1
MSHQQESIGISAYEGRQDHIPSLKLPEIESFANVYEGKDYTIDFTIPEFTAVCPKTGLPDFGVIEISYIPKAKCIELKSLKEYILAYRNLGIFHENVVNRILEDLIQSVDPKYIKVKGDYNLRGGIKTVVSREYTSK

SEQ ID NO: 46892 - protein, 133 aa, Leptospira harrisiae
  misc_feature (1)..(133): tr|A0A2N0ANN5|A0A2N0ANN5_9LEPT NADPH-dependent 7-cyano- 7-deazaguanine reductase OS=Leptospira harrisiae OX=202 3189 GN=queF PE=3 SV=1
MSEKKSESSYEDKQDHIQSWKTPEIEWFANVYAGKEYNIEFTIPEFTAVCPKTGLPDFGTIYIDYIPRDRCVELKSLKEYMMSFRNIGIFHENVVNKILEDFVLAVDPLYVKVVGDYNVRGGVKTVVKREYKA

SEQ ID NO: 46893 - protein, 137 aa, Leptospira hartskeerlii
  misc_feature (1)..(137): tr|A0A2M9XF13|A0A2M9XF13_9LEPT NADPH-dependent 7-cyano- 7-deazaguanine reductase OS=Leptospira hartskeerlii OX= 2023177 GN=queF PE=3 SV=1
MSQQQESIGISAYEGRQDHIPSLKLPEIESFANVYEGKDYTIDFTIPEFTAVCPKTGLPDFGIIEISYIPKAKCIELKSLKEYILAFRNLGIFHENVVNRILEDLIQSVDPKYIRVKGDYNLRGGIKTIVTREYTSK

SEQ ID NO: 46894 - protein, 133 aa, Leptospira idonii
  misc_feature (1)..(133): tr|A0A4R9LXR9|A0A4R9LXR9_9LEPT NADPH-dependent 7-cyano- 7-deazaguanine reductase OS=Leptospira idonii OX=119350 0 GN=queF PE=3 SV=1
MSEKKSASLYEDKQDHIPSWKTPEIEWFANVYSGKDYKIEFTIPEFTAVCPKTGLPDFGTIFIEYSPNEKCIELKSLKEYMMAFRSVGIFHENVVNKVLEDLVQAVNPKYLKVVGDYNIRGGVKTIVSREYKQ

SEQ ID NO: 46895 - protein, 133 aa, Leptospira ilyithenensis
  misc_feature (1)..(133): tr|A0A4R9LMW0|A0A4R9LMW0_9LEPT NADPH-dependent 7-cyano- 7-deazaguanine reductase OS=Leptospira ilyithenensis OX =2484901 GN=queF PE=3 SV=1
MSEKKSVSLYEDKQDHIPAWKTPEIEWFANVYSGREYKIEFTIPEFTAVCPKTGLPDFGTIFIEYSPKEKCIELKSLKEYVLAFRNVGIFHENVVNKILEDLIQAVDPNYLKVIGDYNIRGGVKTIVSREYKK

SEQ ID NO: 46896 - protein, 139 aa, Leptospira inadai
  misc_feature (1)..(139): tr|V6HC32|V6HC32_9LEPT NADPH-dependent 7-cyano-7-deazag uanine reductase OS=Leptospira inadai serovar Lyme str. 10 OX=1049790 GN=queF PE=3 SV=1
MDDRQQETGASSYDGRQDHIPALKLPEIESFANVYEGKDYTIDFTIPEFTAVCPKTGLPDFGTIEISYIPRDRCIELKSLKEYILAFRNLGIFHENVVNRILEDLVKSVEPKFIRVKGDYNLRGGIKTVVTREYRLEGK

SEQ ID NO: 46897 - protein, 133 aa, Leptospira interrogans
  misc_feature (1)..(133): tr|M3ICN9|M3ICN9_LEPIT NADPH-dependent 7-cyano-7-deazag uanine reductase OS=Leptospira interrogans serovar Cope nhageni str. LT2050 OX=1001598 GN=queF PE=3 SV=1
MKTNHPETYDGRQDHIPSLQTPEIESFTNVYEGKDYTIDFTVPEFTAVCPKTGLPDFGVILVSYIPNKRCIELKSFKEYILSYRNVGIFHEFLVNKILEDVIKSIDPKYLKVIGDYNARGGIKTIVTREYKKP

SEQ ID NO: 46898 - protein, 133 aa, Leptospira interrogans; identical to SEQ ID NO: 46897
  misc_feature (1)..(133): sp|Q72RB6|QUEF_LEPIC NADPH-dependent 7-cyano-7-deazagua nine reductase OS=Leptospira interrogans serogroup Icte rohaemorrhagiae serovar copenhageni (strain Fiocruz L1- 130) OX=267671 GN=queF PE=3 SV=1

SEQ ID NO: 46899 - protein, 133 aa, Leptospira jelokensis
  misc_feature (1)..(133): tr|A0A4Z1A721|A0A4Z1A721_9LEPT NADPH-dependent 7-cyano- 7-deazaguanine reductase OS=Leptospira jelokensis OX=24 84931 GN=queF PE=3 SV=1
MSEKKSESSYEDKQDHIPSWSTPPIEWFANVYSGKEYNIEFTIPEFTAVCPKTGLPDFGTIYIEYIPRDKCVELKSLKEYMMAYRNVGIFHENVVNKILEDFVKAVDPIYAKVIGDYNVRGGVKTVVKREYKA

SEQ ID NO: 46900 - protein, 133 aa, Leptospira jelokensis
  misc_feature (1)..(133): tr|A0A5F2B2N1|A0A5F2B2N1_9LEPT NADPH-dependent 7-cyano- 7-deazaguanine reductase OS=Leptospira jelokensis OX=24 84931 GN=queF PE=3 SV=1
MSEKKSESSYEDKQDHIPSWSTPPIEWFANVYAGKEYNIEFTIPEFTAVCPKTGLPDFGTIYIEYIPRDKCAELKSLKEYMMAYRNVGIFHENVVNKILEDFVKAVDPIYAKVIGDYNVRGGVKTVVKREYKA

SEQ ID NO: 46901 - protein, 137 aa, Leptospira johnsonii; identical to SEQ ID NO: 46868
  misc_feature (1)..(137): tr|A0A2P2CYI6|A0A2P2CYI6_9LEPT NADPH-dependent 7-cyano- 7-deazaguanine reductase OS=Leptospira johnsonii OX=191 7820 GN=queF PE=3 SV=1

SEQ ID NO: 46902 - protein, 133 aa, Leptospira kanakyensis
  misc_feature (1)..(133): tr|A0A4R9HV64|A0A4R9HV64_9LEPT NADPH-dependent 7-cyano- 7-deazaguanine reductase OS=Leptospira kanakyensis OX=2 484968 GN=queF PE=3 SV=1
MSEKKSESSYEDKQDHIPSWKTPEIEWFANVYAGKEYNIEFTIPEFTAVCPKTGLPDFGSIFIEYIPRMRCVELKSLKEYMMSYRNVGIFHENVVNKILEDFVQAVDPLYVKVVGDYNVRGGVKTIVRREYKA

SEQ ID NO: 46903 - protein, 133 aa, Leptospira kemamanensis
  misc_feature (1)..(133): tr|A0A4R9JV85|A0A4R9JV85_9LEPT NADPH-dependent 7-cyano- 7-deazaguanine reductase OS=Leptospira kemamanensis OX= 2484942 GN=queF PE=3 SV=1
MSEKKSESSYEDKQDHIPSWTTPPIEWFANVYAGREYNIEFTIPEFTAVCPKTGLPDFGTIFIEYIPREKCAELKSLKEYMMSYRNVGIFHENVVNKILEDFVKAVDPLYVKVIGDYNVRGGVKTVVKREYKA

SEQ ID NO: 46904 - protein, 133 aa, Leptospira kirschneri
  misc_feature (1)..(133): tr|M6I4Z6|M6I4Z6_9LEPT NADPH-dependent 7-cyano-7-deazag uanine reductase OS=Leptospira kirschneri serovar Bim s tr. 1051 OX=1049941 GN=queF PE=3 SV=1
MKTNHPEIYDGRQDHIPSLQTPEIESFTNVYEGKDYTIDFTVPEFTAVCPKTGLPDFGVILVSYIPNKRCIELKSFKEYILSYRNVGIFHEFLVNKILEDLIKSVDPKYLKVIGDYNARGGIKTIVTREYIRP

SEQ ID NO: 46905 - protein, 167 aa, Leptospira kirschneri
  misc_feature (1)..(167): tr|M6XAL6|M6XAL6_9LEPT NADPH-dependent 7-cyano-7-deazag uanine reductase OS=Leptospira kirschneri str. 20080192 5 OX=1193046 GN=queF PE=3 SV=1
MDNHSKPLLDFAIDSGKRIFAITRSKNLVIKELSMKTNHPEIYDGRQDHIPSLQTPEIESFTNVYEGKDYTIDFTVPEFTAVCPKTGLPDFGVILVSYIPNKRCIELKSFKEYILSYRNVGIFHEFLVNKILEDLIKSVDPKYLKVIGDYNARGGIKTIVTREYIRP

SEQ ID NO: 46906 - protein, 133 aa, Leptospira kmetyi
  misc_feature (1)..(133): tr|A0A2M9XM34|A0A2M9XM34_9LEPT NADPH-dependent 7-cyano- 7-deazaguanine reductase OS=Leptospira kmetyi OX=408139 GN=queF PE=3 SV=1
METNHPETYDGRQDHIPSLKTPEIESFTNVYEGKDYTIDFTVPEFTAVCPKTGLPDFGVIYVSYIPTKRCIELKSFKEYILSYRNVGIFHEFLVNKILDDLIASVDPKYLKVIGDYNARGGIKTVVTREYKKA

SEQ ID NO: 46907 - protein, 133 aa, Leptospira kobayashii
  misc_feature (1)..(133): tr|A0A2P2DNQ8|A0A2P2DNQ8_9LEPT NADPH-dependent 7-cyano- 7-deazaguanine reductase OS=Leptospira kobayashii OX=19 17830 GN=queF PE=3 SV=1
MSEKKSVSLYEDKQDHIPSWKTPEIEWFANVYSGREYKIEFTIPEFTAVCPKTGLPDFGTIFIEYSPNEKCIELKSLKEYVLAFRNVGIFHENVVNKILEDLIQAVDPNYLKVIGDYNIRGGVKTIVSREYKK

SEQ ID NO: 46908 - protein, 137 aa, Leptospira koniamboensis; identical to SEQ ID NO: 46868
  misc_feature (1)..(137): tr|A0A4R9JAU3|A0A4R9JAU3_9LEPT NADPH-dependent 7-cyano- 7-deazaguanine reductase OS=Leptospira koniamboensis OX =2484950 GN=queF PE=3 SV=1

SEQ ID NO: 46909 - protein, 137 aa, Leptospira langatensis
  misc_feature (1)..(137): tr|A0A5F1ZXE4|A0A5F1ZXE4_9LEPT NADPH-dependent 7-cyano- 7-deazaguanine reductase OS=Leptospira langatensis OX=2 484983 GN=queF PE=3 SV=1
MSHEQESTGISTYEGRQDHIPSLRLPEIESFANVYEGKDYTIDFTIPEFTAVCPKTGLPDFGVIEISYIPKAKCIELKSLKEYILAYRNLGIFHENVVNHILEDLVQSIDPKYIRVKGDYNIRGGIKTIVTREYGSR

SEQ ID NO: 46910 - protein, 133 aa, Leptospira levettii
  misc_feature (1)..(133): tr|A0A2N0AYA3|A0A2N0AYA3_9LEPT NADPH-dependent 7-cyano- 7-deazaguanine reductase OS=Leptospira levettii OX=2023 178 GN=queF PE=3 SV=1
MSEKKSESSYEDKQDHIPSWTTPPIEWFANVYAGREYNIEFTIPEFTAVCPKTGLPDFGTIFIEYIPREKCAELKSLKEYMMSYRNVGIFHENVVNKILEDFVKAVDPIYVKVIGDYNVRGGVKTVVKREYRA

SEQ ID NO: 46911 - protein, 137 aa, Leptospira licerasiae
  misc_feature (1)..(137): tr|I0XS65|I0XS65_9LEPT NADPH-dependent 7-cyano-7-deazag uanine reductase OS=Leptospira licerasiae serovar Varil lal str. VAR 010 OX=1049972 GN=queF PE=3 SV=1
MSHQQESIGISTYEGRQDHIPSLKLPEIESFANVYEGKDYTIDFTIPEFTAVCPKTGLPDFGVIEISYIPKAKCIELKSLKEYILAYRNLGIFHENVVNRILEDLIQSVDPKYIKVKGDYNLRGGIKTIVTREYTSK

SEQ ID NO: 46912 - protein, 137 aa, Leptospira licerasiae
  misc_feature (1)..(137): tr|A0A5F2DUQ1|A0A5F2DUQ1_9LEPT NADPH-dependent 7-cyano- 7-deazaguanine reductase OS=Leptospira licerasiae OX=44 7106 GN=queF PE=3 SV=1
MSHQQESIGISTYEGRQDHIPNLKLPEIESFANVYEGKDYTIDFTIPEFTAVCPKTGLPDFGVIEISYIPKAKCIELKSLKEYILAYRNLGIFHENVVNRILEDLIQSVDPKYIKVKGDYNLRGGIKTIVTREYTSK

SEQ ID NO: 46913 - protein, 133 aa, Leptospira macculloughii; identical to SEQ ID NO: 46910
  misc_feature (1)..(133): tr|A0A2N0CG84|A0A2N0CG84_9LEPT NADPH-dependent 7-cyano- 7-deazaguanine reductase OS=Leptospira macculloughii OX =2023202 GN=queF PE=3 SV=1

SEQ ID NO: 46914 - protein, 133 aa, Leptospira macculloughii
  misc_feature (1)..(133): tr|A0A2N0C8Y3|A0A2N0C8Y3_9LEPT NADPH-dependent 7-cyano- 7-deazaguanine reductase OS=Leptospira macculloughii OX =2023202 GN=queF PE=3 SV=1
MSEKKSESSYEDKQDHIPSWKTPEIEWFANVYAGKEYNIEFTIPEFTAVCPKTGLPDFGSIFIEYIPRDRCVELKSLKEYMMSYRNVGIFHENVVNKILEDFVHAVDPLYVKVVGDYNVRGGVKTIVRREYKA

SEQ ID NO: 46915 - protein, 133 aa, Leptospira mayottensis
  misc_feature (1)..(133): tr|A0A3Q9DVA9|A0A3Q9DVA9_9LEPT NADPH-dependent 7-cyano- 7-deazaguanine reductase OS=Leptospira mayottensis 2009 01116 OX=1192864 GN=queF PE=3 SV=1
METNHPETYDGRQDHIPSLKTPEIESFTNVYEGKDYTIDFTVPEFTAVCPKTGLPDFGVIYVSYIPTQRCIELKSFKEYILSYRNVGIFHEFLVNKIMEDLIAAIDPKYLKVIGDYNPRGGIKTVVTREYNKI

SEQ ID NO: 46916 - protein, 133 aa, Leptospira mayottensis; identical to SEQ ID NO: 46915
  misc_feature (1)..(133): tr|A0A5F2DZF7|A0A5F2DZF7_9LEPT NADPH-dependent 7-cyano- 7-deazaguanine reductase OS=Leptospira mayottensis OX=1 137606 GN=queF PE=3 SV=1

SEQ ID NO: 46917 - protein, 133 aa, Leptospira meyeri; identical to SEQ ID NO: 46914
  misc_feature (1)..(133): tr|A0A5F1ZKU9|A0A5F1ZKU9_LEPME NADPH-dependent 7-cyano- 7-deazaguanine reductase OS=Leptospira meyeri OX=29508 GN=queF PE=3 SV=1

SEQ ID NO: 46918 - protein, 133 aa, Leptospira meyeri
  misc_feature (1)..(133): tr|A0A4R8MV70|A0A4R8MV70_LEPME NADPH-dependent 7-cyano- 7-deazaguanine reductase OS=Leptospira meyeri OX=29508 GN=queF PE=3 SV=1
MSEKKSESSYEDKQDHIPSWKTPEIEWFANVYAGKEYNIEFTIPEFTAVCPKTGLPDFGSIFIEYIPRDRCVELKSLKEYMMSYRNVGIFHENVVNKILEDFVQAVDPLYVKVVGDYNVRGGVKTIVRREYKA

SEQ ID NO: 46919 - protein, 133 aa, Leptospira montravelensis
  misc_feature (1)..(133): tr|A0A4Z0ZKN8|A0A4Z0ZKN8_9LEPT NADPH-dependent 7-cyano- 7-deazaguanine reductase OS=Leptospira montravelensis O X=2484961 GN=queF PE=3 SV=1
MSEKKSESSYEDKQDHIPSWKTPEIEWFANVYAGKEYNIEFTIPEFTAVCPKTGLPDFGTIYIDYIPRDRCVELKSLKEYMMSFRNIGIFHENVVNKILEDFVLAVDPLYVKVVGDYNVRGGVKTVVKREYKA

SEQ ID NO: 46920 - protein, 133 aa, Leptospira mtsangambouensis
  misc_feature (1)..(133): tr|A0A5F2DMC5|A0A5F2DMC5_9LEPT NADPH-dependent 7-cyano- 7-deazaguanine reductase OS=Leptospira mtsangambouensis OX=2484912 GN=queF PE=3 SV=1
MSEKKSESSYEDKQDHIPSWKTPEIEWFANVYAGKEYNIEFTIPEFTAVCPKTGLPDFGTIYIDYIPRDKCVELKSLKEYMMSYRNVGIFHENVVNKILEDFVLAVNPMYVKVVGDYNVRGGVKTIVKREYKA

SEQ ID NO: 46921 - protein, 137 aa, Leptospira neocaledonica; identical to SEQ ID NO: 46868
  misc_feature (1)..(137): tr|A0A2N0A3J5|A0A2N0A3J5_9LEPT NADPH-dependent 7-cyano- 7-deazaguanine reductase OS=Leptospira neocaledonica OX =2023192 GN=queF PE=3 SV=1

SEQ ID NO: 46922 - protein, 133 aa, Leptospira noguchii
  misc_feature (1)..(133): tr|M6V8P6|M6V8P6_9LEPT NADPH-dependent 7-cyano-7-deazag uanine reductase OS=Leptospira noguchii OX=28182 GN=que F PE=3 SV=1
MKTNHSEIYDGRQDHIPSLQTPEIESFTNVYEGKDYTIDFTVPEFTAVCPKTGLPDFGVILVSYIPNKRCIELKSFKEYILSYRNVGIFHEFLVNKILEDLINSIDPKYIKVIGDYNARGGIKTIVTREYTKP

SEQ ID NO: 46923 - protein, 133 aa, Leptospira noguchii; identical to SEQ ID NO: 46922
  misc_feature (1)..(133): tr|T0F9R9|T0F9R9_9LEPT NADPH-dependent 7-cyano-7-deazag uanine reductase OS=Leptospira noguchii serovar Panama str. CZ214 OX=1001595 GN=queF PE=3 SV=1

SEQ ID NO: 46924 - protein, 133 aa, Leptospira noumeaensis
  misc_feature (1)..(133): tr|A0A4R9IF05|A0A4R9IF05_9LEPT NADPH-dependent 7-cyano- 7-deazaguanine reductase OS=Leptospira noumeaensis OX=2 484964 GN=queF PE=3 SV=1
MSEKKSESSYEDKQDHIPSWKTPEIEWFANVYAGKEYNIEFTIPEFTAVCPKTGLPDFGTIYIDYIPRMRCVELKSLKEYMMSFRNIGIFHENVVNKILEDFVLAVDPLYVKVVGDYNVRGGVKTVVKREYKA

SEQ ID NO: 46925 - protein, 134 aa, Leptospira ognonensis
  misc_feature (1)..(134): tr|A0A4R9JXW7|A0A4R9JXW7_9LEPT NADPH-dependent 7-cyano- 7-deazaguanine reductase OS=Leptospira ognonensis OX=24 84945 GN=queF PE=3 SV=1
MSEKKSASLYEDKQDHIPEWKTPQIEWFENVYSGREYTIEFTIPEFTAVCPKTGLPDFGQIFIEYSPREKCLELKSLKEYFLAFRNVGIFHENVVNKVLEDLVAAVDPYSLKVVGDYNVRGGVKTVVRREYRDK

SEQ ID NO: 46926 - protein, 133 aa, Leptospira perdikensis
  misc_feature (1)..(133): tr|A0A4R9JD79|A0A4R9JD79_9LEPT NADPH-dependent 7-cyano- 7-deazaguanine reductase OS=Leptospira perdikensis OX=2 484948 GN=queF PE=3 SV=1
MSEKKSESSYEDKQDHIPSWKTPEIEWFANVYAGKEYNIEFTIPEFTAVCPKTGLPDFGSIFIEYIPRERCVELKSLKEYMMSYRNVGIFHENVVNKILEDFVAAVNPLFVKVVGDYNVRGGVKTIVRREYKA

SEQ ID NO: 46927 - protein, 140 aa, Leptospira perolatii
  misc_feature (1)..(140): tr|A0A2M9ZJ50|A0A2M9ZJ50_9LEPT NADPH-dependent 7-cyano- 7-deazaguanine reductase OS=Leptospira perolatii OX=202 3191 GN=queF PE=3 SV=1
MEHRPNQPGISSYEGRQDHIPSMELPEIESFANVYEGKDYTIDFTIPEFTAICPKTGLPDFGIIQIVYIPTTRCLELKSLKEYILAYRNLGIFHENVVNRILEDIVKSVHPKYLKVSGDYNLRGGIKTVVTREYSAEGSK

SEQ ID NO: 46928 - protein, 133 aa, Leptospira putramalaysiae; identical to SEQ ID NO: 46864
  misc_feature (1)..(133): tr|A0A4R9L0P9|A0A4R9L0P9_9LEPT NADPH-dependent 7-cyano- 7-deazaguanine reductase OS=Leptospira putramalaysiae O X=2484984 GN=queF PE=3 SV=1

SEQ ID NO: 46929 - protein, 134 aa, Leptospira ryugenii
  misc_feature (1)..(134): tr|A0A2P2DWQ9|A0A2P2DWQ9_9LEPT NADPH-dependent 7-cyano- 7-deazaguanine reductase OS=Leptospira ryugenii OX=1917 863 GN=queF PE=3 SV=1
MSEKKSNSLYEDRQDHIPQLETPKIEWFQNVYAGEEYKVEFTIPEFTAVCPKTGLPDFGTIMIEYIPREKCLELKSLKEYFLAYRNIGIFHENVVNKVLEDLVKAVDPMYLKVVGDYNVRGGVKTIVRREYIAT

SEQ ID NO: 46930 - protein, 137 aa, Leptospira saintgironsiae; identical to SEQ ID NO: 46868
  misc_feature (1)..(137): tr|A0A2M9YD80|A0A2M9YD80_9LEPT NADPH-dependent 7-cyano- 7-deazaguanine reductase OS=Leptospira saintgironsiae O X=2023183 GN=queF PE=3 SV=1

SEQ ID NO: 46931 - protein, 133 aa, Leptospira santarosai
  misc_feature (1)..(133): tr|M6ZL91|M6ZL91_9LEPT NADPH-dependent 7-cyano-7-deazag uanine reductase OS=Leptospira santarosai str. 20070225 2 OX=1049977 GN=queF PE=3 SV=1
MGTNHPEIYDGRQDHIPALQTPEIESFTNVYEGKDYTIDFTVPEFTAVCPKTGLPDFGVILVSYIPTKRCIELKSFKEYILSYRNVGIFHEFLVNKIMEDLIKAVDPKYLKVIGDYNSRGGIKTIVTREYTKS

SEQ ID NO: 46932 - protein, 133 aa, Leptospira santarosai; identical to SEQ ID NO: 46931
  misc_feature (1)..(133): tr|A0A0E2E2S0|A0A0E2E2S0_9LEPT NADPH-dependent 7-cyano- 7-deazaguanine reductase OS=Leptospira santarosai str. JET OX=1193057 GN=queF PE=3 SV=1

SEQ ID NO: 46933 - protein, 137 aa, Leptospira sarikeiensis
  misc_feature (1)..(137): tr|A0A4R9K397|A0A4R9K397_9LEPT NADPH-dependent 7-cyano- 7-deazaguanine reductase OS=Leptospira sarikeiensis OX= 2484943 GN=queF PE=3 SV=1
MSHQQESIGISAYEGRQDHIPNLKLPEIESFANVYEGKDYTIDFTIPEFTAVCPKTGLPDFGVIEISYIPKAKCIELKSLKEYILAYRNLGIFHENVVNHILEDLVQSVDPKFIRVKGDYNLRGGIKTIVTREYQSK

SEQ ID NO: 46934 - protein, 137 aa, Leptospira selangorensis
  misc_feature (1)..(137): tr|A0A4V6QKH9|A0A4V6QKH9_9LEPT NADPH-dependent 7-cyano- 7-deazaguanine reductase OS=Leptospira selangorensis OX =2484982 GN=queF PE=3 SV=1
MSHQQESIGISAYEGRQDHIPSLKLPEIESFANVYEGKDYTIDFTIPEFTAVCPKTGLPDFGVIEISYIPKAKCIELKSLKEYILAYRNLGIFHENVVNRILEDLIQSVDPKYIKVKGDYNLRGGIKTVVSREYSSK

SEQ ID NO: 46935 - protein, 137 aa, Leptospira semungkisensis
  misc_feature (1)..(137): tr|A0A4R9FLL0|A0A4R9FLL0_9LEPT NADPH-dependent 7-cyano- 7-deazaguanine reductase OS=Leptospira semungkisensis O X=2484985 GN=queF PE=3 SV=1
MSHEQESTGISTYEGRQDHIPSLRLPEIESFANVYEGKDYTIDFTIPEFTAVCPKTGLPDFGVIEISYIPKAKCIELKSLKEYILAYRNLGIFHENVVNHILEDLVQSIDPKYILVKGDYNIRGGIKTIVTREYGSR

SEQ ID NO: 46936 - protein, 132 aa, Leptospira sp.
  misc_feature (1)..(132): tr|A0A2M8HFZ7|A0A2M8HFZ7_9LEPT NADPH-dependent 7-cyano- 7-deazaguanine reductase OS=Leptospira sp. OX=178 GN=qu eF PE=3 SV=1
MSEKNPSSYEGKQSHIPELIMPKIEVFANVYPGKDFQIDFTIPEFTAICPKTGLPDFGILEISYKPNISCIELKSLKEYVLSFRNIGIFHENVVNKLLEDLVDACQPFYLKVRGDFNPRGGIKTIVTREYKP

SEQ ID NO: 46937 - protein, 133 aa, Leptospira sp.; identical to SEQ ID NO: 46874
  misc_feature (1)..(133): tr|M6DZX8|M6DZX8_9LEPT NADPH-dependent 7-cyano-7-deazag uanine reductase OS=Leptospira sp. serovar Kenya str. S h9 OX=1242991 GN=queF PE=3 SV=1

SEQ ID NO: 46938 - protein, 133 aa, Leptospira stimsonii; identical to SEQ ID NO: 46864
  misc_feature (1)..(133): tr|A0A396Z7A5|A0A396Z7A5_9LEPT NADPH-dependent 7-cyano- 7-deazaguanine reductase OS=Leptospira stimsonii OX=220 2203 GN=queF PE=3 SV=1

SEQ ID NO: 46939 - protein, 133 aa, Leptospira terpstrae
  misc_feature (1)..(133): tr|N1VXY8|N1VXY8_9LEPT NADPH-dependent 7-cyano-7-deazag uanine reductase OS=Leptospira terpstrae serovar Hualin str. LT 11-33 = ATCC 700639 OX=1257025 GN=queF PE=3 SV =1
MSEKKSESSYEDKQDHIPSWKTPEIEWFANVYAGKEYNIEFTIPEFTAVCPKTGLPDFGSIFIEYIPRERCVELKSLKEYMMAFRNVGIFHENVVNKILEDFVQAVVPIYVKVIGDYNVRGGVKTIVKREYKA

SEQ ID NO: 46940 - protein, 133 aa, Leptospira tipperaryensis
  misc_feature (1)..(133): tr|A0A1D7UWP2|A0A1D7UWP2_9LEPT NADPH-dependent 7-cyano- 7-deazaguanine reductase OS=Leptospira tipperaryensis O X=2564040 GN=queF PE=3 SV=1
METINPETYDGRQDHIPALKTPEIESFTNVYEGKDYTIDFTVPEFTAVCPKTGLPDFGIIEISYVPTNRCIELKSFKEYILSYRNIGIFHEFVVNKILDDLIKAIDPKYLKVIGDYNPRGGIKTIVTREYKKA

SEQ ID NO: 46941 - protein, 133 aa, Leptospira vanthielii
  misc_feature (1)..(133): tr|N1VXT9|N1VXT9_9LEPT NADPH-dependent 7-cyano-7-deazag uanine reductase OS=Leptospira vanthielii serovar Holla nd str. Waz Holland = ATCC 700522 OX=1218591 GN=queF PE =3 SV=1
MSEKKSESSYEDKQDHIPSWKTPEIEWFANVYAGKEYNIEFTIPEFTAVCPKTGLPDFGSIFIEYIPRDRCVELKSLKEYMMSYRNVGIFHENVVNKILEDFVAAVNPMYVKVVGDYNVRGGVKTIVKREYKA

SEQ ID NO: 46942 - protein, 133 aa, Leptospira vanthielii; identical to SEQ ID NO: 46941
  misc_feature (1)..(133): tr|A0A4R9LDK5|A0A4R9LDK5_9LEPT NADPH-dependent 7-cyano- 7-deazaguanine reductase OS=Leptospira vanthielii OX=29 3085 GN=queF PE=3 SV=1

SEQ ID NO: 46943 - protein, 133 aa, Leptospira weilii
  misc_feature (1)..(133): tr|M6Q271|M6Q271_9LEPT NADPH-dependent 7-cyano-7-deazag uanine reductase OS=Leptospira weilii str. UI 13098 OX= 1088542 GN=queF PE=3 SV=1
METNHPETYDGRQDHIPSLKTPEIESFTNVYEGKDYTIDFTVPEFTAVCPKTGLPDFGVIFISYIPTGRCIELKSFKEYILSYRNVGIFHEFLVNKIMEDLVAAIDPKYLKVIGDYNPRGGIKTVVTREYNKS

SEQ ID NO: 46944 - protein, 133 aa, Leptospira weilii; identical to SEQ ID NO: 46943
  misc_feature (1)..(133): tr|M6L9T1|M6L9T1_9LEPT NADPH-dependent 7-cyano-7-deazag uanine reductase OS=Leptospira weilii str. LNT 1234 OX= 1088541 GN=queF PE=3 SV=1

SEQ ID NO: 46945 - protein, 133 aa, Leptospira wolbachii
  misc_feature (1)..(133): tr|R9A4L4|R9A4L4_9LEPT NADPH-dependent 7-cyano-7-deazag uanine reductase OS=Leptospira wolbachii serovar Codice str. CDC OX=1218599 GN=queF PE=3 SV=1
MSEKKSESSYEDKQDHIPSWKTPEMEWFANVYAGKEYNIEFTIPEFTAVCPKTGLPDFGSIFIEYIPRERCVELKSLKEYMMSYRNVGIFHENVVNKILEDFVSAVDPLYVKVVGDYNVRGGVKTIVKREYKA

SEQ ID NO: 46946 - protein, 115 aa, Leptospira wolffii
  misc_feature (1)..(115): tr|S3VTH7|S3VTH7_9LEPT NADPH-dependent 7-cyano-7-deazag uanine reductase OS=Leptospira wolffii serovar Khorat s tr. Khorat-H2 OX=1193069 GN=queF PE=3 SV=1
MKLPEIESFANVYEGKDYTIDFTIPEFTAVCPKTGLPDFGVIEISYIPKAKCVELKSLKEYILAYRNLGIFHENVVNHILEDLVRAVDPKYVRVKGDYNLRGGIKTIVTREFGKI

SEQ ID NO: 46947 - protein, 137 aa, Leptospira wolffii
  misc_feature (1)..(137): tr|A0A2M9Z6X5|A0A2M9Z6X5_9LEPT NADPH-dependent 7-cyano- 7-deazaguanine reductase OS=Leptospira wolffii OX=40999 8 GN=queF PE=3 SV=1
MSHRQEPTEISAYEGRQDHIPSLKLPEIESFANVYEGKDYTIDFTIPEFTAVCPKTGLPDFGVIEISYIPKAKCVELKSLKEYILAYRNLGIFHENVVNHILEDLVRAVDPKYIRVKGDYNLRGGIKTIVTREFGKI

SEQ ID NO: 46948 - protein, 133 aa, Leptospira yanagawae; identical to SEQ ID NO: 46899
  misc_feature (1)..(133): tr|A0A4R9IUK0|A0A4R9IUK0_9LEPT NADPH-dependent 7-cyano- 7-deazaguanine reductase OS=Leptospira yanagawae OX=293 069 GN=queF PE=3 SV=1

SEQ ID NO: 46949 - protein, 133 aa, Leptospira yanagawae; identical to SEQ ID NO: 46899
  misc_feature (1)..(133): tr|A0A5E8HJ86|A0A5E8HJ86_9LEPT NADPH-dependent 7-cyano- 7-deazaguanine reductase OS=Leptospira yanagawae serova r Saopaulo str. Sao Paulo = ATCC 700523 OX=1249483 GN=q ueF PE=3 SV=1

SEQ ID NO: 46950 - protein, 133 aa, Leptospira yasudae; identical to SEQ ID NO: 46882
  misc_feature (1)..(133): tr|A0A418A729|A0A418A729_9LEPT NADPH-dependent 7-cyano- 7-deazaguanine reductase OS=Leptospira yasudae OX=22022 01 GN=queF PE=3 SV=1

SEQ ID NO: 46951 - protein, 138 aa, Leptospiraceae bacterium
  misc_feature (1)..(138): tr|A0A357J0Z6|A0A357J0Z6_9LEPT NADPH-dependent 7-cyano- 7-deazaguanine reductase OS=Leptospiraceae bacterium OX =2026757 GN=queF PE=3 SV=1
MSEDTNIHTGAYEGRQDHVRDLKFPEIEVFANIYPGKSYRIDMEIPEFTAICPKTGLPDFGILYLAYKPAEFCLELKSLKEYVTAYRNVGIFHENVVNRMLDDLVKACKPRWMRLHGDYNVRGGIKTRVTATYSAPNE

SEQ ID NO: 46952 - protein, 135 aa, Leptospiraceae bacterium
  misc_feature (1)..(135): tr|A0A2E5RZ72|A0A2E5RZ72_9LEPT NADPH-dependent 7-cyano- 7-deazaguanine reductase OS=Leptospiraceae bacterium OX =2026757 GN=queF PE=3 SV=1
MNDDAKIHTGSYEGRQDQVRSLDFPEIEVFQNIYSDKTYRIDMEIPEFTAICPKTGLPDFGILYLSYKPAEFCLELKSLKEYVTAYRDVGIFHENVVNRILDDLVKACKPRWMRLHGDYNVRGGIKTRVTATYSA

SEQ ID NO: 46953 - protein, 135 aa, Leptospirillum ferriphilum
  misc_feature (1)..(135): tr|A0A059XTK9|A0A059XTK9_9BACT NADPH-dependent 7-cyano- 7-deazaguanine reductase OS=Leptospirillum ferriphilum YSK OX=1441628 GN=queF PE=3 SV=1
MPKKTPYGETAIQQNQLEKWPAPESTVPLEIRISYPEFTCLCPRSGYPDFATIHLRYRPSGFIVELKSFKLYLNSFRNRAISHEETAATLFRDLENLLKPEFLEIVADFNVRGNVKTVITLHSGMGKTPEKDRPL

SEQ ID NO: 46954 - protein, 149 aa, Leptospirillum ferriphilum
  misc_feature (1)..(149): tr|A0A094W827|A0A094W827_9BACT NADPH-dependent 7-cyano- 7-deazaguanine reductase OS=Leptospirillum ferriphilum OX=178606 GN=queF PE=3 SV=1
MPSSKKEKKSSTQSTLKKTAYGETAIQQNQLEKWPAPESTAPLEIRISYPEFTCLCPRSGYPDFATIHLRYRPSGFIVELKSLKLYLNSFRNRAISHEETAATLFRDLENLLRPDFLEIVADFNVRGNVKTVITLHSGMGKTPEKDGIS

SEQ ID NO: 46955 - protein, 141 aa, Leptospirillum ferrodiazotrophum
  misc_feature (1)..(141): tr|C6HU12|C6HU12_9BACT NADPH-dependent 7-cyano-7-deazag uanine reductase OS=Leptospirillum ferrodiazotrophum OX =412449 GN=queF PE=3 SV=1
MAPPKKTKTTEASTSYGEQAIETNRLEGWPNPEKEQSYRIHLSYPEFTCLCPRSGYPDFATIEINYVPDRTIVELRSLKLYLNGFRNRRISHEAAINTIFRDLHELLSPREMDVTGDFNVRGNLKTVIRVDTEMNPKKRKR

SEQ ID NO: 46956 - protein, 146 aa, Leptospirillum ferrooxidans
  misc_feature (1)..(146): tr|I0IPG4|I0IPG4_LEPFC NADPH-dependent 7-cyano-7-deazag uanine reductase OS=Leptospirillum ferrooxidans (strain C2-3) OX=1162668 GN=queF PE=3 SV=1
MSKKHVPSHIPIPASPYGTQAIQEAILEPWPNPAPEEIYETNISYPEFTCLCPRSGYPDFATILIRYRPAQKIVELKSLKLYLNSFRDRAISHEAVTALIYRDLMNLLEPSFLEVKGDFNVRGNVKTVISIDSEMRKATGKSSKKR

SEQ ID NO: 46957 - protein, 149 aa, Leptospirillum sp.
  misc_feature (1)..(149): tr|A0A0K0WQV1|A0A0K0WQV1_9BACT NADPH-dependent 7-cyano- 7-deazaguanine reductase OS=Leptospirillum sp. Group II 'CF-1' OX=1660083 GN=queF PE=3 SV=1
MPSFKKEKKSATKTIPKKTPYGETAIQQNQLEKWPAPESTVPLEIRISYPEFTCLCPRSGYPDFATIHLRYRPSGFIVELKSFKLYLNSFRNRAISHEETAATLFRDLENLLKPEFLEIVADFNVRGNVKTVITLHSGMGKTPEKDRPL

SEQ ID NO: 46958 - protein, 149 aa, Leptospirillum sp.; identical to SEQ ID NO: 46954
  misc_feature (1)..(149): tr|B6ANH7|B6ANH7_9BACT NADPH-dependent 7-cyano-7-deazag uanine reductase OS=Leptospirillum sp. Group II '5-way CG' OX=419541 GN=queF PE=3 SV=1

SEQ ID NO: 46959 - protein, 282 aa, Leptothrix cholodnii
  misc_feature (1)..(282): tr|B1Y274|B1Y274_LEPCP NADPH-dependent 7-cyano-7-deazag uanine reductase OS=Leptothrix cholodnii (strain ATCC 5 1168 / LMG 8142 / SP-6) OX=395495 GN=queF PE=3 SV=1
MSQLPDPNPNADASPLGRASSYRDTYDASLLYPMSRQPKRDEIGLSGELPFMGCDLWTAYELSWLTPRGKPQVALLNLTVPCESPAIVESKSFKLYLNSFNMSRYESSDAVRELLVGDLSAAFGVRVGVKLVPPELFDAQPIHELSGRNLDRLDIECDRYTPAPELLSANHDELPVEETLTSHLLKSNCLVTGQPDWGSVQISYSGAQIDEAGLLRYLVSFRQHNEFHEQCVERIYMDIWQRCRPTTLQVYARYTRRGGLDINPWRTSHPAAPPVNVRTARQ

SEQ ID NO: 46960 - protein, 302 aa, Leptothrix mobilis
  misc_feature (1)..(302): tr|A0A4Q7LSR4|A0A4Q7LSR4_9BURK NADPH-dependent 7-cyano- 7-deazaguanine reductase OS=Leptothrix mobilis OX=47994 GN=queF PE=3 SV=1
MTDMNDLNDTTAAPSLLAAHTHTHTPPHHDPADSPLGRVSAYRDTYAPELLYPIERQPKRDEIGVIGALPFMGCDLWTAYELSWLNLRGKPQVALAQFTVPCESPAIVESKSFKLYLNSFNMSRFESADVVRELLQRDLSAAFGQRVGVKVLSAYDFAAQRIEELDGVDLDRLDLDCDAYEPAPELLTAAFDEKPVTETLTSGLLKSNCLVTGQPDWGSVQIRYSGPQIDQAGLLRYLVSFRQHNEFHEQCVERIYMDVLTRCKPVQLQVYARYTRRGGLDINPWRTSHPATPPRNLRTARQ

SEQ ID NO: 46961 - protein, 273 aa, Leptothrix ochracea
  misc_feature (1)..(273): tr|I4Z4Y7|I4Z4Y7_9BURK NADPH-dependent 7-cyano-7-deazag uanine reductase OS=Leptothrix ochracea L12 OX=735332 G N=queF PE=3 SV=1
MITDSPLGQAVTYSDAYDPTLLFSLPRADKRTDIGIQGQPPFVGADLWTAYELSWLNTKGKPQVALAHFVIPSDSISIIESKSLKLYLNSFNMSRFDAHEVVQQHLITDLSTACGLRVGVRLTLPDQFHTQVIAPLHGLDLDRLDLECTHYTPTPDLLSADHTEPPVTETFVSHLLKSNCLITHQPDWGSVQITYTGATIDQAGLLRYLVSYRGHDEFHEQCVERIFMDIWTRCRPSKLSVYARYTRRGGLDINPYRCSHPAALPSNARTARQ

SEQ ID NO: 46962 - protein, 154 aa, Leucothrix pacifica
  misc_feature (1)..(154): tr|A0A317C906|A0A317C906_9GAMM NADPH-dependent 7-cyano- 7-deazaguanine reductase OS=Leucothrix pacifica OX=1247 513 GN=queF PE=3 SV=1
MSDNIYQDLQQLGGDTVLPDTPENAILESVKNPQADVDYMIRFTAPEFTSLCPMTSQPDFAHLVIDYIPDQLLVESKSLKLFLGSFRNHGAFHEDCTVSIARRLIEEIKPKWIRIGGYWYPRGGIPIDVFFAQGEIPKGVWVPEQGVAGYRGRG

SEQ ID NO: 46963 - protein, 154 aa, Leucothrix sp.
  misc_feature (1)..(154): tr|A0A317CG59|A0A317CG59_9GAMM NADPH-dependent 7-cyano- 7-deazaguanine reductase OS=Leucothrix sp. IMCC9719 OX= 1481894 GN=queF PE=3 SV=1
MSDNIYQNLEQLGGATVLPDDPKTAILESVQNPQADVDYVVRFTAPEFTSLCPMTAQPDFAHLVIDYIPDQLLVESKSLKLFLGAFRNHGAFHEDCTVSIARRLIDEINPKWLRIGGYWYPRGGIPIDVFYAFGEVPKGVWLPEQGVAGYRGRG

SEQ ID NO: 46964 - protein, 154 aa, Liberibacter asiaticus
  misc_feature (1)..(154): tr|C6XHS4|C6XHS4_LIBAP NADPH-dependent 7-cyano-7-deazag uanine reductase OS=Liberibacter asiaticus (strain psy6 2) OX=537021 GN=queF PE=3 SV=1
MSEITLNGLSILGGKAKPCDDPNEALLERIPSQNKNLNYVVRFTIPEFTSLCPVTSQPDFAHMILDYIPKDWLIESKSLKLFMASFRNHHSFHEDCTIYIARRLVTILDPKWLRIGAYWYPRGGIPIDIFWQTSAPPEGVFLPNQDVPQYRGRG

SEQ ID NO: 46965 - protein, 154 aa, Liberibacter crescens
  misc_feature (1)..(154): tr|L0EW63|L0EW63_LIBCB NADPH-dependent 7-cyano-7-deazag uanine reductase OS=Liberibacter crescens (strain BT-1) OX=1215343 GN=queF PE=3 SV=1
MHKKDTPSLSILGEKTTFSDSPETALLEKIPSTYKELCYVVRFTAPEFTSLCPVTSQPDFAYIIIDYVPNKWLVESKSFKLFLTSFRNHRAFHEDCSLYIAQRLVTLLEPQWLRICAYWYPRGGIPIDVFWQTSSPPKGALIPDPGVPTYRGRG

SEQ ID NO: 46966 - protein, 154 aa, Liberibacter solanacearum
  misc_feature (1)..(154): tr|E4UCZ3|E4UCZ3_LIBSC NADPH-dependent 7-cyano-7-deazag uanine reductase OS=Liberibacter solanacearum (strain C Lso-ZC1) OX=658172 GN=queF PE=3 SV=1
MSEIILDGLSILGRKAKIHDNPKEAPLEKIPSNHKDCNYVVRFTIPEFTSLCPVTSQPDFAHIIIDYIPQNWLIESKSLKLFTTSFRNYPSFHEDCSIYIAKRLVQVLEPKWLRIGAYWYPRGGMPIDIFWQTSSPPKGIFLPNQDVPQYRGRG

SEQ ID NO: 46967 - protein, 163 aa, Lihuaxuella thermophila
  misc_feature (1)..(163): tr|A0A1H8C1E8|A0A1H8C1E8_9BACL NADPH-dependent 7-cyano- 7-deazaguanine reductase OS=Lihuaxuella thermophila OX= 1173111 GN=queF PE=3 SV=1
MGSNRGDLNLKLLGNKETEYLFEYNPDVLEVFDNKHPDTDYFVKFNCPEFTSLCPITSQPDFATIYISYVPDQKLVESKSLKLYLFSFRNHGDFHENCIVTIMKDLIKAMDPKYIEVWGKFLPRGGISIDPYVNYGKKGTKWEKIAEERLAKHDLYPETVDNR

SEQ ID NO: 46968 - protein, 155 aa, Limimaricola cinnabarinus
  misc_feature (1)..(155): tr|U2Z6S7|U2Z6S7_9RHOB NADPH-dependent 7-cyano-7-deazag uanine reductase OS=Limimaricola cinnabarinus LL-001 OX =1337093 GN=queF PE=3 SV=1
MSDKSIYDGLTMLGGATVQPQTPEEAVLERVPNPQSDVDYAVRFTAPEFTSLCPLTGQPDFAHLVLDYVPGDWLVESKSLKLFLTSFRNHGAFHEDCTVSIARRLVDTLSPRWLRLGGYWYPRGGIPIDVFYQTGEPPKGVWIPDAGVPGYRGRG

SEQ ID NO: 46969 - protein, 155 aa, Limimaricola cinnabarinus
  misc_feature (1)..(155): tr|A0A2G1MD85|A0A2G1MD85_9RHOB NADPH-dependent 7-cyano- 7-deazaguanine reductase OS=Limimaricola cinnabarinus O X=1125964 GN=queF PE=3 SV=1
MSEKSIYDGLTMLGGTTVQPQSPEEAVLERVPNPQSDVDYAVRFTAPEFTSLCPLTGQPDFAHLVLDYVPGDWLVESKSLKLFLTSFRNHGAFHEDCTVSIARRLVDTLSPRWLRLGGYWYPRGGIPIDVFYQTGEPPKGVWIPDAGVPGYRGRG

SEQ ID NO: 46970 - protein, 155 aa, Limimaricola hongkongensis
  misc_feature (1)..(155): tr|A0A017H7P8|A0A017H7P8_9RHOB NADPH-dependent 7-cyano- 7-deazaguanine reductase OS=Limimaricola hongkongensis DSM 17492 OX=1122180 GN=queF PE=3 SV=1
MSEKSIYDDLTMLGGQTVQPQSPEEAVLERVPNPQADVDYAVRFTAPEFTSLCPLTGQPDFAHLVIDYVPGDWLVESKSLKLFLTSFRNHGAFHEDCTVSIARRLVDTLDPKWLRLGGYWYPRGGIPIDVFYQTGEPPRGVWIPETGVPGYRGRG

SEQ ID NO: 46971 - protein, 155 aa, Limimaricola pyoseonensis
  misc_feature (1)..(155): tr|A0A1G7IT90|A0A1G7IT90_9RHOB NADPH-dependent 7-cyano- 7-deazaguanine reductase OS=Limimaricola pyoseonensis O X=521013 GN=queF PE=3 SV=1
MTDKSIYDGLTVLGGETRQPQSPEEAVLERVPNPQADVDYAVRFTAPEFTSLCPLTGQPDFAHLVIDYVPGDWLVESKSLKLFLTSFRNHGAFHEDCTVSIARRLCETLSPKWLRLGGYWYPRGGIPIDVFYQTGAVPAGVWIPETGVAPYRGRG

SEQ ID NO: 46972 - protein, 155 aa, Limimaricola soesokkakensis
  misc_feature (1)..(155): tr|A0A1X6ZZL2|A0A1X6ZZL2_9RHOB NADPH-dependent 7-cyano- 7-deazaguanine reductase OS=Limimaricola soesokkakensis OX=1343159 GN=queF PE=3 SV=1
MSDKSIYDGLTMLGGQTVQPQSPEEAVLERVPNPQSDVDYAVRFTAPEFTSLCPLTGQPDFAHLVIDYVPGDWLVESKSLKLFLTSFRNHGAFHEDCTVSIGRRLVDTLSPKWLRLGGYWYPRGGIPIDVFYQTGEPPKGVWIPDAGVPGYRGRG

SEQ ID NO: 46973 - protein, 151 aa, Limimonas halophila
  misc_feature (1)..(151): tr|A0A1G7SHM3|A0A1G7SHM3_9PROT NADPH-dependent 7-cyano- 7-deazaguanine reductase OS=Limimonas halophila OX=1082 479 GN=queF PE=3 SV=1
MSTDEPSHLGRASGIPARPEDAVLDVVADPHPDETYLVRFTCPEFTSLCPITGQPDFAHLVIDYVPDRHLLESKALKLYLHSFRNHGAFHEACTVGIAKRLMAAANPVWLRLGGYWYPRGGIPIDIFYQSGEPPAGLWLPEPGVQPYRGRG

SEQ ID NO: 46974 - protein, 139 aa, Limnobacter sp.
  misc_feature (1)..(139): tr|A0A151QKI8|A0A151QKI8_9BURK NADPH-dependent 7-cyano- 7-deazaguanine reductase OS=Limnobacter sp. CACIAM 66H1 OX=1813033 GN=queF PE=3 SV=1
MSNKPSRDLQTFPNPNPDRPYHVHIEVPEFTCLCPLTGQPDFATLVIDYLPNQKNVELKSLKMYMWSYREEGAFHEAVTNKILDDLVAATDPRYMKLTAKWYVRGGVYTTVVAEHRHAGFQPLPKVELDSISTMNPTRG

SEQ ID NO: 46975 - protein, 139 aa, Limnobacter sp.
  misc_feature (1)..(139): tr|A0A520T9J7|A0A520T9J7_9BURK NADPH-dependent 7-cyano- 7-deazaguanine reductase OS=Limnobacter sp. OX=2003368 GN=queF PE=3 SV=1
MSNKPSRDLQTFPNPNPDRPYHVHIEVPEFTCLCPLTGQPDFATLVIDYLPNQKNVELKSLKMYMWSYREEGAFHEAVTNKILDDLVAATDPRYMKLTAKWYVRGGVYTTVVAEHRHSGFQPLPKVELDSISTMNPTRG

SEQ ID NO: 46976 - protein, 284 aa, Limnobaculum parvum
  misc_feature (1)..(284): tr|A0A2Y9U1K2|A0A2Y9U1K2_9ENTR NADPH-dependent 7-cyano- 7-deazaguanine reductase OS=Limnobaculum parvum OX=2172 103 GN=queF PE=3 SV=1
MTSHYQDNQVLSTLKLGKETAYIDHYDASLLQPVPRSLNRDPLGLSATALPFHGADIWTLYELSWLNSRGLPQVAVGEVHIDANSVNLVESKSFKLYLNSFNQTPFNSWEDVQQVLTRDLSLCAQGAVIVKLFRLEQLTGETIGIFDGECIDDQPIAITHYDFDDTLLEQATEKYTPVVEETLVSHLLKSNCLITHQPDWGSVEIRYRGPQINREALLRYIVSFRHHNEFHEQCVERIFNDIQRYCHPESLSVYARYTRRGGLDINPYRTNTQFVPETKRLARQ

SEQ ID NO: 46977 - protein, 281 aa, Limnohabitans curvus
  misc_feature (1)..(281): tr|A0A315ELS3|A0A315ELS3_9BURK NADPH-dependent 7-cyano- 7-deazaguanine reductase OS=Limnohabitans curvus OX=323 423 GN=queF PE=3 SV=1
MNTPEQSQLGKSSSYVDQYDASLLFPIPRQTKRDEIGITGQPPFFGADLWTAYELSWLNTRGKPQVALARITVPAESTHIIESKSFKLYLNSFNNTRIDDIAELQTRLRQDLSAAIWQGEPVKASVGVQLVLPENFDREPVHELDGLSLDRLDLDCDQYQPNPELLTANFNEAPTTETLTSNLLKSNCLVTGQPDWGSVRISYTGPQIDQAGLLRYIVSFRNHNEFHEQCVERIFMDITRRCKPLRLEVYARYTRRGGLDINPWRTSHPQAVPSNVRTARQ

SEQ ID NO: 46978 - protein, 281 aa, Limnohabitans parvus
  misc_feature (1)..(281): tr|A0A315E6G9|A0A315E6G9_9BURK NADPH-dependent 7-cyano- 7-deazaguanine reductase OS=Limnohabitans parvus II-B4 OX=1293052 GN=queF PE=3 SV=1
MNSPEQSQLGKSSAYVDQYDASLLFPIPRATKRAEIGVTGQPVFFGADLWTAFELSWLNTKGKPQVALAHITVPAESTHIVESKSFKLYLNSFNNTQLESAEVVRDMIRRDISAAIWHGGVVQASVGVKLLLQEHFDAEPVHELDGLNLDRMDIECTRYQPAPELLSANAEELPVSETLVSHLLKSNCLVTGQPDWGSVQITYSGPQIDQAGLLQYIVSFRNHNEFHEQCVERIFMDIWTRCKPTQLTVYARYTRRGGLDINPWRTSAPGKLPPNVRTARQ

SEQ ID NO: 46979 - protein, 281 aa, Limnohabitans planktonicus
  misc_feature (1)..(281): tr|A0A2T7UB65|A0A2T7UB65_9BURK NADPH-dependent 7-cyano- 7-deazaguanine reductase OS=Limnohabitans planktonicus II-D5 OX=1293045 GN=queF PE=3 SV=1
MNTPEQSQLGKSSAYVDQYDASLLFPIPRATKRAEIGVTGQPVFFGADLWTAFELSWLNTKGKPQVALAHITVPAESTHIVESKSFKLYLNSFNNTRLESADVVRDMIRRDISAAIWHGGTMQASVGVKLLLQEQFDAEPVHELDGLNLDRMDIECSRYQPAPDLLSATADEAPVTETLVSHLLKSNCLVTGQPDWGSVQITYSGPQIDQAGLLQYIVSFRNHNEFHEQCVERIFMDIWTRCKPTKLTVYARYTRRGGLDINPWRTSAPGALPPNVRTARQ

SEQ ID NO: 46980 - protein, 285 aa, Limnohabitans sp.
  misc_feature (1)..(285): tr|A0A315BUJ2|A0A315BUJ2_9BURK NADPH-dependent 7-cyano- 7-deazaguanine reductase OS=Limnohabitans sp. MMS-10A-1 60 OX=1835766 GN=queF PE=3 SV=1
MSTPNNTPEQSQLGKSSAYVDQYDASLLFPIPRATKRAEIGITAQPVFFGADLWTAFELSWLNTKGKPQVALAHITVPAESTHIVESKSFKLYLNSFNNTRIDSADEVRDRIRRDISAAIWHGSAVQASVGVKLLMPEMFDAEPVHEMDGLNLDRMDIECSRYQPAPDLLSATADEAPVSETLVSHLLKSNCLVTGQPDWGSVQITYSGPQIDQAGLLQYIVSFRNHNEFHEQCVERIFMDIWTRCKPTKLTVYARYTRRGGLDINPWRTSAPGAVPPNVRTARQ

SEQ ID NO: 46981 - protein, 281 aa, Limnohabitans sp.
  misc_feature (1)..(281): tr|A0A2M6VZA8|A0A2M6VZA8_9BURK NADPH-dependent 7-cyano- 7-deazaguanine reductase OS=Limnohabitans sp. 15K OX=11 00706 GN=queF PE=3 SV=1
MNSPEQSQLGKSSAYVDQYDAGLLFPIPRATKRAEIGVTGQPVFFGADLWTAFELSWLNTKGKPQVALAHITVPAESTHIVESKSFKLYLNSFNNTRLESADAVRDMIRRDISAAIWQGGAVQASVGVKLLLQEQFDTEPVHELDGLNLDRMDIECTRYEPAPDLLNANAEELPVTETLVSHLLKSNCLVTGQPDWGSVQITYSGPQIEQAGLLQYIVSYRNHNEFHEQCVERIFMDIWTRCKPTQLTVYARYTRRGGLDINPWRTSAPGKLPPNVRTARQ

SEQ ID NO: 46982 - protein, 142 aa, Limnoraphis robusta
  misc_feature (1)..(142): tr|A0A0F5YHF5|A0A0F5YHF5_9CYAN NADPH-dependent 7-cyano- 7-deazaguanine reductase OS=Limnoraphis robusta CS-951 OX=1637645 GN=queF PE=3 SV=1
MSNSPVEQNVFHSSEVGEVKYGEREIQQGQLITFPNPRVGRRYEVSISLPEFTCKCPFSGYPDFATLHLTYVPNERVVELKSLKLYINSYRDRYISHEESINQILDDFLEACDPLEVKIVGDFNPRGNVHTCVEVRHQRPDD

SEQ ID NO: 46983 - protein, 157 aa, Limnospira indica; identical to SEQ ID NO: 44126
  misc_feature (1)..(157): tr|H1W5Z9|H1W5Z9_9CYAN NADPH-dependent 7-cyano-7-deazag uanine reductase OS=Limnospira indica PCC 8005 OX=37621 9 GN=queF PE=3 SV=1

SEQ ID NO: 46984 - protein, 130 aa, Limnothrix rosea
  misc_feature (1)..(130): tr|A0A1Q4R6K8|A0A1Q4R6K8_9CYAN NADPH-dependent 7-cyano- 7-deazaguanine reductase OS=Limnothrix rosea IAM M-220 OX=454133 GN=queF PE=3 SV=1
MTESPETQEFKYGEREIEAGKLVTFPNPRPGRRYTINISLPEYTCKCPFSGYPDFATIYVSYVPDQKVVELKAIKLYINSYRDRYISHEEGVNQILDDLVAACDPLEMTIKGDYKPRGNVHTVVEVTHKK

SEQ ID NO: 46985 - protein, 137 aa, Limnothrix sp.
  misc_feature (1)..(137): tr|A0A372DH67|A0A372DH67_9CYAN NADPH-dependent 7-cyano- 7-deazaguanine reductase OS=Limnothrix sp. CACIAM 69d O X=1890733 GN=queF PE=3 SV=1
MSQATADTAHEPVKYGERQIEEGQLITFPNPRPGRIYHVQISLPEFTCKCPFSGYPDFAKISIDYVPDQKVVELKAIKLYINSYRDRYISHEESINQILDDFVAAADPLEATIVGDFNPRGNVHTVVEVRHQKPAQA

SEQ ID NO: 46986 - protein, 137 aa, Limnothrix sp.; identical to SEQ ID NO: 46985
  misc_feature (1)..(137): tr|A0A1C0VIU3|A0A1C0VIU3_9CYAN NADPH-dependent 7-cyano- 7-deazaguanine reductase OS=Limnothrix sp. P13C2 OX=188 0902 GN=queF PE=3 SV=1

SEQ ID NO: 46987 - protein, 163 aa, Listeria booriae
  misc_feature (1)..(163): tr|A0A099WB52|A0A099WB52_9LIST NADPH-dependent 7-cyano- 7-deazaguanine reductase OS=Listeria booriae OX=1552123 GN=queF PE=3 SV=1
MRNQDELAGVTHLGNQGTEYRMDYAPEVLEAFPNKHPDNDYFVKFNCPEFTSLCPMTGQPDFATIYISYVPGEKMVESKSLKLYLFSFRNHGDFHEDCINIIMKDLIKLMGPKYIEVWGKFTPRGGISIDPYANYGKPGTRFEEVAMHRLMNHDMYPEKVDNR

SEQ ID NO: 46988 - protein, 163 aa, Listeria cornellensis
  misc_feature (1)..(163): tr|W7CBP9|W7CBP9_9LIST NADPH-dependent 7-cyano-7-deazag uanine reductase OS=Listeria cornellensis FSL F6-0969 O X=1265820 GN=queF PE=3 SV=1
MRNQDELAGVTHLGNQGTEYSMDYAPEVLEAFPNKHPDNDYFVKFNCPEFTSLCPMTGQPDFATIYISYVPGEKMVESKSLKLYLFSFRNHGDFHEDCINIIMKDLIELMGPKYIEVWGKFTPRGGISIDPYANYGKPGTRWEEVAMHRLMNHDMYPEKVDNR

SEQ ID NO: 46989 - protein, 163 aa, Listeria grandensis
  misc_feature (1)..(163): tr|W7B046|W7B046_9LIST NADPH-dependent 7-cyano-7-deazag uanine reductase OS=Listeria grandensis FSL F6-0971 OX= 1265819 GN=queF PE=3 SV=1
MRKQEELAGVTHLGNQGTEYSMDYAPEVLEAFPNKHPDNDYFVKFNCPEFTSLCPMTGQPDFATIYISYVPGEKMVESKSLKLYLFSFRNHGDFHEDCINIIMKDLIKLMEPKYIEVWGKFTPRGGISIDPYANYGKPDTRWDEVAMHRLMNHDMYPEKVDNR

SEQ ID NO: 46990 - protein, 163 aa, Listeria rocourtiae
  misc_feature (1)..(163): tr|A0A4R6ZL38|A0A4R6ZL38_9LIST NADPH-dependent 7-cyano- 7-deazaguanine reductase OS=Listeria rocourtiae OX=6479 10 GN=queF PE=3 SV=1
MRNQDELAGVTHLGNQGTAYSMDYAPEVLEAFPNKHPNNDYFVKFNCPEFTSLCPMTGQPDFATIYISYVPGEKMVESKSLKLYLFSFRNHGDFHEDCINIIMKDLIELMGPKYIEVWGKFTPRGGISIDPYANYGKPDTRWEKVAMHRLMNHDMYPEKVDNR

SEQ ID NO: 46991 - protein, 163 aa, Listeria sp.
  misc_feature (1)..(163): tr|A0A3N9TS52|A0A3N9TS52_9LIST NADPH-dependent 7-cyano- 7-deazaguanine reductase OS=Listeria sp. SHR_NRA_18 OX= 2269046 GN=queF PE=3 SV=1
MRNQDELAGVTHLGNQGTEYRMDYAPEVLEAFPNKHPDNDYFVKFNCPEFTSLCPMTGQPDFATIYISYVPGEMMVESKSLKLYLFSFRNHGDFHEDCINIIMKDLIELMGPKYIEVWGKFTPRGGISIDPYANYGKPDSRFEEVAMHRLMNHDMYPEKVDNR

SEQ ID NO: 46992 - protein, 163 aa, Listeriaceae bacterium; identical to SEQ ID NO: 46991
  misc_feature (1)..(163): tr|A0A099W662|A0A099W662_9LIST NADPH-dependent 7-cyano- 7-deazaguanine reductase OS=Listeriaceae bacterium FSL A5-0209 OX=1497679 GN=queF PE=3 SV=1

SEQ ID NO: 46993 - protein, 285 aa, Litorilituus sediminis
  misc_feature (1)..(285): tr|A0A4P6PB81|A0A4P6PB81_9GAMM NADPH-dependent 7-cyano- 7-deazaguanine reductase OS=Litorilituus sediminis OX=7 18192 GN=queF PE=3 SV=1
MATYQNAKELSTLTLGKATQYCSEYNANLLQGVPRSLNRDDLALCNESLPFYGEDVWYGYELSWLNPKGKPQVAVAEFRFPCTSPNIIESKSFKLYLNSFNQSKFASREEVEKVLTKDLSEVAGASAIVKLFSVDDCPALEIKSADKTSYCIDDEDITVTHYDFDAQLLANAQQQDSENTQEQLVSHLLKSNCLITNQPDWASIYITYTGKKINHGALLKYLISFREHNEFHEQCVERIFCDLQQFCQLEQLTVFARYTRRGGLDINPFRSTHLDSAPHGRTLRQ

SEQ ID NO: 46994 - protein, 283 aa, Litorilituus sp.
  misc_feature (1)..(283): tr|A0A502KLQ6|A0A502KLQ6_9GAMM NADPH-dependent 7-cyano- 7-deazaguanine reductase OS=Litorilituus sp. RZ04 OX=24 91017 GN=queF PE=3 SV=1
MTPYQNASQLKELTLGKKTDYTSEYDPKLLQAVPRSLNRDDLALNEANLPFIGEDVWYGYELSWLNNKGKPVVALVEFRFACTSPNIVESKSFKLYLNSFNQTKFNDIEEVKSYLEKDLSATSGTKATVTLFPVDNCPALEIADEKAVCIDDLDISIEDYQFNAEHLLNSQSNHSQIKEHNIVSHLLKSNCLITNQPDWASIYIHYTGKEISQEQLLTYLISFRQHNEFHEQCVERIFCDLQQYCQLEALTVYARYTRRGGLDINPFRSTHVATAPWGRTLRQ

SEQ ID NO: 46995 - protein, 152 aa, Litorimonas taeanensis
  misc_feature (1)..(152): tr|A0A420WKC1|A0A420WKC1_9RHOB NADPH-dependent 7-cyano- 7-deazaguanine reductase OS=Litorimonas taeanensis OX=5 68099 GN=queF PE=3 SV=1
MTDRYDELNQLGQMKGLPKSPEEAVLERVKNPCSEPYMIRLVAPEFTSICPVTGQPDFAHLVVDYCPDKWIVESKAFKLYLGSFRNHGDFHEACTTGIGQRLVKELSPKWLRIGGYWYPRGGIPIDVFYQFGEAPKGLWIPEQGVPPYRGRG

SEQ ID NO: 46996 - protein, 153 aa, Loktanella sp.
  misc_feature (1)..(153): tr|A0A1H9HE02|A0A1H9HE02_9RHOB NADPH-dependent 7-cyano- 7-deazaguanine reductase OS=Loktanella sp. DSM 29012 OX =1881056 GN=queF PE=3 SV=1
METIYSDLKQLGDQTKLPNTPEEAVLERVANPQADIAYCVRFTAPEFTSLCPMTGQPDFAHLVIDYVPGDYLVESKSLKLFLGSFRNHGAFHEDCTISIARRLVDFLNPQWLRIGGYWYPRGGIPIDVFWQTGAVPQNVWIPDQGVPPYRGRG

SEQ ID NO: 46997 - protein, 154 aa, Loktanella sp.
  misc_feature (1)..(154): tr|A0A0F4RJH0|A0A0F4RJH0_9RHOB NADPH-dependent 7-cyano- 7-deazaguanine reductase OS=Loktanella sp. S4079 OX=579 483 GN=queF PE=3 SV=1
MSDDIYSNLKQLGGATVMPASPEDAELERVPNPQADVLYNVRFTAPEFTSLCPMTGQPDFAHLVIDYVPGDWLVESKSLKLFLGSFRNHGAFHEDCTISIARRLVAFLDPKWLRIGGYWYPRGGIPIDVFWQTGQMPEGVWIPDQGVPPYRGRG

SEQ ID NO: 46998 - protein, 280 aa, Lonepinella koalarum
  misc_feature (1)..(280): tr|A0A5D1ZLN2|A0A5D1ZLN2_9PAST NADPH-dependent 7-cyano- 7-deazaguanine reductase OS=Lonepinella koalarum OX=534 17 GN=queF PE=3 SV=1
MMYSNNASLKNLKLGQKTEYRAIYDRTLLQPVPRSLNRDALGITQQQPFSFGADIWTAYEISWLNPKGLPQVAIADIEIDYRSQNLIESKSFKLYLNSFNQTKFASFEQVQNTIQQDLAQCADGDVKVRLNSLEFYNQQKLDDFIGECIDYQDIEVTDYAFDAHYLQDCTNNTYVEETLVSHLLKSNCLITSQPDWGSVQIHYVGKQINREKLLRYLISFRQHNEFHEQCVERIFNDLMHYAQPQKLTVYARYTRRGGLDINPFRSNFETIPNNQRLARQ

SEQ ID NO: 46999 - protein, 279 aa, Lonepinella koalarum
  misc_feature (1)..(279): tr|A0A4R1KT14|A0A4R1KT14_9PAST NADPH-dependent 7-cyano- 7-deazaguanine reductase OS=Lonepinella koalarum OX=534 17 GN=queF PE=3 SV=1
MYSNNASLKNLKLGQKTEYRAIYDRTLLQPVPRSLNRDALGITQQQPFSFGADIWTAYEISWLNPKGLPQVAIADIEIDYRSQNLIESKSFKLYLNSFNQTKFASFEQVQNTIQQDLAQCADGDVKVRLNSLEFYNQQKLDDFIGECIDYQDIEVTDYAFDAHYLQDCTNNTYVEETLVSHLLKSNCLITSQPDWGSVQIHYVGKQINREKLLRYLISFRQHNEFHEQCVERIFNDLMHYAQPQKLTVYARYTRRGGLDINPFRSNFETIPNNQRLARQ

SEQ ID NO: 47000 - protein, 166 aa, Longibacter salinarum
  misc_feature (1)..(166): tr|A0A2A8D012|A0A2A8D012_9BACT NADPH-dependent 7-cyano- 7-deazaguanine reductase OS=Longibacter salinarum OX=18 50348 GN=queF PE=3 SV=1
MSASNNTDLEQVYREMEEEAVRHTRIALEHMKEYGIEPEGEVRPFLPPSERNEEIKRLPYEHETRQVVTYETEPGEFSALCPFSGLPDFGTLRIEYVPGDWIVELKSLKYYVVSWRQIGAAQEDLTPIIFQDLMKHLKNPEYLVVETEYNVRGGINTTCTIDSREQ

SEQ ID NO: 47001 - protein, 152 aa, Longilinea arvoryzae
  misc_feature (1)..(152): tr|A0A0S7BF88|A0A0S7BF88_9CHLR NADPH-dependent 7-cyano- 7-deazaguanine reductase OS=Longilinea arvoryzae OX=360 412 GN=queF PE=3 SV=1
MTQEDVSGLTILGGQAQPSKKLEAFPNRAPDRFYLVSLHTSEFTCLCPKTGQPDFATIHVDYVPDQKVIESKSFKLYLWSYRNEGAFHEHVVNQILDDLQKVLDAHWIRVTGEFNIRGGIGIKVEAEHTRTPAARLQWMQRAADAAAASGQE

SEQ ID NO: 47002 - protein, 164 aa, Longimonas halophila
  misc_feature (1)..(164): tr|A0A2H3NL87|A0A2H3NL87_9BACT NADPH-dependent 7-cyano- 7-deazaguanine reductase OS=Longimonas halophila OX=146 9170 GN=queF PE=3 SV=1
MSSSTPSPSSPTEWVEQAAEHTEAALEYMRQFGVEPEGHIRPFLPPDTRQDHIDRIPYTHDVRQRVVYKTEPGEFSARCPFSGLPDFGTVEVTYVPGDWILELKSLKYYFMSWRDIGAAQEDITALLFEDLMAELENPARLTITTEYNVRGGINTTCTVDSTNQ

SEQ ID NO: 47003 - protein, 280 aa, Lonsdalea britannica
  misc_feature (1)..(280): tr|A0A1X3RV07|A0A1X3RV07_9GAMM NADPH-dependent 7-cyano- 7-deazaguanine reductase OS=Lonsdalea britannica OX=108 2704 GN=queF PE=3 SV=1
MHITEKDKITHLGVRSSYPDQYDPELLEALPRANGRELVGLTDAELPFTGYDLWTAFELSWLNKKGKPMVGVAEFHVPASSVNLIESKSFKLYLNSFNQTRMRDIETLLSTLVTDLSAAAQGQVKVNIYPGLTGYPAQIDGLPGTVIDDLDIEVNDYSFNPDYLKYAVAENAPTVSETLSSNLLKSNCLVTYQPDWGSVVIKYEGKKIDPECLLRYLISFRQHNEFHEQCVERIFNDIQRYCQPQKLTVFARYTRRGGLDINPFRSNFEDSHTVGRLVRQ

SEQ ID NO: 47004 - protein, 280 aa, Lonsdalea iberica
  misc_feature (1)..(280): tr|A0A1X3RY03|A0A1X3RY03_9GAMM NADPH-dependent 7-cyano- 7-deazaguanine reductase OS=Lonsdalea iberica OX=108270 3 GN=queF PE=3 SV=1
MHITEKDKITHLGVRSSYPDQYDPELLEALPRANGRELVGLTDADLPFTGYDLWTAFELSWLNKKGKPMVGIAEFQVPASSVNLIESKSFKLYLNSFNQTRMRDIETLLSTLVADLSAAAQGQVKVNIYPGLTGYPAQIDALPGTVIDDLDIEVNDYSFNPEYLKYAVSENAPTVSETLSSNLLKSNCLVTYQPDWGSVVIKYEGRKIDPECLLRYLISFRQHNEFHEQCVERIFNDIQRYCQPQKLTVFARYTRRGGLDINPFRSNFEDSHAVGRLVRQ

SEQ ID NO: 47005 - protein, 280 aa, Lonsdalea populi
  misc_feature (1)..(280): tr|A0A3N0UHE9|A0A3N0UHE9_9GAMM NADPH-dependent 7-cyano- 7-deazaguanine reductase OS=Lonsdalea populi OX=1172565 GN=queF PE=3 SV=1
MHITGKDKITHLGVRSSYPDQYDPELLEALPRANGRELVGLTDAGLPFTGYDLWTAFELSWLNKKGKPMVGVAEFQVPASSVNLIESKSFKLYLNSFNQTRMRDIETLLSTLVTDLSAAAQGQVKVNIYPGLTGYPAHIDSLPGTVIDDLDIEVNDYSFNPDYLKYAVSENAPTVSETLSSNLLKSNCLVTYQPDWGSVVIKYEGRKIDPEYLLRYLISFRQHNEFHEQCVERIFSDIQRYCQPQKLTVFARYTRRGGLDINPFRSNFEDSHAVGRLVRQ

SEQ ID NO: 47006 - protein, 280 aa, Lonsdalea quercina
  misc_feature (1)..(280): tr|A0A1H4D7M8|A0A1H4D7M8_9GAMM NADPH-dependent 7-cyano- 7-deazaguanine reductase OS=Lonsdalea quercina OX=71657 GN=queF PE=3 SV=1
MHITENDKITHLGVRSNYPDQYDPELLEALPRANGRELVGLTDADLPFTGYDLWTAFELSWLNKKGKPMVGIAEFQVPASSVNLIESKSFKLYLNSFNQTRMRDIETLLSTLVTDLSAAAQGQVKVNIYPGLSGYPAQIDGLPGTVIDDLDIEVNDYSFNPEYLKYAVSENAPIISETLSSNLLKSNCLVTYQPDWGSVVINYEGKKIDPECLLRYLISFRQHNEFHEQCVERIFNDIQRYCQPQKLTVFARYTRRGGLDINPFRSNFEDSHAVGRLVRQ

SEQ ID NO: 47007 - protein, 165 aa, Lucifera butyrica
  misc_feature (1)..(165): tr|A0A498R9C0|A0A498R9C0_9FIRM NADPH-dependent 7-cyano- 7-deazaguanine reductase OS=Lucifera butyrica OX=135158 5 GN=queF PE=3 SV=1
MPRNQDELTGITLLGNQNTQYNYSYAPEVLETFDNKHPDNDYWVKFNCPEFTSLCPITGQPDFATIYISYIPEIRMVESKSLKLYLLSFRNHGDFHEDVVNIIMKDLIKVMQPRYIEVWGKFLPRGGISIDPYCNYGKPDTRYQELAWHRLREHDLHFMDKVDNR

SEQ ID NO: 47008 - protein, 267 aa, Luminiphilus syltensis
  misc_feature (1)..(267): tr|B8KRQ4|B8KRQ4_9GAMM NADPH-dependent 7-cyano-7-deazag uanine reductase OS=Luminiphilus syltensis NOR5-1B OX=5 65045 GN=NOR51B_1476 PE=4 SV=1
MVDRVLGSRVDAPTRYSPEILEPVERQRGDERLSPMLGADVWHLYELSWLSREGWPTAFVGALAIPASSPRTVESKSLKLYLNSLNFHRFDNERAAVSTIMRDVQAVVGASVDLTIAAPTELAQWTREPAGVCIDDVFSGALVAADWGASRKTPFSQGEDRVSETLISHQLRSLCPVTGQPDWGTLVVDYSGYRLDPAELLSFVCSFREHQDFHEHCVEQIYKKLFGDLSPEALTVTAYYQRRGGIDITPWRGHEKLDAPLWRMGRQ

SEQ ID NO: 47009 - protein, 275 aa, Luteibacter pinisoli
  misc_feature (1)..(275): tr|A0A4Y5Z7J6|A0A4Y5Z7J6_9GAMM NADPH-dependent 7-cyano- 7-deazaguanine reductase OS=Luteibacter pinisoli OX=258 9080 GN=queF PE=3 SV=1
MSSPDHSPLGKATTYADRYDASLLFPIPRQAKRDEIGVDGAALPFHGVDIWNGYELSWLDPRGKPMVAVAEFRFPATTPNIVESKSFKLYLNSFAQETLGSRDDLRDTLVRDLSAASGGPVEVALHAPEELNGVPLHEPEGILLDDQELAFDSYGPPRPDFLSTHEGEVREVLVSHLLRSNCPVTGQPDWGSVQISYTGAPIDRAGLLRYLVSFRRHTEFHEQCVERIFMDLSERCAPRALAVYARYTRRGGLDINPFRSTDPAAEPGNPRGARQ

SEQ ID NO: 47010 - protein, 275 aa, Luteibacter rhizovicinus
  misc_feature (1)..(275): tr|A0A0G9HFQ1|A0A0G9HFQ1_9GAMM NADPH-dependent 7-cyano- 7-deazaguanine reductase OS=Luteibacter rhizovicinus DS M 16549 OX=1440763 GN=queF PE=3 SV=1
MSSPDHSPLGKATVYADRYDAGLLYPIPRQGKRDEIGVSADALPFHGVDVWNGYELSWLDLRGKPVVAVAEFRFPATTPNIVESKSFKLYLNSFAQERLADAAAVGAILVRDLSAAAGGPAEVILRAPGDLDGTPIGEPEGALLDVQELDFDSYGPPRPDFLATHEGDAREVLVSHLLRSNCPVTGQPDWGSVQIAYTGAPIDRAGLLRYLVSFRSHTEFHEQCVERIFMDIRERCAPRELAVYARYTRRGGLDINPFRSTDPAAVPGNPRGARQ

SEQ ID NO: 47011 - protein, 275 aa, Luteibacter rhizovicinus
  misc_feature (1)..(275): tr|A0A4R3YJF5|A0A4R3YJF5_9GAMM NADPH-dependent 7-cyano- 7-deazaguanine reductase OS=Luteibacter rhizovicinus OX =242606 GN=queF PE=3 SV=1
MSSPEHSPLGKSTVYADRYDASLLFPIPRQGKRDDLGVTHPLPFHGMDVWNGYELSWIDDRGKPVVAVAEFRVPATTPNIVESKSFKLYLNSFAQERMVSADALRTVLERDLSQAAGGPVSVVLRSPGDIEGTLIAEPEGILLDAQDLAIDHYGPPRADFLSAPAGPIVTEALVSHLLRSNCPVTGQPDWGSVQVRYTGAPIDRAGLLRYIVSFRNHTEFHEQCVERMFMDISQRCAPRELTVYARYTRRGGLDINPFRSTDPTARPANPRGARQ

SEQ ID NO: 47012 - protein, 285 aa, Luteibacter sp.
  misc_feature (1)..(285): tr|A0A1T5AXC0|A0A1T5AXC0_9GAMM NADPH-dependent 7-cyano- 7-deazaguanine reductase OS=Luteibacter sp. 22Crub2.1 O X=1283288 GN=queF PE=3 SV=1
MAAFTAAVAAMSSPEHSPLGKSTVYADRYDAGLLFPIPRQGKRDEIGVAEAALPFHGVDVWNGYELSWLDKRGKPHVAVAEFRFPATTPNIVESKSFKLYLNSFAQERVADAATLRQTLVRDLSAAAGGPVGIVLHAPGELDGTPISEPEGLLLDTQELDFDSYGPPRADFLVANDGDAREVLVSHLLRSNCPVTGQPDWGSVQIAYTGKPIDRAGLLRYLVSFRNHTEFHEQCVERIFMDVTARCAPRELSVYARYTRRGGLDINPFRSTDPAAVPANPRGARQ

SEQ ID NO: 47013 - protein, 285 aa, Luteibacter sp.
  misc_feature (1)..(285): tr|A0A1I0QIY9|A0A1I0QIY9_9GAMM NADPH-dependent 7-cyano- 7-deazaguanine reductase OS=Luteibacter sp. 329MFSha OX =1798239 GN=queF PE=3 SV=1
MAVCTQLQTAMSSPEHSPLGKTTTYADRYDAGLLFPIPRQGKRDEIGVDGADLPFHGVDVWNGYELSWLDMRGKPVVAVAEFRFPATTPNIVESKSFKLYLNSFAQERMAGPDIVHDTLQRDLSAAAGGRAEVWLRAPNELDGCPLGEPEGQLLDDQDLDFDSYGPPRADFLGTLDGDASETVVSHLLRSNCPVTGQPDWGSVQIAYTGQRIDHAGLLRYLVSFRSHTEFHEQCVERIFMDIRARCAPRELSVYARYTRRGGLDINPFRSTDANAVPGNPRGARQ

SEQ ID NO: 47014 - protein, 275 aa, Luteibacter yeojuensis
  misc_feature (1)..(275): tr|A0A561GXB7|A0A561GXB7_9GAMM NADPH-dependent 7-cyano- 7-deazaguanine reductase OS=Luteibacter yeojuensis OX=3 45309 GN=queF PE=3 SV=1
MSSPDHSPLGKATVYADRYDAGLLFPIPRQGKRDEIGVREGALPFHGEDLWNGYELSWLDARGKPHVAVAEFRFPATTPNIVESKSFKLYLNGFAQERVPDAATLRDTLMRDLSAAAAGPVDVTLHAPDELRGTPIGEPEGSLLDALDIDFDSYGPPRPDFLHAGEGDVREVLVSHLLRSNCPVTGQPDWGSVQVAYAGAPIDHAGLLRYLVSFRSHTEFHEQCVERIFMDLSERCAPRELTVYARYTRRGGLDINPFRSTDPSAKPTNPRGARQ

SEQ ID NO: 47015 - protein, 275 aa, Luteibacter yeojuensis
  misc_feature (1)..(275): tr|A0A0F3KQV1|A0A0F3KQV1_9GAMM NADPH-dependent 7-cyano- 7-deazaguanine reductase OS=Luteibacter yeojuensis OX=3 45309 GN=queF PE=3 SV=1
MSSPDHSPLGKATTYADRYDASLLFPIPRQAKRDEIGVDGAALPFHGVDIWNGYELSWLGPRGKPMVAVAEFRFPATTPHIIESKSFKLYLNSFAQETIASRDVLADTLARDLSAAAGGPATVVLRAPEELNGEPLHEPEGVLLDDQDLDFDSYGPPRADFLATHGGEAREVLVSHLLRSNCPVTGQPDWGSVQVSYTGAPIDRAGLLRYLVSFRRHTEFHEQCVERIFMDLRERCAPRELSVYARYTRRGGLDINPFRSTAAGAQPGNPRGARQ

SEQ ID NO: 47016 - protein, 274 aa, Luteimonas aestuarii
  misc_feature (1)..(274): tr|A0A4R5TPK5|A0A4R5TPK5_9GAMM NADPH-dependent 7-cyano- 7-deazaguanine reductase OS=Luteimonas aestuarii OX=453 837 GN=queF PE=3 SV=1
MPTPEDSLLGREVAYPAHYDPALLFPIPRAPARAETGIGADAALPFIGHDRWHAYELSWLDGRGKPVVETATITVPATTPHLVESKSLKLYLNSLNGTRFDEADAVRSRIAADLSQATGAVVEVAFGLPPFTDGEANDATCIDALEVDIDHYGPPDAGLLRAEDGHVVEETLRSDLLKSNCPVTGQPDWAGVRIAYRGPRIDREGLLRYVVSFRDHAGFHEQCVERMFVDLLARCRPERLSVEARYTRRGGLDINPWRATPGHAAPVAIRDLRQ

SEQ ID NO: 47017 - protein, 269 aa, Luteimonas cucumeris
  misc_feature (1)..(269): tr|A0A562KUV5|A0A562KUV5_9GAMM NADPH-dependent 7-cyano- 7-deazaguanine reductase OS=Luteimonas cucumeris OX=985 012 GN=queF PE=3 SV=1
MTSAIPLGRDVAYPAHYDPSLLFPIARALGRTALDMHGAALPFIGHDRWQAYELSWLDARGKPRVGTATIQVPCESPNLIESKSLKLYLNSFNAHRCDGDAAVLATIAADLSRAAGAQVTVAFGLPAIVEDDAAQSIDDLDIAIDRYGPPDPHWLQADAQSIVEETLGSALLKSNCPVTGQPDWASLRIAYRGPRLDRAGLLRYLVSFRDHAEFHEQCVERIFVDLVARCRPQALSVEARYTRRGGLDINPWRATPGHAPPLPARDARQ

SEQ ID NO: 47018 - protein, 270 aa, Luteimonas marina
  misc_feature (1)..(270): tr|A0A5C5U7Z1|A0A5C5U7Z1_9GAMM NADPH-dependent 7-cyano- 7-deazaguanine reductase OS=Luteimonas marina OX=488485 GN=queF PE=3 SV=1
MSRPEDSQLGREVAYPRHYDPALLFPIPRASGRSELGLGAALPFTGHDRWHAYELSWLDARGKPVVATATITVPADSPNLVESKSLKLYLNSLNAERFDEAQAVRARIAADLSQAAGAEVAVAFGLPPFAGDDDVPCIDALDVEIDGYGPPDAGLLHADPGDLVEETLRSDLLKSNCPVTGQPDWAGVRIAYRGPRIDRAGLLRYIVSFRDHAGFHEQCVEHLFVDLLARCRPQALSVEARYTRRGGLDINPWRATPGLPAPAARRDLRQ

SEQ ID NO: 47019 - protein, 289 aa, Luteimonas sp.
  misc_feature (1)..(289): tr|A0A518N4D7|A0A518N4D7_9GAMM NADPH-dependent 7-cyano- 7-deazaguanine reductase OS=Luteimonas sp. Gr-4 OX=1176 533 GN=queF PE=3 SV=1
MTSELPLGRDVAYPRAYDPALLFPIARDAGRDALGIAGDALPFTGHDRWHAYELSWLDRRGKPVVATATFTVPADSPRLVESKSLKLYLNSLNSERFAGVDDVRARIAADLSAAAGGAVAVVFGLPPVEGGDRRGAERNPCVTRELEGDASPAPISIDGLDVACDEYDAPNPSLLSADAHDRAHELLHSDLLKSNCPVTGQPDWASVRIAYRGPRIDRAGLLRYLVSFREHAEFHEQCVERIFVDLLACCRPEELSVEARYTRRGGLDINPWRATPGLAAPTPARDPRQ

SEQ ID NO: 47020 - protein, 279 aa, Luteimonas sp.
  misc_feature (1)..(279): tr|A0A290XBA3|A0A290XBA3_9GAMM NADPH-dependent 7-cyano- 7-deazaguanine reductase OS=Luteimonas sp. 100111 OX=20 06110 GN=queF PE=3 SV=1
MSSEFDTAAAPPIPLGREVAYPRHYDPGLLFPIARTLGRAELGIAEALPFTGHDRWHAYELGWLDGRGKPVVATATITVPGDSPSLVESKSLKLYLNSLNHTRFDDADAVRTRIAADLSQAAGATVDVSYGLPPMAAAASGEVSIDDLDIEITSYGPPDAALLAADADGDAVVEERLASSLLKSNCPVTGQPDWASLHIAYRGPRIDRASLLRYLVSFRDHAEFHEQCVERVFVDLMARCHPETLSVEARYTRRGGLDINPWRATPAHAAPPARRDERQ

SEQ ID NO: 47021 - protein, 277 aa, Luteimonas terrae
  misc_feature (1)..(277): tr|A0A4R5U922|A0A4R5U922_9GAMM NADPH-dependent 7-cyano- 7-deazaguanine reductase OS=Luteimonas terrae OX=153019 1 GN=queF PE=3 SV=1
MSSHASDAAAPPIPLGREVAYPRHYDPGLLFPIARTLGRAEIGIGDALPFIGHDRWHAYELSWLDGRGKPVVATATITVPGNSPHLVESKSLKLYLNSLNHTRFDTADAVRARVIADLSASAGALVDVVFGLPAMADAAQDGDSIDDLDVEIASYGPPDASLLAADAGDIVEERLQSALLKSNCPVTGQPDWASLHIAYRGPRIDRAALLRYLVSFRDHAEFHEQCVERVFVDLRARCGCTALSVEARYTRRGGLDINPWRATPGHPAPVRLRDERQ

SEQ ID NO: 47022 - protein, 115 aa, Luteitalea pratensis
  misc_feature (1)..(115): tr|A0A143PW03|A0A143PW03_9BACT NADPH-dependent 7-cyano- 7-deazaguanine reductase OS=Luteitalea pratensis OX=185 5912 GN=queF PE=3 SV=1
MASAGIETFPNPRPGRPYEIETRCPEFTSMCPVTGLPDFGEIRITYVPDATCIELKSLKYYLLDFRNKGVFYEALTNQILDDLVASCAPLRMTVVGDFTPRGGIRTTVTATYQKD

SEQ ID NO: 47023 - protein, 114 aa, Lutibaculum baratangense
  misc_feature (1)..(114): tr|V4RGE8|V4RGE8_9RHIZ NADPH-dependent 7-cyano-7-deazag uanine reductase OS=Lutibaculum baratangense AMV1 OX=63 1454 GN=queF PE=3 SV=1
MRFTAPEFTSLCPITGQPDFAHLVIDYVPGDWLVESKSLKLYLMSFRNHGAFHEDCTVSIGRRLAELLAPQWLRVGGYWYPRGGIPIDVFFQTGRAPGDVWIPDQGVPPYRGRG

SEQ ID NO: 47024 - protein, 126 aa, Lyngbya aestuarii
  misc_feature (1)..(126): tr|U7QR92|U7QR92_9CYAN NADPH-dependent 7-cyano-7-deazag uanine reductase OS=Lyngbya aestuarii BL J OX=1348334 G N=queF PE=3 SV=1
MYGEREIQEGHLITFPNPRVGRRYEVSISLPEFTCKCPFSGYPDFATLHLAYVPNQRVVELKSLKLYINSYRDRYISHEESINQILDDFVGACDPLEVKLVGDFNPRGNVHTCIEVQHQRSDSSSQ

SEQ ID NO: 47025 - protein, 138 aa, Lyngbya confervoides; identical to SEQ ID NO: 46305
  misc_feature (1)..(138): tr|A0A0C1YPK6|A0A0C1YPK6_9CYAN NADPH-dependent 7-cyano- 7-deazaguanine reductase OS=Lyngbya confervoides BDU141 951 OX=1574623 GN=queF PE=3 SV=1

SEQ ID NO: 47026 - protein, 147 aa, Lyngbya sp.
  misc_feature (1)..(147): tr|A0YR56|A0YR56_LYNSP NADPH-dependent 7-cyano-7-deazag uanine reductase OS=Lyngbya sp. (strain PCC 8106) OX=31 3612 GN=queF PE=3 SV=1
MSNLPAEQEQNVFPSSEPEELMYGEREIQEGHLITFPNPRVGRRYEVSISLPEFTCKCPFSGYPDFATLHLTYVPNQRVVELKSLKLYINSYRDRYISHEESINQILDDFVGACDPLEVKLVGDFNPRGNVHTCIEVQHQRSESSSQ

SEQ ID NO: 47027 - protein, 166 aa, Lysinibacillus acetophenoni
  misc_feature (1)..(166): tr|A0A285U9J6|A0A285U9J6_9BACI NADPH-dependent 7-cyano- 7-deazaguanine reductase OS=Lysinibacillus acetophenoni OX=614649 GN=queF PE=3 SV=1
MSGRSHEEGLKDLTLLGNQGTKYAFNYAPEVLESVDNLHSNRDYFVKFNCPEFTSLCPLTNQPDFATMYISYIPDKKIVESKSLKLYLFSFRNHGDFHEDCVNIIMNDLIQLLDPRYIEVWGKFTPRGGISIDPWCNYGKPGTKYEEMANYRLMNHDLNPEKIDNR

SEQ ID NO: 47028 - protein, 166 aa, Lysinibacillus boronitolerans
  misc_feature (1)..(166): tr|A0A0A3JE04|A0A0A3JE04_9BACI NADPH-dependent 7-cyano- 7-deazaguanine reductase OS=Lysinibacillus boronitolera ns JCM 21713 = 10a = NBRC 103108 OX=1294264 GN=queF PE= 3 SV=1
MSGRSHEEGLKDLTLLGNQGTKYSYDYAPEVLEAVDNLHANRDYFVKFNCPEFTSLCPLTNQPDFATMYISYIPDKKIVESKSLKLYLFSFRNHGDFHEDCVNIIMNDLITLLDPRYIEVWGKFTPRGGISIDPWCNYGKPGTKYEEIANYRLMNHDLNPEKIDNR

SEQ ID NO: 47029 - protein, 166 aa, Lysinibacillus chungkukjangi
  misc_feature (1)..(166): tr|A0A318TSF4|A0A318TSF4_9BACI NADPH-dependent 7-cyano- 7-deazaguanine reductase OS=Lysinibacillus chungkukjang i OX=1202712 GN=queF PE=3 SV=1
MSGRKNEEGLNDLKLLGNQNTQYPSDYAPEVLEAVDSLHSNRDYFVKFNCPEFTSLCPITGQPDFATMYISYIPDQKIVESKSLKLYLFSFRNHGDFHEDCVNIIMNDLISLLDPRYIEVWGKFTPRGGISIDPWCNYGKPGTKYEEMANYRLMNHDLNPEKVDNR

SEQ ID NO: 47030 - protein, 166 aa, Lysinibacillus composti
  misc_feature (1)..(166): tr|A0A3N9U6Y3|A0A3N9U6Y3_9BACI NADPH-dependent 7-cyano- 7-deazaguanine reductase OS=Lysinibacillus composti OX= 720633 GN=queF PE=3 SV=1
MSGRNHEEGLKDLTLLGNQNTKYSFDYAPEVLEAVDNLHSNRDYFVKFNCPEFTSLCPLTHQPDFATMYISYIPDKKIVESKSLKLYLFSFRNHGDFHEDCVNIIMNDLIKLLDPRYIEVWGKFTPRGGISIDPWCNYGKPGTKYEEIANYRLMNHDLNPEKIDNR

SEQ ID NO: 47031 - protein, 166 aa, Lysinibacillus endophyticus
  misc_feature (1)..(166): tr|A0A494YYL1|A0A494YYL1_9BACI NADPH-dependent 7-cyano- 7-deazaguanine reductase OS=Lysinibacillus endophyticus OX=1978490 GN=queF PE=3 SV=1
MSGRGHEEGLKDLTLLGNQNTKYAFEYAPEVLEAVDNLHSNRDYFVKFNCPEFTSLCPLTNQPDFATMYISYIPDKKIVESKSLKLYLFSFRNHGDFHEDCVNIIMNDLIKLLDPRYIEVWGKFTPRGGISIDPWCNYGRPGTKYEEMANYRLMNHDLNPEKIDNR

SEQ ID NO: 47032 - protein, 166 aa, Lysinibacillus fusiformis
  misc_feature (1)..(166): tr|A0A1E4R814|A0A1E4R814_9BACI NADPH-dependent 7-cyano- 7-deazaguanine reductase OS=Lysinibacillus fusiformis O X=28031 GN=queF PE=3 SV=1
MSGRSHEEGLKDLTLLGNQGTNYSFEYAPEVLEAVDNLHSNRDYFVKFNCPEFTSLCPLTNQPDFATMYISYIPDKKIVESKSLKLYLFSFRNHGDFHEDCVNIIMNDLITLLDPRYIEVWGKFTPRGGISIDPWCNYGKPGTKYEEIANYRLMNHDLNPEKIDNR

SEQ ID NO: 47033 - protein, 166 aa, Lysinibacillus fusiformis
  misc_feature (1)..(166): tr|D7WZC7|D7WZC7_9BACI NADPH-dependent 7-cyano-7-deazag uanine reductase OS=Lysinibacillus fusiformis ZC1 OX=71 4961 GN=queF PE=3 SV=1
MSGRSHEEGLKDLTLLGNQGTKYSYDYAPEVLEAVDNLHANRDYFVKFNCPEFTSLCPLTNQPDFATMYISYIPDKKIVESKSLKLYLFSFRNHGDFHEDCVNIIMNDLIALLDPRYIEVWGKFTPRGGISIDPWCNYGKPGTKYEEIANYRLMNHDLNPEKIDNR

SEQ ID NO: 47034 - protein, 166 aa, Lysinibacillus halotolerans
  misc_feature (1)..(166): tr|A0A3M8H405|A0A3M8H405_9BACI NADPH-dependent 7-cyano- 7-deazaguanine reductase OS=Lysinibacillus halotolerans OX=1368476 GN=queF PE=3 SV=1
MSGRNHEEGLKDLTLLGNQNTQYSFDYAPEVLEAVDNLHSNRDYFVKFNCPEFTSLCPLTHQPDFATMYISYIPDKKIVESKSLKLYLFSFRNHGDFHEDCVNIIMNDLIKLLDPRYIEVWGKFTPRGGISIDPWCNYGKPGTKYEEMAHYRLMNHDLNPEKIDNR

SEQ ID NO: 47035 - protein, 166 aa, Lysinibacillus macroides
  misc_feature (1)..(166): tr|A0A0N0CUZ2|A0A0N0CUZ2_9BACI NADPH-dependent 7-cyano- 7-deazaguanine reductase OS=Lysinibacillus macroides OX =33935 GN=queF PE=3 SV=1
MSSRTEQEGLGDLTLLGNQQTKYPVQYAPEVLEAVESLHTERDYFVKFNCPEFTSLCPITQQPDFATMYISYIPDKKLVESKSLKLYLFSFRNHGDFHEDCVNIIMNDLIKLLDPRYIEVWGKFTPRGGISIDPWCNYGRSETKYEKIADYRLMNHDLYPEKIDNR

SEQ ID NO: 47036 - protein, 166 aa, Lysinibacillus manganicus
  misc_feature (1)..(166): tr|A0A0A3IRY9|A0A0A3IRY9_9BACI NADPH-dependent 7-cyano- 7-deazaguanine reductase OS=Lysinibacillus manganicus D SM 26584 OX=1384049 GN=queF PE=3 SV=1
MSGRSHEDGLKDLTLLGNQGTNYAFNYSPEVLESVDNLHSNRDYFVKFNCPEFTSLCPLTNQPDFATMYISYIPDKKIVESKSLKLYLFSFRNHGDFHEDCVNIIMNDLIKLLDPRYIEVWGKFTPRGGISIDPWCNYGRPGTKYEEIANYRLMNHDLNPEKIDNR

SEQ ID NO: 47037 - protein, 166 aa, Lysinibacillus massiliensis
  misc_feature (1)..(166): tr|A0A0A3J1W6|A0A0A3J1W6_9BACI NADPH-dependent 7-cyano- 7-deazaguanine reductase OS=Lysinibacillus massiliensis 4400831 = CIP 108448 = CCUG 49529 OX=1211035 GN=queF P E=3 SV=1
MSGRKNTEGLEDLTLLGNQNTQYASDYAPEVLESVDSLHSNRDYFVKFNCPEFTSLCPITGQPDFATIYISYIPDKKIVESKSLKLYLFSFRNHGDFHEDCVNIIMNDLIKLLDPRYIEVWGKFTPRGGISIDPWCNYGKPGTKFEEMANYRLMNHDLNPEKVDNR

SEQ ID NO: 47038 - protein, 166 aa, Lysinibacillus odysseyi
  misc_feature (1)..(166): tr|A0A0A3IIA8|A0A0A3IIA8_9BACI NADPH-dependent 7-cyano- 7-deazaguanine reductase OS=Lysinibacillus odysseyi 34h s-1 = NBRC 100172 OX=1220589 GN=queF PE=3 SV=1
MSGRSQQEGLEELTLLGNQNVKYSFDYAPEVLEAVDNLHTNRDYFVKFNCPEFTSLCPITSQPDFATMYISYIPDKKIVESKSLKLYLFSFRNHGDFHEDCVNIIMDDLIKLMDPRYIEVWGKFTPRGGISIDPWCNYGRPGTKYEEMAQYRLMNHDLNPETIDNR

SEQ ID NO: 47039 - protein, 165 aa, Lysinibacillus saudimassiliensis
  misc_feature (1)..(165): tr|A0A078MKG8|A0A078MKG8_9BACI NADPH-dependent 7-cyano- 7-deazaguanine reductase OS=Lysinibacillus saudimassili ensis OX=1461583 GN=queF PE=3 SV=1
MSGRSEENLEGLTLLGNQNTNYLFEYAPEVLEAVPNLHTGRDFFVKFNCPEFTSLCPMTGQPDFATMYLSFIPDELLVESKSLKLYLFSFRNHGDFHEDCVNIIMNDLIQLINPRYIEVWGKFTPRGGLSIDPWCNYGRPGTKYEKMAEHRLMNHDMYPEKIDNR

SEQ ID NO: 47040 - protein, 166 aa, Lysinibacillus sinduriensis
  misc_feature (1)..(166): tr|A0A0A3IHI0|A0A0A3IHI0_9BACI NADPH-dependent 7-cyano- 7-deazaguanine reductase OS=Lysinibacillus sinduriensis BLB-1 = JCM 15800 OX=1384057 GN=queF PE=3 SV=1
MSGRKDTEGLNDLTLLGNQKTQYATDYAPEVLEAVESLHSNRDYFVKFNCPEFTSLCPITGQPDFATMYISYIPDQKIVESKSLKLYLFSFRNHGDFHEDCVNIIMNDLIKLLDPRYIEVWGKFTPRGGISIDPWCNYGKPGTKYEEMADYRLMNHDLYPEKIDNR

SEQ ID NO: 47041 - protein, 165 aa, Lysinibacillus sp.; identical to SEQ ID NO: 44743
  misc_feature (1)..(165): tr|A0A544UPN6|A0A544UPN6_9BACI NADPH-dependent 7-cyano- 7-deazaguanine reductase OS=Lysinibacillus sp. SDF0063 OX=2133753 GN=queF PE=3 SV=1

SEQ ID NO: 47042 - protein, 166 aa, Lysinibacillus sp.
  misc_feature (1)..(166): tr|A0A4R7U6K1|A0A4R7U6K1_9BACI NADPH-dependent 7-cyano- 7-deazaguanine reductase OS=Lysinibacillus sp. YR326 OX =1855296 GN=queF PE=3 SV=1
MAGRNEEQGLQDLTLLGNQNTKYLFEYSPEILEAVDNLHTKNDFFVKFNCPEFTSLCPMTGQPDFATMYISFIPDKKLVESKSLKLYLFSFRNHGDFHEDCVNIIMNDLIKLIEPRYIEVWGKFTPRGGLSIDPWCNYGRPGTKYEKMAEHRLMNHDMYPEKVDNR

SEQ ID NO: 47043 - protein, 166 aa, Lysinibacillus sphaericus
  misc_feature (1)..(166): tr|R7ZDQ6|R7ZDQ6_LYSSH NADPH-dependent 7-cyano-7-deazag uanine reductase OS=Lysinibacillus sphaericus OT4b.31 O X=1285586 GN=queF PE=3 SV=1
MSGRSHEEGLKDLTLLGNQGTQYSYEYAPEVLEAVDNLHSNRDYFVKFNCPEFTSLCPLTNQPDFATMYISYIPDKKIVESKSLKLYLFSFRNHGDFHEDCVNIIMNDLIKLLDPRYIEVWGKFTPRGGISIDPWCNYGKPETKYEEIANYRLMNHDLNPEKIDNR

SEQ ID NO: 47044 - protein, 162 aa, Lysinibacillus sphaericus
  misc_feature (1)..(162): tr|A0A1D8JF41|A0A1D8JF41_LYSSH NADPH-dependent 7-cyano- 7-deazaguanine reductase OS=Lysinibacillus sphaericus O X=1421 GN=queF PE=3 SV=1
MRKSDTKDLTLLGNQETTYNYEYDPDILETFNNQHTENDYFVKFNIPEFTSLCPMTGQPDFATIYISYMPEIKMVESKSLKLYIGSFRNHDGFHEDCANTIMKDLIKLMDPKYIEVWAKFTPRGGISIDPYCNYGKPGTIYEDMARERMFKHDMYPETVDNR

SEQ ID NO: 47045 - protein, 166 aa, Lysinibacillus telephonicus
  misc_feature (1)..(166): tr|A0A431UIT2|A0A431UIT2_9BACI NADPH-dependent 7-cyano- 7-deazaguanine reductase OS=Lysinibacillus telephonicus OX=1714840 GN=queF PE=3 SV=1
MSGRSHEEGLKDLTLLGNQGTKYLFEYAPEVLEAVDNLHSNRDYFVKFNCPEFTSLCPLTHQPDFATIYISYIPDKKIVESKSLKLYLFSFRNHGDFHEDCVNIIMNDLIKLLEPRYIEVWGKFTPRGGISIDPWCNYGKPGTKYEEMANYRLMNHDLNPEKIDNR

SEQ ID NO: 47046 - protein, 166 aa, Lysinibacillus xylanilyticus; identical to SEQ ID NO: 47042
  misc_feature (1)..(166): tr|A0A0K9F6C9|A0A0K9F6C9_9BACI NADPH-dependent 7-cyano- 7-deazaguanine reductase OS=Lysinibacillus xylanilyticu s OX=582475 GN=queF PE=3 SV=1

SEQ ID NO: 47047 - protein, 166 aa, Lysinibacillus xyleni
  misc_feature (1)..(166): tr|A0A285SLG9|A0A285SLG9_9BACI NADPH-dependent 7-cyano- 7-deazaguanine reductase OS=Lysinibacillus xyleni OX=61 4648 GN=queF PE=3 SV=1
MSGRGHEEGLKDLTLLGNQNTKYAFNYAPEVLEAVDNLHSNRDYFVKFNCPEFTSLCPLTNQPDFATMYISYIPDKKIVESKSLKLYLFSFRNHGDFHEDCVNIIMNDLIKLLDCRYIEVWGKFTPRGGISIDPWCNYGRPGTKYEEMANYRLMNHDLNPEKIDNR

SEQ ID NO: 47048 - protein, 274 aa, Lysobacter aestuarii
  misc_feature (1)..(274): tr|A0A508AN04|A0A508AN04_9GAMM NADPH-dependent 7-cyano- 7-deazaguanine reductase OS=Lysobacter aestuarii OX=170 6195 GN=queF PE=3 SV=1
MDPVSNPPSLPLGRHVDYPRHYDAGLLFPIARATGRRAIGLDGDALPFVGVDRWHAYELSWLDPRGKPCMATATFEVPADSPCLVESKSLKLYLNSFNATAFDDAESVRERIASDLSATAGAPVAVAFGLPPLVADGEGEDIDAIEVEVDAYGPPEAGLLRADAGHEVAETLRSGLLKSNCPVTGQPDWATVVIAYRGPRLDRAALLRYLVSFRDHAEFHEQCVERIFADLLARTRPASLSVEARYTRRGGLDINPWRATPGRERPTATRDTRQ

SEQ ID NO: 47049 - protein, 270 aa, Lysobacter antibioticus
  misc_feature (1)..(270): tr|A0A0S2FI55|A0A0S2FI55_9GAMM NADPH-dependent 7-cyano- 7-deazaguanine reductase OS=Lysobacter antibioticus OX= 84531 GN=queF PE=3 SV=1
MTTHDLPLGRHVDYPREYDASLLFPIARSLGRAHIGLADDALPFVGIDRWHAYELSWLDARGKPRVGTATLSVPATSPQLIESKSLKLYLNSFNATRFDDDAVVLATIARDLSAAAGAPVEVAFGLPPIDTADGVESIDELDVAIDDYGPPNAEHLAADAGEIVEETLGSALLKSNCPVTGQPDWARVVIAYRGPKLDRAGLLRYLVSFRDHAEFHEQCVERIHSDLSRRCQPQWLSVEARYTRRGGLDINPWRGSPGRARPSVGRDERQ

SEQ ID NO: 47050 - protein, 273 aa, Lysobacter arseniciresistens
  misc_feature (1)..(273): tr|A0A0A0F0J4|A0A0A0F0J4_9GAMM NADPH-dependent 7-cyano- 7-deazaguanine reductase OS=Lysobacter arseniciresisten s ZS79 OX=913325 GN=queF PE=3 SV=1
MTSSDLPLGRQVDYPHGYDASLLFPIARSLGRGEIGLGDAAALPFAGHDRWHAYELGWLDRLGKPRVATATLTVPADSPNLVESKSLKLYLNSFNASRFDDDDAVRERIADDLSRVAGAPVAVAFGLPGFDRADDARVHCIDDLPVTIDHYGPPRADFLQADATGIVEETLSSALLKSNCPVTGQPDWARVLVAYRGPRIDRAGLLRYLVSFRDHCEFHEQCVERIFIDLMQRVAPDQLSVEARYTRRGGLDINPWRATPGTAAPAAGRDLRQ

SEQ ID NO: 47051 - protein, 270 aa, Lysobacter capsici
  misc_feature (1)..(270): tr|A0A108UAE3|A0A108UAE3_9GAMM NADPH-dependent 7-cyano- 7-deazaguanine reductase OS=Lysobacter capsici AZ78 OX= 1444315 GN=queF PE=3 SV=1
MTSHDLPLGRHVDYPREYDASLLFPIERSLGRAHLGLRDDALPFVGYDRWHAYELSWLDRRGKPRVGTATVSVPATSPHLIESKSLKLYLNSFNATAFDDEAAVLTTIARDLSAAAGATVQVASGLPAIGADEPSESIDELDVAIDDYGPPKAEHLAIESDTLVEERLSSGLLKSNCPVTGQPDWARVTLAYRGPKLDRAALLRYLISFRDHAEFHEQCVERIHADLSQRTAPQWLSVEARYTRRGGLDINPWRGSPGLSPPRAGRDERQ

SEQ ID NO: 47052 - protein, 270 aa, Lysobacter capsici
  misc_feature (1)..(270): tr|A0A291A815|A0A291A815_9GAMM NADPH-dependent 7-cyano- 7-deazaguanine reductase OS=Lysobacter capsici OX=43589 7 GN=queF PE=3 SV=1
MTSHDLPLGRHVDYPREYDASLLFPIERALGRAHLGLRDDALPFVGYDRWHAYELSWLDRRGKPRVGTATVSVPATSPHLIESKSLKLYLNSFNATAFDDEAAVLTTIARDLSAAAGAAVQVASGLPAIGADEPSESIDELDVAIDDYGPPRAEHLAIESDTLVEERLSSALLKSNCPVTGQPDWGRVTLAYRGPKLDRAALLRYLISFRDHAEFHEQCVERIHSDLSQRTAPQWLSVEARYTRRGGLDINPWRGSPGLSPPRAGRDERQ

SEQ ID NO: 47053 - protein, 271 aa, Lysobacter concretionis
  misc_feature (1)..(271): tr|A0A0A0EMS3|A0A0A0EMS3_9GAMM NADPH-dependent 7-cyano- 7-deazaguanine reductase OS=Lysobacter concretionis Ko0 7 = DSM 16239 OX=1122185 GN=queF PE=3 SV=1
MPLGRHVDYPREYDASLLFPIARALGRNEIGLAGAGPHDAGLPFIGSDRWHAYELGWLDGRGKPRVATATLSIPAASPHLIESKSLKLYLNSFNATRFDDDEAVRARIAADLAQVAGSAVEVVFGLPPIDEQTEMAESLDELPIAFDHYGPPQPDFLQSDADEVVEESLTSALLKSNCPVTGQPDWARVRIDYRGPRLDRAGLLRYLVSFRDHAGFHEQCVEQIFHDLMQRARPQHLSVQARYTRRGGLDINPWRATPGFAAPAAGRDLRQ

SEQ ID NO: 47054 - protein, 278 aa, Lysobacter daejeonensis
  misc_feature (1)..(278): tr|A0A0A0EQF7|A0A0A0EQF7_9GAMM NADPH-dependent 7-cyano- 7-deazaguanine reductase OS=Lysobacter daejeonensis GH1 -9 OX=1385517 GN=queF PE=3 SV=1
MTTQDNSVAGSALGRHVDYPQGYDPGLLYPIARTLGRHAIGLRDAALPFIGHDRWHAYELSWLDAKGKPQVATATFEVPAEAPNLIESKSLKLYLNSFNASRFDGAEAVLAHIAEDLSRVAGAPVRVAFGLPPMVDAGDAEDAISIDALDVAIDHYGPPRTAFIAIDADGVVEETLASALLKSNCPVTGQPDWAHVRIAYRGPRLDRVGLLRYLVSFRDHAEFHEQCVERIFSDLLVHARPERLSVEARYTRRGGLDINPWRATPNCVTAVARREARQ

SEQ ID NO: 47055 - protein, 269 aa, Lysobacter defluvii
  misc_feature (1)..(269): tr|A0A0A0M9X4|A0A0A0M9X4_9GAMM NADPH-dependent 7-cyano- 7-deazaguanine reductase OS=Lysobacter defluvii IMMIB A PB-9 = DSM 18482 OX=1385515 GN=queF PE=3 SV=1
MSSDLPLGRQVEYPREYDASLLFPIPRANGRDEIGLAGAALPFHGHDRWHAYELGWLDLRGKPVVATATLTVPATSPRLVESKSLKLYLNSFNASRFADPEDVRARIAADLSTCAGAPVTVTFGLPGFDDTAGGTCIDGLDVAIDRYGPPDATLLSADAASVVEETLTSNLLKSNCPVTGQPDWARVSISYRGPRLDREALLRYLVSFRDHCEFHEQCVERIFLDLVRVAAPEWLSVEARYTRRGGLDINPWRASPGVPPPAAGRDLRQ

SEQ ID NO: 47056 - protein, 271 aa, Lysobacter dokdonensis
  misc_feature (1)..(271): tr|A0A0A2WDU9|A0A0A2WDU9_9GAMM NADPH-dependent 7-cyano- 7-deazaguanine reductase OS=Lysobacter dokdonensis DS-5 8 OX=1300345 GN=queF PE=3 SV=1
MTSSELPLGRAVDYPRHYDPGLLFPIPRAVGRSALSIAGDTLPFVGHDRWHAYELSWLDGRGKPMVATATFTVPADSPHLVESKSLKLYLNSFNSSRFDSADDVRARIASDLARSAGAPVDVHFGLPPMIGDEDDVVDLDALAIDIDDYGPPNAGHLACDAGDIVEARVRSALLKSNCPVTGQPDWAEVRIEYRGPRIDAAGLLRYLVSFRDHAEFHEQCVERIHTDLVARCAPEQLSVEALYTRRGGLDINPWRATPGSAPPLAVRALRQ

SEQ ID NO: 47057 - protein, 270 aa, Lysobacter enzymogenes
  misc_feature (1)..(270): tr|A0A0S2DQJ4|A0A0S2DQJ4_LYSEN NADPH-dependent 7-cyano- 7-deazaguanine reductase OS=Lysobacter enzymogenes OX=6 9 GN=queF PE=3 SV=1
MTAHELPLGRHVDYPREYDASLLFPIARALGREHIGVDDAAPPFVGHDRWHAYELSWLDGRGKPRVATATVSVPATSPHLIESKSLKLYLNSFNSSRFDSAQAVLDTIAADLSAAAGAPVAVVFGLPPIDGDGTAESIDGLDVAIDDYGPPNAAHLSADAGEIVEETLNSALLKSNCPVTGQPDWARVVIAYRGPRLDRAGLLRYLVSFRDHAEFHEQCVERIHADLTRIAKPQWLSVEARYTRRGGLDINPWRGSPGLAAPAAGRDERQ

SEQ ID NO: 47058 - protein, 270 aa, Lysobacter enzymogenes
  misc_feature (1)..(270): tr|A0A1H3HRL5|A0A1H3HRL5_LYSEN NADPH-dependent 7-cyano- 7-deazaguanine reductase OS=Lysobacter enzymogenes OX=6 9 GN=queF PE=3 SV=1
MTAHELPLGRHVDYPREYDASLLFPIARALGREHIGVDDAAPPFVGHDRWHAYELSWLDPRGKPQVATATVSVPATSPHLIESKSLKLYLNSFNSSRFDSAQAVLHTIAADLSAAAGAPVAVAFGLPPIGGDGAVESIDGLDVAIDDYGPPNAGHLSADAGEIVEEALSSALLKSNCPVTGQPDWARVVIAYRGPRLDRAGLLRYLVSFRDHAEFHEQCVERIHADLTRIAAPQWLSVEARYTRRGGLDINPWRGSPGLDAPAAGRDERQ

SEQ ID NO: 47059 - protein, 270 aa, Lysobacter gummosus
  misc_feature (1)..(270): tr|A0A0S2GEH3|A0A0S2GEH3_9GAMM NADPH-dependent 7-cyano- 7-deazaguanine reductase OS=Lysobacter gummosus OX=2623 24 GN=queF PE=3 SV=1
MTTHDLPLGRHVDYPREYDASLLFPIARSLGRAHIGLSDDALPFTGFDRWNAYELSWLDARGKPRVATATVTVPAGSPHLIESKSLKLYLNSFNSTRFDGEDIVRATIAADLSAAAGAPVEVAFGLPSIGNDDGAESIDELDVAIDDYGPPNAGHLRADPGAIVEETLTSALLKSNCPVTGQPDWARVIVAYRGPRLDRAALLRYLISFRDHAEFHEQCVERIHSDLQTHAQPQWLSVQARYTRRGGLDINPWRGSHGLAPPPAGRDERQ

SEQ ID NO: 47060 - protein, 271 aa, Lysobacter lycopersici
  misc_feature (1)..(271): tr|A0A516V6H9|A0A516V6H9_9GAMM NADPH-dependent 7-cyano- 7-deazaguanine reductase OS=Lysobacter lycopersici OX=1 324796 GN=queF PE=3 SV=1
MSTPQDSSLGRHVDYPREYDASLLFPIARSLGRDALGIRADALPFAGFDRWHAYELSWLDARGKPRVATATFEVPADSPNLVESKSLKLYLNSFNASRFDGDDAVRDTIARDLSNAAGAPVSVAFGLPPLRDDDAAIDIDAQDIAIESYGPPDASLLASDASSDANETLSSALLKSNCPVTGQPDWASVRIAYRGPRIDRAGLLRYLVSFRDHAEFHEQCVERIFVDVLAHCRPHALSVEARYTRRGGLDINPWRATPGFIAPTPGRDLRQ

SEQ ID NO: 47061 - protein, 274 aa, Lysobacter maris
  misc_feature (1)..(274): tr|A0A2U9T0Y0|A0A2U9T0Y0_9GAMM NADPH-dependent 7-cyano- 7-deazaguanine reductase OS=Lysobacter maris OX=1605891 GN=queF PE=3 SV=1
MNDSPRNDGLPLGRHVDYPRHYDAGLLFPIARSLGRHEIDVDDAALPFVGIDRWHAYELSWLDARGKPAMATATVQVPANSPFLIESKSLKLYLNSFNATAFDDAEAVRLRIATDLSAAAGAPVQVAFGLPPATPEHEGESIDGLDVAIEHYGPPRAALLAADAGRIVEEVLCSGLLKSNCPVTGQPDWATVVIGYTGPQLDRAALLRYLVSFRDHAEFHEQCVERIFTDLLARAAPTALSVEARYTRRGGLDINPWRATPGHPRPIETRDTRQ

SEQ ID NO: 47062 - protein, 274 aa, Lysobacter maris
  misc_feature (1)..(274): tr|A0A508B865|A0A508B865_9GAMM NADPH-dependent 7-cyano- 7-deazaguanine reductase OS=Lysobacter maris OX=1605891 GN=queF PE=3 SV=1
MNDSARNAGLPLGRHVDYPRHYDAGLLFPIARSLGRHEIGVDDAALPFVGVDRWHAYELSWLDARGKPAMATATVQVPADSPFLIESKSLKLYLNSFNATAFDDAEAVRLRIATDLSAAAGAPVQVAFGLPPATPEHEGESIDGLDVAIEHYGPPRAALLAADAGRIVEEVLCSGLLKSNCPVTGQPDWATVVIGYTGPQLDRAALLRYLVSFRDHAEFHEQCVERIFTDLLARAAPTALSVEARYTRRGGLDINPWRATPGHPRPIETRDTRQ

SEQ ID NO: 47063 - protein, 273 aa, Lysobacter pythonis
  misc_feature (1)..(273): tr|A0A3M2I0V5|A0A3M2I0V5_9GAMM NADPH-dependent 7-cyano- 7-deazaguanine reductase OS=Lysobacter pythonis OX=2483 112 GN=queF PE=3 SV=1
MSTAHNSPDTSQLGRETAYPEHYDARLLFPIPRARGRAALGIDGAPPFVGFDAWNAYELSWLDARGKPRVAVARFTVPADSPNLIESKSFKLYLNSFNRERVEDDTALRARIETDLSTAAAAPVTMHPALPPMGEAGGECIDGLDIAIDDYGPPNAGHLSAADDETVEEILSSHLLKSNCPVTGQPDWASVVIAYRGPRIAREGLLRYLVSFRDHREFHEQCVERIFIDLTARCRPRSLSVEACYTRRGGLDINPWRATPDCAAPPPRRLPRQ

SEQ ID NO: 47064 - protein, 276 aa, Lysobacter ruishenii
  misc_feature (1)..(276): tr|A0A562M0U1|A0A562M0U1_9GAMM NADPH-dependent 7-cyano- 7-deazaguanine reductase OS=Lysobacter ruishenii OX=686 800 GN=queF PE=3 SV=1
MTTQDNSVAGSALGRHVDYPQGYDPGLLYPIARTLGRHAIGLREEALPFIGHDRWHAYELSWLDAKGKPVVATATFEVPADAPNLVESKSLKLYLNSFNASRFDDADAVRASIAGDLSRVAGAPVRVAFGLPPMATGDDDAVSIDALDVAIDHYGPPRADFIRIDADDVVEETLASALLKSNCPVTGQPDWAHVRIAYRGPRLDRAGLLRYLVSFRDHAEFHEQCVERVFADVLAQARPERLSVEARYTRRGGLDINPWRATPGSVTPVARREDRQ

SEQ ID NO: 47065 - protein, 270 aa, Lysobacter silvestris
  misc_feature (1)..(270): tr|A0A2K1Q1A2|A0A2K1Q1A2_9GAMM NADPH-dependent 7-cyano- 7-deazaguanine reductase OS=Lysobacter silvestris OX=16 45665 GN=queF PE=3 SV=1
MHTPEDSQLGREVDYPRHYDPALLFPIPRTQGRDELGIRADALPFIGHDRWQGYELGWLDARGKPVVATATFEVPATSPNLVESKSFKLYLNSFNAHRIESPEELQRILERDLANVAGAPVRMRFGVPPLREEDGGECIDGLDIAIDHYGPPDPALLICAGADVEEALVSHLLKSNCPVTGQPDWATLQIRYLGPRIDRAGLLRYIVGFRDQREFHEQCVERIFVDVLARCRPQVLSVEARYTRRGGLDINPWRATPGSEPPEVWRTPRQ

SEQ ID NO: 47066 - protein, 273 aa, Lysobacter soli
  misc_feature (1)..(273): tr|A0A3D8VA93|A0A3D8VA93_9GAMM NADPH-dependent 7-cyano- 7-deazaguanine reductase OS=Lysobacter soli OX=453783 G N=queF PE=3 SV=1
MTHDLPLGRHVDYPREYDASLLFPIARSLGRDHIGIASGELPFIGVDRWNAYELSWLDLRGKPRVGTATITVPATSPNLVESKSLKLYLNSFNAARFDSDADVHARIVEDLTRVAGVPVDVRFGLPPTDEAAPDNAVLDCIDSLDVEIHDYGPPNADHLSADASRVVTETLTSSLLKSNCPVTGQPDWARIVIDYHGPKLDRAGLLRYVVSFRDHAEFHEQCVERVFVDLIARTGAQRLSVEARYTRRGGLDINPWRATPGIERPAPGRDERQ

SEQ ID NO: 47067 - protein, 268 aa, Lysobacter sp.
  misc_feature (1)..(268): tr|A0A0Q9ECU0|A0A0Q9ECU0_9GAMM NADPH-dependent 7-cyano- 7-deazaguanine reductase OS=Lysobacter sp. Root96 OX=17 36612 GN=queF PE=3 SV=1
MTQELPLGRHVDYPREYDPALLFPIARALGRSQIGLSDGALPFVGLDRWHAYELSWLDARGKPHMATATLTVPADSPHLIESKSLKLYLNSYNASRFDDAETVRARIAADLSQAAGAGVEVAFGLPPMRDSAAESLDGLEVAIDDYGPPNAAHLAADPAMVVEETLSSALLKSNCPVTGQPDWARVDIAYRGPRLDRAGLLRYLVSFRDHAEFHEQCVERIFADLLRAAAPQALSVEARYTRRGGLDINPWRATAGFSRPAAQRDERQ

SEQ ID NO: 47068 - protein, 281 aa, Lysobacter sp.
  misc_feature (1)..(281): tr|A0A0D0S4W2|A0A0D0S4W2_9GAMM NADPH-dependent 7-cyano- 7-deazaguanine reductase OS=Lysobacter sp. A03 OX=11991 54 GN=queF PE=3 SV=1
MTASDPTAAARAGSDLPLGRSVAYPRSYDASLLFPIARALGRTPLGVHADALLFVGNDRWHAYELGWLDGRGKPRVATATITVPASSPHLIESKSLKLYLNSFNATAFTSDEAVLTRMVADLSRVAGSPVEVAFGLPAMDEAHDGAILIDTLDIAIDHYGPPEPAFIAADPAQLVTETLTSELLKSNCPVTGQPDWARLVVRYHGPQLDRAGLLRYLVSFRDHAGFHEQCVEQVFCDLMRHACPTQLSVEARYTRRGGLDINPWRATPGCPAPQPGRDLRQ

SEQ ID NO: 47069 - protein, 269 aa, Lysobacter spongiicola
  misc_feature (1)..(269): tr|A0A1T4SDI5|A0A1T4SDI5_9GAMM NADPH-dependent 7-cyano- 7-deazaguanine reductase OS=Lysobacter spongiicola DSM 21749 OX=1122188 GN=queF PE=3 SV=1
MTTNDLPLGRHVEYPREYDPSLLFPIERALGRGELGIDGGALPFIGHDRWHAYELGWLDTRGKPRVATATLTVPADSPRLVESKSLKLYLNSFNASRFNDDAQVLERMAADLSAVAGAPVQVAFGLPDFDPGEAACIDGTAVSIDHYGPPHAGFLAADTDDVVEEVLSSALLKSNCPVTGQPDWARLVIDYRGPRLDRAALLRYLVSFRDHCEFHEQCVERVFTDLMARARPARLSVEARYTRRGGLDINPWRATPGTVAPRAGRDLRQ

SEQ ID NO: 47070 - protein, 273 aa, Lysobacter tolerans
  misc_feature (1)..(273): tr|A0A1N6S6I8|A0A1N6S6I8_9GAMM NADPH-dependent 7-cyano- 7-deazaguanine reductase OS=Lysobacter tolerans OX=1604 334 GN=queF PE=3 SV=1
MGNFNTPADSQLGRETAYPDRYDPALLFPIPRAAARAQIGVDDQALPFTGHDGWNVYELSWLDLRGKPQVAVGRLTVPADSPHLIESKSLKLYLNSFNSERLADAESLQARIERDLSATAGAPVSMVFGLPGMGVIAGENIDFVDVDINEYGPPNARLLQADDSSHVNETLVSDLLKSNCPVTGQPDWATLSIDYRGPRIEREGLLKYLASYRDYREFHEQCVERIFIDLMTHCRLQSLSVQANYTRRGGVDINPWRGTPDRLPPPDLRVLRQ

SEQ ID NO: 47071 - protein, 150 aa, Macellibacteroides sp.
  misc_feature (1)..(150): tr|A0A1C2BXP1|A0A1C2BXP1_9PORP NADPH-dependent 7-cyano- 7-deazaguanine reductase OS=Macellibacteroides sp. HH-Z S OX=1857568 GN=queF PE=3 SV=1
MDEKELSLLGNKTVYKSDYAPEVLEAFTNKHPDNDYWVRFNCPEFTSLCPITGQPDFATILIDYIPDVKMVESKSLKLYLFSFRNHGDFHEDCVNIIMKDLIKLMDPKYIEVTGIFTPRGGISIHPYCNYGRKGTKFEELAEKRLFAHNS

SEQ ID NO: 47072 - protein, 165 aa, Macrococcus bohemicus
  misc_feature (1)..(165): tr|A0A328A5C5|A0A328A5C5_9STAP NADPH-dependent 7-cyano- 7-deazaguanine reductase OS=Macrococcus bohemicus OX=19 03056 GN=queF PE=3 SV=1
MTGRQKEELQDITLLGNQNNKYLYEYDPSILESFDNKHQGRDYFVKFNCPEFTSLCPITGQPDFAAIYISYIPNIKMVESKSLKLYLFSFRNHGDFHEDCMNIIMNDLIDLMDPHYIEVWGKFTPRGGISIDPYTNYGRPGTKYEEIANYRLMNHDLYPETITNR

SEQ ID NO: 47073 - protein, 164 aa, Macrococcus bovicus
  misc_feature (1)..(164): tr|A0A4R6C0N6|A0A4R6C0N6_9STAP NADPH-dependent 7-cyano- 7-deazaguanine reductase OS=Macrococcus bovicus OX=6996 8 GN=queF PE=3 SV=1
MTRSKDELQDITLLGNQHNQYLYEYDPSILESFDNKHPGRDYFVKFNCPEFTSLCPITGQPDFATIYISYIPNIKMVESKSLKLYLFSFRNHGDFHEDCINIIMNDLIELMDPHYIEVWGKFTPRGGISIDPYTNYGRPDSKYEEIANYRLMNHDLYPETITNR

SEQ ID NO: 47074 - protein, 164 aa, Macrococcus brunensis
  misc_feature (1)..(164): tr|A0A4R6BGQ9|A0A4R6BGQ9_9STAP NADPH-dependent 7-cyano- 7-deazaguanine reductase OS=Macrococcus brunensis OX=19 8483 GN=queF PE=3 SV=1
MTRSKDELQDITLLGNQNNQYLYEYDPSILESFDNKHQGRDYFVKFNCPEFTSLCPITGQPDFATIYISYIPNIKMVESKSLKLYLFSFRNHGDFHEDCMNIIMNDLIELMDPHYIEIWGKFTPRGGISIDPYTNYGRPGTKYEEIANYRLMNHDLYPETITNR

SEQ ID NO: 47075 - protein, 165 aa, Macrococcus canis
  misc_feature (1)..(165): tr|A0A1W7A9N0|A0A1W7A9N0_9STAP NADPH-dependent 7-cyano- 7-deazaguanine reductase OS=Macrococcus canis OX=185582 3 GN=queF PE=3 SV=1
MSGRQKEELQDITLLGNQNNKYLYEYDPSILESFDNKHQGRDYFVKFNCPEFTSLCPITGQPDFAAIYISYIPNIKMVESKSLKLYLFSFRNHGDFHEDCMNIIMNDLIELMDPHYIEVWGKFTPRGGISIDPYTNYGRPGTKYEEMASYRLMNHDLYPETITNR

SEQ ID NO: 47076 - protein, 166 aa, Macrococcus canis
  misc_feature (1)..(166): tr|A0A4R6C6H1|A0A4R6C6H1_9STAP NADPH-dependent 7-cyano- 7-deazaguanine reductase OS=Macrococcus canis OX=185582 3 GN=queF PE=3 SV=1
MMSGRQKEELQDITLLGNQNNKYLYEYDPSILESFDNKHQGRDYFVKFNCPEFTSLCPITGQPDFAAIYISYIPNIKMVESKSLKLYLFSFRNHGDFHEDCMNIIMNDLIELMDPHYIEVWGKFTPRGGISIDPYTNYGRPGTKYEEMASYRLMNHDLYPETITNR

SEQ ID NO: 47077 - protein, 164 aa, Macrococcus carouselicus
  misc_feature (1)..(164): tr|A0A4V3BED5|A0A4V3BED5_9STAP NADPH-dependent 7-cyano- 7-deazaguanine reductase OS=Macrococcus carouselicus OX =69969 GN=queF PE=3 SV=1
MSRNKEELQDITLLGNQNNQYLYEYDPSILESFDNKHPGRDYFVKFNCPEFTSLCPITGQPDFAAIYISYIPNIKMVESKSLKLYLFSFRNHGDFHEDCINIIMNDLIELMDPHYIEVWGKFTPRGGISIDPYTNYGRPDSKYEEIANYRLMNHDLYPETITNR

SEQ ID NO: 47078 - protein, 166 aa, Macrococcus caseolyticus
  misc_feature (1)..(166): tr|A0A5E8SKP2|A0A5E8SKP2_9STAP NADPH-dependent 7-cyano- 7-deazaguanine reductase OS=Macrococcus caseolyticus su bsp. hominis OX=1891096 GN=queF PE=3 SV=1
MMSGRQKEELQDITLLGNQNNKYLYEYDKTILESFDNKHQGRDYFVKFNCPEFTSLCPITGQPDFAAIYISYIPNIKMVESKSLKLYLFSFRNHGDFHEDCMNIIMNDLIELMDPHYIEVWGKFTPRGGISIDPYTNYGRPGTKYEEMASYRLMNHDLYPETITNR

SEQ ID NO: 47079 - protein, 165 aa, Macrococcus caseolyticus
  misc_feature (1)..(165): sp|B9EAC6|QUEF_MACCJ NADPH-dependent 7-cyano-7-deazagua nine reductase OS=Macrococcus caseolyticus (strain JCSC 5402) OX=458233 GN=queF PE=3 SV=1
MSGRQKEELQDITLLGNQNNKYLYEYDKTILESFDNKHQGRDYFVKFNCPEFTSLCPITGQPDFAAIYISYIPNIKMVESKSLKLYLFSFRNHGDFHEDCMNIIMNDLIELMDPHYIEVWGKFTPRGGISIDPYTNYGRPGTKYEEMASYRLMNHDLYPETITNR

SEQ ID NO: 47080 - protein, 165 aa, Macrococcus epidermidis; identical to SEQ ID NO: 47072
  misc_feature (1)..(165): tr|A0A327ZV73|A0A327ZV73_9STAP NADPH-dependent 7-cyano- 7-deazaguanine reductase OS=Macrococcus epidermidis OX= 1902580 GN=queF PE=3 SV=1

SEQ ID NO: 47081 - protein, 165 aa, Macrococcus goetzii
  misc_feature (1)..(165): tr|A0A395G9R5|A0A395G9R5_9STAP NADPH-dependent 7-cyano- 7-deazaguanine reductase OS=Macrococcus goetzii OX=1891 097 GN=queF PE=3 SV=1
MTGRQKEELQDITLLGNQNNKYLYEYDPSILESFDNKHQGRDYFVKFNCPEFTSLCPITGQPDFAAIYISYIPNIKMVESKSLKLYLFSFRNHGDFHEDCMNIIMNDLIELMDPHYIEVWGKFTPRGGISIDPYTNYGRPGTKYEEIANYRLMNHDLYPETITNR

SEQ ID NO: 47082 - protein, 164 aa, Macrococcus hajekii
  misc_feature (1)..(164): tr|A0A4R6BJ25|A0A4R6BJ25_9STAP NADPH-dependent 7-cyano- 7-deazaguanine reductase OS=Macrococcus hajekii OX=1984 82 GN=queF PE=3 SV=1
MSRSNDELQDITLLGNQNNKYLYEYDPSVLESFDNKHPGRDYFVKFNCPEFTSLCPITGQPDFATIYISYIPHIKMVESKSLKLYLFSFRNHGDFHEDCMNIIMNDLIDLMDPHYIEVWGKFTPRGGISIDPYTNYGRPDSKYAEMAHYRLMNHDLYPETITNR

SEQ ID NO: 47083 - protein, 165 aa, Macrococcus lamae
  misc_feature (1)..(165): tr|A0A4V3BF47|A0A4V3BF47_9STAP NADPH-dependent 7-cyano- 7-deazaguanine reductase OS=Macrococcus lamae OX=198484 GN=queF PE=3 SV=1
MTGRTNEELQDITLLGNQNNVYEYSYNPDVLESFDNKHQGRDYFVKFNCPEFTSLCPITGQPDFATIYISYIPNIKMVESKSLKLYLFSFRNHGDFHEDCMNIIMNDLISLMDPHYIEVWGKFTPRGGISIDPYTNYGRPDTKYEEIASYRLMNHDLYPETITNR

SEQ ID NO: 47084 - protein, 166 aa, Macrococcus sp.
  misc_feature (1)..(166): tr|A0A4Q1B1K1|A0A4Q1B1K1_9STAP NADPH-dependent 7-cyano- 7-deazaguanine reductase OS=Macrococcus sp. DPC7161 OX= 2507060 GN=queF PE=3 SV=1
MMAGRQKDELQDITLLGNQNNKYLYEYDPSILESFDNKHQGRDYFVKFNCPEFTSLCPITGQPDFAAIYISYIPNIKMVESKSLKLYLFSFRNHGDFHEDCMNIIMNDLIELMDPHYIEVWGKFTPRGGISIDPYTNYGRPGTKYEEMAQYRLMNHDLYPENINNR

SEQ ID NO: 47085 - protein, 128 aa, Magnetococcus marinus
  misc_feature (1)..(128): sp|A0LD64|QUEF_MAGMM NADPH-dependent 7-cyano-7-deazagua nine reductase OS=Magnetococcus marinus (strain ATCC BA A-1437 / JCM 17883 / MC-1) OX=156889 GN=queF PE=3 SV=1
MSSPEKVEPQRAILESFANPNPQRDYEIDMHCPEFTCLCPKTGQPDFADFRITYVADEKCIELKSLKIYMWSFRDRGAFHEAVTNQIMDDLIAVCDPRYMQVQGAFYVRGGITTTITVEHHKERSTEA

SEQ ID NO: 47086 - protein, 122 aa, Magnetococcus massalia
  misc_feature (1)..(122): tr|A0A1S7LM67|A0A1S7LM67_MAGMO NADPH-dependent 7-cyano- 7-deazaguanine reductase OS=Magnetococcus massalia (str ain MO-1) OX=451514 GN=queF PE=3 SV=1
MAGPETMPQRDILETFPNPNPERDYEIKMDCPEFTCLCPKTGQPDFAEFVISYTPDVNCVELKSLKIYLWSFRDRGAFHEAVTNQIINDLVAACDPRYMKVEGAFKVRGGITTTVTIEHHKA

SEQ ID NO: 47087 - protein, 176 aa, Magnetofaba australis
  misc_feature (1)..(176): tr|A0A1Y2K844|A0A1Y2K844_9PROT NADPH-dependent 7-cyano- 7-deazaguanine reductase OS=Magnetofaba australis IT-1 OX=1434232 GN=queF PE=3 SV=1
MSISLPNSFYDFLRNLAGQTPNRPTAFDKRPLRKVKRVADTPPFPPVKERVVAMTSPASVENQAALLETFPNPNPERDYEIDMQCPEFTCVCPKTGQPDFADIRIIYTPDQTCVELKSLKLYLWSYRDRGAFHEKVTNQILNDLVAATSPRQMTVEGAFKVRGGITTTVTVRYPDK

SEQ ID NO: 47088 - protein, 153 aa, Magnetospirillum caucaseum
  misc_feature (1)..(153): tr|M2YEY5|M2YEY5_9PROT NADPH-dependent 7-cyano-7-deazag uanine reductase OS=Magnetospirillum caucaseum OX=12448 69 GN=queF PE=3 SV=1
MGTGTEHLTQLGQAAALPDSPDAAVLETVPNPHPGTLYLVRFTAPEFTSLCPITGQPDFAQLVIDYAPECALVESKSLKLFLGSFRNHGAFHEDCTIAIAKRLVAACQPKWLRIGGYWYPRGGIPIDVFWQTGAAPDGLWLPDQGVAGYRGRG

SEQ ID NO: 47089 - protein, 152 aa, Magnetospirillum gryphiswaldense
  misc_feature (1)..(152): tr|V6F437|V6F437_MAGGM NADPH-dependent 7-cyano-7-deazag uanine reductase OS=Magnetospirillum gryphiswaldense (s train DSM 6361 / JCM 21280 / NBRC 15271 / MSR-1) OX=431 944 GN=queF PE=3 SV=1
MADYPHLTQLGQSAALPDDPEAARLEVVPNPHPGDTYLVRFTAPEFTSLCPITGQPDFAHLVIDYVPENHLVESKSLKLFLGSFRNHGAFHEACTVMIGKRVVDATKPKWLRIGGYWYPRGGIPIDVFWQTGAPPAGLWLPDQGVPPYRGRG

SEQ ID NO: 47090 - protein, 152 aa, Magnetospirillum gryphiswaldense; identical to SEQ ID NO: 47089
  misc_feature (1)..(152): tr|A4U5K8|A4U5K8_9PROT NADPH-dependent 7-cyano-7-deazag uanine reductase OS=Magnetospirillum gryphiswaldense OX =55518 GN=queF PE=3 SV=1

SEQ ID NO: 47091 - protein, 150 aa, Magnetospirillum kuznetsovii
  misc_feature (1)..(150): tr|A0A364P208|A0A364P208_9PROT NADPH-dependent 7-cyano- 7-deazaguanine reductase OS=Magnetospirillum kuznetsovi i OX=2053833 GN=queF PE=3 SV=1
MTGPLTQLGQNTALPASPDQAVLETVPNPHPGTLYLVRFAAPEFTSLCPITGQPDFAHLVIDYAPDAALVESKSLKLFLGSFRNHGAFHEDCTLAIAKRLVAASAPKWLRIGGYWYPRGGIPIDVFWQTGTPPEGLWLPDQGVPSYRGRG

SEQ ID NO: 47092 - protein, 153 aa, Magnetospirillum magneticum
  misc_feature (1)..(153): sp|Q2W992|QUEF_MAGSA NADPH-dependent 7-cyano-7-deazagua nine reductase OS=Magnetospirillum magneticum (strain A MB-1 / ATCC 700264) OX=342108 GN=queF PE=3 SV=1
MGTGTEHLTQLGQSTALPASPDKAVLETVPNPHPGTLYLVRFTAPEFTSLCPITGQPDFAQLVIDYAPEGSLVESKSLKLFLGSFRNHGAFHEDCTIAIAKRLVAACAPKWLRIGGYWYPRGGIPIDVFWQTGPAPEGLWLPDQGVAGYRGRG

SEQ ID NO: 47093 - protein, 151 aa, Magnetospirillum magnetotacticum
  misc_feature (1)..(151): tr|A0A0C2YWX5|A0A0C2YWX5_MAGMG NADPH-dependent 7-cyano- 7-deazaguanine reductase OS=Magnetospirillum magnetotac ticum MS-1 OX=272627 GN=queF PE=3 SV=1
MADLSLTQLGQSTALPDNPDKAVLETVPNPHPGTLYLVRFTAPEFTSLCPITGQPDFAQLVIDYAPEGALVESKSLKLFLGSFRNHGAFHEDCTIAIAKRLVAACAPKWLRIGGYWYPRGGIPIDVFWQTGPSPEGLWLPDQGVAGYRGRG

SEQ ID NO: 47094 - protein, 160 aa, Magnetospirillum marisnigri
  misc_feature (1)..(160): tr|A0A178MEV9|A0A178MEV9_9PROT NADPH-dependent 7-cyano- 7-deazaguanine reductase OS=Magnetospirillum marisnigri OX=1285242 GN=queF PE=3 SV=1
MAAPVDGRFDVSDGLTQLGRQTPLPDSPEAAVLEVVANPHPGTTYLVRFAAPEFTSLCPITGQPDFAHLVIDYVPAASLVESKSLKLFLGSFRNHGAFHEDCTVGIGKRLVEACKPVWLRIGGYWYPRGGIPIDVFWQTGTPPEGLWLPDQGVPGYRGRG

SEQ ID NO: 47095 - protein, 152 aa, Magnetospirillum moscoviense
  misc_feature (1)..(152): tr|A0A178MMR5|A0A178MMR5_9PROT NADPH-dependent 7-cyano- 7-deazaguanine reductase OS=Magnetospirillum moscoviens e OX=1437059 GN=queF PE=3 SV=1
MTQPTHLTQLGQSVTAAADPDQAVIEVVDNPHPGTTYLVRFAAPEFTSLCPITGQPDFAHLVIDYVPDASLVESKSLKLFLASFRNHGAFHEACTIGIAKRLVEACRPHWLRIGGYWYPRGGIPIDVFWQTGTPPEGLWLPDQGVAPYRGRG

SEQ ID NO: 47096 - protein, 151 aa, Magnetospirillum sp.
  misc_feature (1)..(151): tr|A0A0U5ML41|A0A0U5ML41_9PROT NADPH-dependent 7-cyano- 7-deazaguanine reductase OS=Magnetospirillum sp. XM-1 O X=1663591 GN=queF PE=3 SV=1
MSDLNLTQLGQAAALPESPDKAVLETVPNPHPDTLYLVRFTAPEFTSLCPITGQPDFAQLVIDYAPEGALVESKSLKLFLGSFRNHGAFHEDCTIAIAKRLVAACQPKWLRIGGYWYPRGGIPIDVFWQTGPAPEGLWLPDQGVAGYRGRG

SEQ ID NO: 47097 - protein, 152 aa, Magnetospirillum sp.
  misc_feature (1)..(152): tr|A0A522X4K9|A0A522X4K9_9PROT NADPH-dependent 7-cyano- 7-deazaguanine reductase OS=Magnetospirillum sp. OX=318 72 GN=queF PE=3 SV=1
MTGPGPLTQLGQAAPLPSDPGTAVLETVVNPHPGSLYLVRFTAPEFTSLCPITGQPDFAHLVIDYAPEAALVESKSLKLFLGSFRNHGAFHEDCTLAIAKRLVTAAAPKWLRIAGYWYPRGGIPIDVFWQTAAAPEGLWLPDPGVPPYRGRG

SEQ ID NO: 47098 - protein, 157 aa, Magnetovibrio blakemorei
  misc_feature (1)..(157): tr|A0A1E5QBZ3|A0A1E5QBZ3_9PROT NADPH-dependent 7-cyano- 7-deazaguanine reductase OS=Magnetovibrio blakemorei OX =28181 GN=queF PE=3 SV=1
MTNENLGHPSQLGQLGHQVEAPTSPDEAMLETVPNPQAGTDYVARFSAPEFTSVCPVTGQPDFAHLVIDYIPADKLVESKSFKLYLGSFRNHGAFHEDCTIAIAKKFIEAAKPKWLRIGGYWYPRGGIPIDVFYQTGTPPEGVWIPDQGVQGYRGRG

SEQ ID NO: 47099 - protein, 154 aa, Magnetovibrio sp.
  misc_feature (1)..(154): tr|A0A2D8Z0J7|A0A2D8Z0J7_9PROT NADPH-dependent 7-cyano- 7-deazaguanine reductase OS=Magnetovibrio sp. OX=202483 6 GN=queF PE=3 SV=1
MAKTTEKTLTQLGAASAIPDSPETAILECAANPHPKTPYLIRFTCPEFTSLCPVTGQPDFAHLVIDYVPGRKIVESKSLKLYLASFRNHAGFHEKCTLDIAAKIKKAAAPKWLRIGGYWYPRGGIPIDVFHQTGEPPKGLWIPDQGVASYKGRG

SEQ ID NO: 47100 - protein, 154 aa, Magnetovibrio sp.
  misc_feature (1)..(154): tr|A0A2E3P6F5|A0A2E3P6F5_9PROT NADPH-dependent 7-cyano- 7-deazaguanine reductase OS=Magnetovibrio sp. OX=202483 6 GN=queF PE=3 SV=1
MAKTTETTLTQLGAASAIPDSPETATLECAGNPHPKTPYLIRFTCPEFTSLCPVTGQPDFAHLVIDYVPGRKIVESKSLKLYLASFRNHAGFHEKCTLDIAAKIKKAAAPKWLRIGGYWYPRGGIPIDVFHQTGAPPKGLWIPDQGVAGYRGRG

SEQ ID NO: 47101 - protein, 289 aa, Malikia granosa
  misc_feature (1)..(289): tr|A0A2S9K7V8|A0A2S9K7V8_9BURK NADPH-dependent 7-cyano- 7-deazaguanine reductase OS=Malikia granosa OX=263067 G N=queF PE=3 SV=1
MSEPLHPSQHQPEQSQLGKTSSYADQYDPSLLFPLPRQPKRDEIGISGQPPFLGADLWTAYELSWLNPRGKPQVAIAHFTVPCESPNIIESKSFKLYLNSFNNSRFDDGQQVLDRLKADLSEAAWRGAERQGSVGVRLLAPAQFAQEQIHELDGLSLDRLDVECTQYQPDPELLRADHEQPPVTETLVSDLLKSNCLVTGQPDWASVRISYTGAPIDQERLLQYLVSFRNHNEFHEQCVERIFMDLWARCKPVKLSVYARYTRRGGLDINPWRSSQPQQPPANIRTARQ

SEQ ID NO: 47102 - protein, 289 aa, Malikia spinosa
  misc_feature (1)..(289): tr|A0A2S9KCL3|A0A2S9KCL3_9BURK NADPH-dependent 7-cyano- 7-deazaguanine reductase OS=Malikia spinosa OX=86180 GN =queF PE=3 SV=1
MTESQHPSQHQPEQSQLGKTSAYADQYDPSLLFPLPRQTKRDEIGISATPPFLGADLWTAYELSWLNPRGKPQVAIAQVTVPCESPNIIESKSFKLYLNSFNNSRFDDGQAVLDRLKADLSEAIWRGSERRGSIGVKLLTPAQFEQEKIRELDGLSLDRLDVECTHYQPAPELLRADATQPPVTETLVSDLLKSNCLVTGQPDWASVRISYTGAPIDQERLLQYLVSFRNHNEFHEQCVERIFMDLWTRCKPVKLSVYARYTRRGGLDINPWRSSQPQQPPANVRTARQ

SEQ ID NO: 47103 - protein, 276 aa, Malonomonas rubra
  misc_feature (1)..(276): tr|A0A1M6LT78|A0A1M6LT78_MALRU NADPH-dependent 7-cyano- 7-deazaguanine reductase OS=Malonomonas rubra DSM 5091 OX=1122189 GN=queF PE=3 SV=1
MIDYEAVLPLGKTTEYISEYDPKLLCPFPRQVKRDVIGVTGKLPFSGYDIWNAFELSWLNLKGKPIVAMGEFHIPCESPNLIESKSFKLYLNSFNQTKLQGFADAEKRMVTDLSAAAGAPVRVRLFGSDQFITEEIECLPGERIDNLDIEVDDYSLDPALLEGAADPQNIVEEELHSHLLKSNCLVTNQPDWGSVLIRYKGGKLDREALLRYIISFRQHNEFHEQCVERIFVDLMRYCQPESLTVYARYTRRGGLDINPFRSNYETRIANMRQARQ

SEQ ID NO: 47104 - protein, 154 aa, Mameliella alba
  misc_feature (1)..(154): tr|A0A0B3SGG6|A0A0B3SGG6_9RHOB NADPH-dependent 7-cyano- 7-deazaguanine reductase OS=Mameliella alba OX=561184 G N=queF PE=3 SV=1
MTDSIYRDLKQLGGATRIPASPEEAALERVANPQADATYTVRFTAPEFTSLCPMTGQPDFAHLVIDYVPGPWLVESKSLKLYLTSFRNHGAFHEDCTISIARRLVEFLEPQWLRIGGYWYPRGGIPIDVFWQTGPLPDGTWIPDQGVPPYRGRG

SEQ ID NO: 47105 - protein, 282 aa, Mangrovibacter phragmitis
  misc_feature (1)..(282): tr|A0A1B7KY56|A0A1B7KY56_9ENTR NADPH-dependent 7-cyano- 7-deazaguanine reductase OS=Mangrovibacter phragmitis O X=1691903 GN=queF PE=3 SV=1
MTVYDNHKALSGLTLGKTTDYRDRYDANLLQPVPRSLNRDPLGLHADSLPFHGCDIWTLYELSWLNSKGLPQVAVGHVELEARSVNLIESKSFKLYLNSFNQTHFESWDDVRQTLIRDLSQCAKGQVAVTLYSVGFLEGQPIAAFNGECIDNQDITIDDYQFDDTLLEGAASTGPVIEETLVSHLLKSNCLITHQPDWGSVQIAYQGKRIDREKLLRYLVSFRHHNEFHEQCVERIFNDIQRYCQPKALSVYARYTRRGGLDINPWRSNYAFTPATGRLPRQ

SEQ ID NO: 47106 - protein, 282 aa, Mangrovibacter plantisponsor
  misc_feature (1)..(282): tr|A0A317QAA1|A0A317QAA1_9ENTR NADPH-dependent 7-cyano- 7-deazaguanine reductase OS=Mangrovibacter plantisponso r OX=451513 GN=queF PE=3 SV=1
MTVYDNHKALSGLTLGKTTDYRDRYDANLLQPVPRSLNRDPLGLHADSLPFHGCDIWTLYELSWLNSKGLPQVAVGHVELEARSVNLIESKSFKLYLNSFNQTHFESWDDVRQTLIRDLSQCAKGQVAVTLYSVGDLEGQPIAAFNGECIDNQDITIDDYQFDDTLLEGAASTGPVIEETLISHLLKSNCLITHQPDWGSVQIAYQGRRIDREKLLRYLVSFRHHNEFHEQCVERIFNDIQRYCQPKALSVYARYTRRGGLDINPWRSNYAFTPATGRLPRQ

SEQ ID NO: 47107 - protein, 282 aa, Mangrovibacter sp.
  misc_feature (1)..(282): tr|A0A071MD40|A0A071MD40_9ENTR NADPH-dependent 7-cyano- 7-deazaguanine reductase OS=Mangrovibacter sp. MFB070 O X=1224318 GN=queF PE=3 SV=1
MTVYDNHKALSGLTLGKTTDYRDRYDANLLQPVPRSLNRDPLGLHADSLPFHGCDIWTLYELSWLNSKGLPQVAVGHVELEARSVNLIESKSFKLYLNSFNQTHFESWDDVRQTLIRDLSQCAKGQVAVTLYSVGDLEGQPIAAFNGECIDNQDITIDDYQFDDTLLEGAASAGPVIEETLISHLLKSNCLITHQPDWGSVQIAYQGRRIDREKLLRYLVSFRHHNEFHEQCVERIFNDIQRYCQPKALSVYARYTRRGGLDINPWRSNYAFTPATGRLPRQ

SEQ ID NO: 47108 - protein, 156 aa, Mangrovibacterium diazotrophicum
  misc_feature (1)..(156): tr|A0A419W8H5|A0A419W8H5_9BACT NADPH-dependent 7-cyano- 7-deazaguanine reductase OS=Mangrovibacterium diazotrop hicum OX=1261403 GN=queF PE=3 SV=1
MENLTHLGNDTNYGFNYSPAVLETFDNKHPQNDYWVKFNAPEFTSLCPITGQPDFATIYISYIPGEKMVESKSLKLYLFSFRNHGDFHEDCINIIMKDLIKLMDPKYIEVWGKFLPRGGISIDPYSNYGKAGTKFEELAWYRMQNHDLNPETITNR

SEQ ID NO: 47109 - protein, 156 aa, Mangrovibacterium marinum
  misc_feature (1)..(156): tr|A0A2T5BYI4|A0A2T5BYI4_9BACT NADPH-dependent 7-cyano- 7-deazaguanine reductase OS=Mangrovibacterium marinum O X=1639118 GN=queF PE=3 SV=1
MDNLTHLGSETNYGFNYSPELLETFDNKHPQNDYWVKFNAPEFTSLCPITGQPDFATIYISYIPGEKMVESKSLKLYLFSFRNHGDFHEDCINIIMKDLIQLMDPKYIEVWGKFLPRGGISIDPYANYGKVGTKYEELAWYRMQNHDLNPETITNR

SEQ ID NO: 47110 - protein, 279 aa, Mannheimia granulomatis
  misc_feature (1)..(279): tr|A0A011P947|A0A011P947_9PAST NADPH-dependent 7-cyano- 7-deazaguanine reductase OS=Mannheimia granulomatis OX= 85402 GN=queF PE=3 SV=1
MNYNDKSLSALKLGQKTEYKSEYDPTLLQAVPRKLNRDGLGITETQPFKQGADIWTCYELSWLNPNGLPQVAIADVAIDFQSENLIESKSFKLYLNSFNQSKFDSIEAVEKTIQSDLAHCASGQVSVKIYKLGHYTQQPIVDFQGECIDEQDIQIDSYAFSTDYLENVASGEAVEETLVSHLLKSNCLITSQPDWGSVQICYQGKKLDREKLLRYLVSFREHNEFHEQCVERIFCDLMQFAKPEKLTVYARYTRRGGLDINPFRSNFESVPENLRMARQ

SEQ ID NO: 47111 - protein, 279 aa, Mannheimia haemolytica
  misc_feature (1)..(279): tr|A0A249A0T9|A0A249A0T9_MANHA NADPH-dependent 7-cyano- 7-deazaguanine reductase OS=Mannheimia haemolytica OX=7 5985 GN=queF PE=3 SV=1
MNYNDKSLSALKLGQKTEYKSEYDASLLQPVPRKLNRDSLGITQEQPFNRGADVWTCYELSWLNQNGLPQVAIADVAIDFKSENLIESKSFKLYLNSFNQTKFSSIEEVGKTIQADLARCASGQVSVKIYQLSHYTQQPIVDFAGDCIDEQDIQIDSYAFSTHYLENIAEDELVEETLVSHLLKSNCLITSQPDWGSVQIRYKGKKLNREKLLRYLVSFREHNEFHEQCVERIFCDLMQFAEPEKLTVYARYTRRGGLDINPFRSNFEEVPENLRMARQ

SEQ ID NO: 47112 - protein, 279 aa, Mannheimia haemolytica
  misc_feature (1)..(279): tr|A0A3S4XYJ5|A0A3S4XYJ5_MANHA NADPH-dependent 7-cyano- 7-deazaguanine reductase OS=Mannheimia haemolytica OX=7 5985 GN=queF PE=3 SV=1
MNYNDKSLSALKLGQKTEYKSEYDASLLQPVPRKLNRDGLGITQHQPFNRGADVWTCYELSWLNLNGLPQVAIADVAIDFKSENLIESKSFKLYLNSFNQTRFRSIEDVEKTIQADLACCASGQVSVKIYQLSHYTQQPIVDFAGDCIDEQDIQIDSYAFSTHYLENIAEDDLVEETLVSHLLKSNCLITSQPDWGSVQIRYKGKKLNREKLLRYLVSFREHNEFHEQCVERIFCDLMQFAQPEKLTVYARYTRRGGLDINPFRSNFEEVPANLRMARQ

SEQ ID NO: 47113 - protein, 279 aa, Mannheimia sp.
  misc_feature (1)..(279): tr|W0Q6Z5|W0Q6Z5_9PAST NADPH-dependent 7-cyano-7-deazag uanine reductase OS=Mannheimia sp. USDA-ARS-USMARC-1261 OX=1432056 GN=queF PE=3 SV=1
MNYNDKSLDALKLGQKTEYKSEYDASLLQPVPRKLNRDGLAITQSQPFTQGADVWTCYELSWLNKNGLPQVAIADVAIDFKSENLIESKSFKLYLNSFNQTKFSSIEEVEQTIQRDLENCASGQVSVKIYKLSHYTKQPIVDFEGECIDEQDIQIDSYAFSTHYLENITEDDVVEETLVSHLLKSNCLITSQPDWGSVQIHYKGKKLNREKLLRYLVSFREHNEFHEQCVERIFCDLMQFAQPEKLTVYARYTRRGGLDINPFRSNFEEVPENLRMARQ

SEQ ID NO: 47114 - protein, 281 aa, Mannheimia succiniciproducens
  misc_feature (1)..(281): sp|Q65TN4|QUEF_MANSM NADPH-dependent 7-cyano-7-deazagua nine reductase OS=Mannheimia succiniciproducens (strain MBEL55E) OX=221988 GN=queF PE=3 SV=1
MDYKDNSLKTLKLGQKTDYIANYDRTLLQPVPRALNRDGLGITKQQPFSVGADIWTAYEISWLNIKGLPQVAIADVEIDYRSTNLIESKSFKLYLNSFNQTKFSDMSEVQRTISEDLSICAEGNVRVQLHSLSNYSHERIADFAGECLDELDIEISDYGFNAEILQNCTALSTEIVEETLVSHLLKSNCLITSQPDWGSVQIHYQGKRIDHEKLLRYLVSFRQHNEFHEQCVERIYCDIMKYARPEKLTVYARYTRRGGLDINPFRSNFEAIPQNLRLARQ

SEQ ID NO: 47115 - protein, 279 aa, Mannheimia varigena
  misc_feature (1)..(279): tr|W0QF70|W0QF70_9PAST NADPH-dependent 7-cyano-7-deazag uanine reductase OS=Mannheimia varigena USDA-ARS-USMARC -1296 OX=1433287 GN=queF PE=3 SV=1
MNYNDKSLDALKLGQKTEYKSEYDASLLQPVPRKLNRDGLGITQSQPFTQGADVWTCYELSWLNKNGLPQVAIADVAIDFKSENLIESKSFKLYLNSFNQTKFSSIEEVEQTIQRDLANCASGQVSVKIYKLSHYTKQPIVDFEGECIDEQDIQIDSYAFSTHYLENITEDDVVEETLVSHLLKSNCLITSQPDWGSVQIHYKGKKLNREKLLRYLVSFREHNEFHEQCVERIFCDLMQFAQPEKLTVYARYTRRGGLDINPFRSNFEEVPENLRMARQ

SEQ ID NO: 47116 - protein, 153 aa, Maricaulis maris
  misc_feature (1)..(153): tr|A0A495DCK1|A0A495DCK1_9RHOB NADPH-dependent 7-cyano- 7-deazaguanine reductase OS=Maricaulis maris OX=74318 G N=queF PE=3 SV=1
MTDDRYDQLGQLGTTTALPDNPETAQLERVANPCDAPYMTRFVCPEFTSLCPVTGAPDFAHLVIDYVPREWIVESKSLKLYLGSFRNHGAFHEACTTGIGQRLVKELDPVWLRIGGYWYPRGGIPIDVFYATGEPPAGVWIPDQDVPGYRGRG

SEQ ID NO: 47117 - protein, 153 aa, Maricaulis maris
  misc_feature (1)..(153): sp|Q0AQT4|QUEF_MARMM NADPH-dependent 7-cyano-7-deazagua nine reductase OS=Maricaulis maris (strain MCS10) OX=39 4221 GN=queF PE=3 SV=1
MTDNRYDNLGQLGTSTPLPDNPDTAALERVANPCDAPYMTRFVCPEFTSLCPVTGAPDFAHLVIDYVPRDWIVESKSLKLYLGSFRNHGAFHEACTTGIGQRLVKELDPVWLRIGGYWYPRGGIPIDVFFATGEPPKGVWIPDQDVPGYRGRG

SEQ ID NO: 47118 - protein, 153 aa, Maricaulis salignorans
  misc_feature (1)..(153): tr|A0A1G9TX33|A0A1G9TX33_9RHOB NADPH-dependent 7-cyano- 7-deazaguanine reductase OS=Maricaulis salignorans OX=1 44026 GN=queF PE=3 SV=1
MTDNRYQDLGQLGATTPLPDHPDTAALERVANPCDAPYMIRFAVPEFTSLCPVTGAPDFAHLVIDYVPRDWIVESKSLKLFLGSFRNHGAFHEACTTQIAQRLVKELDPVWLRIGGYWYPRGGIPIDVFFATGEAPAGVWIPEQGVASYRGRG

SEQ ID NO: 47119 - protein, 153 aa, Maricaulis sp.
  misc_feature (1)..(153): tr|A0A2D8BSP7|A0A2D8BSP7_9RHOB NADPH-dependent 7-cyano- 7-deazaguanine reductase OS=Maricaulis sp. OX=1486257 G N=queF PE=3 SV=1
MTDTRYETLSQLGGDTQMPASPDQAVLERVANPCDAPYLIRFTCPEFTSLCPVTGQPDFAHLVIDYVPRDWIVESKSLKLFLTSFRNHGAFHEACTTSIAQRLVSELDPAWLRIGGYWYPRGGIPIDVFYQTGPPPEGVWIPDQGVPPYRGRG

SEQ ID NO: 47120 - protein, 153 aa, Maricaulis sp.
  misc_feature (1)..(153): tr|A0A1Q8FYY8|A0A1Q8FYY8_9RHOB NADPH-dependent 7-cyano- 7-deazaguanine reductase OS=Maricaulis sp. W15 OX=17723 33 GN=queF PE=3 SV=1
MTDDRYDNLGQLGTTTVLPDNPDTAQLERVANPCDAPYMTRFVCPEFTSLCPVTGAPDFAHLVIDYVPREWIVESKSLKLYLGSFRNHGAFHEACTTGIGQRLVKELDPVWLRIGGYWYPRGGIPIDVFYATGEPPAGVWIPDQDVPGYRGRG

SEQ ID NO: 47121 - protein, 129 aa, Marichromatium gracile
  misc_feature (1)..(129): tr|A0A4R4A5C4|A0A4R4A5C4_MARGR NADPH-dependent 7-cyano- 7-deazaguanine reductase OS=Marichromatium gracile OX=1 048 GN=queF PE=3 SV=1
MPSAPSRSLETFPNPQPERDYTIRIRVPEFTCLCPKTGQPDFAELTLEYIPEARCVELKALKNYVWSYRDEGAFHEAVTNRILGDLVAATEPRFMRLTADFNVRGGIYTTVVAEHRAADWQPQPQVQLP

SEQ ID NO: 47122 - protein, 129 aa, Marichromatium purpuratum
  misc_feature (1)..(129): tr|W0E5L4|W0E5L4_MARPU NADPH-dependent 7-cyano-7-deazag uanine reductase OS=Marichromatium purpuratum 984 OX=76 5910 GN=queF PE=3 SV=1
MPSAPSRSLETFPNPQPERDYTIRIRVPEFTCLCPKTGQPDFAELTLEYIPEARCVELKALKNYVWSYRDEGAFHEAVTNRILGDLVAATEPRFMRLTADFNVRGGIYTKVVVEHRAADWQPQPQVQLP

SEQ ID NO: 47123 - protein, 126 aa, Unknown
  misc_feature (1)..(126): tr|A0A0C1R8P5|A0A0C1R8P5_9ACTN Uncharacterized protein OS=marine actinobacterium MedAcidi-G2B OX=1550401 GN=MB 54_03315 PE=4 SV=1
MEKANQEPVLGRPDSTPTTQIDTFSTEGPVESVHFRSSELTAVCPVTNQPDFYTIDISYSPESICIETKSLKLFLRTFEGVGIFAEHLAPRIANHLGEAVLVPVKVTLEQQIRGGIITTVTSVSNN

SEQ ID NO: 47124 - protein, 117 aa, Unknown
  misc_feature (1)..(117): tr|A0A0C1RPQ0|A0A0C1RPQ0_9ACTN NADPH-dependent 7-cyano- 7-deazaguanine reductase OS=marine actinobacterium MedA cidi-G3 OX=1550402 GN=queF PE=3 SV=1
MPSEPSKELIVLDNPKPNRDYEIRCETPELTCLCPVTGQPDFATVVITYIPNELIVELKSLKMYLWSFRDQGVHHEGITNGILDDLVSAISPRSMTVVTDWLVRGGIATTVTATHES

SEQ ID NO: 47125 - protein, 145 aa, Unknown
  misc_feature (1)..(145): tr|A0A1Q3GI67|A0A1Q3GI67_9BACT NADPH-dependent 7-cyano- 7-deazaguanine reductase OS=marine bacterium AO1-C OX=1 905359 GN=BKI52_38450 PE=3 SV=1
MAEQKIYKDIEAGILKAIPNPDKRAYEIKIKIPEFTFLGVHKQPDFATVFLTFYPKNKIIELKSLKEYVFQLRNIIVSYERLINVFYDHLIDTYEPERLRILMVCNPRGGISSKLTIDSDWEARGGNEKYQDWQQKITDEWEVVM

SEQ ID NO: 47126 - protein, 267 aa, Unknown
  misc_feature (1)..(267): tr|A0Z1W1|A0Z1W1_9GAMM QueF_N domain-containing protein OS=marine gamma proteobacterium HTCC2080 OX=247639 GN= MGP2080_11058 PE=4 SV=1
MAVHALGQKVAAPKRYAPDILEAISRREGREALGPAPKSMVGHDCWHLYELSWLNLRNEPQHCVGVLLVDSASPATIESKSLKLYLNSLNFHCFASEAQACEVICGDIGRVTQSDVSLTVLPPDGLGAITREPEGVLLEADPQQSDHTSMQSPWCDSGDDILDATYVSHRLRSLCPVTAQPDWGTLVIDYRGRPINHHRLLGFIESFREHQEFHEQCVERCFYEVMKQTNAESLRVSAFYQRRGGIDITPVRSNHRVVPELWRMGRQ

SEQ ID NO: 47127 - protein, 272 aa, Unknown
  misc_feature (1)..(272): tr|A0YAY3|A0YAY3_9GAMM NADPH-dependent 7-cyano-7-deazag uanine reductase OS=marine gamma proteobacterium HTCC21 43 OX=247633 GN=queF PE=3 SV=1
MSDIPLGKDVTYPDQYTTDVLFPISRQPSRDSLGINPMALPFQGEDVWNAYELSWLNDKGMPQVACARFYVPCESASIVESKSFKLYLNSFNQTRISSWEAVSKMLAVDLSACIGSPVKVDLYTIDDGTSRIGFSTLSGFCLDTLDITLDRYDPDPSQLGTLHGLVVDESLNSNLLRSLCPVTAQPDWGSVQIVYTGAQIDRVGLLKYLIGYRQHQEFHEQCVERIFRDITDYCAPDELYVQAFYTRRGGLDINPYRSSGESVSKFDRLFRQ

SEQ ID NO: 47128 - protein, 153 aa, Marinibacterium profundimaris
  misc_feature (1)..(153): tr|A0A225NFB8|A0A225NFB8_9RHOB NADPH-dependent 7-cyano- 7-deazaguanine reductase OS=Marinibacterium profundimar is OX=1679460 GN=queF PE=3 SV=1
MENIYGDLRQLGSDTRLPESPEAAELERVPNPQSDVAYCVRFTAPEFTSLCPMTGQPDFAHLVIDYVPGGWLVESKSLKLYLGSFRNHGAFHEDCTISIARRLVDFLDPQWLRIGGYWYPRGGIPIDVFWQTGQTPSDVWIPDQGVPPYRGRG

SEQ ID NO: 47129 - protein, 119 aa, Mariniblastus fucicola
  misc_feature (1)..(119): tr|A0A5B9PJY1|A0A5B9PJY1_9PLAN NADPH-dependent 7-cyano- 7-deazaguanine reductase OS=Mariniblastus fucicola OX=9 80251 GN=queF PE=3 SV=1
MSKNFHEMLDPIENPAPGRDYTIEIVCPEFTSVCPKTGQPDFGELTFEYVPDALIVELKSLKMYLQQFRNEGIFYENVTNSIFDDFVNVVQPKTAKLTARFTPRGGIRSIITAEYSKEA

SEQ ID NO: 47130 - protein, 154 aa, Marinicauda algicola
  misc_feature (1)..(154): tr|A0A4S2GYK1|A0A4S2GYK1_9RHOB NADPH-dependent 7-cyano- 7-deazaguanine reductase OS=Marinicauda algicola OX=202 9849 GN=queF PE=3 SV=1
MTQDRYSGLDQLGSKTETPASPDEAKLERVENPAREHDYLIRFTAPEFTSLCPVTGQPDFAHLVIDYAPGDWIVESKSLKLFLTSFRNHGAFHEACTMMIGQRLVDELAPKWLRIGGYWYPRGGIPIDVFGQWGEIPKGLWVPEQGVAPYRGRG

SEQ ID NO: 47131 - protein, 154 aa, Marinicauda pacifica
  misc_feature (1)..(154): tr|A0A4S2HDM7|A0A4S2HDM7_9RHOB NADPH-dependent 7-cyano- 7-deazaguanine reductase OS=Marinicauda pacifica OX=113 3559 GN=queF PE=3 SV=1
MTDDRYAGLDQLGSKTDAPTRPEDARLERVENPASETDYLVRFAAPEFTSLCPVTGQPDFAHLVIDYAPDQWIVESKSLKLFLQSFRNHGAFHEACTLMIGQRIVDECAPKWLRIGGYWYPRGGIPIDVFAQWGEAPQGLWVPDQGVAPYRGRG

SEQ ID NO: 47132 - protein, 154 aa, Marinicauda sp.
  misc_feature (1)..(154): tr|A0A2U2BU18|A0A2U2BU18_9RHOB NADPH-dependent 7-cyano- 7-deazaguanine reductase OS=Marinicauda sp. WD6-1 OX=21 35793 GN=queF PE=3 SV=1
MTDPRYETLGQLGRAAEAPDSPDAATLERVENPEREADYLVRFTCPEFTSLCPVTGQPDFAHLVIDYAPDKWIVESKSLKLFLTSFRNHGAFHEACTTMIGKRLVEAISPKWLRIGGYWYPRGGIPIDVFAQWGEAPAGLWIPDQGVQPYRGRG

SEQ ID NO: 47133 - protein, 194 aa, Marinicaulis flavus
  misc_feature (1)..(194): tr|A0A2S7K3N8|A0A2S7K3N8_9PROT NADPH-dependent 7-cyano- 7-deazaguanine reductase OS=Marinicaulis flavus OX=2058 213 GN=queF PE=3 SV=1
MPTRSRTKKAKSTARKKAAPKAAALSALRAIDSGKSGKSKVKTAGAAPLTQLGSAAAPAASPEEAMLETAPNPQAGETYVARFTAPEFTSLCPVTGQPDFAHLVIDYVPGKHIVESKSLKLFLTSFRNHGAFHEDCTVYIAKRIIDAAKPKWLRIAGYWYPRGGIPIDVFYQTGEPPKGVWLPDPGVAPYRGRG

SEQ ID NO: 47134 - protein, 117 aa, Marinicella litoralis
  misc_feature (1)..(117): tr|A0A4R6XQ68|A0A4R6XQ68_9GAMM NADPH-dependent 7-cyano- 7-deazaguanine reductase OS=Marinicella litoralis OX=64 4220 GN=queF PE=3 SV=1
MSTHPTKDLETFVNPNQERDYTIIIDIPEFTCLCPKTGQPDFATIKIEYQPDEKCVELKALKLYMWTFRERGAFHEAVTNEILDDLIAATDPKWMKITMKFNVRGGIYTDVVIEHKK

SEQ ID NO: 47135 - protein, 167 aa, Marinifilum sp.
  misc_feature (1)..(167): tr|A0A4T2AGP6|A0A4T2AGP6_9BACT NADPH-dependent 7-cyano- 7-deazaguanine reductase OS=Marinifilum sp. JC120 OX=23 02941 GN=queF PE=3 SV=1
MKTTKSQDKTEALVSLGQAGATKYNYDTPGPEILETFPNNFPGRPYIISIEFPEYTSLCPVTGQPDFATIIVEYIPDELCVESKSFKLYMGAYRNHQSFMETITNNILDHFVGRLSPLWMRVKGIFSPRGGTGLHVFAEHYNKESAQYEEVRETVREWKMESGRHSA

SEQ ID NO: 47136 - protein, 291 aa, Marinilabilia salmonicolor
  misc_feature (1)..(291): tr|A0A368UUL0|A0A368UUL0_9BACT 7-cyano-7-deazaguanine r eductase OS=Marinilabilia salmonicolor OX=989 GN=DFO77_ 11920 PE=4 SV=1
MNNEAKYLGKVSRYPKHYAPEVLVPVPRHLNREIYGLEDHNLPFTGFDVWHAYELSFLTQKGMPVAGLLKIIYPANSPNIVESKSLKLYLNGFNMERYGNNPAEGTAMVLRIIKTDLEKILETKAEVTFFSKEESLEADFTDYEILEEQPGIEETSFSKYQEAPELLKEAPYTQEKSMKVATHLLRSNCKVTFQPDWGSAFIHLKGENIPAKTALLQYLVSIRNENHFHEEICEMIYKRLWDKFSPEELMVSCIYTRRGGIDICPVRTSSPELMPDNLVNKNKLMSKLLRQ

SEQ ID NO: 47137 - protein, 291 aa, Marinilabilia salmonicolor
  misc_feature (1)..(291): tr|A0A2T0XPQ4|A0A2T0XPQ4_9BACT 7-cyano-7-deazaguanine r eductase OS=Marinilabilia salmonicolor OX=989 GN=BY457_ 104133 PE=4 SV=1
MSNEAKYLGKVSRYPKQYAPEVLVPVPRHLNREIYGLEDHNLPFTGFDVWHAYELSFLTQKGMPVAGLLKIIYPANSPNIVESKSLKLYLNGFNMERYGNNPAEGTAMVLRIIKTDLEKILETKAEVTFFSKEESLEADFTDYEILEEQPGIEETSFSKFQEAPELLKEAPYTQEKSMKVATHLLRSNCKVTFQPDWGSAFIHLKGENIPAKTALLQYLVSIRNENHFHEEICEMIYKRLWDKFSPEELMVSCIYTRRGGIDICPVRTSSPELMPDNLVNKNKLMSKLLRQ

SEQ ID NO: 47138 - protein, 290 aa, Marinilabilia sp.
  misc_feature (1)..(290): tr|A0A2U2BCN9|A0A2U2BCN9_9BACT NADPH-dependent 7-cyano- 7-deazaguanine reductase QueF OS=Marinilabilia sp. WTE OX=2162893 GN=DDZ16_04155 PE=4 SV=1
MNEDKYLGKVTSYPQKYSPEILIPVPRHLNRKDYNIKENNLPFTGYDTWHAYELSFLTEKGLPVVGLLKLVYPSDSTFLVESKSFKLYLNSFNMERYGKTPAEGLEIVLSTIRYDLNQTLKTNVTTHFFQGDESQSHFDFDDFEILENSEVAVSSDFKNYTETPELLAQSEDLKKTIKVATHLLRSNCKVTHQPDWGSAYIHLKGNQIPDKISLLKYIVSVRNENHFHEEICEMIYKRLMDIFSPQELMVTCIYTRRGGIDICPARASRTDLLPKFLISPGVLTKKLLRQ

SEQ ID NO: 47139 - protein, 146 aa, Marinilabilia sp.
  misc_feature (1)..(146): tr|A0A2U2B4Y3|A0A2U2B4Y3_9BACT 7-cyano-7-deazaguanine r eductase OS=Marinilabilia sp. WTE OX=2162893 GN=DDZ16_1 7380 PE=4 SV=1
MAEKVLTYKDIDKSILKSLPNPTGQAYEIKVKIPEFTFLGVKDQPDFADVYITFYPTDRIIELKSLKMYVQALRNITVSYERLINVFYDHLMEVYKPDRIRLVMLCNPRGGISSRLTIDSDWKVRGGDEKYSDWKNHMDDTWSVTL

SEQ ID NO: 47140 - protein, 296 aa, Marinilabiliaceae bacterium
  misc_feature (1)..(296): tr|A0A359FY45|A0A359FY45_9BACT NADPH-dependent 7-cyano- 7-deazaguanine reductase QueF OS=Marinilabiliaceae bact erium OX=2053574 GN=DEG09_07705 PE=4 SV=1
MKKSSEPIEAQVLGKQVAYPKGYSPELLVVVPRSANRKIYGLQDDSLPFVGYDVWHAYELGFLTDKGLPVSGVLKIIYPANSPGIVESKSLKLYLNGFNMSYYGANREDGIIKICEIIKDDLSELLKTKVELHFFDATAGETGFDFTYYELLEARLETENLNFADFKENQSLLKISDDKGGQIMVGTHLLRSKCRITGQPDWGSAYILLKGDQLPELSSLLKYIVSIRNENHFHEEICEMIYKRLWDTFSPIELMVSTIYTRRGGIDICPLRASKASLLPKLLTNVNQLSKKLIRQ

SEQ ID NO: 47141 - protein, 146 aa, Marinilabiliaceae bacterium
  misc_feature (1)..(146): tr|A0A353U1N5|A0A353U1N5_9BACT NADPH-dependent 7-cyano- 7-deazaguanine reductase OS=Marinilabiliaceae bacterium OX=2053574 GN=queF PE=3 SV=1
MENNIRTYKEIDASILKSLPNPTGEAYEIKIKIPEFTFLGVKEQPDFADVFITFYPKKRIIELKSLKQYVYALRNITVSYERLINVFYDHIMQVYEPERVRIVMVFNPRGGISSKLTIDSDWKVRGGDEKFSDWKNNIEDQWSVTL

SEQ ID NO: 47142 - protein, 289 aa, Marinilabiliales bacterium
  misc_feature (1)..(289): tr|A0A2J6HPC8|A0A2J6HPC8_9BACT NADPH-dependent 7-cyano- 7-deazaguanine reductase QueF OS=Marinilabiliales bacte rium OX=2053303 GN=C0593_12945 PE=4 SV=1
MEQELTHLGNQSGYPQEYAPDVLEAIPRSLNREQYHIDEETPGFLGFDIWHAWEVSFITQKGMPVSGVLKIIYPQSSPFIVESKSLKLYLNSFNMTRLGKNRKEGISLLLQTVQNDLDRVLESLPTVSFFDYSDEKENDFSSWEILEEKYDLNDINFEDYNENPALLESDKESSEFRIGSNLLRSNCRVTFQPDWGSVFIHFKGKEGPTPQSLIKYIVSFRNENHFHEEVCEMIYKRLWDAYNPEELLVACLYTRRGGIDISPVRTNKISLLPEVILNPRVLGRKLLRG

SEQ ID NO: 47143 - protein, 126 aa, Marinimicrobia bacterium
  misc_feature (1)..(126): tr|A0A117M9E5|A0A117M9E5_9BACT NADPH-dependent 7-cyano- 7-deazaguanine reductase OS=Marinimicrobia bacterium 46 _43 OX=1635280 GN=queF PE=3 SV=1
MAKAEGLSLPFEKPEKIRTDLLEPIPYRGNDQVITLEYPEFSAVCPYSGLPDIARVTIEYIPNDKIIELKSLKYYFISFRNVGIYQEDMTNRVYEDLKKVLGPKKMKVKTVYNIRGGIETTCTMGG

SEQ ID NO: 47144 - protein, 126 aa, Marinimicrobia bacterium; identical to SEQ ID NO: 47143
  misc_feature (1)..(126): tr|A0A101G521|A0A101G521_9BACT NADPH-dependent 7-cyano- 7-deazaguanine reductase OS=Marinimicrobia bacterium 46 _47 OX=1635279 GN=queF PE=3 SV=1

SEQ ID NO: 47145 - protein, 276 aa, Marinimicrobium koreense
  misc_feature (1)..(276): tr|A0A3N1NZ87|A0A3N1NZ87_9GAMM NADPH-dependent 7-cyano- 7-deazaguanine reductase OS=Marinimicrobium koreense OX =306545 GN=queF PE=3 SV=1
MSEHTSNSHGPLGQQTAYASSYDPGLLFPIARAETRASLGLSELALPFYGTDLWTGYEVSWLDERGKPIVAIAQFRLPCTSPNLIESKSFKLYLNSYNQSRFAGQEQVRAQMIQDLSAAAGADVSVQLEPVADAQLPIAEAGGECIDALPVTIEHYHPAPELLATGEELVEERLHSHLLKSNCPVTGQPDWATVEIHYRGSKIEREGLLKYVVSFREHQDFHEHCVERMFVDLQARCKPEFLTVFARYTRRGGLDINPWRSSAQGSAPDFERLVRQ

SEQ ID NO: 47146 - protein, 276 aa, Marinimicrobium sp.
  misc_feature (1)..(276): tr|A0A2D8WMC3|A0A2D8WMC3_9GAMM NADPH-dependent 7-cyano- 7-deazaguanine reductase OS=Marinimicrobium sp. OX=2024 837 GN=queF PE=3 SV=1
MSEHTSNSHGPLGQQTAYASSYDPGLLFPIARAETRASLGLSESALPFYGTDLWTGYEVSWLDERGKPIVAIAQFRLPCTSPNLIESKSFKLYLNSYNQSRFVGQEQVRAQMIQDLSAAAGADVSVQLEPVADAQLPIAEAGGECIDALPVTIEHYHPAPELLATGEELVEERLHSHLLKSNCPVTGQPDWATVEIHYRGSKIEREGLLKYVVSFREHQDFHEHCVERMFVDLQARCQPEFLTVFARYTRRGGLDINPWRSSAQGSAPDFERLVRQ

SEQ ID NO: 47147 - protein, 137 aa, Marininema halotolerans
  misc_feature (1)..(137): tr|A0A1I6SVH2|A0A1I6SVH2_9BACL NADPH-dependent 7-cyano- 7-deazaguanine reductase OS=Marininema halotolerans OX= 1155944 GN=queF PE=3 SV=1
MGKVNVDHSKYQNIRFDIQDESAIMTDILETIPYEYPGKEVEIEIPTNEFTSVCPWSGLPDFAEIMISFVPNHDLIEMKSLKYYLTSYRNVGIYQEHATRRILEEVVAAIKPKRMKVEALWNPRGGLGTRVVTEYTE

SEQ ID NO: 47148 - protein, 137 aa, Marininema mesophilum
  misc_feature (1)..(137): tr|A0A1H2QWW0|A0A1H2QWW0_9BACL NADPH-dependent 7-cyano- 7-deazaguanine reductase OS=Marininema mesophilum OX=10 48340 GN=queF PE=3 SV=1
MGKVEVDHSKYQNIRFDIQDESAIMTDILETIPYEYPGKDVEIEIPTNEFTSVCPWSGLPDFADITISFVPNQNLIEMKSLKYYLTSYRNVGIYQEHATRRILEEVVAAIKPKRMKVKALWNPRGGLGTKVVAEYTA

SEQ ID NO: 47149 - protein, 159 aa, Marinithermus hydrothermalis
  misc_feature (1)..(159): tr|F2NM61|F2NM61_MARHT NADPH-dependent 7-cyano-7-deazag uanine reductase OS=Marinithermus hydrothermalis (strai n DSM 14884 / JCM 11576 / T1) OX=869210 GN=queF PE=3 SV =1
MDASLEHKLQEAAEHTRKALEYMARFGIKPEGKVRLFLPPETRQKTIDRIPFPYEERQVVVYETEPGEFSAVCPFSGLPDYGVVRIEYVPGSWILELKSLKYYLISWRDIGVYQEEATALIYRDLMQHLEDPEYLVVTTIYNVRGGIKTTCTIDSRAQG

SEQ ID NO: 47150 - protein, 272 aa, Marinobacter adhaerens
  misc_feature (1)..(272): tr|A0A351PPM7|A0A351PPM7_9ALTE NADPH-dependent 7-cyano- 7-deazaguanine reductase OS=Marinobacter adhaerens OX=1 033846 GN=queF PE=3 SV=1
MALNDAPLGKTSDYPDSYDPGLLFPVAREENRRRIGLEDGRWPWFGEDLWQAWEISWLRPSGVPEVAWAEIVFPAASPAIIESKSLKLYLNSLNQAVYSSREQVAEVITQDLSSACGGAVQVNLLSVDESGEAIGRPEGFELIDDEPVSEVVFEYAPEALSASGEVVTERLCSHLLKSNCPVTGQPDWATLLISYTGPKIDRGGLLRYVVSFRQKQDFHEHCVETVFTDLMGRCNPESLTVVARYTRRGGLDINPWRSTETGGDAGPRLIRQ

SEQ ID NO: 47151 - protein, 272 aa, Marinobacter adhaerens
  misc_feature (1)..(272): tr|E4PKD0|E4PKD0_MARAH NADPH-dependent 7-cyano-7-deazag uanine reductase OS=Marinobacter adhaerens (strain DSM 23420 / HP15) OX=225937 GN=queF PE=3 SV=1
MALNDAPLGKTSDYPDSYDPGLLFPVAREENRRRLGLEDGRWPWFGEDLWQAWEISWLRPSGVPEVAWAEIVFPAASPAIIESKSLKLYLNSLNQAVYSSREQVAEVITQDLSSACGGAVQVNLLSVDESGEAIGRPEGFELIDDEPVSEVVFEYAPEALSASGEVVTERLCSHLLKSNCPVTGQPDWATLLISYTGPKIDRGGLLRYVVSFRQKQDFHEHCVETVFTDLMGRCNPESLTVVARYTRRGGLDINPWRSTETGGDAGPRLIRQ

SEQ ID NO: 47152 - protein, 272 aa, Marinobacter algicola
  misc_feature (1)..(272): tr|A6EWJ4|A6EWJ4_9ALTE NADPH-dependent 7-cyano-7-deazag uanine reductase OS=Marinobacter algicola DG893 OX=4431 52 GN=queF PE=3 SV=1
MALIDAPLGKSSDYPDAYDPQLLFPVAREENRRRIGLEDGRWPWFGEDLWQAWEISWLRSGGVPAVAWAEIRVPSASPSIIESKSLKLYLNSLNQTVFSSADQVRDVIARDLSSASGAAVQVDLHSVDQGARAVGRPEGFVLIDDEDVDSVGYDYNPDSLQAAGEVVSEKLCSHLLKSNCPVTGQPDWATVLIDYTGPAMDRAGLLQYIVSFRQKQDFHEHCVETMFTDLMTRCQPQKLSVCARYTRRGGLDINPWRSTDPEEAVGPRLIRQ

SEQ ID NO: 47153 - protein, 272 aa, Marinobacter antarcticus
  misc_feature (1)..(272): tr|A0A1M6U0U5|A0A1M6U0U5_9ALTE NADPH-dependent 7-cyano- 7-deazaguanine reductase OS=Marinobacter antarcticus OX =564117 GN=queF PE=3 SV=1
MALDNAPLGKASDYPDRYDPALLFPVAREENRRRIGLEDGRWPWFGGDLWQAWEISWLRPGGIPDLAWAEIRFPAASPSIIESKSLKLYLNSLNQTAFSSADQVAEAITGDLSSACGAAVNVRFLSVDDSGTAIGRPSGYELIDNEPVEDVVYDYAPESLSATGPVVTEKFCSHLLKSNCPVTGQPDWGTVLISYTGSAIDRAGLLRYIVSFRQKQDFHEHCVETLFTDLLRRCKPQNLTVCARYTRRGGLDINPWRSTEPEEQAGPRLIRQ

SEQ ID NO: 47154 - protein, 273 aa, Marinobacter confluentis
  misc_feature (1)..(273): tr|A0A4Z1BPB7|A0A4Z1BPB7_9ALTE NADPH-dependent 7-cyano- 7-deazaguanine reductase OS=Marinobacter confluentis OX =1697557 GN=queF PE=3 SV=1
MSLIDAPLGKASEYPDSYDPALLFPVSRDVNRRRIGLDDGRWPWFGDDLWQGWEISWLRPDGVPAVAWAEIFVPAASPCIIESKSMKLYLNSLNQAVFSSFERVEEVVAQDLSSVSGAAVSVKLHSVDEGVRLSGRPEGFVLIDDESPASVAYEYNPELLSAASDQRVTERLCSHLLKSNCPVTGQPDWATLLVEYTGPAMDRAALLSYVVGFRQTQDFHEHCVETIFTDLMARCQPEHLTVCARYTRRGGLDINPLRSTAPDAPFGPRLIRQ

SEQ ID NO: 47155 - protein, 272 aa, Marinobacter daqiaonensis
  misc_feature (1)..(272): tr|A0A1I6GKK6|A0A1I6GKK6_9ALTE NADPH-dependent 7-cyano- 7-deazaguanine reductase OS=Marinobacter daqiaonensis O X=650891 GN=queF PE=3 SV=1
MALDNAPLGKSSDYPERYAPELLFPVPRDDNRRRIALDDGRWPWFGEDLWQAWELSWLRPSGVPEVAWGTFRLPAASPSLIESKSLKLYLNSLNQEVYSSHGQVRETIERDLASACGAAASVMLYSVDRGMTAAGRPEGAILIDDEPVDGVIYEYCPEVLVAGGEKVSESLCSHLLKSNCPVTGQPDWGSLLIEYTGPAMDRAALLKYVVGFRQKQDFHEHCVETVFTDLMRACQPEQLTVSARYTRRGGLDINPWRSTSPGEAPLVRLVRQ

SEQ ID NO: 47156 - protein, 272 aa, Marinobacter excellens
  misc_feature (1)..(272): tr|A0A0N8KKE4|A0A0N8KKE4_9ALTE NADPH-dependent 7-cyano- 7-deazaguanine reductase OS=Marinobacter excellens HL-5 5 OX=1305731 GN=queF PE=3 SV=1
MALHNAPLGKSSDYPDQYDPALLFPVAREENRGRIGLHDSRWPWFGEDLWQAWEISWLRPGGVPAVAWGELRFPAASPSIIESKSLKLYLNSLNQAVFSSVDQVAETITADLSSACGAAVSVSLFSVDDAAPAEGRPAGYQLIDDEPVEDVVYDYSAESLVTGAEDVTEQLCSHLLKSNCPVTGQPDWASVFIHYTGKKIDRAGLLRYIVSFRQKQDFHEHCVETLFTDLMSRCKPRELTVCARYTRRGGLDINPVRSTHPEADAGPRLVRQ

SEQ ID NO: 47157 - protein, 272 aa, Marinobacter excellens
  misc_feature (1)..(272): tr|A0A137SBE4|A0A137SBE4_9ALTE NADPH-dependent 7-cyano- 7-deazaguanine reductase OS=Marinobacter excellens LAMA 842 OX=1306954 GN=queF PE=3 SV=1
MALHNAPLGKSSDYPDQYDPSLLFPVAREENRRRIGLEDGRWPWFGEDLWQAWEISWLRPGGVPAVAWGEIRFPAASPSIIESKSLKLYLNSLNQAVFSSADQVAETITADLSSACGAAVTVRLFSVDESAPAEGRPQGYELIDDEPVDDVVYEYSADSLSAGEEVVSEQLCSHLLKSNCPVTGQPDWASVFVRYTGPKIDRAGLLRYVVSFRQKQDFHEHCVETVFTDLMARCQPTELMVCARYTRRGGLDINPWRSTRAEGDAGPRLVRQ

SEQ ID NO: 47158 - protein, 272 aa, Marinobacter flavimaris; identical to SEQ ID NO: 47151
  misc_feature (1)..(272): tr|A0A3D8GZW8|A0A3D8GZW8_9ALTE NADPH-dependent 7-cyano- 7-deazaguanine reductase OS=Marinobacter flavimaris OX= 262076 GN=queF PE=3 SV=1

SEQ ID NO: 47159 - protein, 272 aa, Marinobacter fuscus
  misc_feature (1)..(272): tr|A0A2T1K6H8|A0A2T1K6H8_9ALTE NADPH-dependent 7-cyano- 7-deazaguanine reductase OS=Marinobacter fuscus OX=2109 942 GN=queF PE=3 SV=1
MALDNAPLGKSSEYPDQYDPSLLFPVSRDQNRHRIGLDDGRWPWFGEDMWQAWELSWLRAGGVPAVAWAEIRFPAASPAIIESKSLKLYLNSLNQLVFSSPDQVAGVIARDLSSACGATVDVRMLSVDEAAPAIGRPDGFELIDDEPLDDVIYSYAPGSLVAGEEQVSESLCSHLLKSNCPVTGQPDWATLFIRYTGPKIDRAGLLRYIVSFRQEQDFHEHCVETVFTDIMARCRPESLMVCARYTRRGGLDINPWRSTSAEDGPGPRLVRQ

SEQ ID NO: 47160 - protein, 272 aa, Marinobacter gudaonensis
  misc_feature (1)..(272): tr|A0A1I6G7M1|A0A1I6G7M1_9ALTE NADPH-dependent 7-cyano- 7-deazaguanine reductase OS=Marinobacter gudaonensis OX =375760 GN=queF PE=3 SV=1
MALNDAPLGKTSDYPDRYDPGLLFPVAREENRRRLGLEDGRWPWFGEDLWQAWEVSWLRPGGVPEVAWAELVFPAASPAIIESKSLKLYLNSLNQAVYSSREQVAEVIAQDLSSACGGSVQVRLHSVDESGEAIGRPAGFELVDDEPVTEPVYEYSPDSLSAGGTVVTEQLCSHLLKSNCPVTGQPDWATLLVSYTGPRIDRAGLLRYVVSFRQKQDFHEHCVETVFTDIMARCRPESLTVCARYTRRGGLDINPWRSTETGQDAGPRLIRQ

SEQ ID NO: 47161 - protein, 272 aa, Marinobacter guineae
  misc_feature (1)..(272): tr|A0A2G1VBA5|A0A2G1VBA5_9ALTE NADPH-dependent 7-cyano- 7-deazaguanine reductase OS=Marinobacter guineae OX=432 303 GN=queF PE=3 SV=1
MALNDAPLGKTSDYPDSYNPGLLFPVAREENRRRLGLDDGRWPWFGEDLWQAWEISWLRPGGVPDVAWAEIVFPAASPSIIESKSLKLYLNSLNQAVYSTRDQVAEVITKDLSSACGGAVHVRLLSVDESGDAVGRPAGFELIDDEPVSDVVYDYAPDSLFAGDEIVTERLCSHLLKSNCPVTGQPDWATLLISYTGPKIDRAGLLRYVVSFRQKQDFHEHCVETVFTDVMSHCKPESLTVCARYTRRGGLDINPWRSTETGHDAGPRLIRQ

SEQ ID NO: 47162 - protein, 272 aa, Marinobacter halophilus
  misc_feature (1)..(272): tr|A0A2T1KH45|A0A2T1KH45_9ALTE NADPH-dependent 7-cyano- 7-deazaguanine reductase OS=Marinobacter halophilus OX= 1323740 GN=queF PE=3 SV=1
MALHNAPLGKSSDYPDQYDPALLFPVAREENRRRIGLHDGRWPWFGEDLWQAWEISWLRPGGVPAVAWGEIRFPATSPSIIESKSLKLYLNSLNQAVFSTEDQVVETITADLSSACGAAVDVRLFSVDEAAPAEGRPVGYELIDDEPVQNVVYDYSAESLAAGTKEVSEQLCSHLLKSNCPVTGQPDWASVFIRYTGPKIDRSGLLRYIVSFRQKQDFHEHCVETLFTDLMSRCQPSQLMVCARYTRRGGLDINPVRSTSPEDGAGPRLVRQ

SEQ ID NO: 47163 - protein, 34 aa, Marinobacter hydrocarbonoclasticus
  misc_feature (1)..(34): tr|A0A3B8WFT0|A0A3B8WFT0_MARHY NADPH-dependent 7-cyano- 7-deazaguanine reductase QueF (Fragment) OS=Marinobacte r hydrocarbonoclasticus OX=2743 GN=DCF82_13980 PE=4 SV= 1
LMVCARYTRRGGLDINPWRSTCAEDGPGPRLVRQ

SEQ ID NO: 47164 - protein, 272 aa, Marinobacter hydrocarbonoclasticus
  misc_feature (1)..(272): tr|A0A455W4S5|A0A455W4S5_MARHY NADPH-dependent 7-cyano- 7-deazaguanine reductase OS=Marinobacter hydrocarbonocl asticus OX=2743 GN=queF PE=3 SV=1
MALHNAPLGKSSDYPDQYDPSLLFPVAREENRRRIGLEDGRWPWFGADLWQAWEISWLRPGGVPAVAWGEIRFPAESPSIIESKSLKLYLNSLNQAVFSSADQVAETITADLSSACGASVDVRLFSVDESAPAEGRPKGYELIDDEPVDDVVYEYSAESLSAGEQVVSEQLCSHLLKSNCPVTGQPDWASVFIRYTGPKMDRAGLLRYVVSFRQKQDFHEHCVETMFTDLMARCQPTELMVCARYTRRGGLDINPWRSTRAEGDAGPRLVRQ

SEQ ID NO: 47165 - protein, 272 aa, Marinobacter lipolyticus
  misc_feature (1)..(272): tr|R8B184|R8B184_9ALTE NADPH-dependent 7-cyano-7-deazag uanine reductase OS=Marinobacter lipolyticus SM19 OX=13 18628 GN=queF PE=3 SV=1
MALNDAPLGKSSEYPDRYNPDLLFPVPREENRRRIGLNDGRWPWFGEDLWQAWEVSWLRADGVPAVAWAEIRFPAASPNIIESKSLKLYLNSLNQAVFSSPDQVADVITRDLSSGSGAAVQVTMRSVDEGAMAEGRPQGYELIDGETVDDVTYDYAPESLSAFGESVSESLCSHLLKSNCPVTGQPDWATVMIRYTGPKLDRRGLLRYIVSFRQKQDFHEHCVETLFTDIMARCKPEVLMVCARYTRRGGLDINPWRSTNPEDGSGARLIRQ

SEQ ID NO: 47166 - protein, 272 aa, Marinobacter litoralis
  misc_feature (1)..(272): tr|A0A3M2RA93|A0A3M2RA93_9ALTE NADPH-dependent 7-cyano- 7-deazaguanine reductase OS=Marinobacter litoralis OX=1 87981 GN=queF PE=3 SV=1
MALDNAPLGKSSDYPDQYDPSLLFPVAREENRRRIGLEDGRWPWFGEDMWQAWELSWLRPGGVPVVAWAEIRFPAASPSIVESKSLKLYLNSLNQHVFSSEQQVAETITRDLSKVCGGAVHVQMQSVDATAPAVGRPDGYELIDNETVEEVVYEYAPESLSAKGPEVTEGLCSHLLKSNCPVTGQPDWGTIFIRYTGAAIDRAGLLRYIISFRQKQDFHEHCVETVFTDVMQRCKPSELMVCARYTRRGGLDINPWRSTNPQEGLGPRLVRQ

SEQ ID NO: 47167 - protein, 274 aa, Marinobacter lutaoensis
  misc_feature (1)..(274): tr|A0A1V2DUH0|A0A1V2DUH0_9ALTE NADPH-dependent 7-cyano- 7-deazaguanine reductase OS=Marinobacter lutaoensis OX= 135739 GN=queF PE=3 SV=1
MALHDAPLGKSSEYPEHYDPTLLFPVARQENRRRLGLDDGRWPWFGEDLWQAWEVSWLRPGGVPAVAWAEIHVPADSPSIIESKSLKLYLNSLNQEVFASPERLRAVVSEDLSGAAGAPVRVQLREVDTGAMAEGRPEGYELIDDEPVADVVYHYAPESLRLRDGAERVSERLCSHLLKSNCPVTGQPDWGTLLIEYTGPRIDRSALLRYIVSFRNKQDFHEHCVETVFTDLMARCKPEALTVCARYTRRGGLDINPWRSTSPGGGAGPRLIRQ

SEQ ID NO: 47168 - protein, 272 aa, Marinobacter manganoxydans
  misc_feature (1)..(272): tr|G6YV70|G6YV70_9ALTE NADPH-dependent 7-cyano-7-deazag uanine reductase OS=Marinobacter manganoxydans MnI7-9 O X=1094979 GN=queF PE=3 SV=1
MALNDAPLGKTSDYPDNYDPGLLFPVAREENRRRLGLEDGRWPWFGEDLWQAWEISWLRPNGVPEVAWAQIVFPAASPSIIESKSLKLYLNSLNQAVYSSREQVAEVITQDLSSACGGAVQVNLLSVDESGEAVGRPEGFELIDDEPVSDVVYEYSPESLEAGNEVVTEQLCSHLLKSNCPVTGQPDWATLLVSYTGPKIDRPGLLRYVVSFRQKQDFHEHCVETVFTDLMARCSPESLTVIARYTRRGGLDINPWRSTETGKDAGPRLIRQ

SEQ ID NO: 47169 - protein, 272 aa, Marinobacter mobilis
  misc_feature (1)..(272): tr|A0A1H3BT23|A0A1H3BT23_9ALTE NADPH-dependent 7-cyano- 7-deazaguanine reductase OS=Marinobacter mobilis OX=488 533 GN=queF PE=3 SV=1
MGLHNAPLGKNSEYPDSYSPELLFPVPRDDNRRRIGLSDGRWPWFGEDLWQAWEVSWLRPSGVPAVAWIEFRVPAASPSLIESKSWKLYLNSLNQSVFSTPEQMLEVVERDLSSACGAAVTARLHSVDESGVATGRPEGFILIDDEPVDAVSYDYDASCLSVDGPVITEKLCSHLLKSNCPVTGQPDWGTLTVEYTGPALSRAGLLKYVVGFRQKQDFHEHCVETVFTDIMTHCQPESLTVCARYTRRGGLDINPWRSTEPGYAPSVRLIRQ

SEQ ID NO: 47170 - protein, 272 aa, Marinobacter nanhaiticus
  misc_feature (1)..(272): tr|N6VUH1|N6VUH1_9ALTE NADPH-dependent 7-cyano-7-deazag uanine reductase OS=Marinobacter nanhaiticus D15-8W OX= 626887 GN=queF PE=3 SV=1
MALHDAPLGKSSEYPERYAPELLFPVPRQDNRRRIGLDDGRWPWFGADLWQAWELSWLRPNGVPAVAWGVIRVPAASPSIVESKSLKLYLNSFNQEVFSDADQVRERIEHDLSSASGSVVSVELYSVDEPATIVSRPDDFELIDDEPIEVESYTPCPDRLHTGEEQVSEALCSHLLKSNCPVTGQPDWGSLLIRYTGKKIDRAALLHYVVGFRQKQDFHEHCVETVFTDLMTYCQPESLTVSAHYTRRGGLDINPWRSTDLHEPPMPRLLRQ

SEQ ID NO: 47171 - protein, 272 aa, Marinobacter nitratireducens
  misc_feature (1)..(272): tr|A0A072N4J9|A0A072N4J9_9ALTE NADPH-dependent 7-cyano- 7-deazaguanine reductase OS=Marinobacter nitratireducen s OX=1137280 GN=queF PE=3 SV=1
MALHDAPLGKSSAYPDRYDPNLLFPVSREENRRRLGLEDGRWPWFGEDVWQAWEVSWVRPGGVPAVAWAEICFPAASPAIIESKSLKLYLNSLNQTIFSSAEQVAETIKSDLSSASGSAVDVWMRSVDDSGEAVGRPGGFLLVDDESLDEVVYEYAPESLTASGASVSEKLCSHLLKSNCPVTGQPDWATVLIEYSGPKIDRAGLLRYIVSFRQKQDFHEHCVETIFTDIMARCQPERLSVCARYTRRGGLDINPWRSTEPAGDAGPRLIRQ

SEQ ID NO: 47172 - protein, 274 aa, Marinobacter pelagius
  misc_feature (1)..(274): tr|A0A366GM91|A0A366GM91_9ALTE NADPH-dependent 7-cyano- 7-deazaguanine reductase OS=Marinobacter pelagius OX=37 9482 GN=queF PE=3 SV=1
MALHNAPLGKSSEYPDSYDPNLLFPVARDENRRRIGLEDGRWPWFGEDLWQAWEVSWLRPGGVPAVAWAEIFVPAASPSIIESKSLKLYFNSLNQHVFSTPEQLVETVVSDLSSACGAAVRVNLHSVDESGEATGRPEGYQLIDDEPVADVVYQYAPESLAVEQGAEVVTEQLCSHLLKSNCPVTGQPDWGTLLISYTGPKVDRSALLRYIVSFRNKQDFHEHCVETVFTDLMKQCQPTELAVCARYTRRGGLDINPWRSTQAEGNAGPRLIRQ

SEQ ID NO: 47173 - protein, 274 aa, Marinobacter pelagius
  misc_feature (1)..(274): tr|A0A1I4VZI8|A0A1I4VZI8_9ALTE NADPH-dependent 7-cyano- 7-deazaguanine reductase OS=Marinobacter pelagius OX=37 9482 GN=queF PE=3 SV=1
MALHNAPLGKSSEYPDSYDPNLLFPVARDENRRRIGLEDGRWPWFGEDLWQAWEVSWLRPGGVPAVAWAEIFVPAASPSIIESKSLKLYLNSLNQHVFSTPEQLVETVVSDLSSACGAAVRVNLHSVDESGQAIGRPEGYQLIDDEPVGDVVYQYAPESLAVEQSAEVVTEQLCSHLLKSNCPVTGQPDWGTLLIRYTGPKIDRSALLRYIVSFRNKQDFHEHCVETVFTDLMKQCQPTELAVCARYTRRGGLDINPWRSTQAEGSAGPRLIRQ

SEQ ID NO: 47174 - protein, 272 aa, Marinobacter persicus
  misc_feature (1)..(272): tr|A0A2S6G7K8|A0A2S6G7K8_9ALTE NADPH-dependent 7-cyano- 7-deazaguanine reductase OS=Marinobacter persicus OX=93 0118 GN=queF PE=3 SV=1
MALDKAPLGKTSDYPDRYDPTLLFPVPREENRRRIGLHDGRWPWFGEDLWQAWEISWLRPGGVPAVAWAEIRFPAASPAIIESKSLKLYLNSFNQAVFSSIEQVQHTMEMDLSSACGAAVHVLVHSVDEGAPAVGRPEGYDLIDDLPVENVVYEYAPESLSADGDTVTEQLCSHLLKSNCPVTGQPDWATVLIRYTGPKIDAAGLLRYIVGFRQKQDFHEHCVETLFTDLMEHCRPSELMVCARYTRRGGLDINPWRSTSPADGPGPRLVRQ

SEQ ID NO: 47175 - protein, 272 aa, Marinobacter persicus
  misc_feature (1)..(272): tr|A0A1I3WS23|A0A1I3WS23_9ALTE NADPH-dependent 7-cyano- 7-deazaguanine reductase OS=Marinobacter persicus OX=93 0118 GN=queF PE=3 SV=1
MALDKAPLGKTSEYPDRYDPTLLFPVPREENRRRLDLDDGRWPWFGEDLWQAWELSWLRPGGVPAVAWAEIRFPAASPAIIESKSLKLYLNSFNQAVFSSVEQVQHTMEADLSSACGAAVHVRMRSVDETEPAVGRPEGYRLIDDLPVEDVVYDYAPDSLSAGGGTVTEQLCSHLLKSNCPVTGQPDWATVLIRYTGPRIDASGLLRYIVGFRQKQDFHEHCVETLFTDLMHHCQPTELMVCARYTRRGGLDINPWRSTSAGDGPGPRLIRQ

SEQ ID NO: 47176 - protein, 272 aa, Marinobacter psychrophilus
  misc_feature (1)..(272): tr|A0A0H4I3I5|A0A0H4I3I5_9ALTE NADPH-dependent 7-cyano- 7-deazaguanine reductase OS=Marinobacter psychrophilus OX=330734 GN=queF PE=3 SV=1
MALDNAPLGKISEYPDTYDPGQLFPIPRLHNRQRIGLEDGLWPWFGGDLWQAWEVSWLRSGGVPVVAWAEIEFAAESPQLVESKSLKLYLNSLNQTVYASAERVCEVIVADLSSASGAAVRVTLHSVDEGALAQGRPHEYQLIDDEPLTDVVYSYAPESLVTGTKIVSEKLCSHLLKSNCPVTGQPDWGSVLIDYTGPKLNRVGLLRYIVSFRQKQDFHEHCVETLFTDLMRHCKPQALTVTARYTRRGGLDINPWRSTRADANSGPRLIRQ

SEQ ID NO: 47177 - protein, 272 aa, Marinobacter salarius
  misc_feature (1)..(272): tr|A0A1W6KAN0|A0A1W6KAN0_9ALTE NADPH-dependent 7-cyano- 7-deazaguanine reductase OS=Marinobacter salarius OX=14 20917 GN=queF PE=3 SV=1
MALNDAPLGKSSDYPDAYDPQLLFPVAREENRRRIGLEDGRWPWFGEDLWQAWEISWLRTGGVPAVAWAEIRVPSASPSIIESKSLKLYLNSLNQTVFSSADQVRDVIARDLSSASGAAVNVDLHSVDQGARAVGRPEGFVLIDDEDVESVGYDYNPDSLQATGDVVSEKLCSHLLKSNCPVTGQPDWATVLIDYAGPAMDRAGLLQYIVSFRQKQDFHEHCVETMFTDLMARCQPQKLSVCARYTRRGGLDINPWRSTDPEEAVGPRLIRQ

SEQ ID NO: 47178 - protein, 272 aa, Marinobacter salarius
  misc_feature (1)..(272): tr|W5YQ24|W5YQ24_9ALTE NADPH-dependent 7-cyano-7-deazag uanine reductase OS=Marinobacter salarius OX=1420917 GN =queF PE=3 SV=1
MALNDAPLGKSSDYPDAYDPQLLFPVAREENRRRIGLEDGRWPWFGEDLWQAWEISWLRTGGVPAVAWAEIRVPSASPSIIESKSLKLYLNSLNQTVFSSADQVRDVIARDLSSASGAAVNVDLHSVDQGARAVGRPEGFVLIDDEDVESVGYDYNPDSLQATGDVVSEKLCSHLLKSNCPVTGQPDWATVLIDYTGPAMDRAGLLQYIVSFRQKQDFHEHCVETMFTDLMARCQPQKLSVCARYTRRGGLDINPWRSTDPEEAVGPRLIRQ

SEQ ID NO: 47179 - protein, 272 aa, Marinobacter salinus
  misc_feature (1)..(272): tr|A0A1D9GKN4|A0A1D9GKN4_9ALTE NADPH-dependent 7-cyano- 7-deazaguanine reductase OS=Marinobacter salinus OX=187 4317 GN=queF PE=3 SV=1
MALHDAPLGKSSEYPDRYDPNLLFPVARDENRRRLGLADGRWPWFGEDLWQAWEVSWLRQGGVPAVVWAEIRFPSASPCIIESKSLKLYLNSFNQSIFSSAEQVAETLTRDLSSACGASVHVQLRSVDESGDALGRPPGFELIDDEPVGEVVYEYAPDSLVVSGETVTEQLCSHLLKSNCPVTGQPDWATIMVSYTGPAIVRSGLLRYLVSFRQKQDFHEHCVETVFTDLMRYCGPKSLMVCARYTRRGGLDINPWRATEPGHDAGPRLIRQ

SEQ ID NO: 47180 - protein, 273 aa, Marinobacter santoriniensis
  misc_feature (1)..(273): tr|M7D7C1|M7D7C1_9ALTE NADPH-dependent 7-cyano-7-deazag uanine reductase OS=Marinobacter santoriniensis NKSG1 O X=1288826 GN=queF PE=3 SV=1
MALHTAPLGKSSEYPDRYDPDILFPVPREENRRRIGLDDGRWPWFGEDLWQAWELSWLKPGGVPVVAWAEIHVPGASPFLIESKSLKLYLNSLNQHTFSSWQQAGETIINDLSSACGAAVRVQLHSVDEDVVTRGRPAGYELIDDEPVDGVVYEYDVASLAVRDEAVVTESLCSHLLKSNCPVTGQPDWGTLLIRYTGKPIDRAGLLRYVVSFRNKQDFHEHCVETVFTDLMAHCAPDSLEVCARYTRRGGLDINPWRSTAPEGDPGPRLVRQ

SEQ ID NO: 47181 - protein, 272 aa, Marinobacter segnicrescens
  misc_feature (1)..(272): tr|A0A1H9YEB3|A0A1H9YEB3_9ALTE NADPH-dependent 7-cyano- 7-deazaguanine reductase OS=Marinobacter segnicrescens OX=430453 GN=queF PE=3 SV=1
MALDHAPLGKSSEYPDRYAPELLFPVPRDDNRRRIGLEDGRWPWFGDDLWQAWELSWLRPGGVPVVAWGEFRVPAASPSLIESKSLKLYLNSLNQEVFSSHDQVRETIERDLSSACGAQVAVSLYSVDRGMTAEGRPPGAILIDDEPVSSVGYDYCPEVLKASGETVTESLCSHLLKSNCPVTGQPDWGSLLVEYTGPAIDRSALLQYVVGFRQKQDFHEHCVETVFTDLMQRCQPEHLVVSARYTRRGGLDINPWRSTDPGEAPRMRLVRQ

SEQ ID NO: 47182 - protein, 272 aa, Marinobacter shengliensis; identical to SEQ ID NO: 47157
  misc_feature (1)..(272): tr|A0A2T1KNA0|A0A2T1KNA0_9ALTE NADPH-dependent 7-cyano- 7-deazaguanine reductase OS=Marinobacter shengliensis O X=1389223 GN=queF PE=3 SV=1

SEQ ID NO: 47183 - protein, 272 aa, Marinobacter similis
  misc_feature (1)..(272): tr|W5YGK3|W5YGK3_9ALTE NADPH-dependent 7-cyano-7-deazag uanine reductase OS=Marinobacter similis OX=1420916 GN= queF PE=3 SV=1
MALHNAPLGKASEYPDRYDPSLLFPVARDENRRRIGLNDGRWPWFGEDLWQAWEVSWLRLSGVPAVAWAEIRFPAASPSIIESKSLKLYLNSFNQSAFSSPEQVAKTITDDLSSACGAAVQVDMKSVDEPGDAFGRPQGYELIDDEPVSDVVYEYSPESLSASGEVVTEKLCSHLLKSNCPVTGQPDWATLMVSYTGPKLDRAGLLKYVVSFRQKQDFHEHCVETVFTDLMAQCQPEKLMVCARYTRRGGLDINPWRATEPTQDSSGRLVRQ

SEQ ID NO: 47184 - protein, 272 aa, Marinobacter sp.
  misc_feature (1)..(272): tr|A0A1E7PZN1|A0A1E7PZN1_9ALTE NADPH-dependent 7-cyano- 7-deazaguanine reductase OS=Marinobacter sp. X15-166B O X=1897620 GN=queF PE=3 SV=1
MALDKAPLGKHSEYPDKYSPDLLFPVPRDDNRRRIALADGRWPWFGEDLWQAWEISWLQPNGVPAVVWGVIRVPAASASLIESKSLKLYLNSLNQTVFSTTDQVRELISRDLSSLVGAAVTVDLYSVDEAVAAVGRPEGYQLIDGEPVTSVDYQYRPELLQATGPRVTEQLCSHLLKSNCPVTGQPDWGSLLIEYTGPQIARPQLLQYVVGFRQQQDFHEHCVETVFTDIMARCQPEQLTVCARYTRRGGLDINPWRSTQPGSAPLVRLVRQ

SEQ ID NO: 47185 - protein, 272 aa, Marinobacter sp.; identical to SEQ ID NO: 47178
  misc_feature (1)..(272): tr|A0A3S1DXK9|A0A3S1DXK9_9ALTE NADPH-dependent 7-cyano- 7-deazaguanine reductase OS=Marinobacter sp. NP-6 OX=24 88666 GN=queF PE=3 SV=1

SEQ ID NO: 47186 - protein, 272 aa, Marinobacter subterrani
  misc_feature (1)..(272): tr|A0A0J7LZ74|A0A0J7LZ74_9ALTE NADPH-dependent 7-cyano- 7-deazaguanine reductase OS=Marinobacter subterrani OX= 1658765 GN=queF PE=3 SV=1
MALLDAPLGKTSDYPDRYDPDLLFPVARGENRRRLGLNDGRWPWFGADLWQAWEISWLRPGGIPEVAWAEFVFPAASPSIIESKSLKLYLNSLNQTVYSSAEQVAEVITQDLSSACGAAVQVKMMSVDESGDAIGRPGGFTLIDDEPVSDVVYDYAPESLSSGGEDVTEHLCSHLLKSNCPVTGQPDWATLLISYTGPKMDRAGLLRYVVSFRQKQDFHEHCVETVFTDLMNRCMPESLTVCARYTRRGGLDINPWRSTETGQDAGPRLVRQ

SEQ ID NO: 47187 - protein, 272 aa, Marinobacter vinifirmus
  misc_feature (1)..(272): tr|A0A558BEK8|A0A558BEK8_9ALTE NADPH-dependent 7-cyano- 7-deazaguanine reductase OS=Marinobacter vinifirmus OX= 355591 GN=queF PE=3 SV=1
MALHNAPLGKSSEYPDQYDPSLLFPVAREENRRRIGLEDGRWPWFGEDLWQAWEISWLRPGGVPAVAWAEIRFPAASPSIIESKSLKLYLNSLNQAVFSTVEQVAETITADLSSACGAAVDVRLLSVDESAPAIGRPEGYELIDDEPVDDVVYEYSAESLTVSGEEVSEQLCSHLLKSNCPVTGQPDWATVLIRYQGKKIDRSGLLRYIVSFRQKQDFHEHCVETVFTDLMARCKPEQLTVCARYTRRGGLDINPWRSTSPEQGPGPRLVRQ

SEQ ID NO: 47188 - protein, 272 aa, Marinobacter zhejiangensis
  misc_feature (1)..(272): tr|A0A1I4P702|A0A1I4P702_9ALTE NADPH-dependent 7-cyano- 7-deazaguanine reductase OS=Marinobacter zhejiangensis OX=488535 GN=queF PE=3 SV=1
MGLHNAPLGKSSEYPESYSPDLLFPVVRDDNRRRIGLSDGRWPWFGEDLWQAWEVSWLRPSGVPAVAWVEFRVPAASPALIESKSWKLYLNSLNQATFSSAEQMLSVVEKDLSSACGAAVKARLHSVDDSGDAIGRPEGFILIDDEPVDSVSYEYDPSSLTTEGPVVTEKLCSHLLKSNCPVTGQPDWGTLTVEYTGPAISKAGLLKYVVGFRQKQDFHEHCVETVFTDIMAHCKPESLTVCARYTRRGGLDINPWRSTEPGAAPSLRLVRQ

SEQ ID NO: 47189 - protein, 275 aa, Marinobacterium aestuarii
  misc_feature (1)..(275): tr|A0A1A9F0R4|A0A1A9F0R4_9GAMM NADPH-dependent 7-cyano- 7-deazaguanine reductase OS=Marinobacterium aestuarii O X=1821621 GN=queF PE=3 SV=1
MSHEDQVLYQSPLGQGTAYVNTYDAGQLYPIARNLNWQKRGIDQTSLPFAGEDIWNAYEVSWLNGRGKPLVRLAEFRIPASSSHIIESKSFKLYLNSFNLSRFDSEAEVAALMVRDLSAAAGAAVGVRLIEPDAAAPIGAFEGRCIDELDVEIEHYQPAPELLCAGENAVTESLYSHLLKSNCPVTGQPDWASIQVSYTGPQIDREGLLRYLVSYREHGDFHEQCVENIFMDIWQQCRPESLSVYARYVRRGGLDINPYRSSQPGEAPNLRLDRQ

SEQ ID NO: 47190 - protein, 274 aa, Marinobacterium georgiense
  misc_feature (1)..(274): tr|A0A1H4BPC8|A0A1H4BPC8_9GAMM NADPH-dependent 7-cyano- 7-deazaguanine reductase OS=Marinobacterium georgiense DSM 11526 OX=1122198 GN=queF PE=3 SV=1
MSEHDQVKASPLGQDTVYVNEYDASLLYPIRRDLNWEVKGVKRSSLPFRGLDIWNAYEVSWLDAGGKPVVRLAEFRIPASSPCIIESKSFKLYLNSFNLSRFAQESEVRERMQADLSAAAGAPVQVKLIPLTQAVEVSQLKGRCLDDLPLQVEHYSPAPELLNASGPVTEETLVSHLLKSNCPVTGQPDWASVQIRYKGAQIDHKGLLAYLISYREHGDFHEQCVENIFMDIWQRCRPQKLSVYARYVRRGGLDINPYRSSINDEPQNLRLSRQ

SEQ ID NO: 47191 - protein, 274 aa, Marinobacterium halophilum
  misc_feature (1)..(274): tr|A0A2P8ETW9|A0A2P8ETW9_9GAMM NADPH-dependent 7-cyano- 7-deazaguanine reductase OS=Marinobacterium halophilum OX=267374 GN=queF PE=3 SV=1
MSEHEQVKASPLGQETAYVNEYDASLLYPIARDLNWAAKGVKRAALPFRGLDIWNAYEVSWLDRGGKPVVRLAEFRIPASSPHIIESKSFKLYLNSYNLSRFGGEADVRERMTADLSAVAGAPVEVILTSLTAPVEVVQLKGRCLDELPLQVEHYTPAPELLTAGGAVQDEILVSHLLKSNCPVTGQPDWASVQIRYKGPQIDQKGLLAYLISYREHGDFHEQCVENIFMDIWQRCRPQKLSVYARYVRRGGLDINPYRSSINDVPQNLRLSRQ

SEQ ID NO: 47192 - protein, 274 aa, Marinobacterium lutimaris
  misc_feature (1)..(274): tr|A0A1H5ZF68|A0A1H5ZF68_9GAMM NADPH-dependent 7-cyano- 7-deazaguanine reductase OS=Marinobacterium lutimaris O X=568106 GN=queF PE=3 SV=1
MSEHESVKQSPLGQGTRYVNRYDPSLLYPIARDINWQAQGVDRTKLPFRGVDIWNAYELSWLDSRGKPVVRLAEFRIPASSESIIESKSFKLYLNSYNLTRFGSEDEVRSHLQQDLSQAAGGQVSVRLIRPDAPGTIGQLEGVCIDDLEIDVEHYTPAPSLLKCSSETVTETLTTHLLKSNCPVTGQPDWGSVQIRYRGGKIDRKGLLAYIVSYREHGDFHEQCVENIFMDIWRHCRPQKLSVYARYVRRGGLDINPYRSSIQDEPVNTRLSRQ

SEQ ID NO: 47193 - protein, 274 aa, Marinobacterium mangrovicola
  misc_feature (1)..(274): tr|A0A4R1GIJ2|A0A4R1GIJ2_9GAMM NADPH-dependent 7-cyano- 7-deazaguanine reductase OS=Marinobacterium mangrovicol a OX=1476959 GN=queF PE=3 SV=1
MSEHESVKQSPLGQGTRYVNRYDPSLLYPIARDINWQAQGVDRATLPFRGVDIWNAYELSWLDSRGKPVVRLAEFRIPASSDHIIESKSFKLYLNSYNLTRFGSEEEARSHLQQDLSQAAGGQVSVRLIRPDAPATIGQLEGVCIDDLEIDVEHYSPAPSLLKCSSETVTETLVTHLLKSNCPVTGQPDWGSVQIRYRGGKIDRKGLLAYIVSYREHGDFHEQCVENIFMDIWRHCRPQKLSVYARYVRRGGLDINPYRSSIQDEPVNTRLSRQ

SEQ ID NO: 47194 - protein, 274 aa, Marinobacterium sp.
  misc_feature (1)..(274): tr|A0A081FZP6|A0A081FZP6_9GAMM NADPH-dependent 7-cyano- 7-deazaguanine reductase OS=Marinobacterium sp. AK27 OX =1232683 GN=queF PE=3 SV=1
MSEHESIKQSPLGQGTRYVNRYDPGLLYPIAREINWQAKGIDRSTLPFRGVDIWNAYELSWLDSRGKPVVRLAEFRIPANSAHIIESKSFKLYLNSYNLTRFGSESEVQAHLKQDLSQAAGGDVSVRLVRPDAPLQMGKLEGACIDDLEIDVEHYTPAPNLLQSSNEIVSETLVSHLLKSNCPVTGQPDWGSVQIRYKGGKIDRKGLLAYIVSYREHGDFHEQCVENIFMDIWQRCRPQKLSVYARYVRRGGLDINPYRSSIADEPVNPRLARQ

SEQ ID NO: 47195 - protein, 274 aa, Marinobacterium stanieri
  misc_feature (1)..(274): tr|A0A1N6SJ46|A0A1N6SJ46_9GAMM NADPH-dependent 7-cyano- 7-deazaguanine reductase OS=Marinobacterium stanieri OX =49186 GN=queF PE=3 SV=1
MSEHHQVKASPLGQETAYVNEYDPKLLYPIARDLNWQAKGVTRSSLPFRGLDIWNAYEVSWLDQGGKPVVRLAEFRIPASSPNIIESKSFKLYLNSYNLSRFCNEAEVRTRMQEDLSAAAGAPVDVILTSLNAPVEVQQLKGLCLDELPLQVEHYTPAPQLLTSGGQVQDETLVSHLLKSNCPVTGQPDWASVQIRYKGPQIDHKGLLAYLISYREHGDFHEQCVENIFMDIWQRCRPQKLSVYARYVRRGGLDINPYRSSINDTPQNLRLSRQ

SEQ ID NO: 47196 - protein, 163 aa, Marinococcus halophilus
  misc_feature (1)..(163): tr|A0A510Y3Y5|A0A510Y3Y5_MARHA NADPH-dependent 7-cyano- 7-deazaguanine reductase OS=Marinococcus halophilus OX= 1371 GN=queF PE=3 SV=1
MPEREDIEQLDQLGSEKTSYTFEYDPSLLETFENTHPYRDYFVKFNCPEFTTLCPKTGQPDFGTLYISYIPDEKMVESKSLKLYLFSFRNHGGFHEDSINTIVNDLVHLMNPRYLEIWGKFTPRGGISIDPFVNYGRAGSKYEQLAENRLFQHDLYPEPIDNR

SEQ ID NO: 47197 - protein, 163 aa, Marinococcus luteus
  misc_feature (1)..(163): tr|A0A1H2VF36|A0A1H2VF36_9BACI NADPH-dependent 7-cyano- 7-deazaguanine reductase OS=Marinococcus luteus OX=1122 204 GN=queF PE=3 SV=1
MPEREDIEQLDQLGSEKTAYTFEYDPSLLEVFENTHPYRDYFVKFNCPEFTTLCPKTGQPDFGTLYISYIPDEKMVESKALKLYLFSFRNHGGFHEDSINTIVNDLVELMDPRYLEIWGKFTPRGGISIDPFVNYGRAGSKYEQLAENRLFQHDLYPEPIDNR

SEQ ID NO: 47198 - protein, 271 aa, Marinomonas alcarazii
  misc_feature (1)..(271): tr|A0A318VAN9|A0A318VAN9_9GAMM NADPH-dependent 7-cyano- 7-deazaguanine reductase OS=Marinomonas alcarazii OX=49 1949 GN=queF PE=3 SV=1
MGFLPLGQQTEYVSEYDAGLLYPIARVDKWTEMGIESERLPFYGEDVWNAYELSWLNLKGKPIVALAEFRLPCDSPNIIESKSFKLYLNSLNQMRYESAEEVQGILERDLSQAAQAEVTVIIRDVDSMSSLVVLTPDYCIDDLDIDVSEYHPNADLLAIDESMGIVEERLVSHLLKSNCPVTNQPDWGSVFIDYKGPKINHESLLRYVISFREHTDFHEQCVERIFIDIMRHCRPESLTVYARYVRRGGLDINPYRSSTPVVLGNDRLTRQ

SEQ ID NO: 47199 - protein, 270 aa, Marinomonas aquimarina
  misc_feature (1)..(270): tr|A0A1A8TFE3|A0A1A8TFE3_9GAMM NADPH-dependent 7-cyano- 7-deazaguanine reductase OS=Marinomonas aquimarina OX=2 95068 GN=queF PE=3 SV=1
MGFLPLGQKTDYVSEYDPGLLFPIARVDKWRDMGIESERLPFHGEDIWNAYELSWLNKKGKPIVATAEFRLPCSSPNIIESKSFKLYLNSLNQMRYQDQFEVQEILERDLTAAAGAPVSVVIRDVDAMESLVVLTPDYCIDELDVEINEYHPNADLLTVKDTEQVEERLVSHLLKSNCPVTNQPDWGSVFIDYQGGQIDHAGLLKYIASFREHTDFHEQCVERIFIDIMTRCKPQSLVVYARYVRRGGLDINPYRSTSEIVLGNDRLARQ

SEQ ID NO: 47200 - protein, 272 aa, Marinomonas aquiplantarum
  misc_feature (1)..(272): tr|A0A366CZX7|A0A366CZX7_9GAMM NADPH-dependent 7-cyano- 7-deazaguanine reductase OS=Marinomonas aquiplantarum O X=491951 GN=queF PE=3 SV=1
MGFLPLGQQTEYVSEYDAGLLYPIARVDKWTEMGIASERLPFYGEDIWNAYELSWLDMNGKPVVAMAEFRLPCESPNIIESKSFKLYLNSLNQMRYESRDQVQDILEKDLSAAAGASVSVAIRDLDAMSSLVVLTPDYCIDDLDVTIENYHPNSDLLQLDKEAGQVEERLVSHLLKSNCPVTNQPDWGSVFIDYRGPKIHHESLLKYIISFREHTDFHEQCVERIFIDIMRHFQPEFLTVYARYVRRGGLDINPYRSTQQGLVLGNDRLSRQ

SEQ ID NO: 47201 - protein, 270 aa, Marinomonas balearica
  misc_feature (1)..(270): tr|A0A4R6M670|A0A4R6M670_9GAMM NADPH-dependent 7-cyano- 7-deazaguanine reductase OS=Marinomonas balearica OX=49 1947 GN=queF PE=3 SV=1
MGMLPLGQKTEYVSKYDPSLLFPIPRVDKWAEMGIERNRLPFFGEDIWNAYELSWLNEKGKPVVALGEFRIPHDSPNIIESKSFKLYLNSFNQSTYENIAILQEVIEQDLSKAAGAPVTVMLRDVDSMESLVVLTPDYCIDDIDVEIDTYHPDSSLLTIEHDGIVEERLVSHLLRSNCPVTNQPDWGSIFIDYKGKKIDHASLLKYIVSFREHTDFHEQCVERVFIDIMQQCQPESLIVYARYVRRGGLDINPYRSSSEIVLGNDRLTRQ

SEQ ID NO: 47202 - protein, 270 aa, Marinomonas communis
  misc_feature (1)..(270): tr|A0A4R6X882|A0A4R6X882_9GAMM NADPH-dependent 7-cyano- 7-deazaguanine reductase OS=Marinomonas communis OX=282 54 GN=queF PE=3 SV=1
MGFLPLGQKTEYVSEYDPGLLFPIPRVDKWKDMGIESERLPFHGEDIWNAYELSWLNKKGKPIVATAEFRLPCHSPNIIESKSFKLYLNSLNQMRYEDQFEVQELLEKDLSAAAGADVTVIIRDVEAMEALVVLTPDYCIDDLDVEVNEYHPNADLLTTVEGEQVEERLVSHLLKSNCPVTNQPDWGSVFIDYRGAKIDHAGLLKYVASFREHTDFHEQCVERIFIDIMTKCQPESLIVYARYVRRGGLDINPYRSTDPIVLGNDRLTRQ

SEQ ID NO: 47203 - protein, 271 aa, Marinomonas foliarum
  misc_feature (1)..(271): tr|A0A369A314|A0A369A314_9GAMM NADPH-dependent 7-cyano- 7-deazaguanine reductase OS=Marinomonas foliarum OX=491 950 GN=queF PE=3 SV=1
MGFLPLGQQTEYVSEYDAGLLYPIARVDKWTEMGIESERLPFYGEDVWNAYELSWLNLKGKPIVALAEFRLPCDSPNIIESKSFKLYLNSLNQMRYESPEEVQAILERDLSHAAEAEVTVIIRDVDSMSSLVVLTPDYCIDDLDVDVTEYHPNAGLLAIDDSMGIVEERLVSHLLKSNCPVTNQPDWGSVFIDYKGDKIDHESLLRYVISFREHTDFHEQCVERIFIDIMRHCRPESLTVYARYVRRGGLDINPYRSSAPVVLGNDRLTRQ

SEQ ID NO: 47204 - protein, 270 aa, Marinomonas fungiae
  misc_feature (1)..(270): tr|A0A0K6ILD8|A0A0K6ILD8_9GAMM NADPH-dependent 7-cyano- 7-deazaguanine reductase OS=Marinomonas fungiae OX=1137 284 GN=queF PE=3 SV=1
MGFLPLGQKTDYVSEYDSGLLFPIARVDKWRDMGIESERLPFHGEDIWNAYELSWLNKKGKPIVATAEFRLPCSSPNIIESKSFKLYLNSLNQMRYEDQFEVQGILEADLSAAAGAPVTVIIRDVDAMESLVVLTPDYCIDDLDVEINEYHPNADLLTVKETEQVEERLVSHLLKSNCPVTNQPDWGSVFIDYQGGQIDHAGLLKYIASFREHTDFHEQCVERIFIDIMTRCKPQSLVVYARYVRRGGLDINPYRSTSPIVLGNDRLARQ

SEQ ID NO: 47205 - protein, 271 aa, Marinomonas gallaica
  misc_feature (1)..(271): tr|A0A1C3JUM6|A0A1C3JUM6_9GAMM NADPH-dependent 7-cyano- 7-deazaguanine reductase OS=Marinomonas gallaica OX=180 6667 GN=queF PE=3 SV=1
MGFLPLGQKTDYVSEYDPGLLFPIARVDKWRDMGIESERLPFHGEDIWNAYELSWLNKKGKPIVAMAEFRLPCSSPNIIESKSFKLYLNSLNQMRYDDAFEVQQILEDDLSKVAGAPVGVIIRDVDAMESLVVLTPDYCIDDLDVEVTEYHPNASLLVNKLGGEKVEERLVSHLLKSNCPVTNQPDWGSVFIDYRGKQIDHAALLKYVASFREHTDFHEQCVERIFIDIMTQCKPDSLVVYARYVRRGGLDINPYRSTESIVLGNDRLSRQ

SEQ ID NO: 47206 - protein, 271 aa, Marinomonas hwangdonensis
  misc_feature (1)..(271): tr|A0A3M8Q1V0|A0A3M8Q1V0_9GAMM NADPH-dependent 7-cyano- 7-deazaguanine reductase OS=Marinomonas hwangdonensis O X=1053647 GN=queF PE=3 SV=1
MGFLPLGQQTEYVSEYDAGLLYPIARVDKWAEMGIETERLPFYGEDIWNAYEVSWLNAKGKPIAALAEFRLPCDSPNIIESKSFKLYLNSLNQMRYESVEEVQALLEKDLSDAACAPVTVFIRDVDNMASLVVMTPDYCIDELDIEVSEYHPNADLLTVDASQGVVEERLVSHLLKSNCPVTNQPDWGSVFIEYKGTKICHESLLKYVISFREHTDFHEQCVERMFIDILRQCQPESLTVYARYVRRGGLDINPYRSTMPLVLGNDRLTRQ

SEQ ID NO: 47207 - protein, 270 aa, Marinomonas mediterranea
  misc_feature (1)..(270): tr|F2K3C1|F2K3C1_MARM1 NADPH-dependent 7-cyano-7-deazag uanine reductase OS=Marinomonas mediterranea (strain AT CC 700492 / JCM 21426 / NBRC 103028 / MMB-1) OX=717774 GN=queF PE=3 SV=1
MGVLPLGQKTEYVSTYDASLLFPIPRVDKWGEMGIEEDRLPFFGEDIWNAYELSWLNLKGKPVVALGEFRIPHDSPNIIESKSFKLYLNSFNQMKHEHFASVQAIMERDLSAAAGAPVTVILRDVDSMESLVVLTPDYCIDEIDVDIDTYQPNSELLQREHDGVVEERLVSHLLRSNCPVTNQPDWGSVFIDYKGMKIDHASLLKYIVSFREHTDFHEQCVERIFIDIMQRCQPESLIVYARYVRRGGLDINPYRSSTEIVLGNDRLTRQ

SEQ ID NO: 47208 - protein, 271 aa, Marinomonas polaris
  misc_feature (1)..(271): tr|A0A1M4ZWD3|A0A1M4ZWD3_9GAMM NADPH-dependent 7-cyano- 7-deazaguanine reductase OS=Marinomonas polaris DSM 165 79 OX=1122206 GN=queF PE=3 SV=1
MGFLPLGQQTEYVSEYDAGLLYPIARVDKWTEMAIESERLPFFGEDVWNAYELSWLNLKGKPIVALAEFRLPCDSPNIIESKSFKLYLNSLNQMRYESAEEVQAILEKDLSRAAGAEVTVIIRDVDSMASLVVLTPDYCIDELDVDVSEYQPNAGLLETDETMGVVEERLVSHLLKSNCPVTNQPDWGSVFIDYKGPKIHHESLLKYVISFREHTDFHEQCVERIFIDIMRQCKPESLTVYARYVRRGGLDINPYRSTAPLVLGNDRLTRQ

SEQ ID NO: 47209 - protein, 271 aa, Marinomonas pollencensis
  misc_feature (1)..(271): tr|A0A3E0DRN2|A0A3E0DRN2_9GAMM NADPH-dependent 7-cyano- 7-deazaguanine reductase OS=Marinomonas pollencensis OX =491954 GN=queF PE=3 SV=1
MGFLPLGQQTEYVSEYDAGLLYPIARVDKWAEMDIEAERLPFFGEDIWNAYEVSWLNLKGKPIVALAEFRLPCDSPNIIESKSFKLYLNSLNQMRYESFADVQQLLETDLSNAAGAPVTVMLRDVDSMAALVVLTPDYCIDELDVEIDEYQPNAELLTVDASQGVVEERLVSHLLKSNCPVTNQPDWGSVFIDYKGAKINHQQLLKYVISFREHTDFHEQCVERIYIDIMRYCKPESLTVYARYVRRGGLDINPYRSSAPLVLGNDRLTRQ

SEQ ID NO: 47210 - protein, 272 aa, Marinomonas posidonica
  misc_feature (1)..(272): tr|F6D180|F6D180_MARPP NADPH-dependent 7-cyano-7-deazag uanine reductase OS=Marinomonas posidonica (strain CECT 7376 / NCIMB 14433 / IVIA-Po-181) OX=491952 GN=queF PE =3 SV=1
MGFLPLGQQTEYVSEYDAGLLYPIGRVDKWTDMGIASERLPFYGEDVWNAYELSWLDLKGKPVVAMAEFRLPCESPNIIESKSFKLYLNSLNQMRYESRDQVQEILEKDLSAAAGARVSVVIRELDSMSSLVVLTPDYCIDELEVTIEDYHPNSDLLRVEKEAGQVEERLVSHLLKSNCPVTNQPDWGSVFIDYRGPKIHHESLLKYIVSFREHTDFHEQCVERIFIDIMRHCQPEFLTVYARYVRRGGLDINPYRSTVQGLVLGNDRLTRQ

SEQ ID NO: 47211 - protein, 271 aa, Marinomonas primoryensis
  misc_feature (1)..(271): tr|A0A2Z4PTD7|A0A2Z4PTD7_9GAMM NADPH-dependent 7-cyano- 7-deazaguanine reductase OS=Marinomonas primoryensis OX =178399 GN=queF PE=3 SV=1
MGFLPLGQQTDYVSEYDSGLLYPIARVDKWSEMGIASERLPFYGEDVWNAYELSWLNLKGKPVVALAEFRLPCDSPNIIESKSFKLYLNSLNQMRYDSTEDVQAILEKDLSNAAGADVTVIIRDVDSMASLVVLTPDYCIDELDVDITEYHPNAGLLTLDAFSGVVEERLVSHLLKSNCPVTNQPDWGSVFIDYKGSQIHHESLLKYIVSFREHTDFHEQCVERIFIDIMRECQPESLTIYARYVRRGGLDINPYRSSAPLVLGNDRLTRQ

SEQ ID NO: 47212 - protein, 271 aa, Marinomonas profundimaris
  misc_feature (1)..(271): tr|W1RSZ9|W1RSZ9_9GAMM NADPH-dependent 7-cyano-7-deazag uanine reductase OS=Marinomonas profundimaris OX=120832 1 GN=queF PE=3 SV=1
MGFLPLGQQTEYVSEYDAGLLYPIARVDKWSEMGIASERLPFYGEDVWNAYEMSWLNLKGKPVVALAEFRLPCDSPNIIESKSFKLYLNSLNQMRYDSIEEVQALLEKDLSNAAGADVTVIIRDVDSMASLVVLTPDYCIDELDVDITEYHPNADLLTLDAESGIVEERLVSHLLKSNCPVTNQPDWGSVFIDYKGAKIHHESLLKYVVSFREHTDFHEQCVERIFIDIMRQCQPESLTVYARYVRRGGLDINPYRSSAPLVLGNDRLTRQ

SEQ ID NO: 47213 - protein, 271 aa, Marinomonas rhizomae
  misc_feature (1)..(271): tr|A0A366JE16|A0A366JE16_9GAMM NADPH-dependent 7-cyano- 7-deazaguanine reductase OS=Marinomonas rhizomae OX=491 948 GN=queF PE=3 SV=1
MGFLPLGQQTEYVSEYDAGLLYPIARVDKWTEMAIESERLPFFGEDVWNAYELSWLNLKGKPIVALAEFRLPCDSPNIIESKSFKLYLNSLNQMRYGSAEEVQVILEKDLSSAAGADVTVIIRDVDSMASLVVLTPDYCIDDLDVDVSEYHPNADLLETGELMGVVEERLVSHLLKSNCPVTNQPDWGSVFIDYKGPKIHHESLLKYVISFREHTDFHEQCVERIFIDIMRQCKPESLTVYARYVRRGGLDINPYRSTAPLVLGNDRLTRQ

SEQ ID NO: 47214 - protein, 270 aa, Marinomonas sp.
  misc_feature (1)..(270): tr|A0A370UDQ4|A0A370UDQ4_9GAMM NADPH-dependent 7-cyano- 7-deazaguanine reductase OS=Marinomonas sp. YLB-05 OX=2 213058 GN=queF PE=3 SV=1
MGALPLGQKTDYVSEYDPGLLFPIARLDKWQDMGIESERLPFHGEDIWNAYELSWLNEKGKPIVAMAEFRLPCSSPNIIESKSFKLYLNSLNQMRYKDAYEVQALLEADLSQAAGAPVTVIIRNVDAMESLVVLTPDYCIDELDVVVDEYHPNAQLLTIEEGAVVEERLVSHLLKSNCPVTNQPDWGSIFIDYRGSQISHEGLLKYVASFREHTDFHEQCVERIFIDIMTQCKPESLVVYARYVRRGGLDINPYRSTHEIVLGNDRLTRQ

SEQ ID NO: 47215 - protein, 272 aa, Marinomonas sp.
  misc_feature (1)..(272): tr|A0A166JRQ9|A0A166JRQ9_9GAMM NADPH-dependent 7-cyano- 7-deazaguanine reductase OS=Marinomonas sp. TW1 OX=1561 203 GN=queF PE=3 SV=1
MGFLPLGQQTEYVSEYDAGLLYPIARVDKWTDMGIASERLPFYGEDIWNAYELSWLDTNGKPVVAMAEFRLPCESPNIIESKSFKLYLNSLNQMRYESRDQVQGLLENDLSIAAGASVSVVIRDLDAMASLVVLTPDYCIDDLDVTIEDYHPNSDLLRVDQEAGQVEERLVSHLLKSNCPVTNQPDWGSVFIDYRGPKIHHESLLKYIVSFREHTDFHEQCVERIFIDIMRHCQPEFLTVYARYVRRGGLDINPYRSTEQGLVLGNDRLSRQ

SEQ ID NO: 47216 - protein, 271 aa, Marinomonas spartinae
  misc_feature (1)..(271): tr|A0A1A8TMY8|A0A1A8TMY8_9GAMM NADPH-dependent 7-cyano- 7-deazaguanine reductase OS=Marinomonas spartinae OX=17 92290 GN=queF PE=3 SV=1
MGTLPLGQQTEYVSEYDPGLLYPIARVDKWSEMGVASERLPFYGEDVWNAYEVSWLNSKGKPIVALAEFRFPCNSPNIIESKSFKLYLNSLNQMRYDSQEDVQATLEKDLSNAAGVTVTVVLREVDSMSSLVVLTPDYCIDELDVEIDEYHPKADLLTLDRDAGIVEERLVSHLLKSNCPVTNQPDWGSVFIDYRGPRIDHESLLKYIVSFREHTDFHEQCVERIYIDIMRLCQPESLIVYARYVRRGGLDINPYRSSAPLVLGNDRLTRQ

SEQ ID NO: 47217 - protein, 271 aa, Marinomonas ushuaiensis
  misc_feature (1)..(271): tr|X7E6Q6|X7E6Q6_9GAMM NADPH-dependent 7-cyano-7-deazag uanine reductase OS=Marinomonas ushuaiensis DSM 15871 O X=1122207 GN=queF PE=3 SV=1
MGFLPLGQQTEYVSEYDSGLLYPIARVDKWIEMNIESERLPFYGEDVWNAYELSWLNLKGKPVVALAEFRLPCDSPNIIESKSFKLYLNSLNQMRYDSTEEVQALLERDLSNAAEARVTVVIRDVESMSSLVVLTPDYCIDELDVEIIEYHPNAELLKAGDPSDMAEERLVSHLLKSNCPVTNQPDWGSVFIDYKGPKINHEDLLKYIVSFREHTDFHEQCVERIFIDIMRQCQPESLTVYARYVRRGGLDINPYRSSAPLVLGNDRLARQ

SEQ ID NO: 47218 - protein, 140 aa, Marinoscillum sp.
  misc_feature (1)..(140): tr|A0A2D7TFJ3|A0A2D7TFJ3_9BACT NADPH-dependent 7-cyano- 7-deazaguanine reductase OS=Marinoscillum sp. OX=202483 8 GN=queF PE=3 SV=1
MKLKSNIIDPYLGQEAEGKKFKFESVDKIEVKELKVFLFDNKEECIKITSKEFIAVCPFSGLPDIARLKIEYYPEGGLAIELKSLKYYLVSFKNVGIYQEEVTSRIFKDLKKILKTQKIRVTTKYNVRGGLHTTCKVGKI

SEQ ID NO: 47219 - protein, 266 aa, Marinospirillum alkaliphilum
  misc_feature (1)..(266): tr|A0A1K1YMI4|A0A1K1YMI4_9GAMM NADPH-dependent 7-cyano- 7-deazaguanine reductase OS=Marinospirillum alkaliphilu m DSM 21637 OX=1122209 GN=queF PE=3 SV=1
MSVSAAVENSPLGQSTPYTNRYDPGLLYPIPRSGSRQDFYGVDIWNAYEVSWLNARGKPQVRLAEFRVPADSANIIESKSFKLYLNSFNLTRFDDQQTVVQQLEQDLSAAAGASVAVKLHAVDVGLQPQPLNGECLDELDIDIQHYLPEPALLSADPKQLVSETLVSHLLKSNCPVTGQPDWASIQISYRGPQMDRAGLLAYLVSYREKGDFHEACVEQIHRDLMQRCHPDYLSVYARYVRRGGLDINPFRCSEPVEVNNCRLLRQ

SEQ ID NO: 47220 - protein, 274 aa, Marinospirillum celere
  misc_feature (1)..(274): tr|A0A1I1DTI4|A0A1I1DTI4_9GAMM NADPH-dependent 7-cyano- 7-deazaguanine reductase OS=Marinospirillum celere OX=1 122252 GN=queF PE=3 SV=1
MHSPRVETSPLGKETQYINQYTSEVLYPLPRQQGRSSLGLSAGKLPFQGVDIWNAYELSWLNSKGKPLVRLAEFHFPATSSHIIESKSFKLYLNSFNLTRFASEEEVLARLTQDLSQASGSEVQVILHPADYGLPVRPLEGECLDDLDIEVNHYTPAPELLKVTSDEVVEETLVSHLLKSNCPVTGQPDWASVQIHYKGPKIDPESLLAYLISYREKGDFHEHCVEEIFVDLLRLCQCQQLTVYARYLRRGGLDINPWRSTLSVEPPNPRQARQ

SEQ ID NO: 47221 - protein, 154 aa, Marinovum algicola
  misc_feature (1)..(154): tr|A0A0H4LFI2|A0A0H4LFI2_9RHOB NADPH-dependent 7-cyano- 7-deazaguanine reductase OS=Marinovum algicola DG 898 O X=988812 GN=queF PE=3 SV=1
MSENIYSDLKQLGGETRIPASPEEAELERVPNPQADVAYNVRFTAPEFTSLCPMTGQPDFAHLVIDYVPGAWLVESKSLKLFLTSFRNQGAFHEDCTISIARRLVDFLEPQWLRIGGYWYPRGGIPIDVFWQTAPRPEGLWLPDQGVPPYRGRG

SEQ ID NO: 47222 - protein, 155 aa, Marinovum sp.
  misc_feature (1)..(155): tr|A0A2D7ZBJ5|A0A2D7ZBJ5_9RHOB NADPH-dependent 7-cyano- 7-deazaguanine reductase OS=Marinovum sp. OX=2024839 GN =queF PE=3 SV=1
MSDPNIYKDLTLLGGETNLPNNPDEAILERVPNPQKDVNYCVRFTAPEFTSLCPLTGQPDFAHLVIDYVPKDWLVESKSLKLYLGAFRNHGAFHEDCTISIARKITDLLEPEWLRIGGYWFPRGGIPIDIFYQTGNGPKGVWIPDQNVPTYRGRG

SEQ ID NO: 47223 - protein, 154 aa, Marinovum sp.
  misc_feature (1)..(154): tr|A0A2E7WGB5|A0A2E7WGB5_9RHOB NADPH-dependent 7-cyano- 7-deazaguanine reductase OS=Marinovum sp. OX=2024839 GN =queF PE=3 SV=1
MSSNIYENLQQLGGQTALPDSPETAVLERVENPQAGTPYAVRFTAPEFTSLCPMTGQPDFAHLVIDYVPDAWLVESKSLKLYLGAFRNHGAFHEDCTVSIGKRLVDFLSPQWLRIGGYWYPRGGIPIDVFYQTGPTPQDCWIPDQGVPTYRGRG

SEQ ID NO: 47224 - protein, 124 aa, Mariprofundus aestuarium
  misc_feature (1)..(124): tr|A0A2K8KVW4|A0A2K8KVW4_9PROT NADPH-dependent 7-cyano- 7-deazaguanine reductase OS=Mariprofundus aestuarium OX =1921086 GN=queF PE=3 SV=1
MTEKLGTVINKPTRYLETFENPNPERDYHVRIDSPEFTCLCPKTGQPDFAEIKLDYIPDQSCVELKSLKFYYWSFRDEGHFHEKVTNMIANDLIELLDPRYIKVQAIFNVRGGVYTTVEVEHRK

SEQ ID NO: 47225 - protein, 124 aa, Mariprofundus ferrinatatus
  misc_feature (1)..(124): tr|A0A2K8L5H5|A0A2K8L5H5_9PROT NADPH-dependent 7-cyano- 7-deazaguanine reductase OS=Mariprofundus ferrinatatus OX=1921087 GN=queF PE=3 SV=1
MSEKLGAVINKPTRYLETFENPNPERDYHVRIDSPEFTCLCPKTGQPDFAEIKLDYVPDQLCVELKSLKLYYWSFRDEGHFHEKVTNMIANDLIGLLDPRYIKVQAVFNVRGGVYTTVEVEHRK

SEQ ID NO: 47226 - protein, 124 aa, Mariprofundus ferrooxydans
  misc_feature (1)..(124): tr|Q0EYR8|Q0EYR8_9PROT NADPH-dependent 7-cyano-7-deazag uanine reductase OS=Mariprofundus ferrooxydans PV-1 OX= 314345 GN=queF PE=3 SV=1
MSDKLGAIINRPGKFLETFENPNPERDYHIRIDSPEFTCLCPKTGQPDFAEIKLDYVPDQLCVELKSLKLYYWSFRDEGHFHEQVTNMIANDLIALLDPRQIKVTAVFNVRGGVYTTVEVEHSK

SEQ ID NO: 47227 - protein, 124 aa, Mariprofundus micogutta
  misc_feature (1)..(124): tr|A0A1L8CPX2|A0A1L8CPX2_9PROT NADPH-dependent 7-cyano- 7-deazaguanine reductase OS=Mariprofundus micogutta OX= 1921010 GN=queF PE=3 SV=1
MSEKLGAVLNKPTRYLETFENPNPERDYHIRIDSPEFTCLCPKTGQPDFAEIKLDYIPDAVCVELKSLKLYYWSFRDEGHFHEQVTNMIANDLIKLLDPRQIKVTAVFNVRGGVYTTVEVEHSK

SEQ ID NO: 47228 - protein, 129 aa, Mariprofundus sp.
  misc_feature (1)..(129): tr|A0A498DEZ2|A0A498DEZ2_9PROT NADPH-dependent 7-cyano- 7-deazaguanine reductase OS=Mariprofundus sp. EBB-1 OX= 2650971 GN=queF PE=3 SV=1
MTGSTNNEALGAQMNYPEKELEVFDNPNPERDYHIRIDSPEFTCLCPKTGQPDFAEIKLDYVPDQCCVELKSLKLYYWSFRDEGHFHEKVTNMIADDLIKLLDPRYLKVQAVFNVRGGVYTTVEVEHKK

SEQ ID NO: 47229 - protein, 283 aa, Marisediminitalea aggregata
  misc_feature (1)..(283): tr|A0A1M5GW30|A0A1M5GW30_9ALTE NADPH-dependent 7-cyano- 7-deazaguanine reductase OS=Marisediminitalea aggregata OX=634436 GN=queF PE=3 SV=1
MTELSKQKKELSLPTHLTLGQSVDYIEQYTPDLLQSVPRSLSRDQIGVTAPLPFEGVDIWNGYELSWLNAKGKPLVAILQCRVPVTSANLIESKSFKLYLNSFNQTKFNSREDVSACLEKDLSACADAPVAVTLFGPEQFDDLPVKNLTGTCIDELDIDVTQYSPAPSLLNSDTSQHAEETLVSHLLKSNCLITSQPDWASIQIRYQGPKIDHEGLLAYLISFRQHNEFHEQCIERIYCDLMARCKPLKLAVYARYTRRGGLDINPLRSNYTVDIENDRQARQ

SEQ ID NO: 47230 - protein, 154 aa, Maritalea myrionectae
  misc_feature (1)..(154): tr|A0A2R4MHZ5|A0A2R4MHZ5_9RHIZ NADPH-dependent 7-cyano- 7-deazaguanine reductase OS=Maritalea myrionectae OX=45 4601 GN=queF PE=3 SV=1
MTENIYANLKQLGGETRIPASPEEAELERVPNPQADVTYNVRFTAPEFTSLCPMTGQPDFAHLVIDYAPGAWLVESKSLKLFLTSFRNHGAFHEDCTISIARRLVDFLEPQWLRIGGYWYPRGGIPIDVFWQSGPVPEQLWLPDQGVPPYRGRG

SEQ ID NO: 47231 - protein, 155 aa, Maritimibacter sp.
  misc_feature (1)..(155): tr|A0A2U2CLB7|A0A2U2CLB7_9RHOB NADPH-dependent 7-cyano- 7-deazaguanine reductase OS=Maritimibacter sp. 55A14 OX =2174844 GN=queF PE=3 SV=1
MAREDIYADLTQLGAKTELPASPDEAVLERVPNPQAGTAYTVRFTAPEFTSLCPLTGQPDFAHLVIDYIPGDWLVESKSLKLYLGSFRNHGAFHEDCTVSIGKRLAETLAPQWLRIGGYWYPRGGIPIDVFYQTGPAPDGVWIPETGVAPYRGRG

SEQ ID NO: 47232 - protein, 154 aa, Maritimibacter sp.
  misc_feature (1)..(154): tr|A0A2D9YVX3|A0A2D9YVX3_9RHOB NADPH-dependent 7-cyano- 7-deazaguanine reductase OS=Maritimibacter sp. OX=20033 63 GN=queF PE=3 SV=1
MAKTDVSGLSQLGAHTALPASPSEAVLERVPFGSKGQGAAVRFTAPEFTSLCPMTGQPDFAHIVIDYIPGDWLVESKSLKLFLHSFRNHGAFHEDCTMEIASRLVELLSPEWLRIGAYWYPRGGIPIDVFWQTGPAPEGAWIPDQGVPTYRGRG

SEQ ID NO: 47233 - protein, 154 aa, Marivivens niveibacter
  misc_feature (1)..(154): tr|A0A251WXW5|A0A251WXW5_9RHOB NADPH-dependent 7-cyano- 7-deazaguanine reductase OS=Marivivens niveibacter OX=1 930667 GN=queF PE=3 SV=1
MTDSIYSNLQQLGGATVVPQSPEEAVLERVQNPQADIEYNVRFTAPEFTSLCPMTGQPDFAHLCIDYVPSEWLVESKSLKLFLGSFRNHGAFHEDCTISIARRLVEFLDPKWLRIGGYWYPRGGIPIDVFWQTGEMPAGVWIPDQGVPPYRGRG

SEQ ID NO: 47234 - protein, 154 aa, Martelella endophytica
  misc_feature (1)..(154): tr|A0A0D5LQC8|A0A0D5LQC8_9RHIZ NADPH-dependent 7-cyano- 7-deazaguanine reductase OS=Martelella endophytica OX=1 486262 GN=queF PE=3 SV=1
MVKTDVSGLSQLGHAVDAPSSPEEAVMEKVPFSQAGTDFVVRFTAPEFTSLCPMTGQPDFAHIVIDYIPGEWLVESKSLKLFLHSFRNHGAFHEDCSIYIAKRIVELTEPKWLRIGAYWYPRGGIPIDVFWQTGAPPEGVWLPDQGVAPYRGRG

SEQ ID NO: 47235 - protein, 154 aa, Martelella mediterranea
  misc_feature (1)..(154): tr|A0A2T0JBQ3|A0A2T0JBQ3_9RHIZ NADPH-dependent 7-cyano- 7-deazaguanine reductase OS=Martelella mediterranea OX= 293089 GN=queF PE=3 SV=1
MVKTDVSGLSQLGQAVDAPSSPEEAKLEKVPFSEAGTDFVVRFTAPEFTSLCPMTGQPDFAHIVIDYIPGEWLVESKSLKLFLHSFRNHGAFHEDCSIYIAKRIVALLEPKWLRIGAYWYPRGGIPIDVFWQTGAPPEGVWLPDQGVAPYRGRG

SEQ ID NO: 47236 - protein, 154 aa, Martelella sp.
  misc_feature (1)..(154): tr|A0A506UFP5|A0A506UFP5_9RHIZ NADPH-dependent 7-cyano- 7-deazaguanine reductase OS=Martelella sp. BGMRC2036 OX =2590451 GN=queF PE=3 SV=1
MVKTDVSGLSQLGHAVEAPANPEDAVMEKVPFSQAGTDFVVRFTAPEFTSLCPMTGQPDFAHIVIDYIPGEWLVESKSLKLFLASFRNHGAFHEDCSIYIAKRIVELLDPKWLRIGAYWYPRGGIPIDVFWQTGTPPEGVCLPDQGVQPYRGRG

SEQ ID NO: 47237 - protein, 277 aa, Massilia albidiflava
  misc_feature (1)..(277): tr|A0A411X4H6|A0A411X4H6_9BURK NADPH-dependent 7-cyano- 7-deazaguanine reductase OS=Massilia albidiflava OX=321 983 GN=queF PE=3 SV=1
MSNSPEHSPLGKNSAYRTDYAPELLFPIPRIGKRDELGLTGTLPFFGVDIWNAYELSWLNMRGKPQVAVARITVPADSPNIIESKSFKLYLNSFNQTRLGGPEALRDLLQQDLSAATGANVHVVLTMQEDFGKLQMGELEGLLLDRLDIEVDNYSPQPSILKANFEELPVEEVLVSHLLKSNCLVTGQPDWGSVQISYSGPQIDQESLLKYLIGFREHNEFHEQCVERIFVDILRECQPAHLTVYARYTRRGGLDINPWRSNFTKGGRPSNLRNARQ

SEQ ID NO: 47238 - protein, 277 aa, Massilia armeniaca
  misc_feature (1)..(277): tr|A0A2R4CGH4|A0A2R4CGH4_9BURK NADPH-dependent 7-cyano- 7-deazaguanine reductase OS=Massilia armeniaca OX=20725 90 GN=queF PE=3 SV=1
MTNTADQSPLGKNSAYRTDYAPELLFPIPRQGKRDELGLSGTLPFFGVDIWNAYELSWLNMRGKPQIAVARITVPADSPNIIESKSFKLYLNSFNQTRLGGPDALRDLLQQDLSAAAGANVHVVLTLQEDFGTLQMGELDGVLLDRLDIEVDNYAPQPEVLKANFDELPVEETLVSHLLKSNCLVTGQPDWGSVQITYAGPQIDQESLLKYLIGFREHNEFHEQCVERIFTDILRQCRPQHLSVYARYTRRGGLDINPWRTNYSKGGRPSNLRNARQ

SEQ ID NO: 47239 - protein, 275 aa, Massilia aurea
  misc_feature (1)..(275): tr|A0A422QMS1|A0A422QMS1_9BURK NADPH-dependent 7-cyano- 7-deazaguanine reductase OS=Massilia aurea OX=373040 GN =queF PE=3 SV=1
MNTPDQSPLGKSSAYQSQYAPELLFPIPRQQKREELGLSGTLPFFGVDIWNAYELSWLNMRGKPQVAIATVTAPADSPNIIESKSFKLYLNSFNQTRLAGPEALLALLRDDLSNGFGAPVHVTLTSPEQFGGIKMGELEGTLLDRLDIEIDAYSPAPQLLKANHEDAPVEETLVSHLLKSNCLVTGQPDWGTVQIRYVGPQIDQEGLLKYLIGFREHNEFHEQCVERIFMDVLRQCQPSKLAVYARYTRRGGLDINPWRANFSTGKPGNLRGARQ

SEQ ID NO: 47240 - protein, 276 aa, Massilia eurypsychrophila
  misc_feature (1)..(276): tr|A0A2G8TER7|A0A2G8TER7_9BURK NADPH-dependent 7-cyano- 7-deazaguanine reductase OS=Massilia eurypsychrophila O X=1485217 GN=queF PE=3 SV=1
MTTTADQSPLGKTSAYQTHYAPDLLFPIPRQGKRDELQLTGTLPFFGVDIWNAYEVSWLNMRGKPQVAIATITAPADSPNIVESKSFKLYLNSFNQTRLANEEALLALLREDLATGFGAPVQVALTLPENFPTLKMGELDGVLLDRLDLEVDQYSPAPALLSANHHEAPVEEKLVSHLLKSNCLVTGQPDWASVQIHYVGPQIEQEGLLRYLIGFREHNEFHEQCVERIFVDIMRECRPQKLAVYARYTRRGGLDINPWRTNFTSGRPPNLRNARQ

SEQ ID NO: 47241 - protein, 277 aa, Massilia flava
  misc_feature (1)..(277): tr|A0A562PM82|A0A562PM82_9BURK NADPH-dependent 7-cyano- 7-deazaguanine reductase OS=Massilia flava OX=871742 GN =queF PE=3 SV=1
MSNSPEHSPLGKNSAYRTDYAPELLFPIPRQGKRDELGLAGTLPFFGVDIWNAYELSWLNMRGKPQVAVARITVPADSPNIVESKSFKLYLNSFNQTRLGGPEALRELLQQDLSAAVGANVQVTLTLQEEFGKLQMGELDGLLLDRLDIEVDNYSPQPSILKANFDELPVEETLVSHLLKSNCLVTGQPDWGSVQISYAGPQIDQESLLKYLIGFREHNEFHEQCVERIFVDILRECKPSHLTVYARYTRRGGLDINPWRSNFTKAGRPSNLRNARQ

SEQ ID NO: 47242 - protein, 276 aa, Massilia glaciei
  misc_feature (1)..(276): tr|A0A2U2I4X0|A0A2U2I4X0_9BURK NADPH-dependent 7-cyano- 7-deazaguanine reductase OS=Massilia glaciei OX=1524097 GN=queF PE=3 SV=1
MSNTPDLSPLGKTSAYQTSYAPGLLFPIARQAKRDELQLTGTMPFFGVDIWNAYELSWLNLRGKPQVAIATVTAPAESPNIIESKSFKLYLNSFNQTRLAGPDALLALLKADLAKGFGAPVHVALTLQDAFGTLKMGELDGLLLDRLDVEIDRYTPSPALLRAGRAGAPVDETLVSHLLKSNCLVTGQPDWASVQVRYVGPQIEQEGLLKYLIGFREHNEFHEQCVERIFMDIWRQCAPQKLAVYARYTRRGGLDINPWRSNFSGAPPSNLRTARQ

SEQ ID NO: 47243 - protein, 277 aa, Massilia lurida
  misc_feature (1)..(277): tr|A0A562QWN5|A0A562QWN5_9BURK NADPH-dependent 7-cyano- 7-deazaguanine reductase OS=Massilia lurida OX=1036180 GN=queF PE=3 SV=1
MSNSPEQSPLGKNSAYRTDYAPELLFPIARQGKRDELGLSGTLPFFGVDIWNAYELSWLNLRGKPQVAVARIAVPADSPNIIESKSFKLYLNSFNQTRLGDPDALRERLQRDLSAAAGSTVHVTLTLQEDFGKLKMGELDGVLLDRLDVEIDDYSPQPSILKANFDENPVEETFVSHLLKSNCLVTGQPDWGSVQIDYAGPQIDQESLLKYLIGFREHNEFHEQCVERIFTDILRECRPQHLTVYARYTRRGGLDINPWRSNFTRAGQPSNLRNARQ

SEQ ID NO: 47244 - protein, 277 aa, Massilia lutea
  misc_feature (1)..(277): tr|A0A4P6KWJ6|A0A4P6KWJ6_9BURK NADPH-dependent 7-cyano- 7-deazaguanine reductase OS=Massilia lutea OX=321985 GN =queF PE=3 SV=1
MSNSPEHSPLGKNSAYRTDYAPELLFPIPRIGKRDELGLTGTLPFFGVDIWNAYELSWLNMRGKPQVAVARITVPADSPNIIESKSFKLYLNSFNQTRLGGPEALRELLQQDLSAATGATVHVALTMQEEFGKLQMGELDGLLLDRLDIEIDNYSPQPSILKAAVDELPVEETLVSHLLKSNCLVTGQPDWGSVQISYAGPQIDQESLLKYLIGFREHNEFHEQCVERIFVDILRECRPAHLTVYARYTRRGGLDINPWRSNFTKAGSPSNLRNARQ

SEQ ID NO: 47245 - protein, 291 aa, Massilia namucuonensis
  misc_feature (1)..(291): tr|A0A1I7KCY3|A0A1I7KCY3_9BURK NADPH-dependent 7-cyano- 7-deazaguanine reductase OS=Massilia namucuonensis OX=1 035707 GN=queF PE=3 SV=1
MRYHASFAPRFDAAMTNTADLSPLGKNSAYRTDYAPELLFPIPRQGKRDELGLTGTLPFFGVDIWNAYELSWLNMRGKPQIAVARVTVPADSPNIVESKSFKLYLNSFNQTRLANADALKSLLIQDLSAAVGANVHVAITPQEEFGTLAMGELDGLLLDRLDIEVDSYAPQPHILKANLDDLPVQETFVSHLLKSNCLVTGQPDWGSVQIHYAGPQIDQESLLKYLIGFREHNEFHEQCVERIFVDILRQCQPQQLSVYARYTRRGGLDINPWRSNYSTGQKPSNLRNARQ

SEQ ID NO: 47246 - protein, 275 aa, Massilia oculi
  misc_feature (1)..(275): tr|A0A2S2DI10|A0A2S2DI10_9BURK NADPH-dependent 7-cyano- 7-deazaguanine reductase OS=Massilia oculi OX=945844 GN =queF PE=3 SV=1
MNTPDQSPLGKSSAYQSQYAPELLFPIPRQQKRDELGLSGSLPFFGVDIWNAYELSWLNMRGKPQVAIATVTAPADSPNIIESKSFKLYLNSFNQTRLAGPEALLALLRDDLSNGFGAPVHVTLTSPEEFGAIRMGELEGTLLDRLDIEVDAYSPAPQLLKANHEEAPVEETLVSHLLKSNCLVTGQPDWGTVQIRYVGPQIDQEGLLKYLIGFREHNEFHEQCVERIFMDVLRQCQPSKLAVYARYTRRGGLDINPWRANFTTGKPGNLRGARQ

SEQ ID NO: 47247 - protein, 276 aa, Massilia phosphatilytica
  misc_feature (1)..(276): tr|A0A2S8H288|A0A2S8H288_9BURK NADPH-dependent 7-cyano- 7-deazaguanine reductase OS=Massilia phosphatilytica OX =2026176 GN=queF PE=3 SV=1
MTNTPEQSPLGKNSAYQTEYAPELLFPIARQQKRDELGLSGTLPFFGVDIWNAYELSWLNMRGKPQVAIATFTVPADSPNIVESKSFKLYLNSFNQTRLANTDALLALLREDLSNAVGAPVHATLTLPEDFDKLKMGELDGLLLDRLDVEIDNYSPSPELLKANHEEAAVEETLVSHLLKSNCLVTGQPDWGSVQIRYVGPQIDQESLLRYLIGFREHNEFHEQCVERIFTDILRQCKPSKLAVYARYTRRGGLDINPWRANFSTAKPPNLRAARQ

SEQ ID NO: 47248 - protein, 277 aa, Massilia plicata
  misc_feature (1)..(277): tr|A0A4P7BGW9|A0A4P7BGW9_9BURK NADPH-dependent 7-cyano- 7-deazaguanine reductase OS=Massilia plicata OX=321984 GN=queF PE=3 SV=1
MTNSADQSPLGKTSAYRTDYAPELLFPIPRVGKRDELGLTGTLPFFGVDIWNAYELSWLNMRGKPQVAIARITVPADSPNIIESKSFKLYLNSFNQTRLGGPEALRELLQQDLSAAAGANVHVVLTMQEDFGKLQMGELDGVLLDRLDIEVDKYAPQPELLKASFDELPVEETLVSHLLKSNCLVTGQPDWGSVQITYAGPQIDQESLLKYLIGFREHNEFHEQCVERIFVDILRQCQPQQLTVYARYTRRGGLDINPWRTNYTSGGKPSNLRNARQ

SEQ ID NO: 47249 - protein, 276 aa, Massilia psychrophila
  misc_feature (1)..(276): tr|A0A2G8SWA8|A0A2G8SWA8_9BURK NADPH-dependent 7-cyano- 7-deazaguanine reductase OS=Massilia psychrophila OX=16 03353 GN=queF PE=3 SV=1
MTTTADQSPLGKTSAYQTQYAPELLFPIPRQGKRDELQLTNTLPFFGVDIWNAYELSWLNMRGKPQVAIATIMAPADSPNIIESKSFKLYLNSFNQTRLANDEALLSLLREDLSNGFGAPVQVALTLQQNFSTLKMGELDGLLLDRLDLDVDLYTPSPALLSASVDAAPVEEKLVSHLLKSNCLVTGQPDWASVQIHYVGPQIDQEGLLRYLIGFREHNEFHEQCVERIFVDILRQCTPQKLAVYARYTRRGGLDINPWRTNFTSARPPNVRNARQ

SEQ ID NO: 47250 - protein, 276 aa, Massilia sp.
  misc_feature (1)..(276): tr|A0A0Q5H1D4|A0A0Q5H1D4_9BURK NADPH-dependent 7-cyano- 7-deazaguanine reductase OS=Massilia sp. Leaf139 OX=173 6272 GN=queF PE=3 SV=1
MNNTPDQSPLGKSSAYQTEYAPELLFPIPRQQKREELAISGTLPFFGLDIWNAYELSWLNMRGKPQVAIATISAPADSPNIVESKSFKLYLNSFNQTRVAGVDALKSLLREDLSNAFGAPVHITITEPEGFGQLKMGELEGLSIDRLDIEVNAYSPAPHLLTANFDEAPVEETLVSNLLKSNCLVTGQPDWGSVQIEYVGPQIDQEGLLRYLIGFREHNEFHEQCVERIFIDILRQCKPSKLAVYARYTRRGGLDINPWRANFSTGRPHNLRGARQ

SEQ ID NO: 47251 - protein, 277 aa, Massilia sp.
  misc_feature (1)..(277): tr|A0A344JL56|A0A344JL56_9BURK NADPH-dependent 7-cyano- 7-deazaguanine reductase OS=Massilia sp. YMA4 OX=159348 2 GN=queF PE=3 SV=1
MTNTADQSPLGKNSAYRTDYAPELLFPIPRQGKRDELGLTGTLPFFGVDIWNAYELSWLNMRGKPQVAVARITVPADSPNIIESKSFKLYLNSFNQTRLGGPDALRDLLQQDLSAAAGANVHVVLTLQEDFGTLQMGELDGLLLDRLDIEVDNYSPQPEVLKANFDELPVEETLVSHLLKSNCLVTGQPDWGSVQITYAGPQIDQESLLKYLIGFREHNEFHEQCVERIFTDILRQCRPQHLSVYARYTRRGGLDINPWRTNYSKGGRPSNLRNARQ

SEQ ID NO: 47252 - protein, 275 aa, Massilia timonae
  misc_feature (1)..(275): tr|A0A1S2NFZ0|A0A1S2NFZ0_9BURK NADPH-dependent 7-cyano- 7-deazaguanine reductase OS=Massilia timonae OX=47229 G N=queF PE=3 SV=1
MNTPDQSPLGKSSAYQSQYAPELLFPIPRQQKREELGLSGTLPFFGVDIWNAYELSWLNMRGKPQVAIATVTAPADSPNIVESKSFKLYLNSFNQTRLAGPEALLALLRDDLSNGFGAPVHVTLTHPDQFGKIGMGELEGTLLDRLDIEVDDYSPAPQLLKANHEEAPVEETLVSHLLKSNCLVTGQPDWGTVQIRYVGSQIDQEGLLKYLIGFREHNEFHEQCVERIFMDVLRQCQPSKLAVYARYTRRGGLDINPWRANFSSGKPGNLRGARQ

SEQ ID NO: 47253 - protein, 275 aa, Massilia timonae
  misc_feature (1)..(275): tr|K9DZV4|K9DZV4_9BURK NADPH-dependent 7-cyano-7-deazag uanine reductase OS=Massilia timonae CCUG 45783 OX=8831 26 GN=queF PE=3 SV=1
MNTPDQSPLGKSSAYQSQYAPELLFPIPRQQKREELGLSGTLPFFGVDIWNAYELSWLNMRGKPQVAIATVTAPADSPNIVESKSFKLYLNSFNQTRLAGPEALLALLRDDLSNGFGAPVHVTLTHPEQFGKIGMGELEGTLLDRLDIEVDDYSPAPQLLKANHEEAPVEETLVSHLLKSNCLVTGQPDWGTVQIRYVGPQINQEGLLKYLIGFREHNEFHEQCVERIFMDVLRQCQPSKLAVYARYTRRGGLDINPWRANFSTGKPGNLRGARQ

SEQ ID NO: 47254 - protein, 277 aa, Massilia umbonata
  misc_feature (1)..(277): tr|A0A4P8HSY6|A0A4P8HSY6_9BURK NADPH-dependent 7-cyano- 7-deazaguanine reductase OS=Massilia umbonata OX=864828 GN=queF PE=3 SV=1
MSNSPEHSPLGKNSAYRTDYAPELLFPIPRIGKRDELGLTGTLPFFGVDIWNAYELSWLNMRGKPQVAVARITVPADSPNIVESKSFKLYLNSFNQTRLGGPEALRDLLQQDLSAATGANVHVVLTMQEDFATLKMGELDGLLLDRLDIEVDHYSPQPSILKANFDELPVEETLVSHLLKSNCLVTGQPDWGSVQISYSGPQIDQESLLKYLIGFREHNEFHEQCVERIFVDILRACKPAHLTVYARYTRRGGLDINPWRSNFTKAGRPSNLRNARQ

SEQ ID NO: 47255 - protein, 276 aa, Massilia violaceinigra
  misc_feature (1)..(276): tr|A0A2D2DG37|A0A2D2DG37_9BURK NADPH-dependent 7-cyano- 7-deazaguanine reductase OS=Massilia violaceinigra OX=2 045208 GN=queF PE=3 SV=1
MTNTADLSPLGKTSAYQTQYAPDLLFPIPRQGKRDELQLTGTLPFFGVDIWNAYEISWLNMRGKPQVAIATITVPADSPNIVESKSFKLYLNSFNQTRLSNSDALLALLREDLAGGFGAPVHITLIEPHAFDTVKMGELDGMLLDRLDVEIDNYSPSPALLTAAADGAPVEEKLVSHLLKSNCLVTGQPDWASVQIHYVGPQIEQGGLLKYLIGFREHNEFHEQCVERIFTDILRQCAPQKLAVYARYTRRGGLDINPWRSNFSSGRPPNLRTARQ

SEQ ID NO: 47256 - protein, 278 aa, Massilia yuzhufengensis
  misc_feature (1)..(278): tr|A0A1I1NTB9|A0A1I1NTB9_9BURK NADPH-dependent 7-cyano- 7-deazaguanine reductase OS=Massilia yuzhufengensis OX= 1164594 GN=queF PE=3 SV=1
MTTPDQSPLGKSSAYQSQYAPELLFPIPRAQKREELGLTADSGTMPFFGVDIWNAYELSWLNMRGKPQVAIATITAPSDSPNIVESKSFKLYLNSFNQTRVAGTDALVELLRQDLSAAFGSPVHVSITTPDAFGSLKMGELEGTLLDRLDVEIDQYLPSPHLLTADHDASPVEETLVSHLLKSNCLVTGQPDWGTVQIRYVGPQIEQEGLLKYLIGFREHNEFHEQCVERIFMDVLRQCKPTKLAVYARYTRRGGLDINPWRANFSTGKPGNLRTARQ

SEQ ID NO: 47257 - protein, 140 aa, Mastigocladus laminosus
  misc_feature (1)..(140): tr|A0A4D9CPV0|A0A4D9CPV0_MASLA NADPH-dependent 7-cyano- 7-deazaguanine reductase OS=Mastigocladus laminosus UU7 74 OX=1594576 GN=queF PE=3 SV=1
MSNSLSESVSQPSQEIKYGEREIAEGQLITFPNPRIGRRYNIDITLPEFTCKCPFSGYPDFATIHITYIPDQLVVELKALKLYINSYRDRYISHEESANQILDDFVAACDPLEITLKADFAPRGNVHTVIEVHHVKSEGQ

SEQ ID NO: 47258 - protein, 139 aa, Mastigocoleus testarum
  misc_feature (1)..(139): tr|A0A0V7ZLX1|A0A0V7ZLX1_9CYAN NADPH-dependent 7-cyano- 7-deazaguanine reductase OS=Mastigocoleus testarum BC00 8 OX=371196 GN=queF PE=3 SV=1
MSDSSTESTNFPIAEMKYGEREIAEGKLITFPNPRIGRRYNIDISLPEFTCKCPFSGYPDFATIYINYVPDEKVVELKALKLYINSYRDRYISHEESANQILDDFVSACDPLEITVKADFSPRGNVHTVVEVTHQKSNK

SEQ ID NO: 47259 - protein, 155 aa, Mediterranea sp.
  misc_feature (1)..(155): tr|A0A1Y4HI45|A0A1Y4HI45_9BACT NADPH-dependent 7-cyano- 7-deazaguanine reductase OS=Mediterranea sp. An20 OX=19 65586 GN=queF PE=3 SV=1
MEELRAQLNALGKKTEYRQDYAPEVLEAFTNKHPENDYWVRFNCPEFTSLCPITGQPDFAEIRISYIPDVKMVESKSLKLYLFSFRNHGAFHEDCVNIIMKDLIRLMDPKYIEVTGFFTPRGGISIYPYANYGRPGTKYERLAEERLFRHDSKQE

SEQ ID NO: 47260 - protein, 164 aa, Megamonas funiformis
  misc_feature (1)..(164): tr|H3KB74|H3KB74_9FIRM NADPH-dependent 7-cyano-7-deazag uanine reductase OS=Megamonas funiformis YIT 11815 OX=7 42816 GN=queF PE=3 SV=1
MRTSEETKDITLLGQKNVKYEFNYRPDVLETFDNKHPDHDYWVKFNCPEFTTLCPITGQPDFGTIYISYIPDEKMVESKSLKLYLFSFRNNGDFHEDVVNIIMKDLIKLMNPKYIEVWGKFLPRGGISIDPYTNYGRPDTKYEQLAQTRFVNHDLYSLDKVDNR

SEQ ID NO: 47261 - protein, 164 aa, Megamonas hypermegale
  misc_feature (1)..(164): tr|A0A239U0V9|A0A239U0V9_9FIRM NADPH-dependent 7-cyano- 7-deazaguanine reductase OS=Megamonas hypermegale OX=15 8847 GN=queF PE=3 SV=1
MRTKEEVQDITLLGQKNVKYDFDYRPDVLETFDNKHPDHDYWVKFNCPEFTTLCPITGQPDFGTIYISYVPDIKMVESKSLKLYLFSFRNHGDFHEDVVNIIMKDLIKLMNPKYIEVWGKFLPRGGISIDPYTNYGRPNTKYESLAQKRFETHDLYSLEKIDNR

SEQ ID NO: 47262 - protein, 164 aa, Megamonas hypermegale; identical to SEQ ID NO: 47260
  misc_feature (1)..(164): tr|A0A378NNL1|A0A378NNL1_9FIRM NADPH-dependent 7-cyano- 7-deazaguanine reductase OS=Megamonas hypermegale OX=15 8847 GN=queF PE=3 SV=1

SEQ ID NO: 47263 - protein, 164 aa, Megamonas rupellensis; identical to SEQ ID NO: 47260
  misc_feature (1)..(164): tr|A0A411ZJX1|A0A411ZJX1_9FIRM NADPH-dependent 7-cyano- 7-deazaguanine reductase OS=Megamonas rupellensis OX=49 1921 GN=queF PE=3 SV=1

SEQ ID NO: 47264 - protein, 164 aa, Megamonas rupellensis
  misc_feature (1)..(164): tr|A0A412CBV4|A0A412CBV4_9FIRM NADPH-dependent 7-cyano- 7-deazaguanine reductase OS=Megamonas rupellensis OX=49 1921 GN=queF PE=3 SV=1
MRTSEETKDITLLGQKNVKYEFNYRPDVLETFDNKHLDHDYWVKFNCPEFTTLCPITGQPDFGTIYISYIPDEKMVESKSLKLYLFSFRNNGDFHEDVVNIIMKDLIKLMNPKYIEVWGKFLPRGGISIDPYTNYGRPDTKYEQLAQTRFVNHDLYSLDKVDNR

SEQ ID NO: 47265 - protein, 164 aa, Megamonas sp.
  misc_feature (1)..(164): tr|A0A1H8HXD3|A0A1H8HXD3_9FIRM NADPH-dependent 7-cyano- 7-deazaguanine reductase OS=Megamonas sp. Calf98-2 OX=1 855330 GN=queF PE=3 SV=1
MRTSEETKDITLLGQKNVKYEFNYRPDVLETFDNKHPDHDYWVKFNCPEFTTLCPITGQPDFGTIYISYIPDEKMVESKSLKLYLFSFRNNGDFHEDVVNIIMKDLIKLMNPKYIEVWGKFLPRGGISIDPYTNYGRPDTKYEQLAQTRFVNHDLYRLDKVDNR

SEQ ID NO: 47266 - protein, 164 aa, Megasphaera cerevisiae
  misc_feature (1)..(164): tr|A0A0J6WRV2|A0A0J6WRV2_9FIRM NADPH-dependent 7-cyano- 7-deazaguanine reductase OS=Megasphaera cerevisiae DSM 20462 OX=1122219 GN=queF PE=3 SV=1
MSRSNEELQGISALGSQHTQYKQDYDPALLEVFPNKHPGRDYFVKFNCPEFTSLCPKTGQPDYATIYISYVPELRMVESKSLKLYLFSFRNHGDFHEDCVNNIMDDLIHLMNPKYIEVWGKFLPRGGISIDPYCNYGRKGTPWEEVAWQRLARHDMYPEQIDNR

SEQ ID NO: 47267 - protein, 164 aa, Megasphaera elsdenii
  misc_feature (1)..(164): tr|G0VPI1|G0VPI1_MEGEL NADPH-dependent 7-cyano-7-deazag uanine reductase OS=Megasphaera elsdenii DSM 20460 OX=1 064535 GN=queF PE=3 SV=1
MSRSKEELQGVTKLGNQHTVYAQDYDPSLLETFVNKHPDRDYFVKFNCPEFTSLCPMTGQPDYATIYISYVPGVRMVESKSLKLYLFSFRNHGDFHEDCVNIIMDDLIRVMDPKYIEVWGKFLPRGGISIDPYCNYGRPGTPWADVAWQRLSQHDLYPEKVDNR

SEQ ID NO: 47268 - protein, 164 aa, Megasphaera elsdenii
  misc_feature (1)..(164): tr|A0A1M6N6D8|A0A1M6N6D8_MEGEL NADPH-dependent 7-cyano- 7-deazaguanine reductase OS=Megasphaera elsdenii OX=907 GN=queF PE=3 SV=1
MSRSKEELQGVTKLGNQHTVYAQDYDPSLLETFVNKHPDRDYFVKFNCPEFTSLCPMTGQPDYATIYISYVPGERMVESKSLKLYLFSFRNHGDFHEDCVNIIMDDLIRVMDPKYIEVWGKFLPRGGISIDPYCNYGRPGTPWADVAWQRLSQHDLYPEKVDNR

SEQ ID NO: 47269 - protein, 164 aa, Megasphaera genomosp.
  misc_feature (1)..(164): tr|A0A2J8BC13|A0A2J8BC13_9FIRM NADPH-dependent 7-cyano- 7-deazaguanine reductase OS=Megasphaera genomosp. type_ 2 OX=699193 GN=queF PE=3 SV=1
MSRTKQELQGITTLGKQQTQYSTTYDPTQLETFVNKHPEHDYFVKFNCPEFTSLCPKTGQPDYATLYISYVPCERMVESKSLKLYLFSFRNHGDFHEDCVNIIMNDLISLMDPKYIEVWGKFLPRGGISIDPFCNYGKKGTPWEQVAWKRLSEHDMYPEIVNNR

SEQ ID NO: 47270 - protein, 176 aa, Megasphaera genomosp.
  misc_feature (1)..(176): tr|D3LVR7|D3LVR7_9FIRM NADPH-dependent 7-cyano-7-deazag uanine reductase OS=Megasphaera genomosp. type_1 str. 2 8L OX=699218 GN=queF PE=3 SV=1
MTATEACWEGMTVSRTKDELQQIQHLGNQHTTYTGTYDPSVLESFANKHGDHDYFVKFNCPEFTSLCPKTGQPDYATIYISYVPDLRLVESKSLKLYLFSFRNHGDFHEDCINIIMKDLCALLDPKYIEVWGKFLPRGGISIDPYCNYGKPHTPWENVAWQRLAQHDLYPETVNNR

SEQ ID NO: 47271 - protein, 164 aa, Megasphaera hexanoica
  misc_feature (1)..(164): tr|A0A344MKH5|A0A344MKH5_9FIRM NADPH-dependent 7-cyano- 7-deazaguanine reductase OS=Megasphaera hexanoica OX=16 75036 GN=queF PE=3 SV=1
MSRTKEELQGVTSLGNQHTAYTFDYDPSLLETFINKHPGRDYFVKFNCPEFTSLCPKTGQPDYATLYISYVPDQRMVESKSLKLYLFSFRNHGDFHEDCVNIIMDDLIHAMDPKYIEVWGKFLPRGGISIDPYCNYGRAGTPWEQVAWQRLSQHDLYPETIDNR

SEQ ID NO: 47272 - protein, 157 aa, Megasphaera micronuciformis
  misc_feature (1)..(157): tr|E2ZCX8|E2ZCX8_9FIRM NADPH-dependent 7-cyano-7-deazag uanine reductase OS=Megasphaera micronuciformis F0359 O X=706434 GN=queF PE=3 SV=1
MEKLTLLGNQNVTYANEYNPKILEVFENKHQDHDYFVKFNCPEFTSLCPITGQPDFATVTISYVPDIKMVESKSLKLYLFSFRNHGAFHEDCVNIIMEDLITLMDPKYIEVWGKFLPRGGLSIDPYCNYGKKGTKWEDVAFKRLAEHDMYPEKVDNR

SEQ ID NO: 47273 - protein, 164 aa, Megasphaera paucivorans
  misc_feature (1)..(164): tr|A0A1G9PY29|A0A1G9PY29_9FIRM NADPH-dependent 7-cyano- 7-deazaguanine reductase OS=Megasphaera paucivorans OX= 349095 GN=queF PE=3 SV=1
MSRNTKELQGVTQLGSKHTEYDFDYEPSLLETFANKHTEREYFVKFNCPEFTSLCPKTGQPDYATIYISYVPGKLMVESKSLKLYLFSFRNHGDFHEDCVNIIMDDLIMLMDPKYIEVWGKFLPRGGISIDPYCNYGKKGTPWEQVAWQRLTQHDVYPEKVDNR

SEQ ID NO: 47274 - protein, 164 aa, Megasphaera sp.
  misc_feature (1)..(164): tr|S7HRA6|S7HRA6_9FIRM NADPH-dependent 7-cyano-7-deazag uanine reductase OS=Megasphaera sp. NM10 OX=1273103 GN= queF PE=3 SV=1
MSRSKEELQGVTQLGNQYTTYAQDYDPSLLETFVNKHPDRDYFVKFNCPEFTSLCPMTGQPDYATIYISYVPGERMVESKSLKLYLFSFRNHGDFHEDCVNIIMDDLIQAMDPKYIEVWGKFLPRGGISIDPYCNYGRPGTPWADVAWQRLSQHDLYPEKVDNR

SEQ ID NO: 47275 - protein, 164 aa, Megasphaera sp.
  misc_feature (1)..(164): tr|F9MQJ4|F9MQJ4_9FIRM NADPH-dependent 7-cyano-7-deazag uanine reductase OS=Megasphaera sp. UPII 135-E OX=10005 69 GN=queF PE=3 SV=1
MSRTKQELQGITTLGKQQTQYSTTYDPTRLETFVNKHPEHDYFVKFNCPEFTSLCPKTGQPDYATLYISYVPCERMVESKSLKLYLFSFRNHGDFHEDCVNIIMNDLISLMDPKYIEVWGKFLPRGGISIDPFCNYGKKGTPWEQVAWKRLSEHDMYPEIVNNR

SEQ ID NO: 47276 - protein, 164 aa, Megasphaera stantonii
  misc_feature (1)..(164): tr|A0A346AWZ6|A0A346AWZ6_9FIRM NADPH-dependent 7-cyano- 7-deazaguanine reductase OS=Megasphaera stantonii OX=21 44175 GN=queF PE=3 SV=1
MNRTSEELSQLASLGSQHTTYRQDYDPGLLETFDNKHPGRDYFVKFNCPEFTSLCPKTGQPDYATIYISYVPDQKMVESKSLKLYLFSFRNHGDFHEDCVNIIMDDLISLMNPKYIEVWGKFLPRGGISIDPYCNYGRQGTPWEQVAWQRLSQHDLYPEKVDNR

SEQ ID NO: 47277 - protein, 123 aa, Meiothermus roseus
  misc_feature (1)..(123): tr|A0A399EVQ1|A0A399EVQ1_9DEIN NADPH-dependent 7-cyano- 7-deazaguanine reductase OS=Meiothermus roseus OX=16441 18 GN=queF PE=3 SV=1
MPRPKSLEEARRVLAHEAFRAPNITQVTLEATEFTSICPRSGQPDFGRVRISYVPREKCIESKSLKFYLWAYRDEPAFCEELTARIADDIVAAIDPAWLEVTLEQNPRGAIGIVVTAVRGQKP

SEQ ID NO: 47278 - protein, 134 aa, Meiothermus terrae
  misc_feature (1)..(134): tr|A0A399EBJ0|A0A399EBJ0_9DEIN NADPH-dependent 7-cyano- 7-deazaguanine reductase OS=Meiothermus terrae OX=14085 45 GN=queF PE=3 SV=1
MDKFWLPRSGPMPRPKSLEEARQVLADEAFRAPNVGRVTFEAAEFTSICPRSGQPDFGRVRISYTPKERCIESKSLKFYLWAYRDEPAFCEELTARIADDIVAAIDPAWLEVTLEQTPRGGIGIVVTAERGQRP

SEQ ID NO: 47279 - protein, 281 aa, Melaminivora alkalimesophila
  misc_feature (1)..(281): tr|A0A317RAI3|A0A317RAI3_9BURK NADPH-dependent 7-cyano- 7-deazaguanine reductase OS=Melaminivora alkalimesophil a OX=1165852 GN=queF PE=3 SV=1
MNTPEHSQLGKASAYADQYDASLLFPIPRADKRAEIGIDGSAPFFGADLWTAFELSWLNLRGKPQVALAHITVPCETPHIVESKSFKLYLNSFNNTRFASEAEVRTRIRADVSEAVWRGAEHPGTVGVTLLLPEAFDREPIHELDGLLLDRLDVECTRYQPAPELLAARHDEAPVTETLVSHLLKSNCLVTGQPDWGSVQIRYTGPQIDQEGLLQYIVSFRNHNEFHEQCVERIFMDLWTRCKPIKLEVYARYTRRGGLDINPWRTSHPQAMPKNVRTARQ

SEQ ID NO: 47280 - protein, 282 aa, Melaminivora sp.
  misc_feature (1)..(282): tr|A0A2P1NN64|A0A2P1NN64_9BURK NADPH-dependent 7-cyano- 7-deazaguanine reductase OS=Melaminivora sp. SC2-7 OX=2 116657 GN=queF PE=3 SV=1
MQTPEQSQLGQHSAYADQYDASLLFPLPRSPKRIELGLQDGAAPFFGADLWTAYELSWLNERGKPQVALAHLTVPCETPHLIESKSLKLYLNSFNGTRFASLDAVRARIRADLSEAAWRGSGQAGGVGVRLIEPGHFDAQQVRELDGLLLDRLDLDCTHYTPAPELLAANHDEAPVTETLVSHLLKSNCLVTGQPDWGSVQIAYSGAQIDQAGLLQYLVSFRNHNEFHEQCVERIFMDVWTRCRPLKLSVYARYTRRGGLDINPFRTSHPQPLPANVRTARQ

SEQ ID NO: 47281 - protein, 281 aa, Melaminivora sp.
  misc_feature (1)..(281): tr|A0A2R3Q9D9|A0A2R3Q9D9_9BURK NADPH-dependent 7-cyano- 7-deazaguanine reductase OS=Melaminivora sp. SC2-9 OX=2 109913 GN=queF PE=3 SV=1
MVTPEQSPLGRATPYPEHYDAQLLCPLPRAPKRAEIGIAAAPPFFGADLWSAYELSWLNPRGKPQVAIAHITVPCETPHLIESKSFKLYLASFNNARFASFDEVRARICADLSEAAWRGSAQSGSVGVRLIAPEAFEQQRVQELDGLLLDRLDLECSHYTPAPELLSADHGEAPVSEVLTSHLLKSNCLVTGQPDWGSVQIAYSGAQIDQAGLLRYLVSFRNHNEFHEQCVERIFMDVWTRCRPIKLSVYARYTRRGGLDINPFRTSHPQQLPPNVRTARQ

SEQ ID NO: 47282 - protein, 142 aa, Melghirimyces algeriensis
  misc_feature (1)..(142): tr|A0A521BR26|A0A521BR26_9BACL NADPH-dependent 7-cyano- 7-deazaguanine reductase OS=Melghirimyces algeriensis O X=910412 GN=queF PE=3 SV=1
MGKATVDHSKYQKIRFDIQDESAIMTDILETIPYEYPGKDVEVEIPTAEFTSVCPWSGLPDFAEIQITFVPDQHLIEMKSLKYYLTSYRNVGIYQEHATRRILDELVALAKPKYMKVEALWNPRGGLGTRVVAEYPEKNNRG

SEQ ID NO: 47283 - protein, 143 aa, Melghirimyces profundicolus
  misc_feature (1)..(143): tr|A0A2T6C9N3|A0A2T6C9N3_9BACL NADPH-dependent 7-cyano- 7-deazaguanine reductase OS=Melghirimyces profundicolus OX=1242148 GN=queF PE=3 SV=1
MGKVTVDHSKYQNIRFDTQEESAIMTDILETIPYQYPGKDVEVEIPTTEFTSVCPWSGLPDFAEIKIRFVPDRYLVEMKSLKYYLTSYRNVGIYQEHATRRILDELVELLKPKSMTVEALWNPRGGLGTRVVAEYPDKKDKKG

SEQ ID NO: 47284 - protein, 138 aa, Melghirimyces thermohalophilus
  misc_feature (1)..(138): tr|A0A1G6HLJ8|A0A1G6HLJ8_9BACL NADPH-dependent 7-cyano- 7-deazaguanine reductase OS=Melghirimyces thermohalophi lus OX=1236220 GN=queF PE=3 SV=1
MGKVDVDHSKYQNIRFDIQDESAIMTDILETIPYEYPGKDVEVEIPTTEFTSVCPWSGLPDFAEITITFVPDRHLVEMKSLKYYLTSYRNVGIYQEHATRRILEELVDLLKPKRMKVEALWNPRGGLGTRVVAEYPEK

SEQ ID NO: 47285 - protein, 118 aa, Melioribacter roseus
  misc_feature (1)..(118): tr|I6ZRU7|I6ZRU7_MELRP NADPH-dependent 7-cyano-7-deazag uanine reductase OS=Melioribacter roseus (strain JCM 17 771 / P3M-2) OX=1191523 GN=queF PE=3 SV=1
MNEKQKILETFPNPNPERDYIIIHTAPEFTSLCPKTGQPDFATIILEYIPDKLCVELKSYKFYLQSFRNDGIYFEAVTNRILNDLVETLQPRKMKLTAKFNTRGGIHSDIIAEYKKEQ

SEQ ID NO: 47286 - protein, 118 aa, Melioribacter sp.
  misc_feature (1)..(118): tr|A0A1G1BB03|A0A1G1BB03_9BACT NADPH-dependent 7-cyano- 7-deazaguanine reductase OS=Melioribacter sp. GWF2_38_2 1 OX=1801612 GN=queF PE=3 SV=1
MQDKTKILVTFPNPNPERDYTVIHYAPEFTSVCPVTGQPDYATIVLEYIPDKICVELKSYKFYLQSYRNDGIYFEAVTNKIANDLIKIMKPRYLKVLAKFNTRGGISSDIIVEHKKRK

SEQ ID NO: 47287 - protein, 136 aa, Melittangium boletus
  misc_feature (1)..(136): tr|A0A250IBH3|A0A250IBH3_9DELT NADPH-dependent 7-cyano- 7-deazaguanine reductase OS=Melittangium boletus DSM 14 713 OX=1294270 GN=queF PE=3 SV=1
MASQPSKDLKTFVNPAPDRDYEIAFDVPEFTCLCPLTGQPDFARFRIRYVPDELCVELKSLKLYMWAYRDEGAFHEKVTNTIADDIVRAIQPRKLTVEGDFFVRGGIGTVVTVTHEKAARSRPAAKKKAATPARRK

SEQ ID NO: 47288 - protein, 144 aa, Merismopedia glauca
  misc_feature (1)..(144): tr|A0A2T1C406|A0A2T1C406_9CYAN NADPH-dependent 7-cyano- 7-deazaguanine reductase OS=Merismopedia glauca CCAP 14 48/3 OX=1296344 GN=queF PE=3 SV=1
MSHSSTPETLPPTQETREMKYGEREIAEGQLITFPNPRVGRRYHVNITLPEFTCKCPFSGYPDFATIDLTYVPNLRVVELKALKLYINSYRDRYISHEESVNQILDDFIAACDPLEVTIKGDFTPRGNVHTVIEIHHSKPQLDS

SEQ ID NO: 47289 - protein, 130 aa, Mesoaciditoga sp.
  misc_feature (1)..(130): tr|A0A2J6WJ67|A0A2J6WJ67_9BACT NADPH-dependent 7-cyano- 7-deazaguanine reductase OS=Mesoaciditoga sp. OX=206032 3 GN=queF PE=3 SV=1
MPKAEGKTFSFLGEDAIETGILETIDFQNKEKEFVRYETDEFSAVCPFSGLPDIGRVMIEYIPSDKIIELKSLKYYFVSFRNVGIYQERATQRIFNDLFELLNPVWMKVTVIYKTRGGIDATTIIEKGER

SEQ ID NO: 47290 - protein, 279 aa, Mesocricetibacter intestinalis
  misc_feature (1)..(279): tr|A0A4V3D9Z6|A0A4V3D9Z6_9PAST NADPH-dependent 7-cyano- 7-deazaguanine reductase OS=Mesocricetibacter intestina lis OX=1521930 GN=queF PE=3 SV=1
MNYQDHSLNTLKLGKKTEYASDYDPRLLQAVPRALNRDGLGITLQQPFTLGADIWTAYEISWLNPKGVPQVAVADIEIDFRSENLIESKSFKLYLNSFNQTKFTDAAEVQRAMQLDLSACAGGGVKVRLNSLADYSGIPIAALPGQCIDNQDIEIKDYRFNPNLLENCTDAQIVEETLVSHLLKSNCLITAQPDWGSIQIHYIGARIQPEKLLRYLISFRQHNEFHEQCVERIFCDLQHYARPQKLTVYARYTRRGGLDINPFRSNFEPCPANFRLARQ

SEQ ID NO: 47291 - protein, 153 aa, Mesorhizobium albiziae
  misc_feature (1)..(153): tr|A0A1I4B0C9|A0A1I4B0C9_9RHIZ NADPH-dependent 7-cyano- 7-deazaguanine reductase OS=Mesorhizobium albiziae OX=3 35020 GN=queF PE=3 SV=1
MTTTGNLTQLGTKVETPASPELAILETVPFARTDGPPAIVRFTCPEFTSLCPVTGQPDFAHIVIDYAPDELLVESKSLKLFMTSFRNHGAFHEDCTVAIGKRVVEATKPLWLRIAGYWYPRGGIPIDVFWQTGTPPEGAWLPETGVAPYRGRG

SEQ ID NO: 47292 - protein, 153 aa, Mesorhizobium alhagi
  misc_feature (1)..(153): tr|H0HUX8|H0HUX8_9RHIZ NADPH-dependent 7-cyano-7-deazag uanine reductase OS=Mesorhizobium alhagi CCNWXJ12-2 OX= 1107882 GN=queF PE=3 SV=1
MTVTENLTQLGARVETPASPDAAILETVPYTRGDGPPAIVRFTCPEFTSLCPVTGQPDFAHIVIDYAPDAALVESKSLKLFMVSFRNHGAFHEDCTVMIARRIIEATKPLWLRIAGYWYPRGGIPIDVFWQTGAPPEGAWLPDTGVAPYRGRG

SEQ ID NO: 47293 - protein, 153 aa, Mesorhizobium amorphae
  misc_feature (1)..(153): tr|A0A212DNE8|A0A212DNE8_9RHIZ NADPH-dependent 7-cyano- 7-deazaguanine reductase OS=Mesorhizobium amorphae CCBA U 01583 OX=1449348 GN=queF PE=3 SV=1
MIDTKTLTQLGAHVETPQSPEAAVLETVPFARGDGPPAIVRFVCPEFTSLCPVTGQPDFAHIVIDYAPDTLLVESKSLKLFMTSFRNHGAFHEECTVMIGRRIVAATKPLWLRIGGYWYPRGGIPIDVFWQTGAPPEGSWLPDTGVAPYRGRG

SEQ ID NO: 47294 - protein, 153 aa, Mesorhizobium amorphae
  misc_feature (1)..(153): tr|G6YJA3|G6YJA3_9RHIZ NADPH-dependent 7-cyano-7-deazag uanine reductase OS=Mesorhizobium amorphae CCNWGS0123 O X=1082933 GN=queF PE=3 SV=1
MIDTKALTQLGAHVEPPRSPEAAVLETVPFARGDGPPAIVRFVCPEFTSLCPVTGQPDFAHIVIDYAPDTLLVESKSLKLFMTSFRNHGAFHEECTVMIGRRIVAATKPLWLRVGGYWYPRGGIPIDVFWQTGAPPEGAWLPDTGVAPYRGRG

SEQ ID NO: 47295 - protein, 153 aa, Mesorhizobium australicum
  misc_feature (1)..(153): tr|L0KQJ0|L0KQJ0_MESAW NADPH-dependent 7-cyano-7-deazag uanine reductase OS=Mesorhizobium australicum (strain H AMBI 3006 / LMG 24608 / WSM2073) OX=754035 GN=queF PE=3 SV=1
MIDTKNLTQLGTHVETPQSPEAAVLETVPFSRGDGPPAIVRFTCPEFTSLCPVTGQPDFAHIVIDYAPDAALVESKSLKLFMTSFRNHGAFHEDCTVMIGRRIVAATKPLWLRIGGYWYPRGGIPIDVFWQTGAPPEGAWLPDTGVTPYRGRG

SEQ ID NO: 47296 - protein, 153 aa, Mesorhizobium ciceri
  misc_feature (1)..(153): tr|A0A143N7U3|A0A143N7U3_9RHIZ NADPH-dependent 7-cyano- 7-deazaguanine reductase OS=Mesorhizobium ciceri OX=396 45 GN=queF PE=3 SV=1
MIDTKTLTQLGAHVETPQSPEAAVLETVPFSRGDGPPAIVRFTCPEFTSLCPVTGQPDFAHIVIDYAPDAALVESKSLKLFMTSFRNHGAFHEDCTVMIGRRIVAATKPLWLRIGGYWYPRGGIPIDVFWQTGAPPEGAWLPDTGVAPYRGRG

SEQ ID NO: 47297 - protein, 153 aa, Mesorhizobium ciceri; identical to SEQ ID NO: 47296
  misc_feature (1)..(153): tr|E8TIG7|E8TIG7_MESCW NADPH-dependent 7-cyano-7-deazag uanine reductase OS=Mesorhizobium ciceri biovar biserru lae (strain HAMBI 2942 / LMG 23838 / WSM1271) OX=765698 GN=queF PE=3 SV=1

SEQ ID NO: 47298 - protein, 153 aa, Mesorhizobium delmotii
  misc_feature (1)..(153): tr|A0A2P9AVX8|A0A2P9AVX8_9RHIZ NADPH-dependent 7-cyano- 7-deazaguanine reductase OS=Mesorhizobium delmotii OX=1 631247 GN=queF PE=3 SV=1
MTDTKNLTQLGTNVEAPQSPEAAVLETVPFSRGDGPPAIVRFTCPEFTSLCPVTGQPDFAHIVIDYAPDTLLVESKSLKLFMTSFRNHGAFHEECTVMIGRRIIAATKPLWLRIGGYWYPRGGIPIDVFWQTGAPPEGAWLPDTGVAPYRGRG

SEQ ID NO: 47299 - protein, 153 aa, Mesorhizobium erdmanii; identical to SEQ ID NO: 47296
  misc_feature (1)..(153): tr|A0A4Q1V9L9|A0A4Q1V9L9_9RHIZ NADPH-dependent 7-cyano- 7-deazaguanine reductase OS=Mesorhizobium erdmanii OX=1 777866 GN=queF PE=3 SV=1

SEQ ID NO: 47300 - protein, 153 aa, Mesorhizobium hawassense
  misc_feature (1)..(153): tr|A0A330HR71|A0A330HR71_9RHIZ NADPH-dependent 7-cyano- 7-deazaguanine reductase OS=Mesorhizobium hawassense OX =1209954 GN=queF PE=3 SV=1
MTDAKNLTQLGKHVETPQSPEQAVLEAVPFQRGDGPPAIVRFTCPEFTSLCPVTGQPDFAHIVIDYAPDEMLVESKSLKLFMTSFRNHGAFHEECTVMIGRRIVEVTKPLWLRVGGYWFPRGGIPIDVFWQTGAPPKDVWLPDTGVAPYRGRG

SEQ ID NO: 47301 - protein, 153 aa, Mesorhizobium helmanticense
  misc_feature (1)..(153): tr|A0A2T4J3G7|A0A2T4J3G7_9RHIZ NADPH-dependent 7-cyano- 7-deazaguanine reductase OS=Mesorhizobium helmanticense OX=1776423 GN=queF PE=3 SV=1
MIDTKTLTQLGAHVETPQSPDAAILETVPFARADGPPAIVRFTCPEFTSLCPVTGQPDFAHIVIDYAPDALLVESKSLKLFMTSFRNHGAFHEECTVMIGRRIVAATKPLWLRIGGYWYPRGGIPIDVFWQTGAPPEGVWLPDTGVAPYRGRG

SEQ ID NO: 47302 - protein, 153 aa, Mesorhizobium huakuii; identical to SEQ ID NO: 47296
  misc_feature (1)..(153): tr|A0A068D8Q5|A0A068D8Q5_9RHIZ NADPH-dependent 7-cyano- 7-deazaguanine reductase OS=Mesorhizobium huakuii 7653R OX=763057 GN=queF PE=3 SV=1

SEQ ID NO: 47303 - protein, 153 aa, Mesorhizobium japonicum; identical to SEQ ID NO: 47296
  misc_feature (1)..(153): tr|A0A3M9XFZ2|A0A3M9XFZ2_9RHIZ NADPH-dependent 7-cyano- 7-deazaguanine reductase OS=Mesorhizobium japonicum OX= 2066070 GN=queF PE=3 SV=1

SEQ ID NO: 47304 - protein, 153 aa, Mesorhizobium japonicum; identical to SEQ ID NO: 47296
  misc_feature (1)..(153): sp|Q983K4|QUEF_RHILO NADPH-dependent 7-cyano-7-deazagua nine reductase OS=Mesorhizobium japonicum (strain LMG 2 9417 / CECT 9101 / MAFF 303099) OX=266835 GN=queF PE=3 SV=1

SEQ ID NO: 47305 - protein, 153 aa, Mesorhizobium jarvisii; identical to SEQ ID NO: 47296
  misc_feature (1)..(153): tr|A0A3A5KBK4|A0A3A5KBK4_9RHIZ NADPH-dependent 7-cyano- 7-deazaguanine reductase OS=Mesorhizobium jarvisii OX=1 777867 GN=queF PE=3 SV=1

SEQ ID NO: 47306 - protein, 153 aa, Mesorhizobium kowhaii
  misc_feature (1)..(153): tr|A0A2W7C3T9|A0A2W7C3T9_9RHIZ NADPH-dependent 7-cyano- 7-deazaguanine reductase OS=Mesorhizobium kowhaii OX=13 00272 GN=queF PE=3 SV=1
MTVTKNLTQLGAHVETPQSPDQAVLETVPFARGDGPPAIVRFTCPEFTSLCPVTGQPDFAHIVIDYAPDALLVESKSLKLFMTSFRNHGAFHEECTVMIGRRIVAATKPLWLRIGGYWFPRGGIPIDVFWQTGAPPEGTWLPDTGVAPYRGRG

SEQ ID NO: 47307 - protein, 153 aa, Mesorhizobium mediterraneum
  misc_feature (1)..(153): tr|A0A271KYU2|A0A271KYU2_9RHIZ NADPH-dependent 7-cyano- 7-deazaguanine reductase OS=Mesorhizobium mediterraneum OX=43617 GN=queF PE=3 SV=1
MTDTKNLIQLGTNVEAPRSPEAAVLETVPFSRGDGPPAIVRFTCPEFTSLCPVTGQPDFAHIVIDYAPDTLLVESKSLKLFMTSFRNHGAFHEECTVMIGRRIIAATKPLWLRIGGYWYPRGGIPIDVFWQTGAPPEGAWLPDTGVAPYRGRG

SEQ ID NO: 47308 - protein, 153 aa, Mesorhizobium metallidurans
  misc_feature (1)..(153): tr|M5EQB1|M5EQB1_9RHIZ NADPH-dependent 7-cyano-7-deazag uanine reductase OS=Mesorhizobium metallidurans STM 268 3 OX=1297569 GN=queF PE=3 SV=1
MIDTKNLTQLGTHVETPQSPEAAVLETVPSARGDGPPAIVRFTCPEFTSLCPVTGQPDFAHIVIDYAPDALLVESKSLKLFMTSFRNHGAFHEDCTVMIGRRIVAATKPLWLRIGGYWYPRGGIPIDVFWQTGAPPEGVWLPDTGVVPYRGRG

SEQ ID NO: 47309 - protein, 153 aa, Mesorhizobium muleiense
  misc_feature (1)..(153): tr|A0A1G9KRD8|A0A1G9KRD8_9RHIZ NADPH-dependent 7-cyano- 7-deazaguanine reductase OS=Mesorhizobium muleiense OX= 1004279 GN=queF PE=3 SV=1
MTDTKNLTQLGSNVEAPQNPEAAVLETVPFSRGDGPPAIVRFTCPEFTSLCPVTGQPDFAHIVIDYAPDMLLVESKSLKLFMTSFRNHGAFHEECTVMIGRRIIAATKPLWLRIGGYWYPRGGIPIDVFWQTGAPPEGAWLPDTGVAPYRGRG

SEQ ID NO: 47310 - protein, 153 aa, Mesorhizobium opportunistum
  misc_feature (1)..(153): tr|F7Y2I1|F7Y2I1_MESOW NADPH-dependent 7-cyano-7-deazag uanine reductase OS=Mesorhizobium opportunistum (strain LMG 24607 / HAMBI 3007 / WSM2075) OX=536019 GN=queF PE =3 SV=1
MIDTKTLTQLGAHVETPQSPEQAVLETVPYTRGDGPPAIVRFTCPEFTSLCPVTGQPDFAHIVIDYAPDAALVESKSLKLFMTSFRNHGAFHEDCTVMIGRRIVAATKPLWLRIGGYWFPRGGIPIDVFWQTGAPPEGAWLPDTGVAPYRGRG

SEQ ID NO: 47311 - protein, 154 aa, Mesorhizobium plurifarium
  misc_feature (1)..(154): tr|A0A2T3EH09|A0A2T3EH09_MESPL NADPH-dependent 7-cyano- 7-deazaguanine reductase OS=Mesorhizobium plurifarium O X=69974 GN=queF PE=3 SV=1
MTKTDVSGLSQLGTKVDLPQSPEEAVLEKVPSGHGGTDFVVRFTAPEFTSLCPMTGQPDFAHIVIDYVPDGWLVESKSLKLFLHSFRNHGAFHEDCTIEIAQRLVSLLSPKWLRIGAYWYPRGGIPIDVFWQTGNPPEGVWLPDQGVPTYRGRG

SEQ ID NO: 47312 - protein, 153 aa, Mesorhizobium plurifarium
  misc_feature (1)..(153): tr|A0A090F7T7|A0A090F7T7_MESPL NADPH-dependent 7-cyano- 7-deazaguanine reductase OS=Mesorhizobium plurifarium O X=69974 GN=queF PE=3 SV=1
MTDAKNLTQLGKHVETPQSPEQAVLETVPFQRGDGPPAIVRFTCPEFTSLCPVTGQPDFAHIVIDYAPDKTLVESKSLKLFMTSFRNHGAFHEECTVMIGRRIVEATKPLWLRVGGYWFPRGGIPIDVFWQTGAPPKDAWLPDTGVAPYRGRG

SEQ ID NO: 47313 - protein, 153 aa, Mesorhizobium prunaredense
  misc_feature (1)..(153): tr|A0A1R3V2N3|A0A1R3V2N3_9RHIZ NADPH-dependent 7-cyano- 7-deazaguanine reductase OS=Mesorhizobium prunaredense OX=1631249 GN=queF PE=3 SV=1
MTDTKNLTQLGSNVEAPQNPEAAVLETVPFSRGDGPPAIVRFTCPEFTSLCPVTGQPDFAHIVIDYAPDTLLVESKSLKLFMTSFRNHGAFHEECTVMIGRRIIAATKPLWLRIGGYWYPRGGIPIDVFWQTGAPPQGAWLPDTGVAPYRGRG

SEQ ID NO: 47314 - protein, 153 aa, Mesorhizobium qingshengii
  misc_feature (1)..(153): tr|A0A1G5XAK1|A0A1G5XAK1_9RHIZ NADPH-dependent 7-cyano- 7-deazaguanine reductase OS=Mesorhizobium qingshengii O X=1165689 GN=queF PE=3 SV=1
MTITKDLTQLGAHVETPQSPDQAVLETVPFSRGDGPPAIVRFTCPEFTSLCPVTGQPDFAHIVIDYAPDAALVESKSLKLFMTSFRNHGAFHEECTVMIGRRIVAATKPLWLRVGGYWFPRGGIPIDVFWQTGAPPEGAWLPDTGVAPYRGRG

SEQ ID NO: 47315 - protein, 153 aa, Mesorhizobium sanjuanii
  misc_feature (1)..(153): tr|A0A2A6F939|A0A2A6F939_9RHIZ NADPH-dependent 7-cyano- 7-deazaguanine reductase OS=Mesorhizobium sanjuanii OX= 2037900 GN=queF PE=3 SV=1
MIDTKSLTQLGAHVETPLSPEAAVLETVPFSRGDGPPAIVRFTCPEFTSLCPVTGQPDFAHIVIDYAPDALLVESKSLKLFMTSFRSHGAFHEDCTVMIGRRIVAVTKPLWLRIGGYWYPRGGIPIDVFWQTGAPPEGAWLPDTGVAPYRGRG

SEQ ID NO: 47316 - protein, 155 aa, Mesorhizobium soli
  misc_feature (1)..(155): tr|A0A2P7SET9|A0A2P7SET9_9RHIZ NADPH-dependent 7-cyano- 7-deazaguanine reductase OS=Mesorhizobium soli OX=12953 66 GN=queF PE=3 SV=1
MSQSNIYSELTQLGKDTPIPASPETAVLERVRNPQAGTRYCVRFTAPEFTSLCPMTGQPDFAHLVIDYVPGEWLVESKSLKLFLTSFRNHGAFHEDCTVSIARRLVDRLEPEWLRIGGYWYPRGGIPIDVFYQTGTAPADVWIPEQGVPPYRGRG

SEQ ID NO: 47317 - protein, 153 aa, Mesorhizobium sp.
  misc_feature (1)..(153): tr|A0A503AM31|A0A503AM31_9RHIZ NADPH-dependent 7-cyano- 7-deazaguanine reductase OS=Mesorhizobium sp. B2-7-1 OX =2589909 GN=queF PE=3 SV=1
MTDAKNLTQLGKHVEPPQSPEQAVLEAVPFQRGDGPPAIVRFTCPEFTSLCPVTGQPDFAHIVIDYAPDKTLVESKSLKLFMTSFRNHGAFHEECTVMIGRRIVEATKPLWLRVGGYWFPRGGIPIDVFWQTGAPPKDVWLPDTGVAPYRGRG

SEQ ID NO: 47318 - protein, 153 aa, Mesorhizobium sp.; identical to SEQ ID NO: 47296
  misc_feature (1)..(153): tr|A0A3S2HMD2|A0A3S2HMD2_9RHIZ NADPH-dependent 7-cyano- 7-deazaguanine reductase OS=Mesorhizobium sp. M7A.F.Ca. CA.002.03.2.1 OX=2496680 GN=queF PE=3 SV=1

SEQ ID NO: 47319 - protein, 153 aa, Mesorhizobium tamadayense
  misc_feature (1)..(153): tr|A0A3P3FRW5|A0A3P3FRW5_9RHIZ NADPH-dependent 7-cyano- 7-deazaguanine reductase OS=Mesorhizobium tamadayense O X=425306 GN=queF PE=3 SV=1
MTDAKNLTQLGKHVETPQSPEQAVLETVPFQRGDGPPAIVRFTCPEFTSLCPVTGQPDFAHIVIDYAPDKRLVESKSLKLFMTSFRNHGAFHEECTVMIGRRIVEATKPLWLRVGGYWFPRGGIPIDVFWQTGAPPKDAWLPDTGVAPYRGRG

SEQ ID NO: 47320 - protein, 153 aa, Mesorhizobium temperatum
  misc_feature (1)..(153): tr|A0A271LBK8|A0A271LBK8_9RHIZ NADPH-dependent 7-cyano- 7-deazaguanine reductase OS=Mesorhizobium temperatum OX =241416 GN=queF PE=3 SV=1
MTDTKNLTQLGTNVEAPQSPEAAVLETVPFSRGDGPPAIVRFTCPEFTSLCPVTGQPDFAHIVIDYAPDAVLVESKSLKLFMTSFRNHGAFHEECTVMIGRRIVAATKPLWLRIGGYWYPRGGIPIDVFWQTGAPPEGAWLPDTGVAPYRGRG

SEQ ID NO: 47321 - protein, 153 aa, Mesorhizobium tianshanense
  misc_feature (1)..(153): tr|A0A562NLC8|A0A562NLC8_9RHIZ NADPH-dependent 7-cyano- 7-deazaguanine reductase OS=Mesorhizobium tianshanense OX=39844 GN=queF PE=3 SV=1
MTITKNLTQLGTHVEAPRSPEAAVLETVPFSRGDGPPAIVRFTCPEFTLLCPVTGQPDFAHIVIDYAPDTLLVESKSLKLFMTSFRNHGAFHEECTVMIGRRIVAATKPLWLRIGGYWYPRGGIPIDVFWQTGAPPEGAWLPDTGVAPYRGRG

SEQ ID NO: 47322 - protein, 153 aa, Mesorhizobium waimense
  misc_feature (1)..(153): tr|A0A3A5KPX9|A0A3A5KPX9_9RHIZ NADPH-dependent 7-cyano- 7-deazaguanine reductase OS=Mesorhizobium waimense OX=1 300307 GN=queF PE=3 SV=1
MIDTRTLTQLGAHVEPPQSPEAAVLETVPFARGNGPPAIVRFVCPEFTSLCPVTGQPDFAHIVIDYAPDTLLVESKSLKLFMTSFRNHGAFHEECTVMIGRRIVAATKPLWLRIGGYWYPRGGIPIDVFWQTAAPPEGAWLPDTGVAPYRGRG

SEQ ID NO: 47323 - protein, 153 aa, Mesorhizobium wenxiniae
  misc_feature (1)..(153): tr|A0A271K7W8|A0A271K7W8_9RHIZ NADPH-dependent 7-cyano- 7-deazaguanine reductase OS=Mesorhizobium wenxiniae OX= 2014805 GN=queF PE=3 SV=1
MTDTKNLTQLGTNVETPQSPEAAVLETVPFSRGDGPPAIVRFTCPEFTSLCPVTGQPDFAHIVIDYAPDTLLVESKSLKLFMTSFRNHGAFHEECTVMIGRRIIAATKPLWLRIGGYWYPRGGIPIDVFWQTGAPPEGAWLPDTGVAPYRGRG

SEQ ID NO: 47324 - protein, 139 aa, Mesosutterella multiformis
  misc_feature (1)..(139): tr|A0A388SCG1|A0A388SCG1_9BURK NADPH-dependent 7-cyano- 7-deazaguanine reductase OS=Mesosutterella multiformis OX=2259133 GN=queF PE=3 SV=1
MSSAPSEKLEVFDNPAPERDYVIHMEIPEFTCLCPLTGQPDFATLIVDYIADEKCLELKSIKLYTWTYREMGAFHEDVTNRILSDFVNAIHPRYMRIRARWWVRGGIYTTVIAEHRKEGWTPAPVVHLPDFETNSPMRG

SEQ ID NO: 47325 - protein, 281 aa, Metakosakonia sp.; identical to SEQ ID NO: 46660
  misc_feature (1)..(281): tr|A0A348D8Z3|A0A348D8Z3_9ENTR NADPH-dependent 7-cyano- 7-deazaguanine reductase OS=Metakosakonia sp. MRY16-398 OX=2487150 GN=queF PE=3 SV=1

SEQ ID NO: 47326 - protein, 279 aa, Metallibacterium scheffleri
  misc_feature (1)..(279): tr|A0A4S3KQA0|A0A4S3KQA0_9GAMM NADPH-dependent 7-cyano- 7-deazaguanine reductase OS=Metallibacterium scheffleri OX=993689 GN=B1806_05040 PE=3 SV=1
MNPYEPTALGKPVAAWPRRVDAAVLAPIPRAAMRADLGLAPHAPLPFHGEDLWGCYELSWLDVHGKPVQALAELRVSAASARLIESKSLKLYLNGYAGERMADADAVRARIAQDLAVAAGDTVQVALLESAVWGRLRLHAAPGEALDELQIAPASYGPPQPQLLRRASAGRVHETLHSALFRSNCPVTGQPDWATVVVDYAGPALDHAALLAYLVSYREHAAFHEQCVERIWLDLMQHGACVALTVFARFTRRGGLDINPLRSSDAAARLPAWQRYAQQ

SEQ ID NO: 47327 - protein, 129 aa, Unknown
  misc_feature (1)..(129): tr|A0A1X7MIV6|A0A1X7MIV6_9GAMM NADPH-dependent 7-cyano- 7-deazaguanine reductase OS=methanotrophic bacterial en dosymbiont of Bathymodiolus sp. OX=280772 GN=queF PE=3 SV=1
MATKPSKDLQAFDNPQPGRDFTIRIDTPEFTCLCPLTGQPDFAEITIEYVPDKLCIELKALKLYLWTFRDRGAFHEAVTNGILNDIVKIVQPNFMRVRADFNVRGGVYTSVIVEHRNPDWQAPELVQLP

SEQ ID NO: 47328 - protein, 153 aa, Methylarcula marina
  misc_feature (1)..(153): tr|A0A3R7Q0T7|A0A3R7Q0T7_9RHOB NADPH-dependent 7-cyano- 7-deazaguanine reductase OS=Methylarcula marina OX=7202 2 GN=queF PE=3 SV=1
MSHYTDALTQLGASTELPRNPDEAVLERVPNPQPGEIYAVRFTQPEFTSLCPMTGQPDFAHLVIDYVPGDWLVESKSLKLYLGSFRNHGAFHEDCTVSIGKRLAETLAPQWLRIGGYWYPRGGMPIDVFWQTGAVPAGLWLPDQGVPGYRGRG

SEQ ID NO: 47329 - protein, 161 aa, Methylibium petroleiphilum
  misc_feature (1)..(161): tr|A2SGS9|A2SGS9_METPP NADPH-dependent 7-cyano-7-deazag uanine reductase OS=Methylibium petroleiphilum (strain ATCC BAA-1232 / LMG 22953 / PM1) OX=420662 GN=queF PE=3 SV=1
MAKTAKKSSPRTPPRQRPMPPNPPTAPSKELHVFPNPAPERDYVIQFQIPEFTCLCPLTGQPDFAHFTIDMIADGLCVELKSLKMYMWSFRDEGAFHEKVTNDILGKIVETTAPRFARITARWYVRGGIYTNVVAEHRKKGWKPEPLVVLPQHATERGLPT

SEQ ID NO: 47330 - protein, 143 aa, Methylibium sp.
  misc_feature (1)..(143): tr|A0A0Q7DHJ1|A0A0Q7DHJ1_9BURK NADPH-dependent 7-cyano- 7-deazaguanine reductase OS=Methylibium sp. Root1272 OX =1736441 GN=queF PE=3 SV=1
MPPNPPTAPSKELHVFPNPAPERDYVIQFQIPEFTCLCPLTGQPDFAHFTIDMIADGLCVELKSLKMYMWSFRDEGAFHEKVTNDILGKIVETTAPRFARITAKWYVRGGIYTSVVAEHRKKGWKPEPLVALPQHAAERGLPT

SEQ ID NO: 47331 - protein, 143 aa, Methylibium sp.
  misc_feature (1)..(143): tr|W7WWN8|W7WWN8_9BURK NADPH-dependent 7-cyano-7-deazag uanine reductase OS=Methylibium sp. T29-B OX=1437443 GN =queF PE=3 SV=1
MPPNPPTAPSKELHVFPNPAPERDYVIQFQIPEFTCLCPLTGQPDFAHFTIDMIADGLCVELKSLKMYMWSFRDEGAFHEKVTNDILGKIVETTAPRFARITARWYVRGGIYTNVVAEHRKKGWKPEPLVVLPQHATERGLPT

SEQ ID NO: 47332 - protein, 139 aa, Methylobacillus flagellatus
  misc_feature (1)..(139): sp|Q1H1G9|QUEF_METFK NADPH-dependent 7-cyano-7-deazagua nine reductase OS=Methylobacillus flagellatus (strain K T / ATCC 51484 / DSM 6875) OX=265072 GN=queF PE=3 SV=1
MSSQPSKALETFDNPTPGRDFHIHMEIPEFTCLCPKTGQPDFAVLYLDYIPDQKCVELKSLKLYIWSFRDEGCFHEAVTNQILDDLVVATDPKFMRLTAKFYVRGGIFTNVVAEHRKPGWQPQPRVELAEFESQSNIRG

SEQ ID NO: 47333 - protein, 139 aa, Methylobacillus rhizosphaerae
  misc_feature (1)..(139): tr|A0A238YMK3|A0A238YMK3_9PROT NADPH-dependent 7-cyano- 7-deazaguanine reductase OS=Methylobacillus rhizosphaer ae OX=551994 GN=queF PE=3 SV=1
MTSQPSKALETFDNPNPGRDFHIHMEIPEFTCLCPKTGQPDFAVLYLDYIPDQKCVELKSLKLYMWSFRDEGCFHEAVTNRILDDLVAATNPKFMRLTAKFYVRGGIFTNVVAEHRQPDWQPQPRVELSTFTAQSNIRG

SEQ ID NO: 47334 - protein, 139 aa, Methylobacillus sp.
  misc_feature (1)..(139): tr|A0A1A9NNA6|A0A1A9NNA6_9PROT NADPH-dependent 7-cyano- 7-deazaguanine reductase OS=Methylobacillus sp. MM3 OX= 1848039 GN=queF PE=3 SV=1
MSSQPSKTLETFDNPQPERDFHIHMEIPEFTCLCPKTGQPDFATLYLDYIPDQKCVELKSLKLYMWSFRNEGAFHEAVTNSILDDLVAATQPRFMRLTAKFYVRGGIFTNVVAEHRKPGWQPAPRVELTQFEHQSNTRG

SEQ ID NO: 47335 - protein, 129 aa, Methylobacter sp.
  misc_feature (1)..(129): tr|A0A522WV67|A0A522WV67_9GAMM NADPH-dependent 7-cyano- 7-deazaguanine reductase OS=Methylobacter sp. OX=205195 5 GN=queF PE=3 SV=1
MTTQPSKDLETFDNPQPGRDYTIRIDVPEFTCLCPKTGQPDFATIQIEYVPAKLCVELKALKLYMWAFRDQGAFHEAVTNEILDDLVKVTSPNFMRIRAEFNVRGGIYTTVVVEHRNPDWQAPELVTLP

SEQ ID NO: 47336 - protein, 129 aa, Methylobacter sp.
  misc_feature (1)..(129): tr|A0A2S5Q6A0|A0A2S5Q6A0_9GAMM NADPH-dependent 7-cyano- 7-deazaguanine reductase OS=Methylobacter sp. OX=205195 5 GN=queF PE=3 SV=1
MTTQPSKDLETFPNPQPERDFTIRIDIPEFTCLCPKTGQPDFAKIQIEYVPADVCVELKALKLYMWTFRERGAFHEAVTNEILNDIVAVTQPNFMRIRAEFNVRGGIYTTVVAEHRNPAWQAPALVNLP

SEQ ID NO: 47337 - protein, 129 aa, Methylobacter tundripaludum
  misc_feature (1)..(129): tr|A0A2S6GVQ8|A0A2S6GVQ8_9GAMM NADPH-dependent 7-cyano- 7-deazaguanine reductase OS=Methylobacter tundripaludum OX=173365 GN=queF PE=3 SV=1
MTTQPSKDLETFDNPKPGRDYTIRIDVPEFTCLCPKTGQPDFATIQIEYIPGALCVELKALKLYMWAFRDQGAFHEAVTNEILDDLVKAIAPNFMRIRAEFNVRGGIYTTVVVEHKNPDWQAPEPVTLP

SEQ ID NO: 47338 - protein, 129 aa, Methylobacter tundripaludum
  misc_feature (1)..(129): tr|A0A2S6HGF4|A0A2S6HGF4_9GAMM NADPH-dependent 7-cyano- 7-deazaguanine reductase OS=Methylobacter tundripaludum OX=173365 GN=queF PE=3 SV=1
MTTQPSKDLETFDNPQPGRDYTIRIDVPEFTCLCPKTGQPDFATIQIEYVPGALCVELKALKLYMWAFRDQGAFHEAVTNEILDDIVKAIAPNFMRIRAEFNVRGGIYTTVVVEHRNPKWQAPELVTLP

SEQ ID NO: 47339 - protein, 154 aa, Methylobacterium aquaticum
  misc_feature (1)..(154): tr|A0A0J6SMA5|A0A0J6SMA5_9RHIZ NADPH-dependent 7-cyano- 7-deazaguanine reductase OS=Methylobacterium aquaticum OX=270351 GN=queF PE=3 SV=1
MTQDLSHHARQLGQLSAQPRSPDEAQLDRVPNPHPDTDYCARFTAPEFTSLCPVTGQPDFAILVIDYVPDQWLVESKSLKLYLHSFRDHGAFHEDCTVGIGRRLTALLEPRYLRIGGYWYPRGGIPIDVFWQTGTPPASVWLPDQGVPPYRARG

SEQ ID NO: 47340 - protein, 154 aa, Methylobacterium aquaticum
  misc_feature (1)..(154): tr|A0A0C6FHJ4|A0A0C6FHJ4_9RHIZ NADPH-dependent 7-cyano- 7-deazaguanine reductase OS=Methylobacterium aquaticum OX=270351 GN=queF PE=3 SV=1
MTQDITDHARQLGQPIAQPRSPEEAQLDRVPNPHPDTDYCARFTAPEFTSLCPVTGQPDFAILVIDYVPDQWLVESKSLKLYLHSFRDHGAFHEDCTVGIGRRLTALLEPRYLRIGGYWYPRGGIPIDVFWQTGTPPASVWLPDQGVPPYRARG

SEQ ID NO: 47341 - protein, 150 aa, Methylobacterium brachiatum
  misc_feature (1)..(150): tr|A0A3G2V4K2|A0A3G2V4K2_9RHIZ NADPH-dependent 7-cyano- 7-deazaguanine reductase OS=Methylobacterium brachiatum OX=269660 GN=queF PE=3 SV=1
MTASETLQLGQATSLPASPGDARLDRVPNPHADTDYVARFTAPEFTSICPVTGQPDFAILVIDYVPGAWLVESKSLKLYLGAFRNHGAFHEDCTVAIGKRLRDLLEPRYLRIGGYWYPRGGIPIDVFWQTGEPPKTIWLPETGVAPYRGR

SEQ ID NO: 47342 - protein, 150 aa, Methylobacterium brachiatum
  misc_feature (1)..(150): tr|A0A1I3PUR9|A0A1I3PUR9_9RHIZ NADPH-dependent 7-cyano- 7-deazaguanine reductase OS=Methylobacterium brachiatum OX=269660 GN=queF PE=3 SV=1
MTASETLQLGQATSLPASPDEARLDRVPNPHADTDYVARFTAPEFTSICPVTGQPDFAILVIDYVPGDWLVESKSLKLYLGAFRNHGAFHEDCTVAIGKRLRDLLEPRYLRIGGYWYPRGGIPIDVFWQTGEPPKTIWLPETGVAPYRGR

SEQ ID NO: 47343 - protein, 164 aa, Methylobacterium currus
  misc_feature (1)..(164): tr|A0A2R4WGD3|A0A2R4WGD3_9RHIZ NADPH-dependent 7-cyano- 7-deazaguanine reductase OS=Methylobacterium currus OX= 2051553 GN=queF PE=3 SV=1
MTQDITNQDIADHDIAGHARQLGQPTAQPRSPDEAQLDRVPNPHPDTDYCARFTAPEFTSLCPVTGQPDFAILVIDYVPDRWLVESKSLKLYLHSFRDHGAFHEDCTVGIGRRLTALLEPRYLRIGGYWYPRGGIPIDVFWQTGTPPASVWLPDQGVPPYRARG

SEQ ID NO: 47344 - protein, 149 aa, Methylobacterium dankookense
  misc_feature (1)..(149): tr|A0A564G0P2|A0A564G0P2_9RHIZ NADPH-dependent 7-cyano- 7-deazaguanine reductase OS=Methylobacterium dankookens e OX=560405 GN=queF PE=3 SV=1
MTNDALQLGQAIPLPASPEEARLDRVPNPHADTDYCARFTAPEFTSLCPVTGQPDFAILVIDYVPDRWLVESKSLKLYLGSFRNHGAFHEDCTVAIGKALAGLLEPRYLRIGGFWYPRGGIPIDVFWQTGEPPKTVWLPDPGVPPYRAR

SEQ ID NO: 47345 - protein, 154 aa, Methylobacterium frigidaeris
  misc_feature (1)..(154): tr|A0A2G8MDL0|A0A2G8MDL0_9RHIZ NADPH-dependent 7-cyano- 7-deazaguanine reductase OS=Methylobacterium frigidaeri s OX=2038277 GN=queF PE=3 SV=1
MTQDITEHARQLGQPTAQPRSPDEAQLDRVPNPHPDTDYCARFTAPEFTSLCPVTGQPDFAILVIDYVPDRWLVESKSLKLYLHSFRDHGAFHEDCTVGIGRRLTTLLEPRYLRIGGYWYPRGGIPIDVFWQTGTPPASVWLPDQGVPPYRARG

SEQ ID NO: 47346 - protein, 154 aa, Methylobacterium gnaphalii
  misc_feature (1)..(154): tr|A0A512JMX6|A0A512JMX6_9RHIZ NADPH-dependent 7-cyano- 7-deazaguanine reductase OS=Methylobacterium gnaphalii OX=1010610 GN=queF PE=3 SV=1
MTDDIAAHARQLGHSTPLPASPEAAQLDRVPNPHPDTDYLARFTAPEFTSLCPVTGQPDFATLVIDYVPGEWLVESKSLKLYLGSFRNHGAFHEDCTVGIGRRLAELLAPRWLRIGGYWYPRGGIPIDVFWQTGAPLASVWLPDQGVPAYRGRG

SEQ ID NO: 47347 - protein, 154 aa, Methylobacterium gossipiicola
  misc_feature (1)..(154): tr|A0A1I2WY21|A0A1I2WY21_9RHIZ NADPH-dependent 7-cyano- 7-deazaguanine reductase OS=Methylobacterium gossipiico la OX=582675 GN=queF PE=3 SV=1
MTQPPLNPETLQLGQATPLPASPEEARLDRVPNPHPGTDYLARFTVPEFTSLCPVTGQPDFAILVIDYVPDQWLVESKSLKLYLTAFRNHGAFHEDCTVGIGLTLNQLLAPRFLRIGGYWYPRGGIPIDVFWQTGEPLKSVWLPEQGVPPYRAR

SEQ ID NO: 47348 - protein, 154 aa, Methylobacterium haplocladii
  misc_feature (1)..(154): tr|A0A512ITN6|A0A512ITN6_9RHIZ NADPH-dependent 7-cyano- 7-deazaguanine reductase OS=Methylobacterium haplocladi i OX=1176176 GN=queF PE=3 SV=1
MSDDPSAAGLQLGQATPLPASPEAAQLDRVPNPHADTDYLARFTAPEFTSLCPVTGQPDFATLVIDYVPGAWLVESKSLKLYLGAFRNHGAFHEDCTVGIGRRLTALLEPRWLRIGGYWYPRGGIPIDVFWQTGEPLKGIWLPEQGVAPYRGRG

SEQ ID NO: 47349 - protein, 154 aa, Methylobacterium indicum
  misc_feature (1)..(154): tr|A0A0J6R9R5|A0A0J6R9R5_9RHIZ NADPH-dependent 7-cyano- 7-deazaguanine reductase OS=Methylobacterium indicum OX =1775910 GN=queF PE=3 SV=1
MTHDITDHARQLGQPTAQPRSPEEAQLDRVPNPHPDTDYCARFTAPEFTSLCPVTGQPDFAILVIDYVPDQWLVESKSLKLYLHSFRDHGAFHEDCTVGIGRRLTALLEPRYLRIGGYWYPRGGIPIDVFWQTGTPPASVWLPDQGVPPYRARG

SEQ ID NO: 47350 - protein, 156 aa, Methylobacterium mesophilicum
  misc_feature (1)..(156): tr|M7Y2K2|M7Y2K2_9RHIZ NADPH-dependent 7-cyano-7-deazag uanine reductase OS=Methylobacterium mesophilicum SR1.6 /6 OX=908290 GN=queF PE=3 SV=1
MTSTNDTTSTDDLQLGQPTPFPTSPEEARLDRVPNPHADTDYVARFTAPEFTSICPVTGQPDFAILVIDYVPGDWLVESKSLKLYLGSFRNHGAFHEDCTVAIGKRLRDLLAPRYLRIGGFWYPRGGIPIDVFWQTGELPKNAWLPEPGVPPYRGR

SEQ ID NO: 47351 - protein, 150 aa, Methylobacterium nodulans
  misc_feature (1)..(150): tr|B8IDB3|B8IDB3_METNO NADPH-dependent 7-cyano-7-deazag uanine reductase OS=Methylobacterium nodulans (strain L MG 21967 / CNCM I-2342 / ORS 2060) OX=460265 GN=queF PE =3 SV=1
MTNETLQLGRPSALPRSPEEAQLDRVPNPHPDTDYLARFTAPEFTSLCPVTGQPDFAILVIDYVPDRWLIESKSLKLYLHSFRDHGAFHEDCTVAIGKRLAGLLQPRYLRIGGYWYPRGGIPIDVFWQTGEPPKSLWLPDQGVPPYRARG

SEQ ID NO: 47352 - protein, 162 aa, Methylobacterium organophilum
  misc_feature (1)..(162): tr|A0A2U1E447|A0A2U1E447_METOR NADPH-dependent 7-cyano- 7-deazaguanine reductase OS=Methylobacterium organophil um OX=410 GN=queF PE=3 SV=1
MRAGPAGSIWPAMTSTDDLQLGQPTPFPASPQEARLDRVPNPHADTDYVARFTAPEFTSICPVTGQPDFAILVIDYVPGDWLVESKSLKLYLGSFRNHGAFHEDCTVAIGKRLRDLLEPRYLRIGGFWYPRGGIPIDVFWQTGELPKNAWLPDPGVPPYRGR

SEQ ID NO: 47353 - protein, 153 aa, Methylobacterium oryzae
  misc_feature (1)..(153): tr|A0A089NR06|A0A089NR06_9RHIZ NADPH-dependent 7-cyano- 7-deazaguanine reductase OS=Methylobacterium oryzae CBM B20 OX=693986 GN=queF PE=3 SV=1
MPAMTSANDLQLGQPTPFPTSPEEARLDRVPNPHADTDYVARFTAPEFTSICPVTGQPDFAILVIDYVPGDWLVESKSLKLYLGSFRNHGAFHEDCTVAIGKRLRDLLEPRYLRIGGFWYPRGGIPIDVFWQTGELPKNAWLPDPGVPPYRGR

SEQ ID NO: 47354 - protein, 157 aa, Methylobacterium oxalidis
  misc_feature (1)..(157): tr|A0A512J5D2|A0A512J5D2_9RHIZ NADPH-dependent 7-cyano- 7-deazaguanine reductase OS=Methylobacterium oxalidis O X=944322 GN=queF PE=3 SV=1
MTNETHTPETHADLQLGQATPQPASPETARLDRVPNPHADTDYLARFTAPEFTSLCPVTGQPDFAILVIDYVPDRWLVESKSLKLYLTSFRNHGAFHEDCTVAIGKRLTTLLEPRYLRIGGFWYPRGGIPIDVFWQTGEPPKSVWLPDPGVPPYRAR

SEQ ID NO: 47355 - protein, 150 aa, Methylobacterium phyllostachyos
  misc_feature (1)..(150): tr|A0A1H0JDK5|A0A1H0JDK5_9RHIZ NADPH-dependent 7-cyano- 7-deazaguanine reductase OS=Methylobacterium phyllostac hyos OX=582672 GN=queF PE=3 SV=1
MTMPNDLQLGQPAPLPTSPEDARLDRVPNPHADTDYVARFTAPEFTSICPVTGQPDFAILVIDYVPGDWLVESKSLKLYLGSFRNHGAFHEDCTVAIGKRLRDLLEPRYLRIGGFWYPRGGIPIDVFWQTGELPKNAWLPDPGVAPYRGR

SEQ ID NO: 47356 - protein, 163 aa, Methylobacterium platani
  misc_feature (1)..(163): tr|A0A179S930|A0A179S930_9RHIZ NADPH-dependent 7-cyano- 7-deazaguanine reductase OS=Methylobacterium platani OX =427683 GN=queF PE=3 SV=1
MTQDIRQDIRQDDIAHHARQLGQPVAAPRSPEEAQLDRVPNPHPDTDYCARFTVPEFTSLCPVTGQPDFAILVIDYVPDQWLVESKSLKLYLHSFRDHGAFHEDCTVGIGRRLTALLEPRYLRIGGYWYPRGGIPIDVFWQTGTPPASVWLPDQGVPPYRARG

SEQ ID NO: 47357 - protein, 150 aa, Methylobacterium pseudosasicola
  misc_feature (1)..(150): tr|A0A1I4KEU5|A0A1I4KEU5_9RHIZ NADPH-dependent 7-cyano- 7-deazaguanine reductase OS=Methylobacterium pseudosasi cola OX=582667 GN=queF PE=3 SV=1
MTASETLQLGQATPLPASPTEARLDRVPNPHADTDYVARFTAPEFTSICPVTGQPDFAILVIDYVPGDWLVESKSLKLYLGAFRNHGAFHEDCTVAIGKRLRDLLEPRYLRIGGYWYPRGGIPIDVFWQTGEPPKTIWLPETGVAPYRGR

SEQ ID NO: 47358 - protein, 162 aa, Methylobacterium radiotolerans
  misc_feature (1)..(162): tr|A0A3S3BWM9|A0A3S3BWM9_9RHIZ NADPH-dependent 7-cyano- 7-deazaguanine reductase OS=Methylobacterium radiotoler ans OX=31998 GN=queF PE=3 SV=1
MRAGPAGSIWPAMTSTDDLQLGQPTPFPASPEEARLDRVPNPHADTDYVARFTAPEFTSICPVTGQPDFAILVIDYVPGDWLVESKSLKLYLGSFRNHGAFHEDCTVAIGKRLRDLLEPRYLRIGGFWYPRGGIPIDVFWQTGELPKNAWLPDPGVPPYRGR

SEQ ID NO: 47359 - protein, 162 aa, Methylobacterium radiotolerans
  misc_feature (1)..(162): tr|B1LZU5|B1LZU5_METRJ NADPH-dependent 7-cyano-7-deazag uanine reductase OS=Methylobacterium radiotolerans (str ain ATCC 27329 / DSM 1819 / JCM 2831 / NBRC 15690 / NCI MB 10815 / 0-1) OX=426355 GN=queF PE=3 SV=1
MRAGPAGSIWPAMTSTDDLQLGQPTPFPTSPEEARLDRVPNPHADTDYVARFTAPEFTSICPVTGQPDFAILVIDYVPGDWLVESKSLKLYLGSFRNHGAFHEDCTVAIGKRLRDLLEPRYLRIGGFWYPRGGIPIDVFWQTGELPKNAWLPDPGVPPYRGR

SEQ ID NO: 47360 - protein, 150 aa, Methylobacterium sp.
  misc_feature (1)..(150): tr|A0A3S2VUD9|A0A3S2VUD9_9RHIZ NADPH-dependent 7-cyano- 7-deazaguanine reductase OS=Methylobacterium sp. TER-1 OX=2499852 GN=queF PE=3 SV=1
MTEETLQLGRATALPRSPDEAQLDRVPNPHPDTDYLARFTAPEFTSLCPVTGQPDFAILVIDYVPDRWLVESKSLKLYLHAFRDHGAFHEDCTVGIGRRLTALLEPRYLRIGGYWYPRGGIPIDVFWQTGTPPQSVWLPDQGVPPYRARG

SEQ ID NO: 47361 - protein, 154 aa, Methylobacterium sp.
  misc_feature (1)..(154): tr|A0A4Z0NPQ0|A0A4Z0NPQ0_9RHIZ NADPH-dependent 7-cyano- 7-deazaguanine reductase OS=Methylobacterium sp. 6HR-1 OX=1141884 GN=queF PE=3 SV=1
MTQDLTQHARQLGQPSAQPRSPDEAQLDRVPNPHPDTDYCARFTAPEFTSLCPVTGQPDFAILVIDYVPDRWLVESKSLKLYLHSFRDHGAFHEDCTVGIGRRLTALLEPRYLRIGGYWYPRGGIPIDVFWQTGTPPASVWLPDQGVPPYRARG

SEQ ID NO: 47362 - protein, 159 aa, Methylobacterium tarhaniae
  misc_feature (1)..(159): tr|A0A0J6VRW2|A0A0J6VRW2_9RHIZ NADPH-dependent 7-cyano- 7-deazaguanine reductase OS=Methylobacterium tarhaniae OX=1187852 GN=queF PE=3 SV=1
MTQDIPQQDISQHARQLGQLSAQPRSPDEAQLDRVPNPHPDTDYCARFTAPEFTSLCPVTGQPDFAILVIDYVPDQWLVESKSLKLYLHSFRDHGAFHEDCTVGIGRRLTALLEPRYLRIGGYWYPRGGIPIDVFWQTGTPPASVWLPDQGVPPYRARG

SEQ ID NO: 47363 - protein, 159 aa, Methylobacterium variabile
  misc_feature (1)..(159): tr|A0A0J6S5U0|A0A0J6S5U0_9RHIZ NADPH-dependent 7-cyano- 7-deazaguanine reductase OS=Methylobacterium variabile OX=298794 GN=queF PE=3 SV=1
MTQDLTQHATTPGSLQLGRASAQPRSPDEAQLDRVPNPHPDTDYCARFTAPEFTSLCPVTGQPDFAILVIDYVPDQWLVESKSLKLYLHSFRDHGAFHEDCTVGIGRRLTALLEPRYLRIGGYWYPRGGIPIDVFWQTGTPPASVWLPDQGVPPYRARG

SEQ ID NO: 47364 - protein, 140 aa, Methylocaldum marinum
  misc_feature (1)..(140): tr|A0A250KSB9|A0A250KSB9_9GAMM NADPH-dependent 7-cyano- 7-deazaguanine reductase OS=Methylocaldum marinum OX=14 32792 GN=queF PE=3 SV=1
MPIREVPYTVSMSSAPSKDLEIFDNPQPGRNYTIRIEIPEFTCLCPKTGQPDFATILIEYVPNRACVELKSLKLYIWSFREEGAFHEAVTNRMLDDLVSACAPNFMRVTARFNVRGGIYTTVVAEHRDSAWKAPDLVNLP

SEQ ID NO: 47365 - protein, 196 aa, Methylocaldum sp.
  misc_feature (1)..(196): tr|A0A4R7A9T1|A0A4R7A9T1_9GAMM NADPH-dependent 7-cyano- 7-deazaguanine reductase OS=Methylocaldum sp. 0917 OX=2 485163 GN=queF PE=3 SV=1
MSFAVRDDSRKMMVGAMAGKSVSLVCNGTGRYYSGLSHGVIPYLFMSCLCSATTAHRAFLKILYRSPMPSIPSKDLETFDNPQPGRNYTIRIEIPEFTCLCPKTGQPDFATILIEYVPNRSCVELKSLKLYIWSFREEGAFHEAVTNRILDDLVRACAPNFMRVTARFNVRGGIYTTVVAEHRDPAWEAPRLVNLP

SEQ ID NO: 47366 - protein, 152 aa, Methylocapsa palsarum
  misc_feature (1)..(152): tr|A0A1I3Y9I8|A0A1I3Y9I8_9RHIZ NADPH-dependent 7-cyano- 7-deazaguanine reductase OS=Methylocapsa palsarum OX=16 12308 GN=queF PE=3 SV=1
MVRTHTGATLLGAQAAAHSPDEATLERVPNPHAGETYIARFTAPEFTSLCPVTGQPDFAHLVIDYAPREWLVESKSLKLYLGSFRNHGAFHEDCTLRIGKDLVAALDPVWFRIGGYWYPRGGIPIDVFWSAGALPAGTWLPDQGVPPYRGRG

SEQ ID NO: 47367 - protein, 176 aa, Methyloceanibacter caenitepidi
  misc_feature (1)..(176): tr|A0A0A8K450|A0A0A8K450_9RHIZ NADPH-dependent 7-cyano- 7-deazaguanine reductase OS=Methyloceanibacter caenitep idi OX=1384459 GN=queF PE=3 SV=1
MAKRPSKKVAKSPANKMAEAVKKASGKAEGLLQLGKAAPLPASPDDAILERVPNPHPDTPYVARFTAPEFTCLCPVTGQPDFAHFVLDYAPGAWLVESKSFKLYLGSFRNTAAFHEDSTLRIGKAIADLLEPSWLRIGGYWFPRGGIPIDVFWQYGTPPEGIWIPDQGVAPYRGRG

SEQ ID NO: 47368 - protein, 153 aa, Methyloceanibacter marginalis
  misc_feature (1)..(153): tr|A0A1E3W3E0|A0A1E3W3E0_9RHIZ NADPH-dependent 7-cyano- 7-deazaguanine reductase OS=Methyloceanibacter marginal is OX=1774971 GN=queF PE=3 SV=1
MTRKITGLRQLGHEVPVPASPVDAQLERVPNPHADTAYVARFTAPEFTCLCPVTGQPDFAHFVVDYAPREWLLESKSFKLFLSSFRNAAAFHEDATLTIGKRIVQIIEPSWLRIGGYWFPRGGIPIDVFWQHGTPPEGVWIPDQGVAPYRGRG

SEQ ID NO: 47369 - protein, 148 aa, Methyloceanibacter methanicus
  misc_feature (1)..(148): tr|A0A1E3W5A3|A0A1E3W5A3_9RHIZ NADPH-dependent 7-cyano- 7-deazaguanine reductase OS=Methyloceanibacter methanic us OX=1774968 GN=queF PE=3 SV=1
MGLKQLGKAAPLPPSPDEAVLERVSNLHADTDYVARFTAPEFTCLCPVTGQPDFAHFVVDYAPGKWLLESKSFKLFLGSFRNTASFHEDTTLRIGKSIATLIEPRWLRIGGYWFPRGGIPIDVFWQHGTPPDGIWIPDQGVAPYRGRG

SEQ ID NO: 47370 - protein, 168 aa, Methyloceanibacter sp.
  misc_feature (1)..(168): tr|A0A353IQZ6|A0A353IQZ6_9RHIZ NADPH-dependent 7-cyano- 7-deazaguanine reductase OS=Methyloceanibacter sp. OX=1 965321 GN=queF PE=3 SV=1
MARKNAAKKPEAKKVKDQKPAGLKQLGKAVPLPASPDDAVLERVPNAHPDTDYVARFTAPEFTCLCPVTGQPDFAHFVMDYAPGKWLLESKSFKLFLGSFRNTASFHEDTTLRIGKTIAQLIEPAWLRIGGYWFPRGGIPIDVFWQHGTPPEGIWIPDQGEVPYRGRG

SEQ ID NO: 47371 - protein, 160 aa, Methyloceanibacter stevinii
  misc_feature (1)..(160): tr|A0A1E3VMH3|A0A1E3VMH3_9RHIZ NADPH-dependent 7-cyano- 7-deazaguanine reductase OS=Methyloceanibacter stevinii OX=1774970 GN=queF PE=3 SV=1
MAEAAKKASVKNQGLRQLGKTAPLPASPDDAILERVPNPHPDTAYVARFTAPEFTCLCPVTGQPDFAHFVLDYTPGAWLVESKSFKLYLGSFRNTAAFHEDTTLTIGKAIADLLEPSWLRIGGYWFPRGGIPIDVFWQCGSPPEGIWIPDQGVAPYRGRG

SEQ ID NO: 47372 - protein, 153 aa, Methyloceanibacter superfactus
  misc_feature (1)..(153): tr|A0A1E3VQY2|A0A1E3VQY2_9RHIZ NADPH-dependent 7-cyano- 7-deazaguanine reductase OS=Methyloceanibacter superfac tus OX=1774969 GN=queF PE=3 SV=1
MTRKITGLKQLGHESPVPNSPDEAELERVPNPHAGTAYVARFTAPEFTCLCPVTGQPDFAHLVVDYAPGKWLLESKSFKLFLASFRNASAFHEDATITIGKRIVDLVEPAWLRIGGYWYPRGGIPIDVFWQYGTPPEGVWIPDQGVAPYRGRG

SEQ ID NO: 47373 - protein, 153 aa, Methylocella silvestris
  misc_feature (1)..(153): tr|A0A2J7TDH5|A0A2J7TDH5_METSI NADPH-dependent 7-cyano- 7-deazaguanine reductase OS=Methylocella silvestris OX= 199596 GN=queF PE=3 SV=1
MVKIHDGASQLGASIALPRSPEEATLERVANPHEDALYLARFTAPEFTSLCPVTGQPDFALLVIDYAPDKWIVESKSLKLYLGSFRNEGAFHEDCTVRIGKDLVAVLTPRWLRIGGYWYPRGGMPIDVFWSTGAPPPGLWLPDQGVPPYRGRG

SEQ ID NO: 47374 - protein, 153 aa, Methylocella silvestris
  misc_feature (1)..(153): sp|B8EJT0|QUEF_METSB NADPH-dependent 7-cyano-7-deazagua nine reductase OS=Methylocella silvestris (strain DSM 1 5510 / CIP 108128 / LMG 27833 / NCIMB 13906 / BL2) OX=3 95965 GN=queF PE=3 SV=1
MVKIHDGASQLGANVAAPRSPEEATLERVANPHEEALYLARFTAPEFTSLCPVTGQPDFALLVIDYAPDKWIVESKSLKLYLGSFRNRGAFHEDCTVRIGKDLVAVLAPRWLRIGGYWYPRGGMPIDVFWSTGAPPPGLWLPDQGVPPYRGRG

SEQ ID NO: 47375 - protein, 153 aa, Methylocella tundrae
  misc_feature (1)..(153): tr|A0A4U8YYR5|A0A4U8YYR5_METTU NADPH-dependent 7-cyano- 7-deazaguanine reductase OS=Methylocella tundrae OX=227 605 GN=queF PE=3 SV=1
MVKTHTGTSQLGASVAAPASPEEATLERVPNPHRSEHYLARFTAPEFTSLCPVTGQPDFALLVIDYVPDEWLVESKSLKLYLGSFRNHGAFHEDCTLRIGKDLVAILSPRWFRIGGYWYPRGGIPIDVFWSTGEPPAGLWLPDQGVPPYRGRG

SEQ ID NO: 47376 - protein, 129 aa, Methylococcaceae bacterium
  misc_feature (1)..(129): tr|A0A257N6T0|A0A257N6T0_9GAMM NADPH-dependent 7-cyano- 7-deazaguanine reductase OS=Methylococcaceae bacterium NSM2-1 OX=1917482 GN=queF PE=3 SV=1
MTTRPTKDLETFDNPQPGRDYTIRIDIPEFTCLCPKTGQPDFATIQIEYVPAALCVELKALKLHMWAFRDQGAFHEAVTNEILNDIVRAIAPNFMRIRAEFNVRGGIYTTVVVEHRNNDWQAPELVNLP

SEQ ID NO: 47377 - protein, 122 aa, Methylococcaceae bacterium
  misc_feature (1)..(122): tr|A0A4Q5L562|A0A4Q5L562_9GAMM NADPH-dependent 7-cyano- 7-deazaguanine reductase OS=Methylococcaceae bacterium FWC3 OX=2516328 GN=queF PE=3 SV=1
MIETFENPRTDRDYTIRIEIPEFTCLCPKTGQPDFATIVLEYVPDGLCIELKALKLYIWSFRDQGAFHEAVTNRILTELCGCCRPRFMRITARFNVRGGIYTTVVAEHRAGGWTPSPPVQLP

SEQ ID NO: 47378 - protein, 129 aa, Methylococcales bacterium
  misc_feature (1)..(129): tr|A0A3A2J4R9|A0A3A2J4R9_9GAMM NADPH-dependent 7-cyano- 7-deazaguanine reductase OS=Methylococcales bacterium O X=2304002 GN=queF PE=3 SV=1
MTTRPTKDLETFVNPQPDRDYTIRIDIPEFTCLCPKTGQPDFATIQIEYVPGALCVELKALKLYMWAFREQGAFHEAVTNEILNDIVAAIAPNFMRIRAEFNVRGGIYTTVVVEHKDKQWQAPELVNLP

SEQ ID NO: 47379 - protein, 129 aa, Methylococcales bacterium
  misc_feature (1)..(129): tr|A0A418RL07|A0A418RL07_9GAMM NADPH-dependent 7-cyano- 7-deazaguanine reductase OS=Methylococcales bacterium O X=2304002 GN=queF PE=3 SV=1
MTTKPTKDLETFVNPQPDRDYTIRIDIPEFTCLCPKTGQPDFATIQIEYVPGALCVELKGLKLYMWAFRDQGAFHEAVTNEILNDIVAAIAPNFMRIRAEFNVRGGIYTTVVVEHKDKHWQAPELVTLP

SEQ ID NO: 47380 - protein, 129 aa, Methylococcus capsulatus
  misc_feature (1)..(129): sp|Q604U5|QUEF_METCA NADPH-dependent 7-cyano-7-deazagua nine reductase OS=Methylococcus capsulatus (strain ATCC 33009 / NCIMB 11132 / Bath) OX=243233 GN=queF PE=3 SV= 1
MPSQPSKTLETFDNPRPDHDYTIRIEIPEFTCLCPKTGQPDFATILLEYVPDRQCIELKSLKMYIWSFRDEGAFHEAVTNTILDDLVTVSRPRFMRVTARFNVRGGIYTTVVAERRAPDWEPTTPVALP

SEQ ID NO: 47381 - protein, 120 aa, Methylococcus sp.
  misc_feature (1)..(120): tr|A0A432RK25|A0A432RK25_9GAMM NADPH-dependent 7-cyano- 7-deazaguanine reductase OS=Methylococcus sp. OX=39769 GN=queF PE=3 SV=1
MSIGPSLNLETFENPKPGRDYTICIQVPEFTCLCPVTGQPDFATVSIEYRPDILCVELKSIKLYMWSFRDQGAFHEAVTNQILDDLVAACSPKYMKISADFNVRGGIYTTVIAEHGKRKD

SEQ ID NO: 47382 - protein, 129 aa, Methylococcus sp.
  misc_feature (1)..(129): tr|A0A3N9V1U1|A0A3N9V1U1_9GAMM NADPH-dependent 7-cyano- 7-deazaguanine reductase OS=Methylococcus sp. OX=39769 GN=queF PE=3 SV=1
MTTQPSKTLETFDNPRPDRDYTIRIDMPEFTCLCPKTGQPDFATLHLEYVPDAKCVELKSLKLYVWSYRDEGAFHEAITNRILDDLVAATQPRFMRLTARFNVRGGVYTNVVAEHRKPGWQAPAVVQLP

SEQ ID NO: 47383 - protein, 129 aa, Methylocucumis oryzae
  misc_feature (1)..(129): tr|A0A0F3IMF7|A0A0F3IMF7_9GAMM NADPH-dependent 7-cyano- 7-deazaguanine reductase OS=Methylocucumis oryzae OX=16 32867 GN=queF PE=3 SV=1
MTQLASHYLETFPNPALGRDYTIRIDIPEFTCLCPKTGQPDFAVIKLEYVPDQVCVELKSLKLYIWGFRDQGAFHEAVTNQILADLVAVTMPKFMRIRAEFNVRGGIYTTVIVEHQQPDWQPPVYIQLA

SEQ ID NO: 47384 - protein, 153 aa, Methylocystaceae bacterium
  misc_feature (1)..(153): tr|A0A395D374|A0A395D374_9RHIZ NADPH-dependent 7-cyano- 7-deazaguanine reductase OS=Methylocystaceae bacterium OX=2052174 GN=queF PE=3 SV=1
MTKTHKGAALLGQKTALPASPDEAELDLVANPHPGETYLVRFVAPEFTSLCPVTGQPDFAHIVIDYAPAEWLVESKSLKLYLGSYRNHGAFHEDCTLRIAKDLVAALAPKWLRIGGYWYPRGGIPIDVFWHTGDPPKGLWLPDQGVPPYRGRG

SEQ ID NO: 47385 - protein, 153 aa, Methylocystaceae bacterium
  misc_feature (1)..(153): tr|A0A4V0X374|A0A4V0X374_9RHIZ NADPH-dependent 7-cyano- 7-deazaguanine reductase OS=Methylocystaceae bacterium OX=2052174 GN=queF PE=3 SV=1
MTKKHDGPELLGRIVALPNSPDEAELDLVTNPYKDTVYLVRFTAPEFTSLCPVTGQPDFAHLVIDYCPADCLIESKSLKLFLGSFRNHGAFHEDCTLRIAHELIAAMKPRWLRIGGYWYPRGGMPIDVFWQTATPPAGLWLPDQGVPPYRGRG

SEQ ID NO: 47386 - protein, 153 aa, Methylocystis bryophila
  misc_feature (1)..(153): tr|A0A1W6MRU5|A0A1W6MRU5_9RHIZ NADPH-dependent 7-cyano- 7-deazaguanine reductase OS=Methylocystis bryophila OX= 655015 GN=queF PE=3 SV=1
MTKTHKGAALLGERAPLPASPDEAELDLVPNPHKGETYLVRFTAPEFTSLCPVTGQPDFAHLVIDYVPAETLVESKSLKLYLASFRNHGAFHEDCTVRIALDLKAALSPLWLRIGGYWYPRGGIPIDVFWQSGEPPKGLWLPDQGVAPYRGRG

SEQ ID NO: 47387 - protein, 153 aa, Methylocystis heyeri
  misc_feature (1)..(153): tr|A0A4V3XH09|A0A4V3XH09_9RHIZ NADPH-dependent 7-cyano- 7-deazaguanine reductase OS=Methylocystis heyeri OX=391 905 GN=queF PE=3 SV=1
MTKTHQGPALLGEKAPLPASPDEAELDLVPNPHPGETYLVRFTAPEFTSLCPVTGQPDFAHIVIDYAPGEWLVESKSLKLYLGSFRNHGAFHEDCTLRIALDLKNAMSPRWLRIGGYWYPRGGIPIDVFWQSSEPPQGLWLPDQGVPPYRGRG

SEQ ID NO: 47388 - protein, 153 aa, Methylocystis hirsuta
  misc_feature (1)..(153): tr|A0A3M9XLP1|A0A3M9XLP1_9RHIZ NADPH-dependent 7-cyano- 7-deazaguanine reductase OS=Methylocystis hirsuta OX=36 9798 GN=queF PE=3 SV=1
MTKTHKGAALLGRMAALPASPDEAELDLVPNPHKDATYLVRFTAPEFTSLCPVTGQPDFAHIVIDYVPAEWLVESKALKLYLGSFRNHGAFHEDCTLRIACDLVAAMTPKWLRIGGYWYPRGGMPIDVFWQTGAPPDGLWLPDQGVPPYRGRG

SEQ ID NO: 47389 - protein, 153 aa, Methylocystis rosea
  misc_feature (1)..(153): tr|A0A3G8M1C9|A0A3G8M1C9_9RHIZ NADPH-dependent 7-cyano- 7-deazaguanine reductase OS=Methylocystis rosea OX=1733 66 GN=queF PE=3 SV=1
MTKTHKGAALLGRMAALPASPDEAELDLVPNPHKDATYLVRFTAPEFTSLCPVTGQPDFAHIVIDYVPAEWLVESKALKLYLGSFRNHGAFHEDCTLRIARDLVAAMTPKWLRIGGYWYPRGGMPIDVFWQTGAPPEGLWLPDQGVPPYRGRG

SEQ ID NO: 47390 - protein, 126 aa, Methylocystis sp.
  misc_feature (1)..(126): tr|A0A2S5MGH1|A0A2S5MGH1_9RHIZ NADPH-dependent 7-cyano- 7-deazaguanine reductase (Fragment) OS=Methylocystis sp . OX=1911079 GN=CTY36_09310 PE=3 SV=1
MTKTHKGAALLGRMAALPASPDEAELDLVPNPHKDATYLVRFTAPEFTSLCPVTGQPDFAHIVVDYVPAEWLVESKALKLYLGSFRNHGAFHEDCTLRIARDLVAAMTPKWLRIGGYWYPRGGMPI

SEQ ID NO: 47391 - protein, 153 aa, Methylocystis sp.; identical to SEQ ID NO: 47389
  misc_feature (1)..(153): tr|A0A2U1SBD0|A0A2U1SBD0_9RHIZ NADPH-dependent 7-cyano- 7-deazaguanine reductase OS=Methylocystis sp. MitZ-2018 OX=2127046 GN=queF PE=3 SV=1

SEQ ID NO: 47392 - protein, 129 aa, Methyloglobulus morosus
  misc_feature (1)..(129): tr|V5DYH6|V5DYH6_9GAMM NADPH-dependent 7-cyano-7-deazag uanine reductase OS=Methyloglobulus morosus KoM1 OX=111 6472 GN=queF PE=3 SV=1
MTTKPSKDLETFPNPQPGRDYTIRITIPEFTCLCPKTGQPDFATISLEYVPASLCVELKALKLYMWSFRDEGAFHEAVTNEMLNHIVSAIHPNFMRIRAEFNVRGGIYTTVIAEHKNPVWEAPDLINLP

SEQ ID NO: 47393 - protein, 159 aa, Methyloligella halotolerans
  misc_feature (1)..(159): tr|A0A1E2S1T0|A0A1E2S1T0_9RHIZ NADPH-dependent 7-cyano- 7-deazaguanine reductase OS=Methyloligella halotolerans OX=1177755 GN=queF PE=3 SV=1
MAGEADTPKHTEELTQLGHETAIPRSPDEARLERVPNPHPGTEYLARFTCPEFTCLCPVTGQPDFAHLVIDYVPGDWLLESKSLKLYLFSFRDHGGFHEETTVSVGKRIVEEIAPPFLRIGGYWYPRGGIPIDVFWQHGEAPQGLWLPDQGVAPYRGRG

SEQ ID NO: 47394 - protein, 129 aa, Methylomagnum ishizawai
  misc_feature (1)..(129): tr|A0A1Y6CSP2|A0A1Y6CSP2_9GAMM NADPH-dependent 7-cyano- 7-deazaguanine reductase OS=Methylomagnum ishizawai OX= 1760988 GN=queF PE=3 SV=1
MSTLPSKALETFDNPQPGRDYTIRIDVPEFTCLCPKTGQPDFATLLLEYVPDRLCVELKSLKLYAWSFRDEGAFHEAVTNRILDDLVAATRPRFMRLTAKFNVRGGIYTTVVAEHRDPEWVAPAVVALP

SEQ ID NO: 47395 - protein, 129 aa, Methylomicrobium album
  misc_feature (1)..(129): tr|H8GNU0|H8GNU0_METAL NADPH-dependent 7-cyano-7-deazag uanine reductase OS=Methylomicrobium album BG8 OX=68634 0 GN=queF PE=3 SV=1
MSTQPSKDLETFVNPEPGRDYTIRIDIPEFTCLCPKTGQPDFATIRLEYVPAAACVELKALKLYIWSFRDQGAFHEAVTNQILNDIVAAIRPNFLRVRAEFNVRGGIYTTVVAEHRNPDWQAPQPVHLS

SEQ ID NO: 47396 - protein, 129 aa, Methylomicrobium alcaliphilum
  misc_feature (1)..(129): tr|G4SZH7|G4SZH7_META2 NADPH-dependent 7-cyano-7-deazag uanine reductase OS=Methylomicrobium alcaliphilum (stra in DSM 19304 / NCIMB 14124 / VKM B-2133 / 20Z) OX=10914 94 GN=queF PE=3 SV=1
MTTQPSTQLETFDNPRPGRDFTIRIDIPEFTCLCPKTGQPDFATLTIEYVPSQLCVELKSLKLYMWSFRDRGAFHEAVTNEILDHIAAAIHPNFMRIRANFNVRGGIYTNVIAEHKNPDWQAPEPVHLP

SEQ ID NO: 47397 - protein, 129 aa, Methylomicrobium buryatense
  misc_feature (1)..(129): tr|A0A4P9UNI4|A0A4P9UNI4_9GAMM NADPH-dependent 7-cyano- 7-deazaguanine reductase OS=Methylomicrobium buryatense OX=95641 GN=queF PE=3 SV=1
MTTQPSTQLETFDNPRPGRDFTIRIDIPEFTCLCPKTGQPDFATLTIEYVPSQLCVELKSLKLYMWSFRDRGAFHEAVTNEILDHIAAAIHPNFMRIRANFNVRGGIYTNVIAEHKSPDWQAPEPVHLP

SEQ ID NO: 47398 - protein, 129 aa, Methylomicrobium kenyense
  misc_feature (1)..(129): tr|A0A543VET8|A0A543VET8_9GAMM NADPH-dependent 7-cyano- 7-deazaguanine reductase OS=Methylomicrobium kenyense O X=269709 GN=queF PE=3 SV=1
MTTQPSTELETFDNPRPGRDFTIRIDIPEFTCLCPKTGQPDFATLTIEYVPNQLCVELKSLKLYMWSFRERGAFHEAVTNEILDHIAATIHPNFMRIRANFNVRGGIYTNVIVEHKNPDWQAPEPVHLP

SEQ ID NO: 47399 - protein, 129 aa, Methylomonas denitrificans
  misc_feature (1)..(129): tr|A0A126T0W2|A0A126T0W2_9GAMM NADPH-dependent 7-cyano- 7-deazaguanine reductase OS=Methylomonas denitrificans OX=1538553 GN=queF PE=3 SV=1
MTTKPSADLTTFENPRPARDFTIRIDIPEFTCLCPMTGQPDFAKLVLEYVPNKLCVELKSLKLYMWTFRERGAFHEAVTNEILDHIVAAISPNFMRLRAEFNVRGGIYTTVIAEHRDPSWHAPELVNLP

SEQ ID NO: 47400 - protein, 129 aa, Methylomonas koyamae
  misc_feature (1)..(129): tr|A0A291IHK4|A0A291IHK4_9GAMM NADPH-dependent 7-cyano- 7-deazaguanine reductase OS=Methylomonas koyamae OX=702 114 GN=queF PE=3 SV=1
MTTQPSSDLTTFENPRPARDFTIRIDIPEFTCLCPMTGQPDFAKLTIEYVPDRLCVELKSLKLYMWTFRERGAFHEAVTNEILDHIVATISPNFMRLRAEFNVRGGIYTTVVAEHRNPNWQAPAPVTLP

SEQ ID NO: 47401 - protein, 129 aa, Methylomonas koyamae
  misc_feature (1)..(129): tr|A0A177P054|A0A177P054_9GAMM NADPH-dependent 7-cyano- 7-deazaguanine reductase OS=Methylomonas koyamae OX=702 114 GN=queF PE=3 SV=1
MSTQPSSDLTTFENPRPARDFTIRIDIPEFTCLCPMTGQPDFAKLTLEYVPDRLCVELKSLKLYMWTFRERGAFHEAVTNEILDHIAAATQPNFMRLRADFNVRGGIYTTVVVEHRNPAWQAPTPVQLP

SEQ ID NO: 47402 - protein, 129 aa, Methylomonas lenta
  misc_feature (1)..(129): tr|A0A177N5W6|A0A177N5W6_9GAMM NADPH-dependent 7-cyano- 7-deazaguanine reductase OS=Methylomonas lenta OX=98056 1 GN=queF PE=3 SV=1
MTTKPNSDLITFENPKPERDFTIRIDIPEFTCLCPMTGQPDFAKLIIEYVPAKLCVELKGLKLYMWTFRERGAFHEAVTNEILDHIVAAIAPNFMRLRAEFNVRGGIYTTVIAEHRNPVWQVPELVNLP

SEQ ID NO: 47403 - protein, 129 aa, Methylomonas methanica
  misc_feature (1)..(129): tr|F9ZYL7|F9ZYL7_METMM NADPH-dependent 7-cyano-7-deazag uanine reductase OS=Methylomonas methanica (strain MC09 ) OX=857087 GN=queF PE=3 SV=1
MTTKPSSDLTTFENPRPERDFTIRIDIPEFTCLCPMTGQPDFAKLVLEYVPDKLCVELKSLKLYMWTFRERGAFHEAVTNEILDHIVSAISPNFMRLRAEFNVRGGIYTTVIAEHRNPDWQAPAIVNLP

SEQ ID NO: 47404 - protein, 129 aa, Methylomonas methanica; identical to SEQ ID NO: 47399
  misc_feature (1)..(129): tr|A0A4R3XXS5|A0A4R3XXS5_METMH NADPH-dependent 7-cyano- 7-deazaguanine reductase OS=Methylomonas methanica OX=4 21 GN=queF PE=3 SV=1

SEQ ID NO: 47405 - protein, 129 aa, Methylomonas sp.
  misc_feature (1)..(129): tr|A0A2P5MUU8|A0A2P5MUU8_METSP NADPH-dependent 7-cyano- 7-deazaguanine reductase OS=Methylomonas sp. OX=418 GN= queF PE=3 SV=1
MTTQPSSDLATFPNPRPKRDFTIRIDIPEFTCLCPLTGQPDFAKLILEYVPNELCVELKSLKLYMWTFRERGAFHEAITHEILDHIVAATSPNFMRLRAEFNVRGGIYTNVIAEHRNPDWQAPELVNLP

SEQ ID NO: 47406 - protein, 129 aa, Methylomonas sp.
  misc_feature (1)..(129): tr|A0A172U6I4|A0A172U6I4_9GAMM NADPH-dependent 7-cyano- 7-deazaguanine reductase OS=Methylomonas sp. DH-1 OX=17 27196 GN=queF PE=3 SV=1
MTTQPSSDLTTFENPRPARDFTIRIDIPEFTCLCPMTGQPDFAKLTIEYVPDRLCVELKSLKLYMWTFRERGAFHEAVTNEILDHIVAAISPNFMRLRAEFNVRGGIYTTVVAEHRNPNWQAPAPVTLP

SEQ ID NO: 47407 - protein, 129 aa, Methylophaga aminisulfidivorans
  misc_feature (1)..(129): tr|F5SXH2|F5SXH2_9GAMM NADPH-dependent 7-cyano-7-deazag uanine reductase OS=Methylophaga aminisulfidivorans MP OX=1026882 GN=queF PE=3 SV=1
MSTQPSKQLETFDNATPDRDYTIHIETSEFTCLCPKTGQPDFATIKLDYVPDEKCVELKAFKLYMWSYRDQGAFHEKVTNTILDDLVAVCQPRFMRITGIFNVRGGVYTTVVAEYRKEGWVAPEPVTLP

SEQ ID NO: 47408 - protein, 129 aa, Methylophaga frappieri
  misc_feature (1)..(129): tr|I1YE85|I1YE85_METFJ NADPH-dependent 7-cyano-7-deazag uanine reductase OS=Methylophaga frappieri (strain ATCC BAA-2434 / DSM 25690 / JAM7) OX=754477 GN=queF PE=3 SV =1
MSTQPSKQLETFDNATPERDYTIHIETPEFTCLCPKTGQPDFATIKIDYVPDLKCVELKSLKLYFWSFRDEGGFHEKLTNQILSDLVAALNPRFMRVTGIFNVRGGVYTNVVAEHRQKDWLPPQPVVLP

SEQ ID NO: 47409 - protein, 129 aa, Methylophaga lonarensis
  misc_feature (1)..(129): tr|M7NU82|M7NU82_9GAMM NADPH-dependent 7-cyano-7-deazag uanine reductase OS=Methylophaga lonarensis MPL OX=1286 106 GN=queF PE=3 SV=1
MSTQPSKQLETFDNAAPERDYTIHIETPEFTCLCPKTGQPDFATIKIDYVPDLKCVELKSLKLYFWSFREEGGFHEKLTNQILTDLVTAIDPRFMRVTGVFNVRGGVYTTVVAEHRQAGWVAPEAVHLP

SEQ ID NO: 47410 - protein, 129 aa, Methylophaga muralis
  misc_feature (1)..(129): tr|A0A1E3GRX5|A0A1E3GRX5_9GAMM NADPH-dependent 7-cyano- 7-deazaguanine reductase OS=Methylophaga muralis OX=291 169 GN=queF PE=3 SV=1
MSTLPSKQLETFDNAVPERDYTIHIETPEFTCLCPKTGQPDFATIKIDYVPDLKCVELKSLKLYFWSYREEGGFHEKLTNQILTDLVAATAPRFMRVTGIFNVRGGVYTNVVAEYRKEGWVAPTPVHLP

SEQ ID NO: 47411 - protein, 50 aa, Methylophaga nitratireducenticrescens
  misc_feature (1)..(50): tr|A0A525NJS0|A0A525NJS0_METNJ NADPH-dependent 7-cyano- 7-deazaguanine reductase QueF (Fragment) OS=Methylophag a nitratireducenticrescens OX=754476 GN=E8F57_01895 PE= 4 SV=1
NQILTDLVAATEPRFMRVTGIFNVRGGVYTNVVAEYRKEGWVAPTPVHLP

SEQ ID NO: 47412 - protein, 129 aa, Methylophaga nitratireducenticrescens
  misc_feature (1)..(129): tr|I1XK01|I1XK01_METNJ NADPH-dependent 7-cyano-7-deazag uanine reductase OS=Methylophaga nitratireducenticresce ns OX=754476 GN=queF PE=3 SV=1
MSTLPSKQLETFDNAVPERDYTIHIETPEFTCLCPKTGQPDFATIKIDYVPDLKCVELKSLKLYFWSYREEGGFHEKLTNQILTDLVAATEPRFMRVTGIFNVRGGVYTNVVAEYRKEGWVAPTPVHLP

SEQ ID NO: 47413 - protein, 129 aa, Methylophaga sp.
  misc_feature (1)..(129): tr|A0A2E2D3N3|A0A2E2D3N3_9GAMM NADPH-dependent 7-cyano- 7-deazaguanine reductase OS=Methylophaga sp. OX=2024840 GN=queF PE=3 SV=1
MSTQPSKQLETFDNATPERDYTIHIETSEFTCLCPKTGQPDFATIKLDYVPDEKCVELKAFKLYMWSYRDQGAFHEKVTNTILDDLVAACQPRFMRITGIFNVRGGVYTTVVAEYRKEGWVAPEPVTLP

SEQ ID NO: 47414 - protein, 129 aa, Methylophaga sp.
  misc_feature (1)..(129): tr|A0A2D9KSA5|A0A2D9KSA5_9GAMM NADPH-dependent 7-cyano- 7-deazaguanine reductase OS=Methylophaga sp. OX=2024840 GN=queF PE=3 SV=1
MSTLPSKQLETFDNAVPERDYTIHIETPEFTCLCPKTGQPDFATIKIDYVPDLKCVELKSLKLYFWSYREEGGFHEKLTNQILTDLVAATEPRFMRVTGIFNVRGGVYTNVVAEYRKEGWVAPTPVQLP

SEQ ID NO: 47415 - protein, 129 aa, Methylophaga sulfidovorans; identical to SEQ ID NO: 47413
  misc_feature (1)..(129): tr|A0A1I3Z968|A0A1I3Z968_9GAMM NADPH-dependent 7-cyano- 7-deazaguanine reductase OS=Methylophaga sulfidovorans OX=45496 GN=queF PE=3 SV=1

SEQ ID NO: 47416 - protein, 129 aa, Methylophaga thiooxydans
  misc_feature (1)..(129): tr|A0A0A0BFW4|A0A0A0BFW4_9GAMM NADPH-dependent 7-cyano- 7-deazaguanine reductase OS=Methylophaga thiooxydans OX =392484 GN=queF PE=3 SV=1
MSTLPSKQLETFDNATPERDYSIHIETPEFTCLCPKTGQPDFATIKLDYVPDEKCVELKSFKLYIWSYRDEGAFHEKVTNTILNDLVKATDPRFMRVTGVFNVRGGVYTTVVAEHRKEGWVPPSPVTLP

SEQ ID NO: 47417 - protein, 129 aa, Methylophaga thiooxydans
  misc_feature (1)..(129): tr|C0N200|C0N200_9GAMM NADPH-dependent 7-cyano-7-deazag uanine reductase OS=Methylophaga thiooxydans DMS010 OX= 637616 GN=queF PE=3 SV=1
MSTLPSKQLETFDNATPERDYSIHIETPEFTCLCPKTGQPDFATIKLDYVPDEKCVELKSFKLYIWSYRDEGAFHEKVTNTILNDLVEATDPRFMRVTGVFNVRGGVYTTVVAEHRKEGWVPPTPVTLP

SEQ ID NO: 47418 - protein, 172 aa, Methylophilaceae bacterium
  misc_feature (1)..(172): tr|Y0KGN6|Y0KGN6_9PROT NADPH-dependent 7-cyano-7-deazag uanine reductase OS=Methylophilaceae bacterium 11 OX=11 01195 GN=queF PE=3 SV=1
MIDEYGLIFKRYNNVFLTQKLLFIMHNESLGAKPTAQPSKQLETFPNPNSGRDFHIHMEIPEFTCLCPKTGQPDFAIIYLDYIPDQLCVELKSLKLYMWSFRDEGCFHEAVTNSMLDDLVAATQPKFMRVTAKFYVRGGIFTNVVTEHRKEGWQPQPLVDLLQFSAQSNIRG

SEQ ID NO: 47419 - protein, 148 aa, Methylophilaceae bacterium
  misc_feature (1)..(148): tr|A0A4P5TXI0|A0A4P5TXI0_9PROT NADPH-dependent 7-cyano- 7-deazaguanine reductase OS=Methylophilaceae bacterium OX=2030816 GN=queF PE=3 SV=1
MKALSLGKKPSAKPTKKLETFTNPCPSRDFHIHMQIPEFTCLCPKTGQPDFATLYLDYIPNKKCVELKSLKLYIWSFRDEGCFHEAVTNRILDDLVKATEPRFMRLRAEFFVRGGVFTNVVAEHKKKGWKPEPTIDLTQFSKQSNTRS

SEQ ID NO: 47420 - protein, 147 aa, Methylophilales bacterium
  misc_feature (1)..(147): tr|A0A0H4IZM4|A0A0H4IZM4_9PROT NADPH-dependent 7-cyano- 7-deazaguanine reductase OS=Methylophilales bacterium M BRS-H7 OX=1623450 GN=queF PE=3 SV=1
MKLTKLGSKPTAQPTKELETFSNPNPKGDFHIHMEIPEFTCLCPKTGQPDFATLYLDYIPDKHCVELKSLKLYMWSFRDEGCFHEAVTNQILSDLVKATKPRYMKLTAKFYVRGGIFTNVVVEHRKKGWKPQPKVDLDQFPSQNSVV

SEQ ID NO: 47421 - protein, 148 aa, Methylophilales bacterium
  misc_feature (1)..(148): tr|A0P6P0|A0P6P0_9PROT NADPH-dependent 7-cyano-7-deazag uanine reductase OS=Methylophilales bacterium HTCC2181 OX=383631 GN=queF PE=3 SV=1
MSDQSLGGKPTAQPTKHLEVFDNPNKNRDFHIHMQIPEFTCLCPKTGQPDFATLYLDYIPDERCVELKSLKLYIWSFRDEGCFHEAVTNSILDDLVAATNPRYMKLTAKFFVRGGVFTNVVAEHRKNGWKPQEKIDLNQFPSESNTRG

SEQ ID NO: 47422 - protein, 148 aa, Methylophilus medardicus
  misc_feature (1)..(148): tr|A0A5B8CSK7|A0A5B8CSK7_9PROT NADPH-dependent 7-cyano- 7-deazaguanine reductase OS=Methylophilus medardicus OX =2588534 GN=queF PE=3 SV=1
MNEHLLGGKPTAQPEKTLETFENPNTNRDFHIHMEIPEFTCLCPKTGQPDFAVIYLDYIPNKLCVELKSLKLYMWSFRDEGCFHEAVTNQILDTLVGATDPKFMRVTAKFYVRGGIFTNVVAEHRANGWQPQPYVELSQFSAQSNIRG

SEQ ID NO: 47423 - protein, 148 aa, Methylophilus methylotrophus
  misc_feature (1)..(148): tr|A0A5C7WJ25|A0A5C7WJ25_METME NADPH-dependent 7-cyano- 7-deazaguanine reductase OS=Methylophilus methylotrophu s OX=17 GN=queF PE=3 SV=1
MNEHLLGGKPTAQPSKTLETFDNPNPGRDFHIHMEIPEFTCLCPKTGQPDFAVIYLDYIPNKLCVELKSLKLYMWSFRDEGCFHEAVTNQILDDLVASIDPKFMRVTAKFYVRGGIFTNVVVEHRAAGWQPQPYVELSQFSAQSNIRG

SEQ ID NO: 47424 - protein, 148 aa, Methylophilus rhizosphaerae
  misc_feature (1)..(148): tr|A0A1G9AUD1|A0A1G9AUD1_9PROT NADPH-dependent 7-cyano- 7-deazaguanine reductase OS=Methylophilus rhizosphaerae OX=492660 GN=queF PE=3 SV=1
MNEHLLGGKPTAEPTKALETFDNPNPGRDFHIHMEIPEFTCLCPKTGQPDFAVIYLDYIPNKLCVELKSLKLYMWSFRDEGCFHEAVTNQILDDLVVAIDPKFMRVTAKFYVRGGIFTNVVAEHRAAGWQPQPYVELSQFSAQSNIRG

SEQ ID NO: 47425 - protein, 148 aa, Methylophilus sp.
  misc_feature (1)..(148): tr|A0A5C7XD88|A0A5C7XD88_9PROT NADPH-dependent 7-cyano- 7-deazaguanine reductase OS=Methylophilus sp. OX=29541 GN=queF PE=3 SV=1
MNEHLLGGKPTAQPVKTLETFDNPNPHRDFHIHMEIPEFTCLCPKTGQPDFAIIYLDYIPNKLCVELKSLKLYMWSFRDEGCFHEAVTNQILDDLVSAIDPKFMRVTAKFYVRGGIFTNVVAEHRAAGWQPQPYVELSQFSAQSNIRG

SEQ ID NO: 47426 - protein, 148 aa, Methylophilus sp.
  misc_feature (1)..(148): tr|A0A0Q6BQC2|A0A0Q6BQC2_9PROT NADPH-dependent 7-cyano- 7-deazaguanine reductase OS=Methylophilus sp. Leaf416 O X=1736373 GN=queF PE=3 SV=1
MNEQLLGGKPTAEPTKALETFENPNSSRDFHIHMEIPEFTCLCPKTGQPDFAVIYLDYIPNKLCVELKSLKLYMWSFRDEGCFHEAVTNQILDDLVAAIDPKFMRVTAKFYVRGGIFTNVVAEHRAAGWQPQPYVELSQFSAQSNIRG

SEQ ID NO: 47427 - protein, 148 aa, Methylopila sp.
  misc_feature (1)..(148): tr|A0A2H6BGZ1|A0A2H6BGZ1_9RHIZ NADPH-dependent 7-cyano- 7-deazaguanine reductase OS=Methylopila sp. Yamaguchi O X=1437817 GN=queF PE=3 SV=1
MTEPLLGRMVGLPSSPEEAELDRVPNPHPDVTYLARFTAPEFTSLCPVTGQPDFAHIVIDYAPDEWLVESKSLKLYLGAFRNHGAFHEDCTVAIAKRLIATLKPRWLRIGGYWYPRGGIPIDVFFQAGELPPGVWVPEQGVAPYRGRG

SEQ ID NO: 47428 - protein, 129 aa, Methyloprofundus sedimenti
  misc_feature (1)..(129): tr|A0A1V8MB45|A0A1V8MB45_9GAMM NADPH-dependent 7-cyano- 7-deazaguanine reductase OS=Methyloprofundus sedimenti OX=1420851 GN=queF PE=3 SV=1
MATKPSKDLQAFDNPKPGRDFTIRIDTPEFTCLCPLTGQPDFAKITIEYVPDQLCIELKALKLYFWTFRDRGAFHEAVTNEILDDIVKVVQPNFMRVRADFNVRGGVYTSVIAEHRNPDWQAPELVQLP

SEQ ID NO: 47429 - protein, 153 aa, Methylorubrum extorquens
  misc_feature (1)..(153): tr|H1KE76|H1KE76_METEX NADPH-dependent 7-cyano-7-deazag uanine reductase OS=Methylorubrum extorquens DSM 13060 OX=882800 GN=queF PE=3 SV=1
MDSIETHAKQLGQQTPLPASPEAAQLDRVPNPHADTDYLARFTAPEFTSLCPVTGQPDFATLVIDYVPDRWLVESKSLKLYLGAFRNHGAFHEDCTVGIGRRLVALLEPRWLRIGGYWYPRGGIPIDVFWQTGEPLKSVWLPDQGVASYRGRG

SEQ ID NO: 47430 - protein, 153 aa, Methylorubrum extorquens
  misc_feature (1)..(153): sp|B7KRB3|QUEF_METC4 NADPH-dependent 7-cyano-7-deazagua nine reductase OS=Methylorubrum extorquens (strain CM4 / NCIMB 13688) OX=440085 GN=queF PE=3 SV=1
MDSIETHAKQLGQQTPLPASPEAAQLDRVPNPHADTDYLARFTAPEFTSLCPVTGQPDFATLVIDYVPDRWLVESKSLKLYLGAFRNHGAFHEDCTVGIGRRLVALLEPRWLRIGGYWYPRGGIPIDVFWQTGEPLKSVWLPDQGVAPYRGRG

SEQ ID NO: 47431 - protein, 153 aa, Methylorubrum populi
  misc_feature (1)..(153): tr|A0A177IXT1|A0A177IXT1_9RHIZ NADPH-dependent 7-cyano- 7-deazaguanine reductase OS=Methylorubrum populi OX=223 967 GN=queF PE=3 SV=1
MDSIETHAKQLGRQTPLPASPEEAQLDRVPNPHADTDYLARFTVPEFTSLCPVTGQPDFATLVIDYVPDRWLVESKSLKLYLAAFRNHGAFHEDCTVGIGRRLADLLEPRWLRIGGYWYPRGGIPIDVFWQTGEPLKSVWLPDQGVAPYRGRG

SEQ ID NO: 47432 - protein, 153 aa, Methylorubrum populi; identical to SEQ ID NO: 47431
  misc_feature (1)..(153): sp|B1ZEJ7|QUEF_METPB NADPH-dependent 7-cyano-7-deazagua nine reductase OS=Methylorubrum populi (strain ATCC BAA -705 / NCIMB 13946 / BJ001) OX=441620 GN=queF PE=3 SV=1

SEQ ID NO: 47433 - protein, 153 aa, Methylorubrum salsuginis
  misc_feature (1)..(153): tr|A0A1I4GQQ4|A0A1I4GQQ4_9RHIZ NADPH-dependent 7-cyano- 7-deazaguanine reductase OS=Methylorubrum salsuginis OX =414703 GN=queF PE=3 SV=1
MTNIEDHAKQLGKQTPLPDSPDAAQLDRVPNPHADTDYLARFTAPEFTSLCPVTGQPDFATLVIDYVPDRWLVESKSLKLYLGAFRNHGAFHEDCTVGIGRRLVSLLEPRWLRIGGYWYPRGGIPIDVFWQSGPPLPNVWLPDQGVAPYRGRG

SEQ ID NO: 47434 - protein, 153 aa, Methylorubrum sp.
  misc_feature (1)..(153): tr|A0A4Z0EAJ9|A0A4Z0EAJ9_9RHIZ NADPH-dependent 7-cyano- 7-deazaguanine reductase OS=Methylorubrum sp. Q1 OX=256 2453 GN=queF PE=3 SV=1
MDSIETHAKQLGQQTSLPASPEAAQLDRVPNPHADTDYLARFTAPEFTSLCPVTGQPDFATLVIDYVPDRWLVESKSLKLYLGAFRNHGAFHEDCTVSIGRRLVERLEPRWLRIGGYWYPRGGIPIDVFWQTGEPLKSVWLPDQGVAPYRGRG

SEQ ID NO: 47435 - protein, 153 aa, Methylorubrum zatmanii; identical to SEQ ID NO: 47430
  misc_feature (1)..(153): tr|A0A1W6RNK8|A0A1W6RNK8_9RHIZ NADPH-dependent 7-cyano- 7-deazaguanine reductase OS=Methylorubrum zatmanii OX=2 9429 GN=queF PE=3 SV=1

SEQ ID NO: 47436 - protein, 153 aa, Methylosinus sp.
  misc_feature (1)..(153): tr|A0A177P8V4|A0A177P8V4_9RHIZ NADPH-dependent 7-cyano- 7-deazaguanine reductase OS=Methylosinus sp. R-45379 OX =980563 GN=queF PE=3 SV=1
MTKTHKGAALLGQKAPLPQSPEEAELDLVANPHPGETYLVRFAAPEFTSLCPVTGQPDFAHIVIDYAPMEWLVESKSLKLYLGSYRNHGAFHEDCTIRIAKDLVAAMTPRWLRIGGYWYPRGGIPIDVFWQTGEPPAGLWLPDQGVPPYRGRG

SEQ ID NO: 47437 - protein, 153 aa, Methylosinus sp.; identical to SEQ ID NO: 47436
  misc_feature (1)..(153): tr|A0A4R8HSD0|A0A4R8HSD0_9RHIZ NADPH-dependent 7-cyano- 7-deazaguanine reductase OS=Methylosinus sp. sav-2 OX=2 485168 GN=queF PE=3 SV=1

SEQ ID NO: 47438 - protein, 153 aa, Methylosinus sporium
  misc_feature (1)..(153): tr|A0A2U1SQ99|A0A2U1SQ99_METSR NADPH-dependent 7-cyano- 7-deazaguanine reductase OS=Methylosinus sporium OX=428 GN=queF PE=3 SV=1
MTKTHKGAALLGQKTALPNSPDEAELDLVANPHPGETYLVRFVAPEFTSLCPVTGQPDFAHIVIDYAPMEWLVESKSLKLYLGSYRNHGAFHEDCTIRIAKDLAAAMTPRWLRIGGYWYPRGGIPIDVFWQTGEPPAGLWLPDQGVPPYRGRG

SEQ ID NO: 47439 - protein, 153 aa, Methylosinus sporium
  misc_feature (1)..(153): tr|A0A549SHC6|A0A549SHC6_METSR NADPH-dependent 7-cyano- 7-deazaguanine reductase OS=Methylosinus sporium OX=428 GN=queF PE=3 SV=1
MTKTHKGAALLGQKTALPNSPDEAELDLVANPHPGETYLVRFVAPEFTSLCPVTGQPDFAHIVIDYAPMEWLVESKSLKLYLGSYRNHGAFHEDCTIRIAKDLVAAMTPRWLRIGGYWYPRGGIPIDVFWQTGEPPAGLWLPDQGVPPYRGRG

SEQ ID NO: 47440 - protein, 153 aa, Methylosinus trichosporium
  misc_feature (1)..(153): tr|A0A2D2D2P0|A0A2D2D2P0_METTR NADPH-dependent 7-cyano- 7-deazaguanine reductase OS=Methylosinus trichosporium OB3b OX=595536 GN=queF PE=3 SV=1
MTKTHKGPELLGRKAALPASPDEAELDLVANPHPSETYLVRFVAPEFTSLCPVTGQPDFAHIVIDYAPAEWLVESKSLKLYLSSYRNHGAFHEDCTLRIAKDLVAALAPRWLRIGGYWYPRGGIPIDVFWQTGAPPQGLWLPDQGVPSYRGRG

SEQ ID NO: 47441 - protein, 148 aa, Methylotenera mobilis
  misc_feature (1)..(148): tr|C6WVP1|C6WVP1_METML NADPH-dependent 7-cyano-7-deazag uanine reductase OS=Methylotenera mobilis (strain JLW8 / ATCC BAA-1282 / DSM 17540) OX=583345 GN=queF PE=3 SV= 1
MTDLSLGAKPTAQPSKTLETFESPTTTRDFHIHMEIPEFTCLCPKTGQPDFAVIYLDYIPDQLCVELKSLKLYMWSFRDEGCFHEAVTNRILDDLVAATQPKFMRVTAKFYVRGGVFTNVIAEHRKPGWQPQPRVELTQFESQSNIRG

SEQ ID NO: 47442 - protein, 148 aa, Methylotenera mobilis
  misc_feature (1)..(148): tr|A0A351RAA4|A0A351RAA4_9PROT NADPH-dependent 7-cyano- 7-deazaguanine reductase OS=Methylotenera mobilis OX=35 9408 GN=queF PE=3 SV=1
MTEHSLGAKPTAQPSKTLETFENPNTKRDFHIHMEIPEFTCLCPKTGQPDFAIIYLDYIPDQLCVELKSLKLYMWSFRDEGCFHEAVTNSILDDLVEATQPKFMRVTAKFYVRGGVFTNVIAEHRKQGWQPQPRVELTQFESQSNIRG

SEQ ID NO: 47443 - protein, 148 aa, Methylotenera sp.
  misc_feature (1)..(148): tr|A0A2S5L7G4|A0A2S5L7G4_9PROT NADPH-dependent 7-cyano- 7-deazaguanine reductase OS=Methylotenera sp. OX=205195 6 GN=queF PE=3 SV=1
MTDLSLGAKPTAQPSKTLETFESPTNTRDFHIHMEIPEFTCLCPKTGQPDFAVIYLDYIPDQLCVELKSLKLYMWSFRDEGCFHEAVTNRILDDLVAATQPKFMRVTAKFYVRGGVFTNVTAEHRKAGWQPQPRVELTQFESQSNIRG

SEQ ID NO: 47444 - protein, 154 aa, Methylotenera sp.
  misc_feature (1)..(154): tr|A0A2S5NU88|A0A2S5NU88_9PROT NADPH-dependent 7-cyano- 7-deazaguanine reductase OS=Methylotenera sp. OX=205195 6 GN=queF PE=3 SV=1
MSSTNLHDSVTLLGDLSAQPSKTLETFPNPNPNRDFHIHMEIPEFTCLCPKTGQPDFAVIYLDYIPNQLCVELKSLKLYTVSFRNEGCFHEAVTNRILDDLVTSTQPKFMRVTAKFYVRGGIFTNVVAEHRQPGWQPLPRVDLLAFESQSNTRG

SEQ ID NO: 47445 - protein, 148 aa, Methylotenera versatilis
  misc_feature (1)..(148): tr|D7DI80|D7DI80_METV0 NADPH-dependent 7-cyano-7-deazag uanine reductase OS=Methylotenera versatilis (strain 30 1) OX=666681 GN=queF PE=3 SV=1
MTTQSIGGKPTAQPTKTLETFENPNQARDFHIHMEIPEFTCLCPKTGQPDFAIIYLDYIPDQTCVELKSLKLYMWSFRDEGCFHEAVTNTILDDLIAATQPKFMRVTAKFYVRGGVFTNVVAEHRKAGWQPLPRVELTQFESQSNIRG

SEQ ID NO: 47446 - protein, 118 aa, Methylothermaceae bacteria
  misc_feature (1)..(118): tr|A0A148N4Q6|A0A148N4Q6_9GAMM NADPH-dependent 7-cyano- 7-deazaguanine reductase OS=Methylothermaceae bacteria B42 OX=1798802 GN=queF PE=3 SV=1
MSTKPSRELETFPNPNPDRDYTIRIETPEFTCLCPKTGQPDFAHITVEYIPDKLCVELKSYKLYIWSYRDLGAFHEAVTNQILDDLVGACQPRWMKVEAKFNVRGGIYTTVMAEYERN

SEQ ID NO: 47447 - protein, 219 aa, Methyloversatilis sp.
  misc_feature (1)..(219): tr|A0A257X8U4|A0A257X8U4_9PROT NADPH-dependent 7-cyano- 7-deazaguanine reductase QueF (Fragment) OS=Methylovers atilis sp. 12-65-5 OX=1970398 GN=B7Z51_06265 PE=4 SV=1
MDEERQLPSHSPLGRSTDYPDRYDAGLLFPMQRCASRQSLGLLPGQPLPFSGIDRWHAWEISWLDPHGKPQVAIGRFDIPADSVCMVESKSLKLYLNSYNNERMVSREAVRALIETDLSAACQSGVMVELYALDALPTQAGVQADALPGDSIDAPELHFDCYQPDASLLSAGGDPVEECLRSDLLKTNCPVTLQPDWATLMVRYRGPRIDREGLLRYVV

SEQ ID NO: 47448 - protein, 283 aa, Methyloversatilis sp.
  misc_feature (1)..(283): tr|A0A1B3LMC2|A0A1B3LMC2_9PROT NADPH-dependent 7-cyano- 7-deazaguanine reductase OS=Methyloversatilis sp. RAC08 OX=1842540 GN=queF PE=3 SV=1
MMDDERQLPSHSPLGRSSDYPDRYDAGLLFPMQRTASRQSLGLVHGQPLPFSGIDRWHAWEISWLDPHGKPQVAIGRFDIPADSVCMVESKSLKLYLNSYNNERMVSREAVRALIETDLSAACQSGVMVELYALDALPTQAWTQLDALPGDSIDAPELHFDCYQPDASLLSAGGDPVEECLRSDLLKTNCPVTLQPDWATLMVRYRGPRIDREGLLRYVVSFRNHADFHEHCVERIYMDLLQRCRPERLTVNALYTRRGGLDINPWRSNFEQPDARFVKLARQ

SEQ ID NO: 47449 - protein, 274 aa, Methyloversatilis universalis
  misc_feature (1)..(274): tr|F5R9J9|F5R9J9_METUF NADPH-dependent 7-cyano-7-deazag uanine reductase OS=Methyloversatilis universalis (stra in ATCC BAA-1314 / JCM 13912 / FAM5) OX=1000565 GN=queF PE=3 SV=1
MEHPATGSGLGHSTDYPDSYDAGLLFPMPREASRLPLGLAADALPFAGIDRWHAWEVSWLNPQGKPEVAIGRIDIPASSPFMVESKSLKLYLNGYNSERMVSLEAVRALIETDLSAACQAGVTVELYSPDTLPGLAVQSPGESIDALDIACERYHPDPALLSAAGDTVEETLRSDLLKSNCPVTLQPDWASVIVHYVGPRIDRAGLLRYIVSFRNHADFHEHCVERIWVDLMERCRPEKLTVFACYTRRGGLDINPWRSNFETLPDTFVKLARQ

SEQ ID NO: 47450 - protein, 153 aa, Methylovirgula ligni
  misc_feature (1)..(153): tr|A0A3D9Z4C1|A0A3D9Z4C1_9RHIZ NADPH-dependent 7-cyano- 7-deazaguanine reductase OS=Methylovirgula ligni OX=569 860 GN=queF PE=3 SV=1
MSKKPIAAPLLGRQAALPASPDEAKLDRVPNPHPDADYIARFTAPEFTSLCPVTGQPDFAHLVIDYVPDRWLVESKSLKLYLGAFRNHGAFHEDCTIRVGKDLIALLKPRWLRIGGYFYPRGGIPIDVFWQSGKVPAGVWVPDQGVAPYRGRG

SEQ ID NO: 47451 - protein, 153 aa, Methylovirgula sp.
  misc_feature (1)..(153): tr|A0A371WUN4|A0A371WUN4_9RHIZ NADPH-dependent 7-cyano- 7-deazaguanine reductase OS=Methylovirgula sp. 4M-Z18 O X=2293567 GN=queF PE=3 SV=1
MAKSTKQLHALGQSVAMPDHPDEAILERVPNPQAGTNYVARFTVPEFTSVCPVTNQPDFAHLVIDYVPGAWLVESKSLKLYLLGFRNHGAFHEDCTVRIGKDLVKLLRPKWFRIGGYWYPRGGIPIDVFWQTGTVPKGTWVPDQGVASYRGRG

SEQ ID NO: 47452 - protein, 139 aa, Methylovorus glucosetrophus
  misc_feature (1)..(139): tr|C6XDD6|C6XDD6_METGS NADPH-dependent 7-cyano-7-deazag uanine reductase OS=Methylovorus glucosetrophus (strain SIP3-4) OX=582744 GN=queF PE=3 SV=1
MSSQPTKALETFDNPQPGRDFHIHMEIPEFTCLCPKTGQPDFAVLYLDYIPDQKCVELKSLKLYMWSFRDEGCFHEAVTNRILDDLVAATDPKFMRLTAKFYVRGGIFTNVVAEHRKPGWQPLPRVELSQFDAQSNIRG

SEQ ID NO: 47453 - protein, 139 aa, Methylovorus sp.
  misc_feature (1)..(139): tr|A0A1A9T5T9|A0A1A9T5T9_9PROT NADPH-dependent 7-cyano- 7-deazaguanine reductase OS=Methylovorus sp. MM2 OX=184 8038 GN=queF PE=3 SV=1
MSSQPSKALETFDNPKPERDFHIHMEIPEFTCLCPKTGQPDFAVLYLDYIPDQKCVELKSLKMYIWAFRDQGCFHEAVTNEILDDLVQATAPKFMRLTAKFYVRGGIFTNVVAEYRKEGWLPAPRVDLTQFEQQFNTRG

SEQ ID NO: 47454 - protein, 129 aa, Methylovulum psychrotolerans
  misc_feature (1)..(129): tr|A0A2S5CN95|A0A2S5CN95_9GAMM NADPH-dependent 7-cyano- 7-deazaguanine reductase OS=Methylovulum psychrotoleran s OX=1704499 GN=queF PE=3 SV=1
MTTQPSKDLETFDNPQPGRDYTIRIDIPEFTCLCPKTGQPDFATLQIEYVPAALCVELKALKLYMWTFRERGAFHEAVTNEILNDIVAVTQPNFMRIRAEFNVRGGIYTTVVVEHRNPAWQAPELVNLP

SEQ ID NO: 47455 - protein, 145 aa, Methylovulum psychrotolerans
  misc_feature (1)..(145): tr|A0A1Z4BVU0|A0A1Z4BVU0_9GAMM NADPH-dependent 7-cyano- 7-deazaguanine reductase OS=Methylovulum psychrotoleran s OX=1704499 GN=queF PE=3 SV=1
MAGKTVLPSSTQPKKLMTTQPSKDLETFDNPQPGRDYTIRIDIPEFTCLCPKTGQPDFATLQIEYVPAALCVELKALKLYMWTFRERGAFHEAVTNEILNDIVAVTQPNFMRIRAEFNVRGGIYTTVVVEHRNPAWQAPELVNLP

SEQ ID NO: 47456 - protein, 129 aa, Methylovulum sp.
  misc_feature (1)..(129): tr|A0A522EI21|A0A522EI21_9GAMM NADPH-dependent 7-cyano- 7-deazaguanine reductase OS=Methylovulum sp. OX=1916980 GN=queF PE=3 SV=1
MSTQASKDLEIFDNPQPGRDYTVRIDIPEFTCLCPKTGQPDFATIQIEYVPATLCVELKSLKLYMWAFREQGAFHEAVTNEILNDMVKAVAPMFMRVRAEFNVRGGIYTTVVAEHRDPAWKAPEFVQLP

SEQ ID NO: 47457 - protein, 154 aa, Micavibrio sp.
  misc_feature (1)..(154): tr|A0A2D6JZD3|A0A2D6JZD3_9PROT NADPH-dependent 7-cyano- 7-deazaguanine reductase OS=Micavibrio sp. OX=2024841 G N=queF PE=3 SV=1
MSKSIYEDLTQLGSKTPLPNSPEEAELERVPNPKKDMEYCVRFSAPEFTSLCPLTGAPDFAHIVIDYVPGEYLVESKSLKLFLGSFRNHGAFHEDCTLEIAKRIMEITEAKWLRIGGYWYPRGGIPIDVFYQSGEPPKGVWIPEAGVQNYRGRG

SEQ ID NO: 47458 - protein, 154 aa, Micavibrio sp.
  misc_feature (1)..(154): tr|A0A2D8M1K4|A0A2D8M1K4_9PROT NADPH-dependent 7-cyano- 7-deazaguanine reductase OS=Micavibrio sp. OX=2024841 G N=queF PE=3 SV=1
MTKDIYKNLSQLGQKSELPDSPEEAVLERVKNPQENTNYIVRFTAPEFTSLCPITSAPDFAHLVIDYLPGDWLIESKSLKLYLGSFRNHGAFHEDCTVTIAKKLAETLEPKWLRIGGYWFPRGGIPIDVFYQTGPDPEGVWIPEQGVAPYRGRG

SEQ ID NO: 47459 - protein, 165 aa, Microbacterium sp.; identical to SEQ ID NO: 44303
  misc_feature (1)..(165): tr|A0A542GQM9|A0A542GQM9_9BACI NADPH-dependent 7-cyano- 7-deazaguanine reductase OS=Microbacterium sp. SLBN-1 O X=1489561 GN=queF PE=3 SV=1

SEQ ID NO: 47460 - protein, 276 aa, Microbulbifer agarilyticus
  misc_feature (1)..(276): tr|A0A1Q2M3T2|A0A1Q2M3T2_9GAMM NADPH-dependent 7-cyano- 7-deazaguanine reductase OS=Microbulbifer agarilyticus OX=260552 GN=queF PE=3 SV=1
MNREDWQNLPLGQETRYESKYNPGLLHPIPRAVSRKQLGLEGQALPFSGADEWWGFELSWLNPKGVPQVAVARFRFAASSPSMIESKSFKLYLNSLNQSEFASSGAVREVLEKDLSAAAGSDVAVTLFGVDDPALAVHAPQGECLDGLDIETRTYEPDAALLKLKQSGEVVEEILFSHLLRSNCPVTGQPDWATVSIQYRGPALDRAGLLAYIISFREHQDFHEHCVERIYCDLQRLAAFEELTVCARYTRRGGLDINPLRTSSGNIEFPLRYGRQ

SEQ ID NO: 47461 - protein, 276 aa, Microbulbifer aggregans
  misc_feature (1)..(276): tr|A0A1C9W8U1|A0A1C9W8U1_9GAMM NADPH-dependent 7-cyano- 7-deazaguanine reductase OS=Microbulbifer aggregans OX= 1769779 GN=queF PE=3 SV=1
MDREDWKGLPLGQETQYESRYNPGLLHPIERAISRAHLGLSGGELPFSGLDEWWGFELSWLNPRGVPQVAVGRFSFPHDSVAMIESKSFKLYLNSFNQSEFASWEEVRDTLKRDLSTASGGEVTVELLGVEDAALSVVKPEGFCLDQLDIETRRYQPDAALLRLDAGRGAVSEVLYSHLLRSNCPVTGQPDWATVCIDYRGPALDREALLAYIISFREHQDFHEHCVERIFCDLQQLSGFDELTVCARYTRRGGLDINPLRSTLAGKGLPPRFARQ

SEQ ID NO: 47462 - protein, 276 aa, Microbulbifer donghaiensis
  misc_feature (1)..(276): tr|A0A1M5HCH0|A0A1M5HCH0_9GAMM NADPH-dependent 7-cyano- 7-deazaguanine reductase OS=Microbulbifer donghaiensis OX=494016 GN=queF PE=3 SV=1
MTREDWQNLPLGQETQYESAYNPALLHPIQRSISRAHLGLDGEALPFFGEDEWWGFELSWLNPKGKPQVAVARFAFPATSPHMVESKSFKLYLNSFNQTVFPSWDAVSDALEKDLTAASGADMSVTLFEVEDPALAVAKPEGYCLDLLDIDIKHYQPDAALLALDSDDRPVSEILYSHLLRSNCPVTGQPDWATVSVEYKGPAIERESLLAYIISFREHQDFHEHCVERMFCDLQRLAEFEELTVCARYTRRGGLDINPLRSTLQNKKLPPRFARQ

SEQ ID NO: 47463 - protein, 276 aa, Microbulbifer marinus
  misc_feature (1)..(276): tr|A0A1H3VP89|A0A1H3VP89_9GAMM NADPH-dependent 7-cyano- 7-deazaguanine reductase OS=Microbulbifer marinus OX=65 8218 GN=queF PE=3 SV=1
MTREDWQDLPLGRETQYESAYNPALLHPIQRSISRAHLGLEGDTLPFCGEDEWWGFELSWLNPKGMPQVAVARFTFPAASPHMVESKSLKLYLNSFNQTEFASWDAVRETLIKDLSAAAGAEVAVTLFEVEDPALAIAKPEGDCLDRLDIAIDQYQPDAALLALADSGERVNETLYSHLLRSNCPVTGQPDWATVCVEYKGPAIKREALLAYIVSFRDHQDFHEHCVERIFCDLQQLAKFDELTVCARYTRRGGLDINPLRSTLQNKKLPPRFARQ

SEQ ID NO: 47464 - protein, 276 aa, Microbulbifer sp.
  misc_feature (1)..(276): tr|A0A2S1JQR0|A0A2S1JQR0_9GAMM NADPH-dependent 7-cyano- 7-deazaguanine reductase OS=Microbulbifer sp. A4B17 OX= 359370 GN=queF PE=3 SV=1
MTREDWQNLPLGQETTYESTYNPELLHPIQRSVSRAQLGLSAGALPFFGEDEWWGFELSWLNPRGKPQVAVARFSFPAESPCMVESKSFKLYLNSFNQSRFESWRLVQDALVRDLSAAAGMNVGVVLMDVEDAALAVEKPEGYCLDHLDIEVNQYEPAPALLALGDGEEDVSEILYSHLLRSNCPVTGQPDWATVVVEYKGPALKREALLAYIISFREHQDFHEHCVERIFCDLQKLAEFTELTVCARYTRRGGLDINPLRSTRIEKRLPPRFARQ

SEQ ID NO: 47465 - protein, 276 aa, Microbulbifer sp.
  misc_feature (1)..(276): tr|A0A510IVI9|A0A510IVI9_9GAMM NADPH-dependent 7-cyano- 7-deazaguanine reductase OS=Microbulbifer sp. GL-2 OX=2 591606 GN=queF PE=3 SV=1
MNREDWQNLPLGRETTYESTYNPQLLHPIQRSISRAQLGLSAGALPFFGEDEWWGFELSWLNSKGKPQVAVARFSFPAESPCMVESKSFKLYLNSFNQSKFESWRLVQDTLARDLGAAVGTAVEVNLLDVEDAALAVERPQGYCLDDLDILVEQYQPDPSLLALDESEEDISEILYSHLLRSNCPVTGQPDWATVMVEYRGPALKREALLAYIISFREHQDFHEHCVERIFCDLQQLAEFSELTVCARYTRRGGLDINPLRSTRIEKPLPPRFARQ

SEQ ID NO: 47466 - protein, 275 aa, Microbulbifer thermotolerans
  misc_feature (1)..(275): tr|A0A1I1F8D0|A0A1I1F8D0_9GAMM NADPH-dependent 7-cyano- 7-deazaguanine reductase OS=Microbulbifer thermotoleran s OX=252514 GN=queF PE=3 SV=1
MNREDWQNLPLGKETRYESTYNPGLLYPIPRAVSRAQLGLGDELPFVGEDEWWGYELSWLNPKGVPQVAVARFSFPASSSRMVESKSFKLYLNSFNQTEFASWDAVRETLAKDLSEVSGAAVEVNLYNVEDAVLAPEPPRGICLDRLDIETRRYQPDASILKLAGGAEPVSETLYSHLLRSNCPVTGQPDWATVSVEYQGPALHRGALLAYIISFREHQDFHEHCVERIFCDLHRLAAFEALTVSARYTRRGGLDINPLRSTIAGKPLPPRFARQ

SEQ ID NO: 47467 - protein, 275 aa, Microbulbifer thermotolerans
  misc_feature (1)..(275): tr|A0A143HM63|A0A143HM63_9GAMM NADPH-dependent 7-cyano- 7-deazaguanine reductase OS=Microbulbifer thermotoleran s OX=252514 GN=queF PE=3 SV=1
MNREDWQNLPLGKETRYESTYNPGLLYPIPRAVSRVQLGLGDELPFVGEDEWWGYELSWLNPKGVPQVAVARFSFPASSSRMVESKSFKLYLNSFNQTEFASWDAVRETLAKDLSEVSGAAVEVNLYNVEDAVLAPEPPRGICLDRLDIETRRYQPDASILKLAGGAEPVSETLYSHLLRSNCPVTGQPDWATVSVEYQGPALHREALLAYIISFREHQDFHEHCVERIFCDLHRLAAFEALTVSARYTRRGGLDINPLRSTIAGKPLPPRFARQ

SEQ ID NO: 47468 - protein, 281 aa, Microbulbifer yueqingensis
  misc_feature (1)..(281): tr|A0A1G9AQB4|A0A1G9AQB4_9GAMM NADPH-dependent 7-cyano- 7-deazaguanine reductase OS=Microbulbifer yueqingensis OX=658219 GN=queF PE=3 SV=1
MDREDWQDLPLGQETSYESRYNPDLLHPIPRHVSRAHLGLMEGELPFCGHDEWWGFELSWLNPRGVPQVAVGRFTFPATSPHMVESKSFKLYLNSLNQTEFGSLDEVRDTLASDLRAAAGAEVGVTLFDVESDELAVQAPRGFCLDRLDIETHRYEPDAALLRLDCDDGEAEGRLVEETLYSHLLRSNCPVTGQPDWGTVFIHYQGPALDREALLAYVISFREHQDFHEHCVERMFCDLMGLADFKALTVCARYTRRGGLDINPLRSRKAVAELAGRLARQ

SEQ ID NO: 47469 - protein, 165 aa, Micrococcus lylae; identical to SEQ ID NO: 47079
  misc_feature (1)..(165): tr|A0A378P1V8|A0A378P1V8_9MICC NADPH-dependent 7-cyano- 7-deazaguanine reductase OS=Micrococcus lylae OX=1273 G N=queF PE=3 SV=1

SEQ ID NO: 47470 - protein, 139 aa, Microcoleaceae bacterium
  misc_feature (1)..(139): tr|A0A355CLT8|A0A355CLT8_9CYAN NADPH-dependent 7-cyano- 7-deazaguanine reductase OS=Microcoleaceae bacterium UB A10368 OX=2055793 GN=queF PE=3 SV=1
MNNDQTEQSMSQMSSTEEMKYGEREILDGELITFPNPRIGRRYSINITLPEFTCKCPFSGYPDFATIHVTYVPDERVVELKALKLYINSYRDRYISHEESINQILDDFVAACSPLEATIKGDFSPRGNVHTVIEVRHEK

SEQ ID NO: 47471 - protein, 38 aa, Microcoleaceae bacterium
  misc_feature (1)..(38): tr|A0A349JMZ7|A0A349JMZ7_9CYAN NADPH-dependent 7-cyano- 7-deazaguanine reductase QueF (Fragment) OS=Microcoleac eae bacterium UBA11344 OX=2055792 GN=DCS91_17690 PE=4 S V=1
MNNHPTEQSMSQKSSAEEMKYGERQILEGELITFPNPR

SEQ ID NO: 47472 - protein, 160 aa, Microcoleus sp.
  misc_feature (1)..(160): tr|K9WFH4|K9WFH4_9CYAN NADPH-dependent 7-cyano-7-deazag uanine reductase OS=Microcoleus sp. PCC 7113 OX=1173027 GN=queF PE=3 SV=1
MVGRQRIALTGNLISNLELAMNQSLTQEQVSSEVQTPEMKYGEREIAEGKLITFPNPRVGRRYDINITLPEFTCKCPFSGYPDFATIHITYVPDERVVELKALKLYINSYRDRYISHEESVNQILDDFVEACDPLEVTVKGDFSPRGNVHTVIEVRHQKE

SEQ ID NO: 47473 - protein, 139 aa, Microcoleus vaginatus
  misc_feature (1)..(139): tr|F5UJC6|F5UJC6_9CYAN NADPH-dependent 7-cyano-7-deazag uanine reductase OS=Microcoleus vaginatus FGP-2 OX=7560 67 GN=queF PE=3 SV=1
MNNYAPEQTMSQKSSTEEMKYGERQILEGELITFPNPRVGRRYSINITLPEFTCKCPFSGYPDFATIHVTYVPDERVVELKALKLYVNSYRDRYISHEESINQILDDFVAACAPLEATIKGDFSPRGNVHTVIEVSHQK

SEQ ID NO: 47474 - protein, 131 aa, Microcystis aeruginosa; identical to SEQ ID NO: 45296
  misc_feature (1)..(131): tr|A0A2H6L623|A0A2H6L623_MICAE NADPH-dependent 7-cyano- 7-deazaguanine reductase OS=Microcystis aeruginosa NIES -87 OX=449440 GN=queF PE=3 SV=1

SEQ ID NO: 47475 - protein, 131 aa, Microcystis aeruginosa; identical to SEQ ID NO: 45296
  misc_feature (1)..(131): sp|B0JPS9|QUEF_MICAN NADPH-dependent 7-cyano-7-deazagua nine reductase OS=Microcystis aeruginosa (strain NIES-8 43) OX=449447 GN=queF PE=3 SV=1

SEQ ID NO: 47476 - protein, 131 aa, Microcystis flosaquae
  misc_feature (1)..(131): tr|A0A552KR06|A0A552KR06_9CHRO NADPH-dependent 7-cyano- 7-deazaguanine reductase OS=Microcystis flos-aquae Mf_Q C_C_20070823_S10D OX=2486236 GN=queF PE=3 SV=1
MVQSSEKIEVKYGEREIAEGTLITFPNPRPGRNYDIQITLPEYTCKCPFSGYPDFATIYLSYVPDQKVMELKAIKLYINSYRDRYISHEEAINQILDDLVAACEPLQMKIKGDFHPRGNVHTVVEVMYKKE

SEQ ID NO: 47477 - protein, 131 aa, Microcystis flosaquae; identical to SEQ ID NO: 47476
  misc_feature (1)..(131): tr|A0A552LZ37|A0A552LZ37_9CHRO NADPH-dependent 7-cyano- 7-deazaguanine reductase OS=Microcystis flos-aquae Mf_W U_F_19750830_S460 OX=2486237 GN=queF PE=3 SV=1

SEQ ID NO: 47478 - protein, 131 aa, Microcystis novacekii
  misc_feature (1)..(131): tr|A0A552ILK8|A0A552ILK8_9CHRO NADPH-dependent 7-cyano- 7-deazaguanine reductase OS=Microcystis novacekii Mn_MB _F_20050700_S1D OX=2486266 GN=queF PE=3 SV=1
MVQSSEKIEVKYGEREIAEGTLITFPNPRPGRNYDIQITLPEYTCKCPFSGYPDFATIYLSYVPDQKVMELKAIKLYINSYRDHYISHEEAINQILDDLVAACEPLQMKIKGDFHPRGNVHTVVEVMYKKE

SEQ ID NO: 47479 - protein, 131 aa, Microcystis panniformis; identical to SEQ ID NO: 45296
  misc_feature (1)..(131): tr|A0A0K1S889|A0A0K1S889_9CHRO NADPH-dependent 7-cyano- 7-deazaguanine reductase OS=Microcystis panniformis FAC HB-1757 OX=1638788 GN=queF PE=3 SV=1

SEQ ID NO: 47480 - protein, 131 aa, Microcystis panniformis; identical to SEQ ID NO: 45296
  misc_feature (1)..(131): tr|A0A552PRT9|A0A552PRT9_9CHRO NADPH-dependent 7-cyano- 7-deazaguanine reductase OS=Microcystis panniformis Mp_ MB_F_20051200_S9 OX=2486223 GN=queF PE=3 SV=1

SEQ ID NO: 47481 - protein, 131 aa, Microcystis sp.; identical to SEQ ID NO: 45296
  misc_feature (1)..(131): tr|A0A552AM08|A0A552AM08_9CHRO NADPH-dependent 7-cyano- 7-deazaguanine reductase OS=Microcystis sp. M_OC_Ca_000 00000_C217Col OX=2486213 GN=queF PE=3 SV=1

SEQ ID NO: 47482 - protein, 131 aa, Microcystis sp.
  misc_feature (1)..(131): tr|A0A552C5X4|A0A552C5X4_9CHRO NADPH-dependent 7-cyano- 7-deazaguanine reductase OS=Microcystis sp. Msp_OC_L_20 101000_S702 OX=2486218 GN=queF PE=3 SV=1
MVQSSEKIEVKYGEREIAEGTLITFPNPRPGRNYDIHITLPEYTCKCPFSGYPDFATIYLSYVPDQKVMELKAIKLYINSYRDRYISHEEAINQILDDLVAACEPLQMKVKGDFHPRGNVHTVVEVMYKKE

SEQ ID NO: 47483 - protein, 131 aa, Microcystis viridis; identical to SEQ ID NO: 45296
  misc_feature (1)..(131): tr|A0A3G9JFT5|A0A3G9JFT5_MICVR NADPH-dependent 7-cyano- 7-deazaguanine reductase OS=Microcystis viridis NIES-10 2 OX=213615 GN=queF PE=3 SV=1

SEQ ID NO: 47484 - protein, 131 aa, Microcystis viridis
  misc_feature (1)..(131): tr|A0A552HTE8|A0A552HTE8_MICVR NADPH-dependent 7-cyano- 7-deazaguanine reductase OS=Microcystis viridis Mv_BB_P _19951000_S68D OX=2486270 GN=queF PE=3 SV=1
MVQSSEKIEVKYGEREIAEGTLITFPNPRPGRNYDIQITLPEYTCKCPFSGYPDFATIYLSYVPDQKVMELKAIKLYINSYRDRYISHEEAINQILDDLVAACEPLQMKVKGDFHPRGNVHTVVEVIYKKE

SEQ ID NO: 47485 - protein, 131 aa, Microcystis wesenbergii; identical to SEQ ID NO: 47482
  misc_feature (1)..(131): tr|A0A552LIH5|A0A552LIH5_9CHRO NADPH-dependent 7-cyano- 7-deazaguanine reductase OS=Microcystis wesenbergii Mw_ MB_S_20031200_S109D OX=2486241 GN=queF PE=3 SV=1

SEQ ID NO: 47486 - protein, 131 aa, Microcystis wesenbergii; identical to SEQ ID NO: 45296
  misc_feature (1)..(131): tr|A0A3E0M8S1|A0A3E0M8S1_9CHRO NADPH-dependent 7-cyano- 7-deazaguanine reductase OS=Microcystis wesenbergii TW1 0 OX=2060474 GN=queF PE=3 SV=1

SEQ ID NO: 47487 - protein, 123 aa, Micromonospora echinospora
  misc_feature (1)..(123): tr|Q70KE1|Q70KE1_MICEC NADPH-dependent 7-cyano-7-deazag uanine reductase OS=Micromonospora echinospora OX=1877 GN=gacA PE=3 SV=1
MALTKLGRADTPPDRSLETFPIGDSSQEITIDCREFTCRCPITGQPDWATIRIEYRPGDRGVETKSLKLYLETFRDEGIFHEHLATKMRDDLVAALEPVFLKVTVDFNVRGGIALAASSTYQR

SEQ ID NO: 47488 - protein, 123 aa, Micromonospora inyonensis
  misc_feature (1)..(123): tr|C9W382|C9W382_9ACTN NADPH-dependent 7-cyano-7-deazag uanine reductase OS=Micromonospora inyonensis OX=47866 GN=sis16 PE=3 SV=1
MALTKLGRADTPPDRSLETFPITDSSQEITIDCREFTCRCPITGQPDWATIRIDYRPGDRGVETKSLKLYLETFRDEGIFHEHLATKMRDDLVAALEPVFLKVTVDFNVRGGIALAASSTYQR

SEQ ID NO: 47489 - protein, 123 aa, Micromonospora olivasterospora
  misc_feature (1)..(123): tr|Q2MFY6|Q2MFY6_MICOL NADPH-dependent 7-cyano-7-deazag uanine reductase OS=Micromonospora olivasterospora OX=1 880 GN=fosC PE=3 SV=1
MALTKLGRANTPPDRSLETFPIGDSSQEITIDCREFTCRCPITGQPDWATIRIDYRPGDRGVETKSLKLYLETFRDEGIFHEHLATKMRDDLVATLEPVFLKVTVNFNVRGGIALAASSTYER

SEQ ID NO: 47490 - protein, 123 aa, Micromonospora pallida
  misc_feature (1)..(123): tr|A0A1C6TCV8|A0A1C6TCV8_9ACTN NADPH-dependent 7-cyano- 7-deazaguanine reductase OS=Micromonospora pallida OX=1 45854 GN=queF PE=3 SV=1
MALTKLGRADTPPDRSLETFPIGDDSQEITIDCREFTCRCPITGQPDWATIRIDYRPGDRGVETKSLKLYLETFRDEGIFHEHLATKMRDDLVAALDPVFLKVTVDFNVRGGIALAASSTYQR

SEQ ID NO: 47491 - protein, 123 aa, Micromonospora sagamiensis; identical to SEQ ID NO: 47488
  misc_feature (1)..(123): tr|A0A562WA78|A0A562WA78_9ACTN NADPH-dependent 7-cyano- 7-deazaguanine reductase OS=Micromonospora sagamiensis OX=47875 GN=queF PE=3 SV=1

SEQ ID NO: 47492 - protein, 123 aa, Micromonospora sp.
  misc_feature (1)..(123): tr|A0A3N1A6F8|A0A3N1A6F8_9ACTN NADPH-dependent 7-cyano- 7-deazaguanine reductase OS=Micromonospora sp. Llam0 OX =2485143 GN=queF PE=3 SV=1
MALTKLGQAQAKPDGTLDTFPITDSSQEITIDCREFTCRCPITGQPDWATIRIDYRPGDRGVETKSLKLYLETFRDEGIFHEHLATKMRDDLVAALNPIFLKVTVDFNVRGGIALAASSTYQR

SEQ ID NO: 47493 - protein, 151 aa, Microvirga aerophila
  misc_feature (1)..(151): tr|A0A512BY18|A0A512BY18_9RHIZ NADPH-dependent 7-cyano- 7-deazaguanine reductase OS=Microvirga aerophila OX=670 291 GN=queF PE=3 SV=1
MMTDTLLQLGQASAVPTSPEDAQLDRVPNPHTDTDYLARFTAPEFTSLCPVTGQPDFAILVIDYVPGDWLVESKSLKLYMHSFRNHGAFHEDCTVAIGKRLAALLEPRYLRIGGYWYPRGGIPIDVFWQTGEMPKDLWLPDQGVAPYRPRV

SEQ ID NO: 47494 - protein, 150 aa, Microvirga guangxiensis
  misc_feature (1)..(150): tr|A0A1G5J3J2|A0A1G5J3J2_9RHIZ NADPH-dependent 7-cyano- 7-deazaguanine reductase OS=Microvirga guangxiensis OX= 549386 GN=queF PE=3 SV=1
MITDTHLQLGQASALPQTPEEATLDRVPNPHPDTDYLARFTVPEFTSLCPVTGQPDFAIIVIDYVPGPWLVESKSLKLYMHSFRNHGAFHEDCTVAIGKRLTELLEPRYLRIGGYWYPRGGIPIDVFWQTGEVPKNLWLPDQGVAPYRAR

SEQ ID NO: 47495 - protein, 149 aa, Microvirga lotononidis
  misc_feature (1)..(149): tr|I4Z0G6|I4Z0G6_9RHIZ NADPH-dependent 7-cyano-7-deazag uanine reductase OS=Microvirga lotononidis OX=864069 GN =queF PE=3 SV=1
MTETTLQLGHASALPQSPEEAQLDRVPNPHSDTDYLARFTVPEFTSLCPVTGQPDFAILVIDYVPGPWLVESKSLKLYMHSFRNHGAFHEDCTVAIGKRLADLLEPRYLRIGGYWYPRGGIPIDVFWQTGELPKNLWLPDQGVAPYRAR

SEQ ID NO: 47496 - protein, 149 aa, Microvirga ossetica
  misc_feature (1)..(149): tr|A0A1B2ENT2|A0A1B2ENT2_9RHIZ NADPH-dependent 7-cyano- 7-deazaguanine reductase OS=Microvirga ossetica OX=1882 682 GN=queF PE=3 SV=1
MTETTLQLGHASALPDSPETAQLDRVPNPHPDTDYLARFTVPEFTSLCPVTGQPDFAILVIDYVPGPWLVESKSLKLYMHSFRNHGAFHEDCTVAIGKRLADLLEPRYLRIGGYWYPRGGIPIDVFWQTGELPKNLWLPDQGVAPYRAR

SEQ ID NO: 47497 - protein, 149 aa, Microvirga sp.
  misc_feature (1)..(149): tr|A0A2T7TZV3|A0A2T7TZV3_9RHIZ NADPH-dependent 7-cyano- 7-deazaguanine reductase OS=Microvirga sp. KLBC 81 OX=1 862707 GN=queF PE=3 SV=1
MTETHLQLGQASALPQTPEEAQLDRVPNPHPDTDYLARFTVPEFTSLCPVTGQPDFAILVIDYVPGPWLVESKSLKLYMHSFRNHGAFHEDCTVAIGKRLAELLEPRYLRIGGYWYPRGGIPIDVFWQTGELPKNLWLPDQGVAPYRAR

SEQ ID NO: 47498 - protein, 149 aa, Microvirga sp.
  misc_feature (1)..(149): tr|A0A086MQ40|A0A086MQ40_9RHIZ NADPH-dependent 7-cyano- 7-deazaguanine reductase OS=Microvirga sp. BSC39 OX=154 9810 GN=queF PE=3 SV=1
MTDNTLQLGQSSALPDSAEAAQLDRVPNPHPDTDYLARFTVPEFTSLCPVTGQPDFAIIVIDYAPGPWLVESKSLKLYMHSFRNHGAFHEDCTVAIGKRLADLLEPRYLRIGGYWYPRGGIPIDVFWQTGELPKNLWLPDQGVAPYRAR

SEQ ID NO: 47499 - protein, 149 aa, Microvirga subterranea
  misc_feature (1)..(149): tr|A0A370HGG9|A0A370HGG9_9RHIZ NADPH-dependent 7-cyano- 7-deazaguanine reductase OS=Microvirga subterranea OX=1 86651 GN=queF PE=3 SV=1
MTDTHLQLGQASASPRSPEEAKLDRVPNPHQDTDYLARFTVPEFTSLCPVTGQPDFAILVIDYAPGPWLVESKSLKLYMHSFRDHGAFHEDCTIAIGKRLAELLEPRYLRIGGYWYPRGGIPIDVFWQTGELPKNLWLPDQGVAPYRAR

SEQ ID NO: 47500 - protein, 150 aa, Microvirga vignae
  misc_feature (1)..(150): tr|A0A0H1RI74|A0A0H1RI74_9RHIZ NADPH-dependent 7-cyano- 7-deazaguanine reductase OS=Microvirga vignae OX=122556 4 GN=queF PE=3 SV=1
MTTEPHLQLGQASALPQTPEEAQLDRVPNPHPDTDYLARFTVPEFTSLCPVTGQPDFAILVIDYVPGPWLVESKSLKLYMHSFRNHGAFHEDCTVAIGKRLAELLEPRYLRIGGYWYPRGGIPIDVFWQTGELPKNLWLPDQGVAPYRAR

SEQ ID NO: 47501 - protein, 145 aa, Microvirgula aerodenitrificans
  misc_feature (1)..(145): tr|A0A2S0PD85|A0A2S0PD85_9NEIS NADPH-dependent 7-cyano- 7-deazaguanine reductase OS=Microvirgula aerodenitrific ans OX=57480 GN=queF PE=3 SV=1
MNLHDKLNALGSQRTDYRYDQPDAALLERFPNPYAEATINPHGVTGSLNITCPEFTSLCPVTGQPDFATLVIDMIPGAWCVESKSLKLYLGSFRMHGEFHEACVCRICNDLVTLLQPKWIRVEGRFTPRGGIPLWPTAEWRQPGC

SEQ ID NO: 47502 - protein, 145 aa, Microvirgula sp.; identical to SEQ ID NO: 47501
  misc_feature (1)..(145): tr|A0A329BA22|A0A329BA22_9NEIS NADPH-dependent 7-cyano- 7-deazaguanine reductase OS=Microvirgula sp. AG722 OX=2 183901 GN=queF PE=3 SV=1

SEQ ID NO: 47503 - protein, 272 aa, Midichloria mitochondrii
  misc_feature (1)..(272): tr|F7XTZ6|F7XTZ6_MIDMI NADPH-dependent 7-cyano-7-deazag uanine reductase OS=Midichloria mitochondrii (strain Ir icVA) OX=696127 GN=midi_01078 PE=3 SV=1
MFNLTSSELGKKSQYISKYKPDLLFAIPRKLKRAELFVGQNPVQFHGVDIWNAYEVSWLDIQGKPQVRIAEIIYDANSEFMVESKSLKLYLNSFNNSNFNTPEEVHNLITNDLSTILKTKIKCVLYNVESSHYIPQKIQGILLDDLDINIKNCNDKPILEQAHDIVEELLYTHLLKSNCLVTGQPDFGSLIVRYSGQKINHISVLRYIISLRNLNEFHEQCIERIFFEIYKNCRPNFLEVSARYTRRGGIDINPIRSSSENFAQSNYRSFRQ

SEQ ID NO: 47504 - protein, 149 aa, Minwuia thermotolerans
  misc_feature (1)..(149): tr|A0A2M9FYS8|A0A2M9FYS8_9PROT NADPH-dependent 7-cyano- 7-deazaguanine reductase OS=Minwuia thermotolerans OX=2 056226 GN=queF PE=3 SV=1
MNDAVKYLGKQSAVPESPGEAVLDAVPDPHPDARYVVRFTAPEFTSLCPVTGQPDFARLVIDYVPAGRIVESKSLKLFLGSFRNHGAFHEDCTVTIAKRIVAAIGPDWLRIAGYWYPRGGIPIDVFYQTGEPPAGVWLPDPGVETYRGR

SEQ ID NO: 47505 - protein, 143 aa, Mitsuaria sp.
  misc_feature (1)..(143): tr|A0A1A9HTB1|A0A1A9HTB1_9BURK NADPH-dependent 7-cyano- 7-deazaguanine reductase OS=Mitsuaria sp. 7 OX=1658665 GN=queF PE=3 SV=1
MPPNPPSRPSKEIHVFPNPAPERDYVIQFQIPEFTCHCPLTGQPDFAHFTIDMIADQYCVELKSLKMYFWSYRDEGAFHEKVTNTILEDIVKVTNPRFIRITAKWYVRGGIYTNVVTEHRKKGWKPLPAVDLPAHGFETGLLR

SEQ ID NO: 47506 - protein, 175 aa, Mitsuaria sp.
  misc_feature (1)..(175): tr|A0A1I6JJ56|A0A1I6JJ56_9BURK NADPH-dependent 7-cyano- 7-deazaguanine reductase OS=Mitsuaria sp. PDC51 OX=1881 035 GN=queF PE=3 SV=1
MAKNPSAKPAAKAGAKAAKPTAKPAVAPKMREMPPNPPSRPSKEIHVFPNPAPERDYVIQFQIPEFTCHCPLTGQPDFAHFTIDMIADQYCVELKSLKMYFWSYRDEGAFHEKVTNTILEDIVKVTNPRFIRITAKWYVRGGIYTNVVAEHRKKGWKPLPAVDLPAHGFETGLLR

SEQ ID NO: 47507 - protein, 164 aa, Mitsuokella jalaludinii
  misc_feature (1)..(164): tr|A0A173W567|A0A173W567_9FIRM NADPH-dependent 7-cyano- 7-deazaguanine reductase OS=Mitsuokella jalaludinii OX= 187979 GN=queF PE=3 SV=1
MSRDKSQEDITLLGKKNVKYHYDYCPEILETFENRHPDNDYWVKFNCPEFTALCPITGQPDYATIYISYIPGRRMVESKSLKLYLVSFRNHGDFHEDVVNVIMKDLIRLMDPKYIEVWGKFLPRGGISIDPYANYGRPDTKYERLAEHRFMEHDLVAMDKVDNR

SEQ ID NO: 47508 - protein, 169 aa, Mitsuokella multacida
  misc_feature (1)..(169): tr|A0A414NUH8|A0A414NUH8_9FIRM NADPH-dependent 7-cyano- 7-deazaguanine reductase OS=Mitsuokella multacida OX=52 226 GN=queF PE=3 SV=1
MEGRSLSRDKSQEDITLLGKKNVKYHYDYCPEILETFENRHPDNDYWVKFNCPEFTALCPITGQPDYATIYISYIPGRRMVESKSLKLYLVSFRNHGDFHEDVVNVIMKDLIRLMDPKYIEVWGKFLPRGGISIDPYANYGRPDTKYERLAEHRFMEHDLVAMDKVDNR

SEQ ID NO: 47509 - protein, 169 aa, Mitsuokella multacida; identical to SEQ ID NO: 47508
  misc_feature (1)..(169): tr|C9KNH4|C9KNH4_9FIRM NADPH-dependent 7-cyano-7-deazag uanine reductase OS=Mitsuokella multacida DSM 20544 OX= 500635 GN=queF PE=3 SV=1

SEQ ID NO: 47510 - protein, 164 aa, Mitsuokella sp.
  misc_feature (1)..(164): tr|A0A415REN4|A0A415REN4_9FIRM NADPH-dependent 7-cyano- 7-deazaguanine reductase OS=Mitsuokella sp. AF33-22 OX= 2292047 GN=queF PE=3 SV=1
MSRDKSQEDITLLGKKNVKYHYDYCPEILETFENRHPDNDYWVKFNCPEFTALCPITGQPDYATIYISYVPGKKMVESKSLKLYLVSFRNHGDFHEDVVNVIMKDLIALMDPKYIEVWGKFLPRGGISIDPYANYGRPGTKYEKLAEHRFMEHDLVAMDKVDNR

SEQ ID NO: 47511 - protein, 164 aa, Mitsuokella sp.
  misc_feature (1)..(164): tr|U2SXH2|U2SXH2_9FIRM NADPH-dependent 7-cyano-7-deazag uanine reductase OS=Mitsuokella sp. oral taxon 131 str. W9106 OX=1321781 GN=queF PE=3 SV=1
MPRDKKNEGLRLLGKKQVQYHYDYCPEILETFENRHKGRDYWVKFNCPEFTALCPITGQPDYATIYISYVPDVRMVESKSLKLYLVSFRSHGDFHEDVVNVILKDLVRLMDPKYIEVWGKFLPRGGISIDPWANYGRQGTKYEELAAHRFMEHDLYFMDKVDNR

SEQ ID NO: 47512 - protein, 281 aa, Mixta gaviniae
  misc_feature (1)..(281): tr|A0A1X1DHM8|A0A1X1DHM8_9GAMM NADPH-dependent 7-cyano- 7-deazaguanine reductase OS=Mixta gaviniae OX=665914 GN =queF PE=3 SV=1
MSSYENHQALAGLTLGKPTAYQDRYDPALLQAVPRSLNREPLGLYPDNLPFHGADIWTLYELSWLNAKGVPQVAVGEVALRADSINLIESKSFKLYLNSFNQTRFADWGEVRQTLERDLSACAQGDVSVALFRLQEIEAQPIGHFEGVCIDEQDISIDDYQFNADYLADAAGSDIVEETLTSHLLKSNCLITNQPDWGSVQIRYRGPRINREALLRYLVSFRHHNEFHEQCVERIFNDLLRFCRPETLSVYARYTRRGGLDINPWRSNTDFKPSRSRLVRQ

SEQ ID NO: 47513 - protein, 281 aa, Mixta sp.
  misc_feature (1)..(281): tr|A0A506V7J4|A0A506V7J4_9GAMM NADPH-dependent 7-cyano- 7-deazaguanine reductase OS=Mixta sp. BIT-26 OX=2562439 GN=queF PE=3 SV=1
MSCYEQHQALAGLTLGKPTAYQDRYQPDLLQGVPRSLNREPLGLYPDNLPFHGADIWTLYELSWLNAKGVPQVAIGEISLRADSLNLIESKSFKLYLNSFNQTRFADWGEVRQTLQRDLSACAQGEVSVALFRLQEIEGQPISQFDGICIDEQDISIDDYQFNVDYLADAAGAEIVEETLTSHLLKSNCLITHQPDWGSVQIRYRGPRINREALLRYLVSFRHHNEFHEQCVERIFNDLLRFCRPQTLTVYARYTRRGGLDINPWRSNTDFQPGHTRLVRQ

SEQ ID NO: 47514 - protein, 281 aa, Mixta theicola
  misc_feature (1)..(281): tr|A0A2K1Q7T1|A0A2K1Q7T1_9GAMM NADPH-dependent 7-cyano- 7-deazaguanine reductase OS=Mixta theicola OX=1458355 G N=queF PE=3 SV=1
MSSYEQHQALASLTLGKPTAWQDRYEPGLLQAVPRSLNREPLGLYPVNLPFHGADIWTLYELSWLNAKGVPQVAVGEVVLQADSLNLIESKSFKLYLNSFNQTRFADWGEVRQTLERDLRACAQGEVSVALFRLQEIEGQPIGQFDGFCIDEQDISIDDYQFNADYLADAAGEEIVEETLVSHLLKSNCLITHQPDWGSVQIRYRGPRIRREALLRYLVSFRRHNEFHEQCVERIFNDLLRFCQPETLSVYARYTRRGGLDINPWRSNSDFSPSHSRLVRQ

SEQ ID NO: 47515 - protein, 275 aa, Mizugakiibacter sediminis
  misc_feature (1)..(275): tr|A0A0U1PC06|A0A0U1PC06_9GAMM NADPH-dependent 7-cyano- 7-deazaguanine reductase OS=Mizugakiibacter sediminis O X=1475481 GN=queF PE=3 SV=1
MNRPTDSPLGRAVAYPETYDPSLLFPIARADKRAELGLAAPLPFAGVDVWNAYELSWLDARGKPAVALAELRVPADSPRIVESKSLKLYLNGYTQTRFDAAEAVRTRIAADLAAATGAEVAVTLLPAARFGEARLAPLAGACIDDLDLAIDDYGPPRPEYLATTPGAEVEEALVSNLLKSNCPVTGQPDWASVQIRYAGAPIDRAGLLRYLVSFRRHSDFHEQCVERIFVDLLRRCAPRRLAVYARYTRRGGLDINPFRATPGYGEAGNPRTARQ

SEQ ID NO: 47516 - protein, 89 aa, Mobilisporobacter senegalensis
  misc_feature (1)..(89): tr|A0A3N1X566|A0A3N1X566_9FIRM NADPH-dependent 7-cyano- 7-deazaguanine reductase OS=Mobilisporobacter senegalen sis OX=1329262 GN=queF PE=3 SV=1
MVESKSLKLFLFSFRNHGDFHEDCVNIIMKDLIKLMDPKYIEVWGKFTPRGGISIDPYCNYGRPDTKWEEVAFNRLINHDLYPEKVDNR

SEQ ID NO: 47517 - protein, 289 aa, Moellerella wisconsensis
  misc_feature (1)..(289): tr|A0A0N0IC03|A0A0N0IC03_9GAMM NADPH-dependent 7-cyano- 7-deazaguanine reductase OS=Moellerella wisconsensis AT CC 35017 OX=1354267 GN=queF PE=3 SV=1
MSQYQDNPALSNLTLGKKTAYHDQYEANLLQAVPRSLNRQPLNIHPDNLPFHGADIWTLYELSWLNSRGVPQVAIGQVSVDATSQNLIESKSFKLYLNSFNQTHFDSWEKVRTTLQNDLTHCAQGLVSVTLHALDEFTQQPIGTFIGECIDNQDINIDDYQFNRDYLIHSISDNDINNGHQPIIEETLVSHLLKSNCLITHQPDWGSVQIHYRGTKIDREKLLRYLVSFRHHNEFHEQCVERIFNDLMEFCRPESLTVYARYTRRGGLDINPWRSNESFQPSLARLARQ

SEQ ID NO: 47518 - protein, 289 aa, Moellerella wisconsensis; identical to SEQ ID NO: 47517
  misc_feature (1)..(289): tr|A0A484ZWE5|A0A484ZWE5_9GAMM NADPH-dependent 7-cyano- 7-deazaguanine reductase OS=Moellerella wisconsensis OX =158849 GN=queF PE=3 SV=1

SEQ ID NO: 47519 - protein, 157 aa, Monoglobus pectinilyticus
  misc_feature (1)..(157): tr|A0A2K9P4N2|A0A2K9P4N2_9FIRM NADPH-dependent 7-cyano- 7-deazaguanine reductase OS=Monoglobus pectinilyticus O X=1981510 GN=queF PE=3 SV=1
MENIQREQEGLTLLGNQKTVYKADYAPEVLETFENKHRDNDYWVRFNCPEFTSLCPITGQPDFAEIIISYVPDVRMVESKSLKLYLFSFRNHGDFHEDCVNKIMKDLIELMDPKYIEVFGRFTPRGGISIHPYANYGRPGTKWEQVAFERLTHREIV

SEQ ID NO: 47520 - protein, 139 aa, Moorea bouillonii
  misc_feature (1)..(139): tr|A0A1U7MVE7|A0A1U7MVE7_9CYAN NADPH-dependent 7-cyano- 7-deazaguanine reductase OS=Moorea bouillonii PNG OX=56 8701 GN=queF PE=3 SV=1
MSNSFTQEQASPEVDTPQIKYGEQEIAQAKLITFPNPRIGRPYHINITLPEFTCKCPFSGYPDFATIYITYVPNQLVVELKALKLYINTYRDRYISHEESINQILDDFVAACNPEDVTIKGDFNPRGNVHTVVEVRHQK

SEQ ID NO: 47521 - protein, 139 aa, Moorea producens
  misc_feature (1)..(139): tr|A0A1D8TKD9|A0A1D8TKD9_9CYAN NADPH-dependent 7-cyano- 7-deazaguanine reductase OS=Moorea producens PAL-8-15-0 8-1 OX=1458985 GN=queF PE=3 SV=1
MSNSFTQEQASPEVDTPQIKYGEQEIAQAKLITFPNPRIGRPYHINITLPEFTCKCPFSGYPDFATIYITYVPNELVVELKALKLYINTYRDRYISHEESINQILDDFVAACNPEEVTIKGDYNPRGNVHTVVEVRHQK

SEQ ID NO: 47522 - protein, 139 aa, Moorea producens
  misc_feature (1)..(139): tr|A0A1D9FTA8|A0A1D9FTA8_9CYAN NADPH-dependent 7-cyano- 7-deazaguanine reductase OS=Moorea producens JHB OX=145 4205 GN=queF PE=3 SV=1
MSNSFTQEQASPEVDTPQIKYGEQEIAQAKLITFPNPRIGRPYNINITLPEFTCKCPFSGYPDFATIYITYVPNELVVELKALKLYINTYRDRYISHEESINQILDDFVAACNPEEVTIKGDFNPRGNVHTVVEVRHQK

SEQ ID NO: 47523 - protein, 126 aa, Moorella glycerini
  misc_feature (1)..(126): tr|A0A0C7NPG7|A0A0C7NPG7_9THEO NADPH-dependent 7-cyano- 7-deazaguanine reductase OS=Moorella glycerini OX=55779 GN=queF PE=3 SV=1
MMEFEALGKVVREPRKKLEVFPKPANVKTVILESDEVTSLCPVTGQPDWETVVVEYAPAKYCIESKSFKLYLWSFREEGVFCEALADTIARDIYQACSPHWCKVTVIQKPRGGIKITASAFYGEGN

SEQ ID NO: 47524 - protein, 126 aa, Moorella humiferrea
  misc_feature (1)..(126): tr|A0A2T0ALY8|A0A2T0ALY8_9THEO NADPH-dependent 7-cyano- 7-deazaguanine reductase OS=Moorella humiferrea OX=6769 65 GN=queF PE=3 SV=1
MMEFEALGKDVREPRKKLEVFPKPANVKTVILESDEVTSLCPVTGQPDWETVIVEYAPDKYCIESKSFKLYLWSFREEGVFCEALADTIARDIYRACSPHWCKVTVIQKPRGGIKITASAFYGEGN

SEQ ID NO: 47525 - protein, 126 aa, Moorella mulderi
  misc_feature (1)..(126): tr|A0A151AWN6|A0A151AWN6_9THEO NADPH-dependent 7-cyano- 7-deazaguanine reductase OS=Moorella mulderi DSM 14980 OX=1122241 GN=queF PE=3 SV=1
MMEFEALGKDVREPRKKLEVFPKPANVKTVILESDEVTSLCPVTGQPDWETVIVEYAPAKYCIESKSFKLYLWSFREEGVFCEALADTIARDIYRACSPHWCKVTVIQKPRGGIKITASAFYGEGN

SEQ ID NO: 47526 - protein, 130 aa, Moorella thermoacetica
  misc_feature (1)..(130): tr|A0A1J5NJJ5|A0A1J5NJJ5_MOOTH NADPH-dependent 7-cyano- 7-deazaguanine reductase OS=Moorella thermoacetica OX=1 525 GN=queF PE=3 SV=1
MMEFEALGKVVREPRKKLEVFPKPANVKTVILESDEVTSLCPVTGQPDWETVVVEYAPAKYCIESKSFKLYLWSFREEGVFCEALADTIARDIYQACSPHWCKVTVIQKPRGGIKITASAFYGEGDKDKK

SEQ ID NO: 47527 - protein, 300 aa, Moraxella atlantae
  misc_feature (1)..(300): tr|A0A378Q3P9|A0A378Q3P9_9GAMM NADPH-dependent 7-cyano- 7-deazaguanine reductase OS=Moraxella atlantae OX=34059 GN=queF PE=3 SV=1
MTDVNDDHSPQNSPLNSALGQTTVYPTTYAPEVLYAITRALGRANLTLPVKQLSIGVDWWQAFEVSWLNPQGVSQVAMARLTIPADSPYLVESKSLKLYLNSLNFTTFANHDALITTIAHDVGACVQAAVTVELFAVDTPNSLPLSAPQGICIDHALDDLSPNEKVALVSDVDAGLLRAASSTHTAKNLVQASQPQAYYSHLLRSNCPVTNQPDWGTVAIEIDSAPLVPADLLRYILSFRTHNGFHEQCVEQIFNDLTQTFAPKSLLVRAWYTRRGGIDINPCRVSDGSLLPAPSRLNRQ

SEQ ID NO: 47528 - protein, 300 aa, Moraxella atlantae
  misc_feature (1)..(300): tr|A0A1B8QFT0|A0A1B8QFT0_9GAMM NADPH-dependent 7-cyano- 7-deazaguanine reductase OS=Moraxella atlantae OX=34059 GN=A9308_02610 PE=3 SV=1
MTDVNDDHSPQNSPLNSALGQTTVYPTTYAPEVLYAITRALGRANLTLPVEQLSIGVDWWQAFEVSWLNPQGVSQVAMARLTIPADSPYLVESKSLKLYLNSLNFTTFANHDALIATIAHDVGACVQAAVAVELFAVDTPNSLPLSAPQGICIDHALDDLSPNEKVALVSDVDAGLLRAASSTHTAKNLVQASQPQAYYSHLLRSNCPVTNQPDWGTVAIEIDSAPLVPADLLRYILSFRAHNGFHEQCVEQIFHDLTQTFAPKSLLVRAWYTRRGGIDINPCRVSDGSLLPAPSRLNRQ

SEQ ID NO: 47529 - protein, 285 aa, Moraxella bovis
  misc_feature (1)..(285): tr|A0A378PTH4|A0A378PTH4_MORBO NADPH-dependent 7-cyano- 7-deazaguanine reductase OS=Moraxella bovis OX=476 GN=q ueF PE=3 SV=1
MSIHGVLGESTTYSKTYDPTLLYPISRQIGRDEILKDVGFDFNNYHNELKNGVDIWQAFELSWLNPIGISQVAMARFTIPANSPNIVESKSLKLYLNSLNFTKFSSIDELKTTLQKDLSICVGADVGVEIIGLDSDELTIAKPIGICIDDVLNHLSDEIVLSDDIDSKFLKSAKKGELATYQFYSNLLRSNCPVTNQPDWGVVQIEMTSEYDLDFGEFLKYILSFRQHNGFHEQCVERIFADMMTYFKPVSLKVLANYTRRGGIDINPVRVFNTDKGQIKRLIRQ

SEQ ID NO: 47530 - protein, 285 aa, Moraxella bovis
  misc_feature (1)..(285): tr|A0A2Z4R5L9|A0A2Z4R5L9_MORBO NADPH-dependent 7-cyano- 7-deazaguanine reductase OS=Moraxella bovis OX=476 GN=D QF64_03455 PE=3 SV=1
MSIHGVLGESTTYSKTYDPTILYPISRQIGRDEILKDVGFDFNNYHDELKNGVDIWQAFELSWLNPIGISKVAMARFTIPANSPNIVESKSLKLYLNSLNFTKFSSINELKTTLQKDLSICVGADVGVEIIGLDSDELTIAKPIGICIDDVLNHLSDEIVLSDDIDSKFLKNAKKGELATYQFYSNLLRSNCPVTNQPDWGVVQIEMTSEYDLDFGEFLKYILSFRQHNGFHEQCVERIFADMMTYFKPVSLKVLANYTRRGGIDINPVRVFNTDKGQIKRLIRQ

SEQ ID NO: 47531 - protein, 285 aa, Moraxella bovoculi
  misc_feature (1)..(285): tr|A0A3F3AJE0|A0A3F3AJE0_9GAMM NADPH-dependent 7-cyano- 7-deazaguanine reductase OS=Moraxella bovoculi OX=38689 1 GN=queF PE=3 SV=1
MSIHGVLGESTTYSKTYDPTILYPISRQIGRDEILKDVGFDFNNYHHELKNGVDIWQAFELSWLNPIGISQVAMARFTIPANSPNIVESKSLKLYLNSLNFTKFSSIDELKTTLQKDLSACAGANVGVEIIGLNDDGLDIHAPVGICIDDVLDNTKKEIPLLDDIDNTFLKNAKRSALTQYKFYSNLLRSNCPVTNQPDWGALQIEITTEYELDFGEFLKYILSFRQHNGFHEQCVERIFADCMIHYRPVFLRVLANYTRRGGIDINPVRVYHRDVGEVKRLVRQ

SEQ ID NO: 47532 - protein, 285 aa, Moraxella bovoculi; identical to SEQ ID NO: 47531
  misc_feature (1)..(285): tr|A0A066UCS9|A0A066UCS9_9GAMM NADPH-dependent 7-cyano- 7-deazaguanine reductase OS=Moraxella bovoculi 237 OX=7 43974 GN=queF PE=3 SV=1

SEQ ID NO: 47533 - protein, 280 aa, Moraxella canis
  misc_feature (1)..(280): tr|A0A1S9ZM24|A0A1S9ZM24_9GAMM NADPH-dependent 7-cyano- 7-deazaguanine reductase OS=Moraxella canis OX=90239 GN =B0180_02455 PE=3 SV=1
MSIHGVLGETTSYPKSYDPSVLFAISRDLGRDEIVKLTGVQADQLTDGVDVWQAFELSWLNDQGISKVAIARISIPAHSPNIVESKSLKLYLNSLNFTSFSDASEVQALIQKDLSACVGADVSAEIIPLSGSGFEVHEPLGVCIDEVLDGGSGVIIGDDIDASVLRHPPVHQMATYQFHTNLLRSNCPVTNQPDWGTLSVSITTDKALDYQKILNYVLTFRKHNGFHEQCVERIFADLLVNFEPSSLMVQANYTRRGGIDINPVRVLNHDLPAVTRQVRQ

SEQ ID NO: 47534 - protein, 285 aa, Moraxella caprae
  misc_feature (1)..(285): tr|A0A378R2V1|A0A378R2V1_9GAMM NADPH-dependent 7-cyano- 7-deazaguanine reductase OS=Moraxella caprae OX=90240 G N=queF PE=3 SV=1
MSIHGVLGESTTYSKTYDPTILYPISRQIGRDEILKDVGFDFNDYHDELKNGVDIWQAFELSWLNPIGISQVAMARFTIPANSPNIVESKSLKLYLNSLNFTKFSSIDELKTTLQKDLSICVGADVGVEIIGLDSDELTIAKPIGICIDDVLNHLSDEIILSDDIDSKFLKNAKKGELATYQFYSNLLRSNCPVTNQPDWGVVQIEMTSEYDLDFGEFLKYILSFRQHNGFHEQCVERIFADMMTYFKPVSLKVLANYTRRGGIDINPVRVFNTDKGQIKRLIRQ

SEQ ID NO: 47535 - protein, 280 aa, Moraxella catarrhalis
  misc_feature (1)..(280): tr|A0A198XA21|A0A198XA21_MORCA NADPH-dependent 7-cyano- 7-deazaguanine reductase OS=Moraxella catarrhalis OX=48 0 GN=AO367_1491 PE=3 SV=1
MSIHGVLGETTSYPKNYDASILFAISRSLGRDEVLKQTGIQADKLTDGVDVWQAFELSWLNLQGICKVAIARIRVPANSPNIVESKSLKLYLNSLNFTKFGDMAEVQALIQKDLSACVGAEVSVEIVPLGGSGFEVQEPLGICIDEVLDTEGEVIACDDINSAILSQPPVHQVMTYQFHTNLLRSNCPVTSQPDWGTLSVSITTNKALDYQKILRYVLTFRQHNGFHEQCVERIFADLLVNFEPSSLMVQANYTRRGGIDINPVRVLNHALPAVTRQVRQ

SEQ ID NO: 47536 - protein, 280 aa, Moraxella catarrhalis
  misc_feature (1)..(280): tr|A0A3A9MUI6|A0A3A9MUI6_MORCA NADPH-dependent 7-cyano- 7-deazaguanine reductase OS=Moraxella catarrhalis OX=48 0 GN=queF PE=3 SV=1
MSIHGVLGETTSYPKNYDASILFAISRSLGRDEVLKQTGIQADQLTDGVDVWQAFELSWLNLQGICKVAIARIRIPANSPNIVESKSLKLYLNSLNFTKFGDMAEVQALIQKDLSACVGIKVSVEIVPLGGSGFEVQEPLGVCIDEVLDTEGEVIACDDINSAILSQPPVHQMMTYQFHTNLLRSNCPVTSQPDWGTLSVSITTNKALDYQKILRYVLTFRQHNGFHEQCVERIFADFLVNFEPSALMVQANYTRRGGIDINPVRVLNHALPAVTRQVRQ

SEQ ID NO: 47537 - protein, 280 aa, Moraxella caviae
  misc_feature (1)..(280): tr|A0A1S9ZWB0|A0A1S9ZWB0_9GAMM NADPH-dependent 7-cyano- 7-deazaguanine reductase OS=Moraxella caviae OX=34060 G N=queF PE=3 SV=1
MSIHGVLGESTSYPKSYAPDVLYPIARSLGRDEIAKTGFAGDYQGVDVWQAFEVSWLDLQGVSQVATARFEIPASSPNIVESKSLKLYLNSLNFTEFANAKAVQDTITKDLSACVGANVAVALHSLDGDDFTVQRPLGECIDQALQTDNTQKVALSDDIDSTFLQGFRKLAAPKSYALYSDLLRSNCPVTNQPDWGTVQISITTNYELNHAAILRYVLSYRQHNGFHEQCVEQIFADFMQNFAPTSLKVQANYTRRGGIDINPVRVFNAEIGKVGRFVRQ

SEQ ID NO: 47538 - protein, 280 aa, Moraxella cuniculi
  misc_feature (1)..(280): tr|A0A3S4SYN4|A0A3S4SYN4_9GAMM NADPH-dependent 7-cyano- 7-deazaguanine reductase OS=Moraxella cuniculi OX=34061 GN=queF PE=3 SV=1
MSIHGVLGETTSYPKTYDASVLFAITRTLGRDEIYQATSVASDDLAVGVDVWQAFELSWLDEFGISQVAVARLIIPADSPNIVESKSLKLYLNSLNFTRFATVSAVQAVIERDVSACIGAMVQVQIEPLNTTAFDLVAPLGECIDDVLSRAGVAVELSDDIDSTLLQPKAGQMMQYQFHSHLLRSNCPVTNQPDWGTLSVAISTDKVVDYQQVLAYILTFRQHNGFHEQCVERIFADFLRLFAPTSLMVQANYTRRGGIDINPVRVKNHPVPKIGRQIRQ

SEQ ID NO: 47539 - protein, 280 aa, Moraxella cuniculi
  misc_feature (1)..(280): tr|A0A1N7E734|A0A1N7E734_9GAMM NADPH-dependent 7-cyano- 7-deazaguanine reductase OS=Moraxella cuniculi DSM 2176 8 OX=1122245 GN=SAMN02745664_103136 PE=3 SV=1
MSIHGVLGETTSYPKTYDASVLFAITRTLGRDEIYQATSVAGDDLAVGVDIWQAFELSWLDEFGISQVAVARLIIPADSPNIVESKSLKLYLNSLNFTRFATVSAVQAVIERDVSACIGAMVQVQIEPLDTTAFDLVAPLGECIDDVLSRAGVAVELSDDIDSTLLQPKAGQMMQYQFHSHLLRSNCPVTNQPDWGTLSVAISTDKVVDYQQVLAYILTFRQHNGFHEQCVERIFADFLRLFAPTSLMVQANYTRRGGIDINPVRVKNHPVPKIGRQIRQ

SEQ ID NO: 47540 - protein, 285 aa, Moraxella equi
  misc_feature (1)..(285): tr|A0A378QS43|A0A378QS43_9GAMM NADPH-dependent 7-cyano- 7-deazaguanine reductase OS=Moraxella equi OX=60442 GN= queF PE=3 SV=1
MSIHGVLGESTTYSKTYDPTILYPISRQIGRDEILKDVGFDFNNCYDDLKHGVDIWQAFELSWLNPIGISQVAMARFTIPANSPNIVESKSLKLYLNSLNFTKFSSIDELKTILQKDLSICVGADVGVEIIDLNGDELNIVKPIGSCIDDVLNDSSDDIILSDDIDSEFLKNAKKGELVTYQFYSNLLRSNCPVTNQPDWGVVQIEMTSEYDLDFGEFLKYILSFRQHNGFHEQCVERIFADMMTYFKPVSLKVLANYTRRGGIDINPVRVFNADKGQIKRLIRQ

SEQ ID NO: 47541 - protein, 285 aa, Moraxella lacunata
  misc_feature (1)..(285): tr|A0A1B8Q5T2|A0A1B8Q5T2_MORLA NADPH-dependent 7-cyano- 7-deazaguanine reductase OS=Moraxella lacunata OX=477 G N=A9309_03535 PE=3 SV=1
MSIHGVLGESTTYSKTYDPTILYPISRQIGRDEILKDVGFDFNNYHDEFKKGVDIWQAFELSWLNPIGISQVAMARFAIPANSPNIVESKSLKLYLNSLNFTKFSSIDELKITLQKDLSACVGANVDVEIIDLNSDELAIVKPIGICIDDVLNHLSDEVILSDDIDSKFLKNAKKGELKAYQFYSNLLRSNCPVTNQPDWGTVQIEMTSEYALDFGEFLKYILSFRQHNGFHEQCVERIFADMMMYFKPTSLKVLANYTRRGGIDINPVRVFNADKGRIRRLIRQ

SEQ ID NO: 47542 - protein, 285 aa, Moraxella lacunata
  misc_feature (1)..(285): tr|A0A1V4H3K1|A0A1V4H3K1_MORLA NADPH-dependent 7-cyano- 7-deazaguanine reductase OS=Moraxella lacunata OX=477 G N=queF PE=3 SV=1
MSIHGVLGESTTYSKTYDPAILYPISRQIGRDEILKEVNFDFNEYDDDLKKGADIWQAFELSWLNPIGVSQVAMARFIIPANSPNIIESKSLKLYLNSLNFTKFHHINELKSTLQKDLSICVGADVGVEIIEMDSDELTIARPMGICIDEALHDFSDEVILTDDIDSKFLKNTQKGELKAYQFYSNLLRSNCPVTNQPDWGTVQIEMASEYALDFGEFLKYILSFRQHNGFHEQCVERIFADMMTYFKPTSLRVLANYTRRGGIDINPVRVFHADKGQIKRLIRQ

SEQ ID NO: 47543 - protein, 287 aa, Moraxella lincolnii
  misc_feature (1)..(287): tr|A0A1T0CD49|A0A1T0CD49_9GAMM NADPH-dependent 7-cyano- 7-deazaguanine reductase OS=Moraxella lincolnii OX=9024 1 GN=B0682_07530 PE=3 SV=1
MNTKQTPENSHLGQSTTYPKTYAPNILYPIPRALGRKKLALPADQLSCGTDFWHVFELSWLNPQGISQVAMARLAIPATSEYIIESKSLKLYFNSLNFSEFNSQSEIQNVIEKDLSTCLNADVTIQIFDVKTADSLPISEPQGECVDDLFDDFADGGQKITMTQDVDSGYLAFATDGQMSKKQIFHSHLLRSNCPVTNQPDWGTVEIMIDCPSIDKVGLLTYILSFRNHNGFHEQCVEQIFSDLTHVFSPKSLVVRAWYTRRGGIDINPCRASDLSLLPKPSRLNRQ

SEQ ID NO: 47544 - protein, 285 aa, Moraxella macacae
  misc_feature (1)..(285): tr|L2FB69|L2FB69_9GAMM NADPH-dependent 7-cyano-7-deazag uanine reductase OS=Moraxella macacae 0408225 OX=123033 8 GN=queF PE=3 SV=1
MTTNQHHSIKQKHGILGQIIEYPKTYSPQILHPIPRRFGRENLALPDEKLSQGFDYWHIFELSWLKPNGVSSVATARMTIPATSEFIVESKSLKLYLNSLNFIQFDNVAQVKQTLQHDLSECLKTEVGFEIFALHDEALTIDQVQGDCLDNLAIDKVVLTDNVDNSLLSFAKTVDNKPKQQRFYSHLLRSNCPVTNQPDWGTVEILLESLPIDKLALLKYLLSYRQHNGFHEQCVEQIFSDLMQKFYPVSLMVRAWYTRRGGIDINPVRASDVSLLPNKSRLIRQ

SEQ ID NO: 47545 - protein, 285 aa, Moraxella nonliquefaciens
  misc_feature (1)..(285): tr|A0A1B8QM22|A0A1B8QM22_MORNO NADPH-dependent 7-cyano- 7-deazaguanine reductase OS=Moraxella nonliquefaciens O X=478 GN=A7456_01770 PE=3 SV=1
MSIHGVLGESTTYSKTYDPAILYPISRQIGRDEILKEVNFDFNEYDDDLKKGADIWQAFELSWLNPIGVSQVAMARFIIPANSPNIIESKSLKLYLNSLNFTKFHHINELKSILQKDLSICVGADVGVEIIEMDSDELTIARPMGICIDEALHDFSDEVILTDDIDDGFLKNANKGELKTYQFYSNLLRSNCPVTNQPDWGTVQIEITSEYELDFGDVLKYILSFRQHNGFHEQCVERIFADLMMSFHPTSLKVLANYTRRGGIDINPVRVFHANRGQMLRLIRQ

SEQ ID NO: 47546 - protein, 285 aa, Moraxella nonliquefaciens
  misc_feature (1)..(285): tr|A0A1B8PLM5|A0A1B8PLM5_MORNO NADPH-dependent 7-cyano- 7-deazaguanine reductase OS=Moraxella nonliquefaciens O X=478 GN=A9Z60_06365 PE=3 SV=1
MSIHGVLGESTTYSKTYDPAILYPISRQIGRDEILKEVNFDFNEYDDDLKKGADIWQAFELSWLNPIGVSQVAMARFIIPANSPNIIESKSLKLYLNSLNFTKFHHINELKSTLQKDLSICVGADVGVEIIEMDSDELTIARPMGICIDEALHDFSNEVILTDDIDDGFLKNANKGELKTYQFYSNLLRSNCPVTNQPDWGTVQIEITSEYELDFGDVLKYILSFRQHNGFHEQCVERIFADLMMSFHPTSLKVLANYTRRGGIDINPVRVFHANRGQMLRLIRQ

SEQ ID NO: 47547 - protein, 283 aa, Moraxella osloensis
  misc_feature (1)..(283): tr|A0A173MUA4|A0A173MUA4_9GAMM NADPH-dependent 7-cyano- 7-deazaguanine reductase OS=Moraxella osloensis OX=3406 2 GN=MOSL_0545 PE=3 SV=1
MKPLETHGILGQSTSYPKTYAPDMLYPIPRALGRAKLALPADALSIGMDWWQVFEMSWLNSHGISQVAMARLAIPATSNYIVESKSLKLYFNSLNFTEFDNQQAVKATVEKDLSACLKTDVTLEIFEVNIANSLPISAPQGDCIDNALDSSDKKIAIVSDVDPSSLTVAHQGAFDSQLQILHSHLLRSNCPVTNQPDWGTLEIQIDSQQIDCAGLLEYILSFRQHNGFHEQCVEQIFSDLTQVFAPKTLMVRAWYTRRGGIDINPCRVSDVSLLPPPSRLNRQ

SEQ ID NO: 47548 - protein, 283 aa, Moraxella osloensis
  misc_feature (1)..(283): tr|A0A270AUF9|A0A270AUF9_9GAMM NADPH-dependent 7-cyano- 7-deazaguanine reductase OS=Moraxella osloensis OX=3406 2 GN=B8W92_07005 PE=3 SV=1
MKPLETHGILGQSTSYPKTYAPDMLYPIPRALGRAKLALPTDALSIGMDWWQVFEMSWLNLHGISQVAMARLAIPATSDYIVESKSLKLYFNSLNFTEFDNQQAVKAAVEKDLSACLKTDVTLEIFEVNIANSLPISAPQGDCIDNALDNSGKKIAIVSDVDSSSLTVADQGASDSQLQILHSHLLRSNCPVTNQPDWGTLEIQIDSQPIDRAGLLEYILSFRQHNGFHEQCVEQIFSDLTQAFAPKTLMVRAWYTRRGGIDINPCRVSDISLLPPPSRLNRQ

SEQ ID NO: 47549 - protein, 285 aa, Moraxella ovis
  misc_feature (1)..(285): tr|A0A378PM09|A0A378PM09_9GAMM NADPH-dependent 7-cyano- 7-deazaguanine reductase OS=Moraxella ovis OX=29433 GN= queF PE=4 SV=1
MSIHGVLGESTTYSKTYDPTILYPISRQIGRDEILKDVGFDFNDCHDELKNGVDIWQAFELSWLNPIGISQVAMARFTIPANSPNIVESKSLKLYLNSLNFTKFSSIDELKTTLQKDLSICVGANVGVEIIGLNDDGLDIHAPVGICIDDVLDNTKKEILLLDDIDNVFLKNAKKGALTQYKFYSNLLRSNCPVTNQPDWGAVQIEIATEYELDFGEFLKYILSFRQHNGFHEQCVERIFADCMIHYRPVFLRVLANYTRRGGIDINPVRVYHRDVGEVKRLVRQ

SEQ ID NO: 47550 - protein, 280 aa, Moraxella pluranimalium
  misc_feature (1)..(280): tr|A0A1T0CJU2|A0A1T0CJU2_9GAMM NADPH-dependent 7-cyano- 7-deazaguanine reductase QueF OS=Moraxella pluranimaliu m OX=470453 GN=B0680_09255 PE=4 SV=1
MSIHGVLGESTSYPQSYDNSMLFAISRTLGRDEILAKSGVSAEHLVAGVDVWQAFELSWLNPQGISKVAIARIHIPADSPNIVESKSLKLYLNSLNFTQFDDVAAVKQTIERDLTACVGATVTVEIGALDGTDFAVVAPMGECIDTVLDGGDGLAVVDDVDASLLGTADDGVMQTYQFHTNLLRSNCPVTNQPDWGTLLVSITTAKQVEYAKVLAYVLSFRKHNGFHEQCVEQIFADLLTVYAPTSLMVQANYTRRGGIDINPVRVLNHPVPNIGRLVRQ

SEQ ID NO: 47551 - protein, 280 aa, Moraxella porci
  misc_feature (1)..(280): tr|A0A1T0CPQ5|A0A1T0CPQ5_9GAMM NADPH-dependent 7-cyano- 7-deazaguanine reductase OS=Moraxella porci DSM 25326 O X=573983 GN=B0681_07375 PE=3 SV=1
MSIHGVLGESTSYPQSYDSSVLFAISRTIGRDEILAKSGVSAEHLMAGVDVWQAFELSWLNPQGISKVAIARITIPADSPNIVESKSLKLYLNSLNFTQFDDVSAVKQTIERDLTACVGASVTVQISSLDGADFAVVRPVGECIDAVLDGGDAVAVVDDVDASLLGTAVDGVVQTFQFHTNLLRSNCPVTNQPDWGTLSVSITTAKQVEYAKVLAYVLSFRKHNGFHEQCVEQIFADLLTVYAPTSLMVQANYTRRGGIDINPVRVLNHPMPSIGRLVRQ

SEQ ID NO: 47552 - protein, 280 aa, Moraxella sp.
  misc_feature (1)..(280): tr|A0A229GY98|A0A229GY98_9GAMM NADPH-dependent 7-cyano- 7-deazaguanine reductase OS=Moraxella sp. VT-16-12 OX=2 014877 GN=CEW93_03740 PE=3 SV=1
MSIHGVLGEHTSYPTTYDPTILYPISRRIGRDEILKDTGIKLHDDCHGVDVWQAFELSWLNTVGISQVAMARFTIPASSPNIVESKSLKLYLNSLNFTPFATIDDVKQTIATDLSACVGADVGVQIVGLGDDTLAVCSPVGVCIDDSLADSQEMVALSDDVDSRFLTATQGELTHYQFYSHLLRSNCPVTNQPDWGTVSVEMTTNRQLQFGEILKYILSFRQHNGFHEQCVERIFADFMKVFEPSSLLVQANYTRRGGIDINPVRVFNCDVGVLGRLVRQ

SEQ ID NO: 47553 - protein, 280 aa, Moraxella sp.
  misc_feature (1)..(280): tr|A0A2K0XQH3|A0A2K0XQH3_9GAMM NADPH-dependent 7-cyano- 7-deazaguanine reductase OS=Moraxella sp. RCAD0137 OX=1 775913 GN=AZ602_09150 PE=3 SV=1
MSIHGVLGESTSYPQSYDNSVLFAISRKIGRDEILAKSGVSAEHLMAGVDVWQAFELSWLNPQGVSKVAIARIIIPADSPNIVESKSLKLYLNSLNFTQFDDVSAVKQTIERDLTAGVGASVTVLISSLNDADFAVVRPVGECIDVVLDGGDVVAVVDDVDASLLGTAVDGVVQTFQFHTNLLRSNCPVTNQPDWGTLSVSITTAKQVEYAKVLAYVLSFRKHNGFHEQCVEQIFADLLTVYAPTSLMVQANYTRRGGIDINPVRVLNHPMPSIGRLVRQ

SEQ ID NO: 47554 - protein, 275 aa, Moraxellaceae bacterium
  misc_feature (1)..(275): tr|A0A345P713|A0A345P713_9GAMM NADPH-dependent 7-cyano- 7-deazaguanine reductase OS=Moraxellaceae bacterium HYN 0046 OX=2283318 GN=queF PE=3 SV=1
MSVNDSALGQETVYPDHYNPTLLFPIARAEGRALLGATYPETVNQGVDIWHIFELSWLDRSGKPVVAVGRMTLPADSPYLIESKSLKLYFNSLNFETFADPDAFLAVVIKDLSAAAQAPVQLELLGVDELTTHLPQGIYLDGLATTQSPSPTEPDASLLMLAEGTSEIVEETLYSNLLRSNCPVTGQPDWGTVFIRYRGAKLCQSSLLTYIISYRKHSGFHEQCVEQIFADIWQYLKPEALAVHAQYTRRGGLDINPCRTSDLRWLPQVTRLARQ

SEQ ID NO: 47555 - protein, 272 aa, Moraxellaceae bacterium
  misc_feature (1)..(272): tr|A0A4V2ABN2|A0A4V2ABN2_9GAMM NADPH-dependent 7-cyano- 7-deazaguanine reductase OS=Moraxellaceae bacterium OX= 1889775 GN=queF PE=3 SV=1
MSVEQSLLGQTTSYPTDYAPEILFPIARAPSRQAYADIAGISQGMDWWHAFELSWLDLANKPQVAIGRLHIPADSEFLIESKSLKLYFNSLNFKSFADQLAFIDCVERDLSHTANARVKLELYDTDALLVSQPMGFCLDPLTPAGFSLHPDASLLRLENAKTQQISEVSLYSHLLRSNCPVTGQPDWGTLFIKYQGIKPCYSSLLAYIISYRQHSGFHEQCVEQIFADIWQQLQPERLMVYAAYTRRGGLDINPCRVSDLDWLPSPIRLARQ

SEQ ID NO: 47556 - protein, 283 aa, Morganella morganii
  misc_feature (1)..(283): tr|A0A422UE49|A0A422UE49_MORMO NADPH-dependent 7-cyano- 7-deazaguanine reductase OS=Morganella morganii subsp. morganii OX=180434 GN=queF PE=3 SV=1
MSLYEGKAELASLTLGKKTGYEQHYNPALLQGVPRSLNRDALHLHADNLPFRGADLWTLYELSWLQPNGVPCIALGYVSLDAAGLNLIESKSFKLYLNSFNQTVFASADDVRRTLEQDLSACAQGKVTVELLRPEQFTEQKIIDFTGECIDYQDITITDYQFSSDYLIDAVNENDDVVEETLVSHLLKSNCLITQQPDWGSVAIQYRGPKIDREKLLRYLVSFRNHNEFHEQCVERIFTDLNTHCRPVALTVYARYTRRGGLDINPWRTNTDFTPSADRLARQ

SEQ ID NO: 47557 - protein, 283 aa, Morganella morganii
  misc_feature (1)..(283): tr|A0A1M7LQU6|A0A1M7LQU6_MORMO NADPH-dependent 7-cyano- 7-deazaguanine reductase OS=Morganella morganii OX=582 GN=queF PE=3 SV=1
MSLYEGKAELASLTLGKKTGYEQHYNPALLQGVPRSLNRDALHLHADNLPFRGADLWTLYELSWLQPNGVPCIALGYVSLDAAGLNLIESKSFKLYLNSFNQTVFASADDVRRTLEQDLSACAQGTVTVELLRPDQFTEQKIIDFTGECIDYQDITITDYQFSSDYLIDAVNENDDVVEETLVSHLLKSNCLITQQPDWGSVAIQYRGPKIDREKLLRYLVSFRNHNEFHEQCVERIFTDLNTHCRPVALTVYARYTRRGGLDINPWRTNTDFTPSADRLARQ

SEQ ID NO: 47558 - protein, 283 aa, Morganella psychrotolerans
  misc_feature (1)..(283): tr|A0A1B8H1T0|A0A1B8H1T0_9GAMM NADPH-dependent 7-cyano- 7-deazaguanine reductase OS=Morganella psychrotolerans OX=368603 GN=queF PE=3 SV=1
MSLYEGKAELASLTLGKKTGYEQHYNPALLQGVPRSLNRDALHLHADNLPFRGADLWTLYELSWLQPNGVPCIALGYVSLDAGGLNLIESKSFKLYLNSFNQTVFASADDVRKTLEQDLSACAQGEVTVKLLRPEQFAEQKIVDFTGECLDYQDITIADYQFSSEYLIDAVNDNDDFVEETLVSHLLKSNCLITQQPDWGSVSIQYRGPRIDRAKLLRYLVSFRNHNEFHEQCVERIFTDINTHCRPATLTVYARYTRRGGLDINPWRTNTDFTPSAARLARQ

SEQ ID NO: 47559 - protein, 283 aa, Morganella psychrotolerans
  misc_feature (1)..(283): tr|A0A1B8HBZ2|A0A1B8HBZ2_9GAMM NADPH-dependent 7-cyano- 7-deazaguanine reductase OS=Morganella psychrotolerans OX=368603 GN=queF PE=3 SV=1
MSLYEGKAELASLTLGKKTGYEQHYNPALLQGVPRSLNRDALHLHADNLPFRGADLWTLYELSWLQPNGIPCIALGYVSLDARGLNLIESKSFKLYLNSFNQTVFASADDVQKTLEQDLSTCAQGEVTVELLRPEQFAEQKIVDFTGECLDYQDITIADYQFSSEYLIDAVNDNDDFVEETLVSHLLKSNCLITQQPDWGSVSIQYRGPQIDRAKLLRYLVSFRNHNEFHEQCVERIFTDINTHCRPATLTVYARYTRRGGLDINPWRTNTDFTPSAARLARQ

SEQ ID NO: 47560 - protein, 283 aa, Morganella sp.
  misc_feature (1)..(283): tr|A0A3D3HW65|A0A3D3HW65_9GAMM NADPH-dependent 7-cyano- 7-deazaguanine reductase OS=Morganella sp. (in: Bacteri a) OX=1912315 GN=queF PE=3 SV=1
MSLYDGKAELASLTLGKKTGYEQHYNPALLQGVPRSLNRDALHLHADNLPFRGADLWTLYELSWLQPNGIPCIALGYVSLDARGLNLIESKSFKLYLNSFNQTVFASAADVQKILEQDLSTCAQGGVTVELLRPEQFAEQKIVDFTGECLDYQDITIADYQFSSEYLIDAVNDNGDFVEETLVSHLLKSNCLITQQPDWGSVSIHYRGPRIDRAKLLRYLVSFRNHNEFHEQCVERIFTDINTHCRPATLTVYARYTRRGGLDINPWRTNTDFTPSAARLARQ

SEQ ID NO: 47561 - protein, 284 aa, Moritella marina
  misc_feature (1)..(284): tr|A0A5J6WUI0|A0A5J6WUI0_MORMI NADPH-dependent 7-cyano- 7-deazaguanine reductase QueF OS=Moritella marina ATCC 15381 OX=1202962 GN=queF PE=4 SV=1
MTPANRYQDSTALDKLNLGQKTEYISQYQPSLLQPVPRQLNRDDLALSDQLPFTGCDLWNLYELSWLNSKGKPIVAVAEVKVCATSVNLIESKSFKLYLNSFNQTRFTSTQEVTETLQRDLASCAEGAVTVEMFDDLDTAPSQITKISGTCIDHLDIDVDGYEFNAALLQGAADNSEQVDEIIYSHLLKSNCLVTNQPDWGSVYIAYQGNKIDQEALLRYLISFRQHNEFHEQCVERIFTDIMHFCKPEQLTVYARYTRRGGLDINPFRTNCDANIENIRLIRQ

SEQ ID NO: 47562 - protein, 289 aa, Moritella sp.
  misc_feature (1)..(289): tr|A0A2G2IM18|A0A2G2IM18_9GAMM NADPH-dependent 7-cyano- 7-deazaguanine reductase OS=Moritella sp. OX=78556 GN=q ueF PE=3 SV=1
MTPANRYQDSTALDKLNLGQKTEYISQYQPSLLQPVPRQLNRDDLALSDQLPFTGCDLWNLYELSWLNSKGKPIVAVAEVKVCATSVNLIESKSFKLYLNSFNQTRFSSTDEVTETLQRDLAACAQGPVEVLVFDDLDKAPSQITKITGSCIDHLDIDVEDYEFNAELLTAATDNNAADNNNNVEEVLYSHLLKSNCLVTNQPDWGSVYIAYQGNKIDQEALLRYLISFRQHNEFHEQCVERIFTDIMHFCKPEQLTVYARYTRRGGLDINPFRTNCDAKIDNIRLIRQ

SEQ ID NO: 47563 - protein, 284 aa, Moritella sp.
  misc_feature (1)..(284): tr|A6F6I5|A6F6I5_9GAMM NADPH-dependent 7-cyano-7-deazag uanine reductase OS=Moritella sp. PE36 OX=58051 GN=queF PE=3 SV=1
MTPANRYQDSTALDKLNLGQKTEYISQYQPSLLQPVPRQLNRDDLALSDQLPFTGCDLWNLYELSWLNSKGKPIVAVAEVKVCATSVNLIESKSFKLYLNSFNQTRFSSTDEVTDTLQRDLAACAQGPVEVLVFDDLDKAPSQITKITGSCIDHLDIDVEDYEFNAELLNSAADNNDNVDEVLYSHLLKSNCLVTNQPDWGSVYIAYQGNKIDPEALLRYLISFRQHNEFHEQCVERIFTDIMHFCKPEQLTVYARYTRRGGLDINPFRTNCDAKIDNIRLIRQ

SEQ ID NO: 47564 - protein, 284 aa, Moritella viscosa
  misc_feature (1)..(284): tr|A0A090KD04|A0A090KD04_9GAMM NADPH-dependent 7-cyano- 7-deazaguanine reductase OS=Moritella viscosa OX=80854 GN=queF PE=3 SV=1
MTITNRYQDSTALDKLNLGQKTEYISQYQPNLLQPVPRQLNRDDLSLSDQLPFTGCDLWNLYELSWLNSKGKPIVAVAEVKVCATSVNLIESKSFKLYLNSFNQTRFNSTEAVTETLQRDLAACAQGPVEVVMFDDLDKAPSQITKITGTCIDHLDIDIDNYEFNADLLKAAADNNDVVNEVVYSHLLKSNCLVTNQPDWGSVYIAYQGNKIDQEALLRYLISFRQHNEFHEQCVERIFTDIMRFCKPEQLTVYARYTRRGGLDINPFRTNCDAKIDNIRLIRQ

SEQ ID NO: 47565 - protein, 284 aa, Moritella yayanosii
  misc_feature (1)..(284): tr|A0A330LT47|A0A330LT47_9GAMM NADPH-dependent 7-cyano- 7-deazaguanine reductase OS=Moritella yayanosii OX=6953 9 GN=queF PE=3 SV=1
MTPANRYQDSTALNKLNLGKKTEYISQYQPSLLQPVPRQLNRDDLALSDQLPFTGCDLWNLYELSWLNSKGKPIVAVAEVRVCATSVNLIESKSFKLYLNSFNQTRFSSTDEVTETLQRDLAACAQGLVEVLMFDDLDKAPSQITKITGSCIDHLDIDVEDYEFNAELLTSAADNNDNVDEVLYSHLLKSNCLVTNQPDWGSVYIAYQGNKIDPEALLRYLISFRQHNEFHEQCVERIFIDIMHFCKPEQLTVCARYTRRGGLDINPFRTNCDAKIDNIRLIRQ

SEQ ID NO: 47566 - protein, 157 aa, Morococcus cerebrosus
  misc_feature (1)..(157): tr|A0A0C1GMH9|A0A0C1GMH9_9NEIS NADPH-dependent 7-cyano- 7-deazaguanine reductase OS=Morococcus cerebrosus OX=10 56807 GN=queF PE=3 SV=1
MSRNTEELQGISLLGNQKTQYPTGYAPEILEAFDNKHPDNDYFVKFVCPEFTSLCPMTGQPDFATIYIRYIPHIKMVESKSLKLYLFSFRNHGDFHEDCVNIIMKDLIALMDPKYIEVFGEFTPRGGIAIHPFANYGKAGTEFETLARKRLFEHDSQ

SEQ ID NO: 47567 - protein, 281 aa, Motilimonas sp.
  misc_feature (1)..(281): tr|A0A418YK43|A0A418YK43_9GAMM NADPH-dependent 7-cyano- 7-deazaguanine reductase OS=Motilimonas sp. PLHSC7-2 OX =2303987 GN=queF PE=3 SV=1
MSKYQGHQALAGLTLGQQSDYSHGYDASLLQPVPRSLNRDDLGLVAGQLPFHGFDSWGLYELSWLNSKGKPVVATGQVRVDANSVNLIESKSFKLYLNSLNQHKFASTEAVQQALTQDLSACAEGQVEVALHTQLDTNNDVLGSFTGTLIDDLDIEVAGFEFNPDWLVGSTQDELVSETLYSHLLKSNCLVTNQPDWGSVLIKYQGRKIQQEKLLQYLISFRQHNEFHEQCVERIFQDIMRYCQPERLTVLAKYTRRGGLDINPFRSNFETELTTPRLLRQ

SEQ ID NO: 47568 - protein, 275 aa, Motiliproteus coralliicola
  misc_feature (1)..(275): tr|A0A369WNN8|A0A369WNN8_9GAMM NADPH-dependent 7-cyano- 7-deazaguanine reductase OS=Motiliproteus coralliicola OX=2283196 GN=queF PE=3 SV=1
MSSDNHEAIKQAPLGQDTQYVCHYDPTQLFSIERANNWQKLGYDKPPFRGFDLWNAYELSWLDPKGKPQVAIAEFRIPCDSSHIVESKSFKLYLNSFNLTRFDSVEQVQQHLVEDLSRAFGGTVSVAIQTLDAAGIIEPLKGESLDQLDIEVEHYQPAPQLLSSAEGDPVDEQLYSHLLKSNCPVTGQPDWASIQIEYRGQPIDREGLLKYLISYREHGDFHEQCVEQIFLDIYQRCQPEQLSVYARYVRRGGLDINPYRSTEAFTPDNIRLLRQ

SEQ ID NO: 47569 - protein, 279 aa, Motiliproteus sp.
  misc_feature (1)..(279): tr|A0A1R1MEI9|A0A1R1MEI9_9GAMM NADPH-dependent 7-cyano- 7-deazaguanine reductase OS=Motiliproteus sp. MSK22-1 O X=1897630 GN=queF PE=3 SV=1
MTHDTNKTDEDRLKHTPLGQETNYVVHYDPKQLCPIPRANNWHHRDYQKAPFSGCDIWNAYEISWLNPKGLPQVAIAEFRFPCDSPHIVESKSFKLYLNSFNLTRFETADEVQSLMAGDLSQCAGADVKVVLLPVDIGSEISTLQGHCIDHQDIEIEHYQPVPEVLRSVAGTEVQEQLYSHLLKSNCPVTGQPDWASIQIEYLGPAIDQATLLKYLVSYREHGDFHEQCVEQIFMDLLEQCKPKELSVFARYVRRGGLDINPYRSTEPQPTVNNRLIRQ

SEQ ID NO: 47570 - protein, 279 aa, Muribacter muris
  misc_feature (1)..(279): tr|A0A4Y9K5M1|A0A4Y9K5M1_9PAST NADPH-dependent 7-cyano- 7-deazaguanine reductase OS=Muribacter muris OX=67855 G N=queF PE=3 SV=1
MTYQDSSLTALKLGQKTDYASEYDPTLLQAVPRRLNRDELGISEQQPFDRGADIWTLYELSWLNSKGVPQVAIADVAVDFRSENLIESKSFKLYLNSFNQTKFESIAAVERCLVEDLSRCASGRVTVNIHKLDAYRQQPIADFDGERIDDLDIEIHDYHFSNCILENIAQGERVEETLVSHLLKSNCLITNQPDWGSVQIHYVGKRLDREKLLRYLISFRQHNEFHEQCVERIFTDLMRFAKPEKLTVYARYTRRGGLDINPFRSNFESEPQNQRLARQ

SEQ ID NO: 47571 - protein, 279 aa, Muribacter muris
  misc_feature (1)..(279): tr|A0A0J5P868|A0A0J5P868_9PAST NADPH-dependent 7-cyano- 7-deazaguanine reductase OS=Muribacter muris OX=67855 G N=queF PE=3 SV=1
MTYQDSSLTALKLGQKTDYASEYDPTLLQAVPRRLNRDELGISEQQPFDRGADIWTLYELSWLNSKGVPQVAIADVAVDFRSENLIESKSFKLYLNSFNQTKFESIAAVERCLVEDLSRCASGQVTVNIHKLDAYRQQPIADFGGERIDDLDIEIHDYQFSNRILENIAQDERVEETLVSHLLKSNCLITNQPDWGSVQIHYVGKRLDREKLLRYLISFRQHNEFHEQCVERIFTDLMRFAEPEKLTVYARYTRRGGLDINPFRSNFESEPQNQRLARQ

SEQ ID NO: 47572 - protein, 162 aa, Muribaculaceae bacterium
  misc_feature (1)..(162): tr|A0A4S4GQP4|A0A4S4GQP4_9BACT NADPH-dependent 7-cyano- 7-deazaguanine reductase OS=Muribaculaceae bacterium OX =2498093 GN=queF PE=3 SV=1
MSRVENELAGLKHLGSQGTEYVYQYNPGLLETFPNKHTDADYMVTLLCPEFTSLCPKTGQPDYAKIIINYIPDRLMVESKSLKLYLFSFRNHGDFHEDCVNIILHDLVRLMQPRYIEVVGLFTPRGGIAIHPFANYADAAHKELAAQRLSSAMPLHMPDRMY

SEQ ID NO: 47573 - protein, 158 aa, Muribaculaceae bacterium
  misc_feature (1)..(158): tr|A0A3N2NLR8|A0A3N2NLR8_9BACT NADPH-dependent 7-cyano- 7-deazaguanine reductase OS=Muribaculaceae bacterium Is olate-114 (HZI) OX=2486475 GN=queF PE=3 SV=1
MRTEKELEGVSLLGNQGVKYPTDYDPSLLETFENKHPENEYVVTFDCPEFTTLCPKTGQPDFGHIYITYIPRERMVESKSLKLYLFSFRNHGDFHEDCVNIIMKDLARLMDPKYIEVRGVFMPRGGISIYPFANMGDADHQDYVKARRLSVMAESAGR

SEQ ID NO: 47574 - protein, 156 aa, Muribaculum intestinale
  misc_feature (1)..(156): tr|A0A4S1ZT54|A0A4S1ZT54_9BACT NADPH-dependent 7-cyano- 7-deazaguanine reductase OS=Muribaculum intestinale OX= 1796646 GN=queF PE=3 SV=1
MSRQDNEMPGLSLLGNTATNYPDKYAPQVLETFPNKHPDNEYLVTFLCPEFTSLCPKTGQPDFAKIIISYIPRERMVESKSLKLYLFSFRNHGDFHEDCVNIIMKDLVALMDPRYLEVKGIFTPRGGIAIHPFANYADDEHRDMARSRMLASFPES

SEQ ID NO: 47575 - protein, 156 aa, Muribaculum intestinale
  misc_feature (1)..(156): tr|A0A1B1SBR5|A0A1B1SBR5_9BACT NADPH-dependent 7-cyano- 7-deazaguanine reductase OS=Muribaculum intestinale OX= 1796646 GN=queF PE=3 SV=1
MSRQDNEMPGLSLLGNTATNYPDKYAPQVLETFPNKHPDNEYLVTFHCPEFTSLCPKTGQPDFAKIIISYIPRERMVESKSLKLYLFSFRNHGDFHEDCVNIIMKDLVALMDPRYLEVKGIFTPRGGIAIHPFANYADDEHRDMARSRMLASFPES

SEQ ID NO: 47576 - protein, 156 aa, Muribaculum sp.
  misc_feature (1)..(156): tr|A0A4P7W3K6|A0A4P7W3K6_9BACT NADPH-dependent 7-cyano- 7-deazaguanine reductase OS=Muribaculum sp. H5 OX=25303 93 GN=queF PE=3 SV=1
MRNESELNGVSLLGNTGVKYPTQYAPEVLETFVNKHPDNEYLVTFTCPEFTSLCPKTGQPDFAKILISYIPREKMVESKSLKLYLFSFRNHGDFHEDCVNIIMKDLIALMDPRYIEVKGIFTPRGGIAILPFANYGDSQHQEMVKQRMLASFPDNF

SEQ ID NO: 47577 - protein, 157 aa, Muribaculum sp.
  misc_feature (1)..(157): tr|A0A4P7VR26|A0A4P7VR26_9BACT NADPH-dependent 7-cyano- 7-deazaguanine reductase OS=Muribaculum sp. TLL-A4 OX=2 530390 GN=queF PE=3 SV=1
MSRTDNEMPGVTLLGNQATKYPSEYAPEVLETFINKHPDNEYLVTFTCPEFTSLCPKTGQPDFARIIINYIPREKMVESKSLKLYLFSFRNHGDFHEDCINIIMKDLVALMNPRYLEVIGLFTPRGGISIYPFANYGDEEHQDMVKARMLASFRNDF

SEQ ID NO: 47578 - protein, 164 aa, Muricauda sp.
  misc_feature (1)..(164): tr|A0A558P4B7|A0A558P4B7_9FLAO NADPH-dependent 7-cyano- 7-deazaguanine reductase OS=Muricauda sp. MT-229 OX=259 7517 GN=queF PE=3 SV=1
MAGRDEDTLDHLTLLGNQETKYKYEYAPEVLEAIDNMHTRDYFVKFNNPEFTSLCPQTGQPDFATIYLSFIPDKKLVESKSLKLYFFSFRNHGDFHEDVVNIIMNDLIELLDPRYIEVWGKFTPRGGLSIDPYTNHGKPGTKYEEMASYRMINHDMNPETITNR

SEQ ID NO: 47579 - protein, 274 aa, Mycoavidus cysteinexigens
  misc_feature (1)..(274): tr|A0A2Z6EU08|A0A2Z6EU08_9BURK NADPH-dependent 7-cyano- 7-deazaguanine reductase OS=Mycoavidus cysteinexigens O X=1553431 GN=queF PE=3 SV=1
MNPHQSPLGQATQYNTQYDAKLLFPIARQPMREQMGLCATLPFLGADIWNAYELSWLNERGKPQIALARIIIPADSPNLVESKSLKLYLGSFAQTKFASADQIRTLMGEDLSALCGMPVSVSLTSPAAFATVPRQELDGLLLDRLELDIEQYQIAPELLSAHFNQAAIEETLVSNLLRSNCPVTGQPDWASIQIRYAGAPIEHAGLLRYLVSYRLHTGFHEQCVERIFMDLMQMCRPTQLAVYARYTRRGGLDINPFRTNFNQPLPDNMRTARQ

SEQ ID NO: 47580 - protein, 145 aa, Mycobacterium angelicum
  misc_feature (1)..(145): tr|A0A1W9ZW09|A0A1W9ZW09_9MYCO Uncharacterized protein OS=Mycobacterium angelicum OX=470074 GN=BST12_11170 PE= 4 SV=1
MGAVSDGPPPVTSLGQTVDPDAPVRLEFFPVPKPVRVTFHTAELQALCPAVAGIQPDIYQAEISYTALTHAIESKSLKLWLVAFRDRRIFAEHLAIELHDGVAAHAPAVGDVRVRLTQNVRGGIVTVIEHPAAASSPSGSCATSR

SEQ ID NO: 47581 - protein, 158 aa, Mycobacterium sp.
  misc_feature (1)..(158): tr|A0A554UBC6|A0A554UBC6_9MYCO NADPH-dependent 7-cyano- 7-deazaguanine reductase OS=Mycobacterium sp. KBS0706 O X=2578109 GN=queF PE=3 SV=1
MARKAKTKGTEALTQLGQATALPASPEEAVLETVPNPRPKQLYLVRFTAPEFTSLCPITGQPDFAHLVIDYAPAAKIVESKSLKLFLGSFRNHGAFHEDCTVYVAERLIKAMKPRWLRIGGYWYPRGGIPIDVFYQSGPAPEGLWLPDQGVPPYRGRG

SEQ ID NO: 47582 - protein, 108 aa, Mycobacterium szulgai
  misc_feature (1)..(108): tr|A0A1X2F2V2|A0A1X2F2V2_MYCSZ Uncharacterized protein OS=Mycobacterium szulgai OX=1787 GN=AWC27_22040 PE=4 SV =1
MRLEFFPVHKPVRVTFHTAELQALCPAVAGIQPDVYQAEISYTALTHAIESKSLKLWLVAFRDRRIFAEHLAIELHDGVAAHAPAVGDVRIRLTQNVRGGIVTVIEHP

SEQ ID NO: 47583 - protein, 154 aa, Mycoplana dimorpha
  misc_feature (1)..(154): tr|A0A2T5B171|A0A2T5B171_MYCDI NADPH-dependent 7-cyano- 7-deazaguanine reductase OS=Mycoplana dimorpha OX=28320 GN=queF PE=3 SV=1
MTKTDVSNLSQLGRNVGLPQSPEEAVLEKVPSGHKGADFVVRFTAPEFTSLCPMTGQPDFAHIVIDYVPDGWLVESKSLKLYLHSFRNHGAFHEDCTLDIGRRLVDLLAPKWLRIGAYWYPRGGIPIDVFWQTGAPPEGVWVPDQGVAPYRGRG

SEQ ID NO: 47584 - protein, 99 aa, Myxococcaceae bacterium
  misc_feature (1)..(99): tr|A0A4Q5ZII6|A0A4Q5ZII6_9DELT NADPH-dependent 7-cyano- 7-deazaguanine reductase (Fragment) OS=Myxococcaceae ba cterium OX=2484252 GN=queF PE=3 SV=1
MSSQPSKEVQTFPNPAPERDYEIAFDVPEFTCLCPLTGQPDFARFTIKYVPDQLCVELKSLKLYMWSYRNEGAFHEKVTNTIADDIVKAIQPRKLTVVG

SEQ ID NO: 47585 - protein, 121 aa, Myxococcaceae bacterium; identical to SEQ ID NO: 45450
  misc_feature (1)..(121): tr|A0A4Q5ZB19|A0A4Q5ZB19_9DELT NADPH-dependent 7-cyano- 7-deazaguanine reductase OS=Myxococcaceae bacterium OX= 2484252 GN=queF PE=3 SV=1

SEQ ID NO: 47586 - protein, 119 aa, Myxococcales bacterium
  misc_feature (1)..(119): tr|A0A2F0AN88|A0A2F0AN88_9DELT NADPH-dependent 7-cyano- 7-deazaguanine reductase OS=Myxococcales bacterium OX=2 026763 GN=queF PE=3 SV=1
MSTKPSRDLQSFPNPKPERDYEIHFDCPEFTCLCPATGQPDFAKIRIRYIADQRCVELKSLKLYLWSYRDEGAFHEAVTNQILDDLVAAISPRFMEIEGDFYVRGGIGTIVIARHGQRP

SEQ ID NO: 47587 - protein, 189 aa, Myxococcales bacterium
  misc_feature (1)..(189): tr|A0A2D9HBK3|A0A2D9HBK3_9DELT NADPH-dependent 7-cyano- 7-deazaguanine reductase OS=Myxococcales bacterium OX=2 026763 GN=queF PE=3 SV=1
MDAVAFPSSSLARSATKSDCSGAAGGKNGCSGLAESLTGQSGLARGGDESQEPTMMTTQPNRNLETFANPSPGRDYEVEILCPEFTCLCPKTGQPDFAIFRLRYVPSERCVELKSLKLYFWSFRDEGHFHEDVTNRILDDLVQGISPRAMELEGVFNIRGGLTTTVIARHGDETLLTPRHRLAGLNSVS

SEQ ID NO: 47588 - protein, 122 aa, Myxococcus fulvus
  misc_feature (1)..(122): tr|F8CFR1|F8CFR1_MYXFH NADPH-dependent 7-cyano-7-deazag uanine reductase OS=Myxococcus fulvus (strain ATCC BAA- 855 / HW-1) OX=483219 GN=queF PE=3 SV=1
MPSQPSKELQTFPNPAADRDYEIAFDVPEFTCLCPLTGQPDFARFKITYVPDQTCIELKSLKLYMWAYRNEGAFHEKVTNTIADDIIKAIQPRKLTVVGDFFVRGGIGTIVTVTHDKSKQQG

SEQ ID NO: 47589 - protein, 120 aa, Myxococcus fulvus
  misc_feature (1)..(120): tr|A0A511SZM6|A0A511SZM6_MYXFU NADPH-dependent 7-cyano- 7-deazaguanine reductase OS=Myxococcus fulvus OX=33 GN= queF PE=3 SV=1
MPSQPTKDLQTFPNPAPERDYEIAFDVPEFTCLCPLTGQPDFARFKITYVPDQSCIELKSLKLYMWAYRNEGAFHEKVTNTIAEDIIKAIQPRKLTVVGDWFVRGGIGTIVTVTHEQKKA

SEQ ID NO: 47590 - protein, 122 aa, Myxococcus hansupus
  misc_feature (1)..(122): tr|A0A0H4WQ07|A0A0H4WQ07_9DELT NADPH-dependent 7-cyano- 7-deazaguanine reductase OS=Myxococcus hansupus OX=1297 742 GN=queF PE=3 SV=1
MPSQPSKELQTFPNPAADRDYEITFDVPEFTCLCPLTGQPDFARFKITYVPDQSCIELKSLKLYMWAYRNEGAFHEKVTNTIADDIIKAIQPRKLTVVGDFFVRGGIGTIVTVTHDKSKQQA

SEQ ID NO: 47591 - protein, 122 aa, Myxococcus macrosporus; identical to SEQ ID NO: 47588
  misc_feature (1)..(122): tr|A0A250K2S9|A0A250K2S9_9DELT NADPH-dependent 7-cyano- 7-deazaguanine reductase OS=Myxococcus macrosporus DSM 14697 OX=1189310 GN=queF PE=3 SV=1

SEQ ID NO: 47592 - protein, 118 aa, Myxococcus sp.
  misc_feature (1)..(118): tr|A0A540WT49|A0A540WT49_9DELT NADPH-dependent 7-cyano- 7-deazaguanine reductase OS=Myxococcus sp. AM401 OX=259 0453 GN=queF PE=3 SV=1
MPSQPTKELQTFPNPAPERDYEIAFDCPEFTCLCPLTGQPDFARFKITYVPDQLCIELKSLKLYMWAYRNEGAFHEKVTNTIADDIIKAIQPRKLTLVGDWFVRGGIGTIVTVTHEKK

SEQ ID NO: 47593 - protein, 130 aa, Myxococcus stipitatus
  misc_feature (1)..(130): tr|L7UJN0|L7UJN0_MYXSD NADPH-dependent 7-cyano-7-deazag uanine reductase OS=Myxococcus stipitatus (strain DSM 1 4675 / JCM 12634 / Mx s8) OX=1278073 GN=queF PE=3 SV=1
MTPSPGVLDDTAMPSQPTKELQTFPNPASDRDYEIAFDCPEFTCLCPLTGQPDFARFKITYVPDQSCIELKSLKLYLWAYRNEGAFHEKVTNTIADDIIKAIQPRKLTVVGDWFVRGGIGTIVTVTHEKK

SEQ ID NO: 47594 - protein, 122 aa, Myxococcus virescens
  misc_feature (1)..(122): tr|A0A511H9A0|A0A511H9A0_9DELT NADPH-dependent 7-cyano- 7-deazaguanine reductase OS=Myxococcus virescens OX=834 56 GN=queF PE=3 SV=1
MPSQPSKELQTFPNPAADRDYEIVFDVPEFTCLCPLTGQPDFARFKISYVPDQSCIELKSLKLYMWAYRNEGAFHEKVTNTIADDIIKAIQPRKLTVVGDFFVRGGIGTIVTVTHDKSKQQA

SEQ ID NO: 47595 - protein, 122 aa, Myxococcus xanthus; identical to SEQ ID NO: 47594
  misc_feature (1)..(122): tr|A0A4Y6C1K6|A0A4Y6C1K6_MYXXA NADPH-dependent 7-cyano- 7-deazaguanine reductase OS=Myxococcus xanthus OX=34 GN =queF PE=3 SV=1

SEQ ID NO: 47596 - protein, 134 aa, Myxococcus xanthus
  misc_feature (1)..(134): tr|Q1CYT2|Q1CYT2_MYXXD NADPH-dependent 7-cyano-7-deazag uanine reductase OS=Myxococcus xanthus (strain DK 1622) OX=246197 GN=queF PE=3 SV=1
MTRGVGVVDDSAMPSQPSKELQTFPNPAADRDYEIVFDVPEFTCLCPLTGQPDFARFKITYVPDQSCIELKSLKLYMWAYRNEGAFHEKVTNTIADDIIKAIQPRKLTVVGDFFVRGGIGTIVTVTHDKSKQQA

SEQ ID NO: 47597 - protein, 125 aa, Nannocystis exedens
  misc_feature (1)..(125): tr|A0A1I1Z413|A0A1I1Z413_9DELT NADPH-dependent 7-cyano- 7-deazaguanine reductase OS=Nannocystis exedens OX=54 G N=queF PE=3 SV=1
MRAVSTVPSRELATFANPRPGRDYEVRFDCPEFTCLCPMTGQPDFATIRIRYRPRARCVELKSLKLYLWSFRDTGAFHEAVTNQILDDLVAVLDPEWLEVEGDFLVRGGIHTVVRARHVGAPLPG

SEQ ID NO: 47598 - protein, 160 aa, Natranaerobius trueperi
  misc_feature (1)..(160): tr|A0A226BXF5|A0A226BXF5_9FIRM NADPH-dependent 7-cyano- 7-deazaguanine reductase OS=Natranaerobius trueperi OX= 759412 GN=queF PE=3 SV=1
MSNAEDLTILGSNQTEYPSDYTTEILECFDNRHPDRDYMVTFNCPEFTTLCPKTNQPDFATIYIQYIPDKKLVESKSLKLYLFSFRNTGEFHEDSVNTILNDLKELMDPKYIEVWGKFTPRGGISIDPYVNYGRPGTEYEEMAKKRLQEHNMYPEKIDNR

SEQ ID NO: 47599 - protein, 162 aa, Natribacillus halophilus
  misc_feature (1)..(162): tr|A0A1G8PD28|A0A1G8PD28_9BACI NADPH-dependent 7-cyano- 7-deazaguanine reductase OS=Natribacillus halophilus OX =549003 GN=queF PE=3 SV=1
MTEENHAELTQLGNEGTQYNFEYDPGLLETFDNQHPYRDYFVKFNTPEFTTLCPITGQPDFATLYISYIPDEKMVESKSLKMYLFSFRNHGDFHEDVINIIVNDLVEAMAPRYIEVWGKFTPRGGISIDPYVNYGKPESKYEQMAEQRLLYHDLYPETITNR

SEQ ID NO: 47600 - protein, 293 aa, Natronoflexus pectinivorans
  misc_feature (1)..(293): tr|A0A4R2GDI5|A0A4R2GDI5_9BACT 7-cyano-7-deazaguanine r eductase OS=Natronoflexus pectinivorans OX=682526 GN=EV 194_11544 PE=4 SV=1
MQPIEAKLLGQQIAYPQKYTPEILVAVPRSLNREIYKIDDKQLPFIGCDIWHTYELSFLTLRGLPVAGMLKLRYSSDSTFLVESKSLKLYLNSFNMERFGSDAETGVKEVVEIIKKDLSDILKTAVEVTFFSDSDEVITHFDFHGYQLLETLDEIKNVDFNTFNETPELLIPTDKLTGKITVATHLLRSNCKITNQPDWGSAFILLKAEQLPELKGLLQYLVSIRNENHFHEEICEMIYKRLWDKFSPEELMVACIYTRRGGIDICPVRANSEELFPKFLCNAKELSAKMLRQ

SEQ ID NO: 47601 - protein, 146 aa, Natronoflexus pectinivorans
  misc_feature (1)..(146): tr|A0A4R2GJB9|A0A4R2GJB9_9BACT NADPH-dependent 7-cyano- 7-deazaguanine reductase OS=Natronoflexus pectinivorans OX=682526 GN=EV194_104123 PE=3 SV=1
MERKTLTYKDIDASILKSLPNPTGEAYEIKIKIPEFTFLGVKEQPDFADVFLTFYPKKKIIELKALKQYVYHLRNITVSYERLINVFYDHIMEVYEPERVRVVMVFNPRGGISSKLTIDSDWKVRGGEEKFGDWKNNMEDQWTVTL

SEQ ID NO: 47602 - protein, 282 aa, Natronospirillum operossus
  misc_feature (1)..(282): tr|A0A4Z0WJ88|A0A4Z0WJ88_9BACT NADPH-dependent 7-cyano- 7-deazaguanine reductase QueF OS=Natronospirillum opero ssus OX=2562806 GN=queF PE=3 SV=1
MAEHKQGNGSPLVASALGRETDYPQQYDPEVLYPVPRQHNRDALQVRGWPWFGFDLWYAYELSWLNERGLPQVALAALTLPADSPYLIESKSLKLYLNSFNMTRFASAEAVRERMVTDLSARAGGPVQVRMHGPEAPLLQGKERLAQATLLDTLDIATEQYELDSSLLALAAGGGQHEACLYSHLLRSNCPVTGQPDWGSVVIDYAGPALDLVSVLRYLVSFRNHTGFHEDCVERIFTDLLALGDFSRLVVSAHYLRRGGLDINPCRSLQPLEPDMGRWARQ

SEQ ID NO: 47603 - protein, 129 aa, Nautilia profundicola
  misc_feature (1)..(129): tr|B9L738|B9L738_NAUPA NADPH-dependent 7-cyano-7-deazag uanine reductase OS=Nautilia profundicola (strain ATCC BAA-1463 / DSM 18972 / AmH) OX=598659 GN=queF PE=3 SV=1
MSEIRYGEKEILEFNPENMEIWPNKHKKNYLIKITLPEFMCKCPRSGYPDFATVYLEYTPDEWVVELKALKLYINSFMNRYISHEDSANEIFDTLYNKLKPKYMKITMDFNPRGNVHTVIEIDSDKIEK

SEQ ID NO: 47604 - protein, 127 aa, Nautilia sp.
  misc_feature (1)..(127): tr|A0A432RSN1|A0A432RSN1_9PROT NADPH-dependent 7-cyano- 7-deazaguanine reductase OS=Nautilia sp. OX=2231114 GN= queF PE=3 SV=1
MKYGEKEILEFNVDEMEIWPNKHKKDYLIKITLPEFMAKCPRSGYPDFATIYIEYIPDKYVVELKALKLYINSFMNRYISHEDSANEIYDTIYNKIKPKKLKVTADFNPRGNVHTIIEIDSEIVNKN

SEQ ID NO: 47605 - protein, 126 aa, Nautilia sp.
  misc_feature (1)..(126): tr|A0A3T0L4A5|A0A3T0L4A5_9PROT NADPH-dependent 7-cyano- 7-deazaguanine reductase OS=Nautilia sp. PV-1 OX=257925 0 GN=queF PE=3 SV=1
MRYGEKEILEFNPENMEIWPNKHKKNYLIKITLPEFMCKCPRSGYPDFATVYLEYTPDEWVVELKALKLFINSFMNRYISHEDSANEIFDTLYNKLKPKYMKVTMDFNPRGNVHTVIEIDSDKIEK

SEQ ID NO: 47606 - protein, 157 aa, Neisseria animalis
  misc_feature (1)..(157): tr|A0A3N3EG78|A0A3N3EG78_NEIAN NADPH-dependent 7-cyano- 7-deazaguanine reductase OS=Neisseria animalis OX=492 G N=queF PE=3 SV=1
MSRNAQELEGITLLGNQNTQYHSEYAPEVLEAFDNKHPGNDYFVKFICPEFTSLCPMTGQPDFATLYIRYIPDVKMVESKSLKLYLFSFRNHGDFHEDCVNIIMKDLIALMNPKYIEVYGDFTPRGGIAIHPFANYGRKDTEFEALARKRLFEHDMQ

SEQ ID NO: 47607 - protein, 157 aa, Neisseria animaloris
  misc_feature (1)..(157): tr|A0A1X3CMM5|A0A1X3CMM5_9NEIS NADPH-dependent 7-cyano- 7-deazaguanine reductase OS=Neisseria animaloris OX=326 522 GN=queF PE=3 SV=1
MTRKTEELHGISLLGNQNTQYKTEYAPEVLEAFENKHPDNDYFVKFICPEFTSLCPMTGQPDFATIHIRYIPHIKMVESKSLKLYLFSFRNHGDFHEDCVNIIMKDLIKLMQPKYIEVFGEFTPRGGIAIHPFANYGKAGTEFEKLARDRLFAHDTL

SEQ ID NO: 47608 - protein, 157 aa, Neisseria arctica
  misc_feature (1)..(157): tr|A0A0J0YSQ0|A0A0J0YSQ0_9NEIS NADPH-dependent 7-cyano- 7-deazaguanine reductase OS=Neisseria arctica OX=147020 0 GN=queF PE=3 SV=1
MSRSEQELDGITLLGDNNTQYKTEYAPEVLEAFDNKHPDNEYLVKFVCPEFTSLCPMTGQPDFATIYIRYIPDVKMVESKSLKLYLFSFRNQGDFHEDCVNIIMKDLILLMQPKYIEVLGEFTPRGGIAIHPFANYGRPGTRFEKMAENRLFTYDLP

SEQ ID NO: 47609 - protein, 156 aa, Neisseria bacilliformis
  misc_feature (1)..(156): tr|F2BE51|F2BE51_9NEIS NADPH-dependent 7-cyano-7-deazag uanine reductase OS=Neisseria bacilliformis ATCC BAA-12 00 OX=888742 GN=queF PE=3 SV=1
MTRSSDELRGLSLLGGSTQYPDRYAPEVLEAFDNKHPGNDYFVKFVCPEFTSLCPMTGQPDFATILIRYIPDAKMVESKSLKLYLFGFRNHGDFHEDCVNIIMKDLISLMNPKYIEVSGIFTPRGGIAIHPFANYGRPDTPFAQMARERLFRHDMQ

SEQ ID NO: 47610 - protein, 157 aa, Neisseria canis
  misc_feature (1)..(157): tr|A0A1X3CX71|A0A1X3CX71_9NEIS NADPH-dependent 7-cyano- 7-deazaguanine reductase OS=Neisseria canis OX=493 GN=q ueF PE=3 SV=1
MTREIEELGGITLLGSRKTQYPATYTPSILEAFDNKHQGNDYFVKFICPEFTSLCPMTGQPDFATIHIRYIPDVKMVESKSLKLYLFSFRNHGDFHEDCVNIIMKDLIALMQPKYIEVFGEFTPRGGIAIHPFANYGRSGTPFEKLAQERLFKHDMQ

SEQ ID NO: 47611 - protein, 157 aa, Neisseria cinerea
  misc_feature (1)..(157): tr|D0W3A4|D0W3A4_NEICI NADPH-dependent 7-cyano-7-deazag uanine reductase OS=Neisseria cinerea ATCC 14685 OX=546 262 GN=queF PE=3 SV=1
MSRNTEELQGISLLGNQKTQYPTGYAPEILEAFDNKHPDNDYFVKFVCPEFTSLCPMTGQPDFATIYIRYIPHIKMVESKSLKLYLFSFRNHGDFHEDCVNIIMKDLIALMDPKYIEVFGEFTPRGGIAIHPFANYGKAGTEFETLARKRLFEHDAQ

SEQ ID NO: 47612 - protein, 157 aa, Neisseria cinerea
  misc_feature (1)..(157): tr|A0A2X3ZD19|A0A2X3ZD19_NEICI NADPH-dependent 7-cyano- 7-deazaguanine reductase OS=Neisseria cinerea OX=483 GN =queF PE=3 SV=1
MSRNNEELQGISLLGNQKTQYPTGYAPEILEAFDNKHPDNDYFVKFVCPEFTSLCPMTGQPDFATIYIRYIPHIKMVESKSLKLYLFSFRNHGDFHEDCVNIIMKDLIALMDPKYIEVFGEFTPRGGIAIHPFANYGKAGTEFETLARKRLFEHDAQ

SEQ ID NO: 47613 - protein, 158 aa, Neisseria dentiae
  misc_feature (1)..(158): tr|A0A1X3DDU4|A0A1X3DDU4_9NEIS NADPH-dependent 7-cyano- 7-deazaguanine reductase OS=Neisseria dentiae OX=194197 GN=queF PE=3 SV=1
MTRSSDELHGITLLGSQNVSYRTEYAPEVLEAFDNKHPGNDYFVKFICPEFTSLCPMTGQPDFATIYIRYIPAEKMVESKSLKLYLFSFRNHGDFHEDCVNIIMKDLIALMQPKYIEVYGEFTPRGGIAIHPFANYGRPGTEFEQLAKTRLFAHDARA

SEQ ID NO: 47614 - protein, 158 aa, Neisseria dumasiana
  misc_feature (1)..(158): tr|A0A1X3DLZ4|A0A1X3DLZ4_9NEIS NADPH-dependent 7-cyano- 7-deazaguanine reductase OS=Neisseria dumasiana OX=1931 275 GN=queF PE=3 SV=1
MTRNTDELHGITLLGNQNVSYKTEYAPEVLEAFDNKHPGNDYFVKFVCPEFTSLCPMTGQPDFATIYIRYIPDIKMVESKSLKLYLFSFRNHGDFHEDCVNIIMKDLIALMQPKYIEVFGEFTPRGGIAIHPFANYGKPDTEFEQLAKQRLFAHDSAL

SEQ ID NO: 47615 - protein, 157 aa, Neisseria elongata
  misc_feature (1)..(157): tr|D4DMX8|D4DMX8_NEIEG NADPH-dependent 7-cyano-7-deazag uanine reductase OS=Neisseria elongata subsp. glycolyti ca ATCC 29315 OX=546263 GN=queF PE=3 SV=1
MTRSSEELRGITLLGNQHTQYKTEYAPEVLEAFDNKHPDNDYFVKFICPEFTSLCPMTGQPDFATIHIRYIPGNKMVESKSLKLYLFSFRNHGDFHEDCVNIIMKDLIGLMQPKYIEVFGEFTPRGGIAIHPFANYGQEGTEFEQLARERLFKHDMP

SEQ ID NO: 47616 - protein, 157 aa, Neisseria elongata
  misc_feature (1)..(157): tr|A0A378TVW9|A0A378TVW9_NEIEL NADPH-dependent 7-cyano- 7-deazaguanine reductase OS=Neisseria elongata OX=495 G N=queF PE=3 SV=1
MTRSSEELRGITLLGNQHTQYKTEYAPEVLEAFDNKHPDNDYFVKFICPEFTSLCPMTGQPDFATIHIRYIPGEKMVESKSLKLYLFSFRNHGDFHEDCVNIIMKDLIGLMQPKYIEVFGEFTPRGGIAIHPFANYGQKETEFEQLARERLFKHDML

SEQ ID NO: 47617 - protein, 157 aa, Neisseria flavescens
  misc_feature (1)..(157): tr|C0EM46|C0EM46_NEIFL NADPH-dependent 7-cyano-7-deazag uanine reductase OS=Neisseria flavescens NRL30031/H210 OX=546264 GN=queF PE=3 SV=1
MSRNNEELQGISLLGNQKTQYPSEYAPEILEAFDNKHPDNDYFVKFVCPEFTSLCPMTGQPDFATIYIRYIPHIKMVESKSLKLYLFSFRNHGDFHEDCVNIIMKDLIALMDPKYIEVFGEFTPRGGIAIHPFANYGKAGTEFEALAHKRLFEHDAQ

SEQ ID NO: 47618 - protein, 157 aa, Neisseria flavescens
  misc_feature (1)..(157): tr|A0A154TMM7|A0A154TMM7_NEIFL NADPH-dependent 7-cyano- 7-deazaguanine reductase OS=Neisseria flavescens OX=484 GN=queF PE=3 SV=1
MSRNNEELQGISLLGNQKTQYPSEYAPEILEAFDNKHPDNDYFVKFVCPEFTSLCPMTGQPDFATIYIRYIPHIKMVESKSLKLYLFSFRNHGDFHEDCVNIIMKDLIALMDPKYIEVFGEFTPRGGIAIHPFANYGKAGTEFEALARKRLFEHDAQ

SEQ ID NO: 47619 - protein, 157 aa, Neisseria gonorrhoeae
  misc_feature (1)..(157): tr|A0A0M3GZ55|A0A0M3GZ55_NEIGO NADPH-dependent 7-cyano- 7-deazaguanine reductase OS=Neisseria gonorrhoeae MIA_2 011_03-10 OX=1351790 GN=queF PE=3 SV=1
MSRNNEELQGISLLGNQKTQYPTGYAPEILEAFDNKHPDNDYFVKFVCPEFTSLCPMTGQPDFATIVIRYIPHIKMVESKSLKLYLFSFRNHGDFHEDCVNIIMKDLIALMDPKYIEVFGEFTPRGGIAVHPFANYGKAGTEFEALARKRLFEHDAQ

SEQ ID NO: 47620 - protein, 157 aa, Neisseria gonorrhoeae; identical to SEQ ID NO: 47619
  misc_feature (1)..(157): sp|Q5F678|QUEF_NEIG1 NADPH-dependent 7-cyano-7-deazagua nine reductase OS=Neisseria gonorrhoeae (strain ATCC 70 0825 / FA 1090) OX=242231 GN=queF PE=3 SV=1

SEQ ID NO: 47621 - protein, 157 aa, Neisseria iguanae
  misc_feature (1)..(157): tr|A0A2P7TYL2|A0A2P7TYL2_9NEIS NADPH-dependent 7-cyano- 7-deazaguanine reductase OS=Neisseria iguanae OX=90242 GN=queF PE=3 SV=1
MSRNTEELNGISLLGNRHTQYPTEYTPNILEAFDNKHPDNDYFVKFICPEFTSLCPMTGQPDFATIYIRYIPHIKMVESKSLKLYLFSFRNYGDFHEDCVNTIMKDLISLMDPKYIEVYGDFTPRGGIAIHPFANYGKTHTEFESLARKRLFEHDAH

SEQ ID NO: 47622 - protein, 157 aa, Neisseria lactamica
  misc_feature (1)..(157): tr|E4ZB88|E4ZB88_NEIL0 NADPH-dependent 7-cyano-7-deazag uanine reductase OS=Neisseria lactamica (strain 020-06) OX=489653 GN=queF PE=3 SV=1
MSRNNEELQGISLLGNQKTRYPTEYAPEILEAFDNKHPDNDYFVKFVCPEFTSLCPMTGQPDFATIYIRYIPHIKMVESKSLKLYLFSFRNHGDFHEDCVNIIMKDLIALMDPKYIEVFGEFTPRGGIAIHPFANYGKAGTEFETLARKRLFEHDAK

SEQ ID NO: 47623 - protein, 157 aa, Neisseria lactamica
  misc_feature (1)..(157): tr|D0WCI2|D0WCI2_NEILA NADPH-dependent 7-cyano-7-deazag uanine reductase OS=Neisseria lactamica ATCC 23970 OX=5 46265 GN=queF PE=3 SV=1
MSRNTEELQGISLLGNQKTRYPSEYAPEILEAFGNKHPDNDYFVKFVCPEFTSLCPMTGQPDFATIYIRYIPHIKMVESKSLKLYLFSFRNHGDFHEDCVNIIMKDLIALMDPKYIEVFGEFTPRGGIAIHPFANYGKAGTEFETLARKRLFEHDAQ

SEQ ID NO: 47624 - protein, 157 aa, Neisseria macacae; identical to SEQ ID NO: 47566
  misc_feature (1)..(157): tr|F9F015|F9F015_9NEIS NADPH-dependent 7-cyano-7-deazag uanine reductase OS=Neisseria macacae ATCC 33926 OX=997 348 GN=queF PE=3 SV=1

SEQ ID NO: 47625 - protein, 157 aa, Neisseria meningitidis
  misc_feature (1)..(157): tr|A0A1V3SMX5|A0A1V3SMX5_NEIME NADPH-dependent 7-cyano- 7-deazaguanine reductase OS=Neisseria meningitidis OX=4 87 GN=queF PE=3 SV=1
MSRNTEELQGISLLGNQKTQYPIGYAPEILEAFDNKHPDNDYFVKFVCPEFTSLCPMTGQPDFATIVIRYIPHIKMVESKSLKLYLFSFRNHGDFHEDCVNIIMKDLIALMDPKYIEVFGEFTPRGGIAIHPFANYGKAGTEFEALARKRLFEHDAQ

SEQ ID NO: 47626 - protein, 157 aa, Neisseria meningitidis
  misc_feature (1)..(157): sp|A1KVW5|QUEF_NEIMF NADPH-dependent 7-cyano-7-deazagua nine reductase OS=Neisseria meningitidis serogroup C / serotype 2a (strain ATCC 700532 / DSM 15464 / FAM18) OX =272831 GN=queF PE=3 SV=1
MSRNTEELQGISLLGNQKTRYPTGYAPEILEAFDNKHPDNDYFVKFVCPEFTSLCPMTGQPDFATIYIRYIPHIKMVESKSLKLYLFSFRNHGDFHEDCVNIIMKDLIALMDPKYIEVFGEFTPRGGIAIHPFANYGKAGTEFETLARKRLFEHDSQ

SEQ ID NO: 47627 - protein, 157 aa, Neisseria mucosa
  misc_feature (1)..(157): tr|A0A2R4AYJ4|A0A2R4AYJ4_NEIMU NADPH-dependent 7-cyano- 7-deazaguanine reductase OS=Neisseria mucosa OX=488 GN= queF PE=3 SV=1
MSRNTEELQGISLLGNQKTQYPTGYAPEILEAFDNKHPDNDYFVKFVCPEFTSLCPMTGQPDFATIYIRYIPHIKMVESKSLKLYLFSFRNHGDFHEDCVNIIMKDLIALMDPKYIEVFGEFTPRGGIAIHPFANYGKAGTEFEALARKRLFEHDSQ

SEQ ID NO: 47628 - protein, 157 aa, Neisseria mucosa
  misc_feature (1)..(157): tr|D2ZYQ6|D2ZYQ6_NEIMU NADPH-dependent 7-cyano-7-deazag uanine reductase OS=Neisseria mucosa ATCC 25996 OX=5462 66 GN=queF PE=3 SV=1
MSRNTEELQGISLLGNQKTQYPTGYAPEILEAFDNKHPDNDYFVKFVCPEFTSLCPMTGQPDFATIYIRYIPHIKMVESKSLKLYLFSFRNHGDFHEDCVNIIMKDLIALMDPKYIEVFGAFTPRGGIAIHPFANYGKAGTEFEALARKRLFEHDSQ

SEQ ID NO: 47629 - protein, 157 aa, Neisseria perflava; identical to SEQ ID NO: 47618
  misc_feature (1)..(157): tr|A0A2I1Y3K8|A0A2I1Y3K8_NEIPE NADPH-dependent 7-cyano- 7-deazaguanine reductase OS=Neisseria perflava OX=33053 GN=queF PE=3 SV=1

SEQ ID NO: 47630 - protein, 157 aa, Neisseria polysaccharea
  misc_feature (1)..(157): tr|E2PCA6|E2PCA6_NEIPO NADPH-dependent 7-cyano-7-deazag uanine reductase OS=Neisseria polysaccharea ATCC 43768 OX=546267 GN=queF PE=3 SV=1
MSRNTEELQGISLLGNQKTQYPIGYAPEILEAFDNKHPDNDYFVKFVCPEFTSLCPMTGQPDFATIYIRYIPHIKMVESKSLKLYLFSFRNHGDFHEDCVNIIMKDLIALMDPKYIEVFGEFTPRGGIAIHPFANYGKAGTEFETLARKRLFEHDAQ

SEQ ID NO: 47631 - protein, 156 aa, Neisseria shayeganii
  misc_feature (1)..(156): tr|G4CJM5|G4CJM5_9NEIS NADPH-dependent 7-cyano-7-deazag uanine reductase OS=Neisseria shayeganii 871 OX=1032488 GN=queF PE=3 SV=1
MRTSNELDGLTLLGKQQTVYRSDYAPEVLEAFDNKHPGNDYFVKFICPEFTSLCPMTGQPDFATIVIRYIPDVKMVESKSLKLYLFSFRNHGDFHEDCVNIIMKDLIALMDPKYIEVFGDFTPRGGIAIHPFANYGRPGTPFVDMARERLLRHDMQ

SEQ ID NO: 47632 - protein, 82 aa, Neisseria sicca
  misc_feature (1)..(82): tr|C6M3Q2|C6M3Q2_NEISI NADPH-dependent 7-cyano-7-deazag uanine reductase OS=Neisseria sicca ATCC 29256 OX=54704 5 GN=queF PE=3 SV=1
MVESKSLKLYLFSFRNHGDFHEDCVNIIMKDLIALMDPKYIEVFGEFTPRGGIAIHPFANYGKAGTEFEALARKRLFEHDSQ

SEQ ID NO: 47633 - protein, 157 aa, Neisseria sicca
  misc_feature (1)..(157): tr|A0A2I1X9L5|A0A2I1X9L5_NEISI NADPH-dependent 7-cyano- 7-deazaguanine reductase OS=Neisseria sicca OX=490 GN=q ueF PE=3 SV=1
MSRNTEELQGISLLGNQKTQYPTGYAPEILEAFDNKHPDNDYFVKFVCPEFTSLCPMTGQPDFATIYIRYIPHIKMVESKSLKLYLFSFRNHGDFHEDCVNIIMKDLIALMDPQYIEVFGEFTPRGGIAIHPFANYGKAGTEFEALARKRLFEHDSQ

SEQ ID NO: 47634 - protein, 157 aa, Neisseria sp.; identical to SEQ ID NO: 47618
  misc_feature (1)..(157): tr|A0A1S1CVL3|A0A1S1CVL3_9NEIS NADPH-dependent 7-cyano- 7-deazaguanine reductase OS=Neisseria sp. HMSC064D07 OX =1715087 GN=queF PE=3 SV=1

SEQ ID NO: 47635 - protein, 157 aa, Neisseria sp.
  misc_feature (1)..(157): tr|A0A2H9X001|A0A2H9X001_9NEIS NADPH-dependent 7-cyano- 7-deazaguanine reductase OS=Neisseria sp. N95_16 OX=202 4408 GN=queF PE=3 SV=1
MSRNTEELNGISLLGNQHTQYPTEYDPNILEAFDNKHPGNDYFVKFICPEFTSLCPMTGQPDFATIYIRYIPHIKMVESKSLKLYLFSFRNHGDFHEDCVNTIMKDLIALMDPKYIEVYGDFTPRGGIAIHPFANYGKADTEFENLARKRLFEHDAH

SEQ ID NO: 47636 - protein, 157 aa, Neisseria subflava; identical to SEQ ID NO: 47618
  misc_feature (1)..(157): tr|A0A4D7WE88|A0A4D7WE88_NEISU NADPH-dependent 7-cyano- 7-deazaguanine reductase OS=Neisseria subflava OX=28449 GN=queF PE=3 SV=1

SEQ ID NO: 47637 - protein, 82 aa, Neisseria subflava
  misc_feature (1)..(82): tr|D3A1E4|D3A1E4_NEISU NADPH-dependent 7-cyano-7-deazag uanine reductase OS=Neisseria subflava NJ9703 OX=546268 GN=queF PE=3 SV=1
MVESKSLKLYLFSFRNHGDFHEDCVNIIMKDLIALMDPKYIEVFGEFTPRGGIAIHPFANYGKAGTEFEALARKRLFEHDAQ

SEQ ID NO: 47638 - protein, 157 aa, Neisseria wadsworthii
  misc_feature (1)..(157): tr|G4CTL6|G4CTL6_9NEIS NADPH-dependent 7-cyano-7-deazag uanine reductase OS=Neisseria wadsworthii 9715 OX=10308 41 GN=queF PE=3 SV=1
MTREIEELGGITLLGSQKTQYPSTYTPAILEAFDNKHQNNDYFVKFICPEFTSLCPMTGQPDFATIHIRYIPDIKMVESKSLKLYLFSFRNHGDFHEDCVNIIMKDLIALMQPKYIEVFGEFTPRGGIAIHPFANYGRPNTPFEKLAQERLFKHDMQ

SEQ ID NO: 47639 - protein, 157 aa, Neisseria weaveri
  misc_feature (1)..(157): tr|A0A448VLR2|A0A448VLR2_9NEIS NADPH-dependent 7-cyano- 7-deazaguanine reductase OS=Neisseria weaveri OX=28091 GN=queF PE=3 SV=1
MTRNTEELSGLTLLGNQNTLYKTSYAPEVLETFENKHLDNDYFVKFICPEFTSLCPMTGQPDFATIHIRYIPDIKMVESKSLKLYLFSFRNHGDFHEDCVNIIMKDLIRIMQPKYIEVFGEFTPRGGIAIHPFANYGKPETGFEALARERLFAHDMQ

SEQ ID NO: 47640 - protein, 158 aa, Neisseria zalophi
  misc_feature (1)..(158): tr|A0A5J6PYK1|A0A5J6PYK1_9NEIS NADPH-dependent 7-cyano- 7-deazaguanine reductase QueF OS=Neisseria zalophi OX=6 40030 GN=queF PE=4 SV=1
MTRSTQELQDITLLGNQNVVYQTEYAPEILEAFDNKHPDNDYFVTFTCPEFTSLCPITGQPDFATIYIRYIPHIKMVESKSLKLYLFSFRNHGDFHEDCVNIIMKDLIKLMQPKYIEVFGEFTPRGGIAIHPFANYGKPDSEYEQLAKTRLFAHEMRS

SEQ ID NO: 47641 - protein, 158 aa, Neisseria zoodegmatis
  misc_feature (1)..(158): tr|A0A378X6U2|A0A378X6U2_9NEIS NADPH-dependent 7-cyano- 7-deazaguanine reductase OS=Neisseria zoodegmatis OX=32 6523 GN=queF PE=3 SV=1
MTRNTEELHGITLLGNQNVSYKTEYAPEVLEAFDNKHPGNDYFVKFICPEFTSLCPMTGQPDFATIYIRYIPDIKMVESKSLKLYLFSFRNHGDFHEDCVNIIMKDLIKLMQPKYIEVFGEFTPRGGIAIHPFANYGKPNTEFEQLAKKRLFSHDSSL

SEQ ID NO: 47642 - protein, 158 aa, Neisseria zoodegmatis
  misc_feature (1)..(158): tr|A0A1X3CSV2|A0A1X3CSV2_9NEIS NADPH-dependent 7-cyano- 7-deazaguanine reductase OS=Neisseria zoodegmatis OX=32 6523 GN=queF PE=3 SV=1
MTRNTEELHGITLLGNQNVSYKTEYAPEVLEAFDNKHLGNDYFVKFICPEFTSLCPMTGQPDFATIYIRYIPDIKMVESKSLKLYLFSFRNHGDFHEDCVNIIMKDLIKLMQPKYIEVFGEFTPRGGIAIHPFANYGKPNTEFEQLAKKRLFSHDSSL

SEQ ID NO: 47643 - protein, 273 aa, Neisseriaceae bacterium
  misc_feature (1)..(273): tr|A0A2I7N300|A0A2I7N300_9NEIS NADPH-dependent 7-cyano- 7-deazaguanine reductase OS=Neisseriaceae bacterium DSM 100970 OX=2052837 GN=queF PE=3 SV=1
MNPELSQLGRKSEYRAHYAPELLFPIPRKIKRDEIGIDEANLPFHGIDIWNHYEVSWLNLKGKPEVAIATIIVPAASPNIIESKSMKLYFNSFNNDKFVSSKDVEDIMSRDLTLAAGAEVTVDLHPLESGLFTIHQPSGLLIDTLDVAIDEYIVNPSLLKVKNDEIVTEKLYSNLLKSNCLVTNQPDWATVVIEYTGKAIDHASLLKYIISFRNHNEFHEQCVERIFSDIMKHCLVNELTVSARFTRRGGLDINPLRTTKADFTTDNLRLIRQ

SEQ ID NO: 47644 - protein, 273 aa, Neisseriaceae bacterium
  misc_feature (1)..(273): tr|A0A431ITS8|A0A431ITS8_9NEIS NADPH-dependent 7-cyano- 7-deazaguanine reductase OS=Neisseriaceae bacterium OX= 2014784 GN=queF PE=3 SV=1
MNIQNSALGKKSAYISEYAPELLFPIARKIKRDEIGIDENNLPFYGVDIWNHYEVSWLNFKGKPMVACAVLYIPANSSNIIESKSMKLYFNSFNNHKFATKQELAEIITKDLSQAANVAVRVELYELNHKGFAISEPAGECLDDLDITITDYTVNPQLLGANPNKQVKEKLYSNLLKSNCLVTYQPDWATLLIEYRGAQIDREALLRYIISFRNHNEFHEQCVERIFNDISKFCAPDELIVMARFTRRGGLDINPIRASQPLSNYPNLRLIRQ

SEQ ID NO: 47645 - protein, 273 aa, Neisseriales bacterium
  misc_feature (1)..(273): tr|A0A5C8B181|A0A5C8B181_9NEIS NADPH-dependent 7-cyano- 7-deazaguanine reductase OS=Neisseriales bacterium OX=2 053582 GN=queF PE=3 SV=1
MNPELSQLGKKSEYRAHYAPELLFPIPRKIKRDEIGIDEANLPFHGIDIWNHYEVSWLNLKGKPEVAIATIVVPATSLNIIESKSVKLYFNSFNNDRFASSKDVEDIMSRDLTLAAGAEVTVDLHPLESGLFAIHQPDGVLIDTLDVAIDEYIVNPLLLKVKNDEIITEKLYSNLLKSNCLVTNQPDWATVAIEYTGRAIDHASLLKYIISFRNHNEFHEQCVERIFSDIMKYCVVNELTVSARFTRRGGLDINPIRTTKADLTTDNLRLIRQ

SEQ ID NO: 47646 - protein, 156 aa, Neoasaia chiangmaiensis
  misc_feature (1)..(156): tr|A0A1U9KRJ1|A0A1U9KRJ1_9PROT NADPH-dependent 7-cyano- 7-deazaguanine reductase OS=Neoasaia chiangmaiensis OX= 320497 GN=queF PE=3 SV=1
MTTAQNDLDALRQLGQHTAQPQSPEEATLDRVPSPHQGRQYVVRFTAPEFTSLCPVTGQPDFAHIVIDYIPDQWIVESKSLKLYLTSFRNHGAFHEDCSISIATRLVEELSPVWLRIGAYWYPRGGIPIDVFWQTGAPPDGVWIPTQDVPGYRGRG

SEQ ID NO: 47647 - protein, 286 aa, Neochlamydia sp.
  misc_feature (1)..(286): tr|A0A0C1K964|A0A0C1K964_9BACT NADPH-dependent 7-cyano- 7-deazaguanine reductase OS=Neochlamydia sp. EPS4 OX=14 78175 GN=queF PE=3 SV=1
MKLYFIGKVAFMKDETLINSPLGKQTFYDTVYDPSLLCPLPRDKQRQAIGIADVNLPFQGYDVWNAYELSWLNVKGKPLLAIGEFFFPCQSPYIVESKSFKLYLNSFHQTTFANLEDVQAILEKDLAKCVGQPVKVNLIQSKDYASLCLKNLPGFCLDNLDIETNLYAVDPSILEHAAELVEEEFYSNLLKSNCPVTKQPDWASLYIHYIGPKINKESLLKYIISFRSHYEFGEHCIERIFMDLQKYCRCHKLTIYGRYTRRGGIDLNPFRSNFESFMRNIRDYRQ

SEQ ID NO: 47648 - protein, 275 aa, Neochlamydia sp.
  misc_feature (1)..(275): tr|A0A3Q9XVC1|A0A3Q9XVC1_9BACT NADPH-dependent 7-cyano- 7-deazaguanine reductase OS=Neochlamydia sp. S13 OX=135 3976 GN=NCS13_1_1769 PE=3 SV=1
MKDETLINSPLGKQTFYDTVYDPSLLCPLPRDKQRQAIGIADVNLPFQGYDVWNAYELSWLNVKGKPLLAIGEFFFPCQSPYIVESKSFKLYLNSFHQTTFANLEDVQAILEKDLAKCVGQPVKVNLIQSKDYASLCLRNLPGFCLDNLDIETNLYAVDPSILGHAAELVEEEFYSNLLKSNCPVTKQPDWASLYIHYIGPKINKESLLKYIISFRSHYEFGEHCIERIFMDLQKYCRCHKLTIYGRYTRRGGIDLNPFRSNFESFMRNIRDYRQ

SEQ ID NO: 47649 - protein, 164 aa, Neokomagataea sp.
  misc_feature (1)..(164): tr|A0A506ULK0|A0A506ULK0_9PROT NADPH-dependent 7-cyano- 7-deazaguanine reductase OS=Neokomagataea sp. Jb2 OX=25 58904 GN=queF PE=3 SV=1
MSSSSAPPSGPSAPGTDALSQLGRQSTQPASPEEAVLERVPAPHPDKRYVVRFTAPEFTSLCPVTGQPDFAHLVIDYIPRNWIVESKSLKLYLTSFRNHGAFHEDCSVSIATRLVELLDPQWLRIGAYWYPRGGMPIDVFWQTGPAPQDVWVPPQDVPGYRGRG

SEQ ID NO: 47650 - protein, 159 aa, Neokomagataea tanensis
  misc_feature (1)..(159): tr|A0A4Y6V4E0|A0A4Y6V4E0_9PROT NADPH-dependent 7-cyano- 7-deazaguanine reductase OS=Neokomagataea tanensis OX=6 61191 GN=queF PE=3 SV=1
MSHPGPSAPGTDALSQLGQHVVPAASPEEAILERVPAPHKGRQYVVRFTAPEFTSLCPVTGQPDFAHIVIDYIPRDWIVESKSLKLYLTSFRNHGAFHEDCSVTIAERLVELLDPEWLRIGAYWYPRGGIPIDVFWQSGTPPESVWIPPQDVPGYRGRG

SEQ ID NO: 47651 - protein, 154 aa, Neorhizobium alkalisoli
  misc_feature (1)..(154): tr|A0A561QW64|A0A561QW64_9RHIZ NADPH-dependent 7-cyano- 7-deazaguanine reductase OS=Neorhizobium alkalisoli OX= 528178 GN=queF PE=3 SV=1
MTMTDVSGLSQLGQQVEAPTSPETAVLEKVPNGNQGTDYVVRFTAPEFTSLCPMTGQPDFAHIVIDYIPDGFLVESKSLKLFLHSFRNHGAFHEDCSVYIAKRIVELLNPKWLRIGAYWYPRGGIPIDVFWQTGEAPKGVWLPEQGVATYRGRG

SEQ ID NO: 47652 - protein, 154 aa, Neorhizobium galegae
  misc_feature (1)..(154): tr|A0A0T7GHE4|A0A0T7GHE4_RHIGA NADPH-dependent 7-cyano- 7-deazaguanine reductase OS=Neorhizobium galegae bv. of ficinalis OX=323656 GN=queF PE=3 SV=1
MTMTDVTGLSQLGSQVEAPQSPETAVLEKVPNGNQGTDYVVRFTAPEFTSLCPMTGQPDFAHIVIDYIPDGFLVESKSLKLFLHSFRSHGAFHEDCSIYIAKRIVDLLAPKWLRIGAYWYPRGGIPIDVFWQTGEAPAGVWLPEQGVATYRGRG

SEQ ID NO: 47653 - protein, 154 aa, Neorhizobium galegae
  misc_feature (1)..(154): tr|A0A0T7FHI4|A0A0T7FHI4_RHIGA NADPH-dependent 7-cyano- 7-deazaguanine reductase OS=Neorhizobium galegae bv. of ficinalis OX=323656 GN=queF PE=3 SV=1
MTMTDVTGLSQLGSQVEAPQSPETAVLERVPNGNQGTDYVVRFTAPEFTSLCPMTGQPDFAHIVIDYIPDGFLVESKSLKLFLHSFRNHGAFHEDCSIYIAKRIVDLLAPKWLRIGAYWYPRGGIPIDVFWQTGEAPAGVWLPEQGVATYRGRG

SEQ ID NO: 47654 - protein, 154 aa, Neorhizobium sp.
  misc_feature (1)..(154): tr|A0A386E0H4|A0A386E0H4_9RHIZ NADPH-dependent 7-cyano- 7-deazaguanine reductase OS=Neorhizobium sp. NCHU2750 O X=1825976 GN=queF PE=3 SV=1
MTMTDVSGLSQLGKQVETPNSPEEAVMERVPNSNQGMDYVTRFTAPEFTSLCPMTGQPDFAHIVIDYIPDAWLVESKSLKLFLTSFRNHGAFHEDCSVYIAKRLVDLLQPKWLRIGAYWYPRGGIPIDVFWQTGDVPAGVWLPDQGVPTYRGRG

SEQ ID NO: 47655 - protein, 154 aa, Neorhizobium sp.
  misc_feature (1)..(154): tr|A0A4R3XPI3|A0A4R3XPI3_9RHIZ NADPH-dependent 7-cyano- 7-deazaguanine reductase OS=Neorhizobium sp. S3-V5DH OX =2485166 GN=queF PE=3 SV=1
MTMTDVSGLSQLGANVSTPQSPEAAVLEKVPNGNQGTDYVVRFTAPEFTSLCPMTGQPDFAHIVIDYIPDGFLVESKSLKLFLHSFRNHGAFHEDCSIYIARRIVDLLQPKWLRIGAYWYPRGGIPIDVFWQTGEAPAGVWLPEQGVPTYRGRG

SEQ ID NO: 47656 - protein, 274 aa, Neptuniibacter sp.
  misc_feature (1)..(274): tr|A0A136H8H7|A0A136H8H7_9GAMM NADPH-dependent 7-cyano- 7-deazaguanine reductase OS=Neptuniibacter sp. Phe_28 O X=1795871 GN=queF PE=3 SV=1
MDTNDVVTQSPLGKDTEYINSYDPSLLYPIARDTNWQAQGIDRETLPFKGVDIWNAYELSWINHRGKPEVRLAEFRVFADSKNIIESKSFKLYLNSFNLSKFASQKEVEALLIKDLSEAAEGRVTVRIYHPDQAPEFGQFTGFCIDNQDVDITAYTPAPDLLFTGEDEVEEVLYSHLLKSNCPVTGQPDWATLGISYSGKEIDREGLLKYIISYREHGDFHEQCVENIFMHIWERCKPDSLNVYARYVRRGGLDINPFRSSEMDDIDNLRLSRQ

SEQ ID NO: 47657 - protein, 274 aa, Neptunomonas antarctica
  misc_feature (1)..(274): tr|A0A1N7M6H5|A0A1N7M6H5_9GAMM NADPH-dependent 7-cyano- 7-deazaguanine reductase OS=Neptunomonas antarctica OX= 619304 GN=queF PE=3 SV=1
MSEQKVLDQSPLGSDTAYVNQYDPGLLFPIQRDLNWQKRGVEREDLPFQGTDIWNGYEVSWINLKGKPVVRIAAFFIPASSKNIIESKSFKLYLNSFNLSQFESEDSVKQLMQKDLSDIAGGEVRVEFYHPDRMPDLSRFDGECLDELDISVEHYQPEPGLLQVGERQVEQALYSHLLKSNCPVTGQPDWASIQITYSGLEINQEGLLKYLISYREHGDFHEQCVENIFMDIWQRCHPESLTVYARYVRRGGLDINPIRSSEPVTAINFRLSRQ

SEQ ID NO: 47658 - protein, 274 aa, Neptunomonas qingdaonensis
  misc_feature (1)..(274): tr|A0A1I2NVP9|A0A1I2NVP9_9GAMM NADPH-dependent 7-cyano- 7-deazaguanine reductase OS=Neptunomonas qingdaonensis OX=1045558 GN=queF PE=3 SV=1
MTEQKVLDQSPLGSDTAYVNQYSPQLLFPIQRDLNWHKRGIERADLPFYGEDLWNGYEISWLNLKGKPVVRIAAFVIPADSRNIIESKSFKLYLNSFNLSRFENEEAVIALMQNDLSLAAGGDVRVEFFHPDGMPELGRFEGKCLDELDISVTHYQPEISLLSTGERHVDEMLYSHLLKSNCPVTGQPDWASIQISYVGKEINQEGLLEYLISYREHGDFHEQCVENIFMDIWTHCQPESLIVYARYVRRGGLDINPLRSSKAIAAVNLRLSRQ

SEQ ID NO: 47659 - protein, 276 aa, Neptunomonas sp.
  misc_feature (1)..(276): tr|A0A437QC45|A0A437QC45_9GAMM NADPH-dependent 7-cyano- 7-deazaguanine reductase OS=Neptunomonas sp. HPM-16 OX= 1815562 GN=queF PE=3 SV=1
MNEEQTLEASPLGSDTAYVNEYDASLLFPIARQLNWQTRGIERGALPIKGEDIWNGYEVSWLNTKGKPVVRVARFHIPASSHNIIESKSFKLYLNSFNLSRFETEQLVIDAMTRDLSSAAGAPVAVFLQHPDALEEIKPLEGVCIDELDIEVEHYAPDASLLTTTADQPVEETLYSHLLKSNCPVTGQPDWASIVVAYKGKPISREGLLQYVISYREHGDFHEQCVENIFMDIWERCEPEKLSVYARYLRRGGLDINPFRSSHLESAPHNRRLGRQ

SEQ ID NO: 47660 - protein, 153 aa, Nesiotobacter exalbescens
  misc_feature (1)..(153): tr|A0A1U7JJ42|A0A1U7JJ42_9RHOB NADPH-dependent 7-cyano- 7-deazaguanine reductase OS=Nesiotobacter exalbescens O X=197461 GN=queF PE=3 SV=1
MSHTEQGLSQLGAASALPQCPDEAVLERVPNPHPDTNYVTRFTMPEFTSICPVTSQPDFAHLVLDFVADKWLVESKSLKLYLLSFRNHGAFHEDCTVAIGKRIVALIEPRWLRIGGYWYPRGGMPIDVFWQHGEVPSGTWVPDQGVQPYRGRG

SEQ ID NO: 47661 - protein, 137 aa, Nevskiales bacterium; identical to SEQ ID NO: 43476
  misc_feature (1)..(137): tr|A0A2E9ZUK0|A0A2E9ZUK0_9GAMM NADPH-dependent 7-cyano- 7-deazaguanine reductase OS=Nevskiales bacterium OX=202 6766 GN=queF PE=3 SV=1

SEQ ID NO: 47662 - protein, 150 aa, Niastella koreensis
  misc_feature (1)..(150): tr|G8TK85|G8TK85_NIAKG NADPH-dependent 7-cyano-7-deazag uanine reductase OS=Niastella koreensis (strain DSM 176 20 / KACC 11465 / GR20-10) OX=700598 GN=Niako_0118 PE=3 SV=1
MSEQITREPVKTYKDIDRSILKPIPNPTDQAYEIKIKIPEFTFLGVKEQPDFAVIYCTFYPGKKIIELKSLKHYVFQLRNIVVSYERLINIIYDDLVAVYEPSRIRLVMVCNPRGGISSKLTIDSDWKIRGGKEQFNDWQIVEDEWSVEM

SEQ ID NO: 47663 - protein, 146 aa, Niastella populi
  misc_feature (1)..(146): tr|A0A1V9G8J1|A0A1V9G8J1_9BACT NADPH-dependent 7-cyano- 7-deazaguanine reductase OS=Niastella populi OX=550983 GN=A4R26_13070 PE=3 SV=1
MTREPVKTYRDIDRSILKPIPNPSEQAYEIKIKIPEFTFLGVKEQPDFAVIYCTFYPGKKIIELKSLKQYVFQLRNIVVSYERLINIIYDDLVAVYEPARLRLVMICNPRGGISSKLTIDSDWKIRGGKEQFNDWQIVEDEWSVEM

SEQ ID NO: 47664 - protein, 150 aa, Niastella sp.
  misc_feature (1)..(150): tr|A0A4R2W095|A0A4R2W095_9BACT NADPH-dependent 7-cyano- 7-deazaguanine reductase OS=Niastella sp. CF465 OX=2135 684 GN=C8K05_105428 PE=3 SV=1
MSEQITREAVKTYKDIDRSILKPIPNPSDQAYEIKIKIPEFTFLGVKEQPDFAVIYCTFYPGKKIIELKSLKQYVFQLRNIVVSYERLINIIYDDLVAIYEPARLRLVMICNPRGGISSKLTIDSDWKIRGGKEQFNDWQIVEDEWSVEM

SEQ ID NO: 47665 - protein, 150 aa, Niastella sp.
  misc_feature (1)..(150): tr|A0A4S8HYV2|A0A4S8HYV2_9BACT NADPH-dependent 7-cyano- 7-deazaguanine reductase OS=Niastella sp. HX-2-15 OX=25 70359 GN=queF PE=3 SV=1
MSEQIVKESVKTYKDIDRRILKPIPNPTDQAYEIKIKIPEFTFLGVKEQPDFAVIYCTFYPGKKIIELKSLKQYVFQLRNIVVSYERLINIIYDDLCAVYEPSRLRLVMICNPRGGISSKLTIDSDWKIRGGKEQFNDWQIVEDEWSVEM

SEQ ID NO: 47666 - protein, 150 aa, Niastella vici
  misc_feature (1)..(150): tr|A0A1V9FZ19|A0A1V9FZ19_9BACT NADPH-dependent 7-cyano- 7-deazaguanine reductase OS=Niastella vici OX=1703345 G N=A3860_24210 PE=3 SV=1
MSEQLTREPVKTYKDIDRSILKPIPNPTDQAYEIKIKIPEFTFLGVKEQPDFAVIYCTFYPGKKIIELKSLKHYVFQLRNIVVSYERLINIIYDDLCAVYEPDRLRLVMVCNPRGGISSKLTIDSDWKIRGGKEQFNDWQIVEDEWSVEM

SEQ ID NO: 47667 - protein, 150 aa, Niastella yeongjuensis
  misc_feature (1)..(150): tr|A0A1V9FC73|A0A1V9FC73_9BACT NADPH-dependent 7-cyano- 7-deazaguanine reductase OS=Niastella yeongjuensis OX=3 54355 GN=A4H97_20630 PE=3 SV=1
MSEQISREPVKTYKDIDRSILKPIPNPTDQAYEIKIKIPEFTFLGVKEQPDFAVIYCTFYPGKKIIELKSLKHYVFQLRNIVVSYERLINIIYDDLVAVYEPSRLRLVMVCNPRGGISSKLTIDSDWKIRGGKEQFNDWQIVEDEWSVEM

SEQ ID NO: 47668 - protein, 122 aa, Nibricoccus aquaticus
  misc_feature (1)..(122): tr|A0A290QK02|A0A290QK02_9BACT NADPH-dependent 7-cyano- 7-deazaguanine reductase OS=Nibricoccus aquaticus OX=25 76891 GN=queF PE=3 SV=1
MSDAKLLETFPNPAPHRDFLIDHTHHEFTSVCPMTGHPDFADITVRYVPDKTCVELKSLKLYFHAFRNQGIFFEAVTNKICDDLGKALKPRSLTIISKWKARGGFTSVVTAEWSGKNAKMTR

SEQ ID NO: 47669 - protein, 277 aa, Nicoletella semolina
  misc_feature (1)..(277): tr|A0A4R2NAF4|A0A4R2NAF4_9PAST NADPH-dependent 7-cyano- 7-deazaguanine reductase OS=Nicoletella semolina OX=271 160 GN=queF PE=3 SV=1
MYDHQSLSTLKLGKKTEYKHAYDASLLQSVPRQLNRTDLGIMENPPFVGADLWTLYELSWLNMRGVPQVAIADVVINADSQNLIESKSFKLYLNSFNQTRFASWNDVQTTLQHDLQSCASGEISVKLCKLADYTNQPITTLEGELIDEQDIEINDYQFSVEHLAQVATGEMVEEKLVSHLLKSNCLITNQPDWGSVQIHYVGKRLDREKLLRYLVSFREHNEFHEQCVERIFCDLMRFAKPEKLTVYARYTRRGGLDINPFRSNFEPLPANLRLARQ

SEQ ID NO: 47670 - protein, 157 aa, Nisaea sp.; identical to SEQ ID NO: 45035
  misc_feature (1)..(157): tr|A0A2D7JNZ8|A0A2D7JNZ8_9PROT NADPH-dependent 7-cyano- 7-deazaguanine reductase OS=Nisaea sp. OX=2024842 GN=qu eF PE=3 SV=1

SEQ ID NO: 47671 - protein, 156 aa, Nisaea sp.
  misc_feature (1)..(156): tr|A0A2D7Z484|A0A2D7Z484_9PROT NADPH-dependent 7-cyano- 7-deazaguanine reductase OS=Nisaea sp. OX=2024842 GN=qu eF PE=3 SV=1
  misc_feature (61)..(61): Xaa can be any naturally occurring amino acid
MTADTDRLSTLTQLGAAADMPDNPEAAVLERVANGQSGVDYVVRFTCPEFTSLCPMTGQPXFAHLVIDYVPEDWLVESKSLKLFLGAFRNHGAFHEDCTVMIARRLVDTLAPKWLRIGGYWYPRGGIPIDVFYQTGPVPADVWLPDQGVPPYRGRG

SEQ ID NO: 47672 - protein, 281 aa, Nissabacter sp.
  misc_feature (1)..(281): tr|A0A4P8SKG3|A0A4P8SKG3_9GAMM NADPH-dependent 7-cyano- 7-deazaguanine reductase OS=Nissabacter sp. SGAir0207 O X=2126321 GN=queF PE=3 SV=1
MSSYQEHQALQQLTLGKPTAYQDHYDAALLQAVPRSMNREPLGLYPDNLPFHGADIWTLYELSWLNANGLPQVAVGEVRLDASSQNLVESKSFKLYLNSFNQTHFASWEEVQATLQRDLSRCADGEVTVELFRLSEVEGQPISRFHGECIDEQDIRIDSYEFSTDFLEQARGGAPVEETLVSHVLKSNCLITHQPDWGSVQIHYRGNQIDREALLRYLVSFRHHNEFHEQCVERIFNDLMRFFQPEKLAVYARYTRRGGLDINPWRANFDFTPANGRLVRQ

SEQ ID NO: 47673 - protein, 125 aa, Nitratifractor salsuginis
  misc_feature (1)..(125): tr|E6X2U0|E6X2U0_NITSE NADPH-dependent 7-cyano-7-deazag uanine reductase OS=Nitratifractor salsuginis (strain D SM 16511 / JCM 12458 / E9I37-1) OX=749222 GN=queF PE=3 SV=1
MKYGEKEIKDFDINRAENFWSNEHEKEYTIDIELPEFMCRCPRSGYPDFATLHLSYVPDKKVIELKALKLYINSFMDRYISHENAANEIFDTLYGKLKPKHMKLVADFNPRGNVHTVITIDSDTM

SEQ ID NO: 47674 - protein, 166 aa, Nitratireductor aquibiodomus
  misc_feature (1)..(166): tr|I5BY82|I5BY82_9RHIZ NADPH-dependent 7-cyano-7-deazag uanine reductase OS=Nitratireductor aquibiodomus RA22 O X=1189611 GN=queF PE=3 SV=1
MTDKTIYDNLTLLGGRTELPASPEDAVLERVPNPQEDVLYAVRFTAPEFTSLCPLTGQPDFAHLVIDYVPADWLVESKSLKLYLGAFRNHGAFHEDCTVSIGRRLCDLLDPHWLRIGGYWYPRGGMPIDVFYQTGEPPKGVWIPDQACRPIAGEAEMFALLRPFSP

SEQ ID NO: 47675 - protein, 155 aa, Nitratireductor indicus
  misc_feature (1)..(155): tr|K2P2M9|K2P2M9_9RHIZ NADPH-dependent 7-cyano-7-deazag uanine reductase OS=Nitratireductor indicus C115 OX=123 1190 GN=queF PE=3 SV=1
MSDENIYANLTQLGRRTELPTSPEQAVLERVPNPQKDARYAVRFTAPEFTSLCPLTGQPDFAHLVIDYVPAGWLVESKSLKLYLGSFRNHGAFHEDCTVSIGRRLADLLEPEWLRIGGYWYPRGGMPIDVFYQTGEPPRDVWLPDQGVATYRGRG

SEQ ID NO: 47676 - protein, 155 aa, Nitratireductor pacificus
  misc_feature (1)..(155): tr|K2LQD8|K2LQD8_9RHIZ NADPH-dependent 7-cyano-7-deazag uanine reductase OS=Nitratireductor pacificus pht-3B OX =391937 GN=queF PE=3 SV=1
MTRDALYDTLTLLGGKTELPQSPEEAVLERVANPQADARYAVRFTAPEFTSLCPLTGQPDFAHLVIDYVPGGWLVESKSLKLYLGAFRNHGAFHEDCTVGIGRRLATLLEPEWLRIGGYWYPRGGMPIDVFYQTGEAPRDVWLPDQGVPPYRGRG

SEQ ID NO: 47677 - protein, 155 aa, Nitratireductor sp.
  misc_feature (1)..(155): tr|A0A1H4LE49|A0A1H4LE49_9RHIZ NADPH-dependent 7-cyano- 7-deazaguanine reductase OS=Nitratireductor sp. ES.061 OX=1855335 GN=queF PE=3 SV=1
MTDKTIYDDLTLLGGRTELPASPEEAVLERVPNPQEDVRYAVRFTAPEFTSLCPLTGQPDFAHLVIDYVPAGWLVESKSLKLYLGAFRNHGAFHEDCTVSIGRRLCDLLDPHWLRIGGYWYPRGGMPIDVFYQTGEPPKGVWIPDQGVPPYRGRG

SEQ ID NO: 47678 - protein, 131 aa, Nitratiruptor sp.
  misc_feature (1)..(131): sp|A6Q0W4|QUEF_NITSB NADPH-dependent 7-cyano-7-deazagua nine reductase OS=Nitratiruptor sp. (strain SB155-2) OX =387092 GN=queF PE=3 SV=1
MRYGEKEIQEFDPKKDLEIWPNKHNKPYKIKITLPEFSCLCPRSGYPDYATMHLEYIPDQYVVELKALKLYINSFRNRYISHEDSTNEIFDTLYSKLKPKYMRLVADFNPRGNVHTLIEIDSEEIEKVSNG

SEQ ID NO: 47679 - protein, 129 aa, Nitratiruptor tergarcus
  misc_feature (1)..(129): tr|A0A1W1WR54|A0A1W1WR54_9PROT NADPH-dependent 7-cyano- 7-deazaguanine reductase OS=Nitratiruptor tergarcus DSM 16512 OX=1069081 GN=queF PE=3 SV=1
MRYGEKEIKEFDPKKDLEIWENKHEKSYKIRITLPEFSCLCPRSGYPDYATIYLDYIPNKYVVELKALKLYINSFRDRYISHEDSANEIFDTLYEKLQPRYMKLVADFNPRGNVHTIIEIDSDQLEKEK

SEQ ID NO: 47680 - protein, 275 aa, Nitrincola lacisaponensis
  misc_feature (1)..(275): tr|A0A063Y0A7|A0A063Y0A7_9GAMM NADPH-dependent 7-cyano- 7-deazaguanine reductase OS=Nitrincola lacisaponensis O X=267850 GN=queF PE=3 SV=1
MTENDVVIHSPLGQETVYANQYDPSLLYPIARHLNWDARGVQRDSLPFKGVDLWNAYEISWLNTDGKPLVRIGEFRIPANSSHIIESKSFKLYLNSFNLTRFATETEVVSRMQQDLSQAAGGAVSVRLMKVNDAAPIERLQGECLDELPLKVSHYTPAPELLQTSGHRIVEESLVSHLLKSNCPVTGQPDWASIQIRYKGTAIDHTGLLAYLISYREKGDFHEQCVENIFMDIWQRCKPQKLTVYARYLRRGGLDINPYRSSLAGEPNNPRLSRQ

SEQ ID NO: 47681 - protein, 274 aa, Nitrincola nitratireducens
  misc_feature (1)..(274): tr|W9V846|W9V846_9GAMM NADPH-dependent 7-cyano-7-deazag uanine reductase OS=Nitrincola nitratireducens OX=12295 21 GN=queF PE=3 SV=1
MSDHEIIKQSPLGQGTAYVNTYDPSLLYPISRQISWDEKGVNRASLPFRGVDIWNAFEVSWLNPKGKPIVRIAEFRIPSHSPNIIESKSFKLYLNSFNLTCFASESDVVALMRRDLSAAAGATVQVQLSKLDAAPPFERFQGECLDELDVEVTHYQPNPQLLRAGSRIVDESLYSHLLKSNCPVTGQPDWASIQIRYKGPALDRAGLLAYLISYREKGDFHEQCVETIFMDIWQQCKPQKLTVYARYVRRGGLDINPYRSSLDSLPRNCRLSRQ

SEQ ID NO: 47682 - protein, 274 aa, Nitrincola sp.
  misc_feature (1)..(274): tr|A0A5A9W889|A0A5A9W889_9GAMM NADPH-dependent 7-cyano- 7-deazaguanine reductase OS=Nitrincola sp. MEB193 OX=17 08751 GN=queF PE=3 SV=1
MNEHEVIQRSPLGQETDYVNQYDPSLLYPIAREINWQARGIQRGSLPFKGVDIWNAYEVSWLNPKGKPVVRLAEFRIAADSTHIIESKSFKLYLNSFNLSCFANEAEVLKRLESDLAQAAGGRVQVFLRKLDAPLQLERLQGECLDELDIEVKHYQPEPKLLRTTDRVVEETLVSHLLKSNCPVTGQPDWASVQIHYKGPSIDRAGLLAYLISYREHGDFHEQCVETIFMDIWNQCRPQKLTVYARYVRRGGLDINPYRSSLAAEPANPRLARQ

SEQ ID NO: 47683 - protein, 274 aa, Nitrincola sp.
  misc_feature (1)..(274): tr|A0A5J6LC84|A0A5J6LC84_9GAMM NADPH-dependent 7-cyano- 7-deazaguanine reductase QueF OS=Nitrincola sp. KXZD110 3 OX=2614693 GN=queF PE=4 SV=1
MTENDVVTHSPLGQETGYTNQYEPSLLYPIARDLNWQARGIERDSLPFKGVDLWNAYEISWLDQNGKPLVRIGEFRIPANSSHIIESKSFKLYLNSFNLTRFQSESEVLARMQQDLSTAAGGKVQVRLIKVNDTAPIERLQGECLDELPLMVTQYSPAPEYLKTTARVVEECLVSHLLKSNCPVTGQPDWASIQIRYKGPAIDHAGLLAYLISYREKGDFHEQCVENIFMDIWQGCKPQKLTVYARYLRRGGLDINPYRSSLAGEPGNPRLSRQ

SEQ ID NO: 47684 - protein, 274 aa, Nitrincola tibetensis
  misc_feature (1)..(274): tr|A0A364NL80|A0A364NL80_9GAMM NADPH-dependent 7-cyano- 7-deazaguanine reductase OS=Nitrincola tibetensis OX=22 19697 GN=queF PE=3 SV=1
MSDHEIIKQSPLGQGTAYVNTYDPSLLYPISRQISWDEKGVNRASLPFRGVDIWNAFEVSWLNYKGKPLVRIAEFRIPSHSPNIIESKSFKLYLNSFNLTCFASESDVLALMRKDLSAAAGAPVQVQFSKLDAALPFERFQGECLDDIDIEVTDYQPNPQLLSVGSRIVEESLYSHLLKSNCPVTGQPDWASIQIRYKGPALDRTGLLAYLISYREKGDFHEQCVETIFMDIWHQCKPQKLTVYARYVRRGGLDINPYRSSLDSLPRNCRLSRQ

SEQ ID NO: 47685 - protein, 158 aa, Nitrobacter hamburgensis
  misc_feature (1)..(158): sp|Q1QMJ0|QUEF_NITHX NADPH-dependent 7-cyano-7-deazagua nine reductase OS=Nitrobacter hamburgensis (strain DSM 10229 / NCIMB 13809 / X14) OX=323097 GN=queF PE=3 SV=1
MPRKLPSSPKTSALQLGRAVAWPGSPEEAKLDRVPNPQKGTNYVARFTAPEFTTLCPVTGQPDFAHLVIDYVPGSWLLESKSLKLYLASFRNHGAFHEDCTVAIGKRIATAVRPKWLRIGGYWYPRGGIPIDVFWQTGTVPKGVWIPDQSVPAYRGRG

SEQ ID NO: 47686 - protein, 158 aa, Nitrobacter sp.
  misc_feature (1)..(158): tr|A0A1M3CAF5|A0A1M3CAF5_9BRAD NADPH-dependent 7-cyano- 7-deazaguanine reductase OS=Nitrobacter sp. 62-23 OX=18 95798 GN=queF PE=3 SV=1
MPRKPPSPPNSSALQLGRAVTWPDSPEAAKLDRVPNPQRDTNYVARFTAPEFTALCPVTGQPDFAHLVIDYVPGSWLLESKSLKLYLASFRNHGAFHEDCTVAIGKRIAAAVGPKWLRIGGYWYPRGGIPIDVFWQTGKAPKGLWIPDQDVAPYRGRG

SEQ ID NO: 47687 - protein, 145 aa, Nitrobacter sp.
  misc_feature (1)..(145): tr|A3WZI3|A3WZI3_9BRAD NADPH-dependent 7-cyano-7-deazag uanine reductase OS=Nitrobacter sp. Nb-311A OX=314253 G N=queF PE=3 SV=1
MQLGRAVAWPDSPEKAKLDRVPNPQKDTSYVARFTAPEFTALCPVTGQPDFAHLVIDYVPASWLLESKSLKLYLASFRNHGAFHEDCTVAIGKRIVGAIKPKWLRIGGYWFPRGGIPIDVFWQTGTAPRGVWIPDQDVASYRGRG

SEQ ID NO: 47688 - protein, 158 aa, Nitrobacter vulgaris
  misc_feature (1)..(158): tr|A0A1V4HY93|A0A1V4HY93_NITVU NADPH-dependent 7-cyano- 7-deazaguanine reductase OS=Nitrobacter vulgaris OX=294 21 GN=queF PE=3 SV=1
MPGKLLSSPKSSPLQLGRAVAWPDSPEKAKLDRVPNPQRGTNYVARFTVPEFTALCPVTGQPDFAHLVIDYVPGSWLLESKSLKLYLASFRNHGAFHEDCTVAIGKRIVSAVRPKWLRIGGYWFPRGGIPIDVFWQTGTAPKGVWIPDQAVPSYRGRG

SEQ ID NO: 47689 - protein, 145 aa, Nitrobacter winogradskyi
  misc_feature (1)..(145): tr|A0A4Y3W9U2|A0A4Y3W9U2_NITWI NADPH-dependent 7-cyano- 7-deazaguanine reductase OS=Nitrobacter winogradskyi OX =913 GN=queF PE=3 SV=1
MQLGRAVAWPDSPERAKLDRVPNPQKGTDYVARFTAPEFTALCPVTGQPDFAHLVIDYVPGSWLLESKSLKLYLASFRNHGAFHEDCTVAIGKRIVGAVKPKWLRIGGYWFPRGGIPIDVFWQTGAAPKGVWIPDQDVPSYRGRG

SEQ ID NO: 47690 - protein, 158 aa, Nitrobacter winogradskyi
  misc_feature (1)..(158): sp|Q3SRK3|QUEF_NITWN NADPH-dependent 7-cyano-7-deazagua nine reductase OS=Nitrobacter winogradskyi (strain ATCC 25391 / DSM 10237 / CIP 104748 / NCIMB 11846 / Nb-255) OX=323098 GN=queF PE=3 SV=1
MPRKPPSSPKSSPLQLGRAVAWPDSPEQAKLDRVPNPQKGTNYVARFTAPEFTALCPVTGQPDFAHLVIDYVPGSWLLESKSLKLYLASFRNHGAFHEDCTVAIGKRIVAAIKPKWLRIGGYWFPRGGIPIDVFWQTGAAPRGVWIPDQDVPSYRGRG

SEQ ID NO: 47691 - protein, 129 aa, Nitrococcus mobilis
  misc_feature (1)..(129): tr|A4BM27|A4BM27_9GAMM NADPH-dependent 7-cyano-7-deazag uanine reductase OS=Nitrococcus mobilis Nb-231 OX=31427 8 GN=queF PE=3 SV=1
MATKPNRELTTFPNPQPERDYTLHIRIPEFTCLCPKTGQPDFATLHIDYVPDQHCVELKSLKQYIWSYRDEGAFHEAVTNHILSDLVNALAPRFARLTAEFNVRGGIYTTVVAEHRQAGWQPAPPVHLP

SEQ ID NO: 47692 - protein, 119 aa, Nitrolancea hollandica
  misc_feature (1)..(119): tr|I4EHQ5|I4EHQ5_9CHLR NADPH-dependent 7-cyano-7-deazag uanine reductase OS=Nitrolancea hollandica Lb OX=112989 7 GN=queF PE=3 SV=1
MPTQPSKRLETFPNPKPERDYEIQISTPEFTCVCPMSGQPDFAEITIRYVPDQRCVELKSLKLYLWSYRNEGAFHEKVTNTILDDLVEAIAPRRATVVGDFNVRGGLHTVVTASYERPE

SEQ ID NO: 47693 - protein, 129 aa, Nitrosococcus halophilus
  misc_feature (1)..(129): tr|D5C140|D5C140_NITHN NADPH-dependent 7-cyano-7-deazag uanine reductase OS=Nitrosococcus halophilus (strain Nc 4) OX=472759 GN=queF PE=3 SV=1
MPSQPSRELETFPNPFPERDYTIRIKIPEFTCLCPKTGQPDFATLHLEYVPDRTCVELKSLKLYIWSYRDQGAFHEAVTNQILDDLVAACTPRFMRLRAEFNVRGGIYTTVVAEYRQPEWDAPEVVRLP

SEQ ID NO: 47694 - protein, 129 aa, Nitrosococcus oceani
  misc_feature (1)..(129): tr|A0A0E2ZM06|A0A0E2ZM06_9GAMM NADPH-dependent 7-cyano- 7-deazaguanine reductase OS=Nitrosococcus oceani C-27 O X=314279 GN=queF PE=3 SV=1
MPSQPNRELETFANPLPERDYTIRIRIPEFTCLCPKTGQPDFATLQLEYVPDQACVELKSLKLYIWSYRDQGAFHEAVTNQILDDLTAVCKPRFMRLTAEFNVRGGIYTTVAAEYRQPGWDAPKIVRLP

SEQ ID NO: 47695 - protein, 129 aa, Nitrosococcus oceani; identical to SEQ ID NO: 47694
  misc_feature (1)..(129): sp|Q3JAH8|QUEF_NITOC NADPH-dependent 7-cyano-7-deazagua nine reductase OS=Nitrosococcus oceani (strain ATCC 197 07 / BCRC 17464 / NCIMB 11848 / C-107) OX=323261 GN=que F PE=3 SV=1

SEQ ID NO: 47696 - protein, 129 aa, Nitrosococcus wardiae
  misc_feature (1)..(129): tr|A0A4P7C014|A0A4P7C014_9GAMM NADPH-dependent 7-cyano- 7-deazaguanine reductase OS=Nitrosococcus wardiae OX=18 14290 GN=queF PE=3 SV=1
MPSQPSRELETFPNPFPERDYTIRIKIPEFTCLCPKTGQPDFATLHLEYVPDRACVELKSLKLYVWSYRDQGAFHEAVTNQILDDLVAACTPRFMRLRAEFNVRGGIYTTVVAEYRQPEWNAPQVVRLP

SEQ ID NO: 47697 - protein, 129 aa, Nitrosococcus watsoni
  misc_feature (1)..(129): tr|D8K613|D8K613_NITWC NADPH-dependent 7-cyano-7-deazag uanine reductase OS=Nitrosococcus watsoni (strain C-113 ) OX=105559 GN=queF PE=3 SV=1
MPSQPNRELEIFANPLPERDYTIRIRIPEFTCLCPKTGQPDFATLQLEYVPDQACVELKSLKLYTWSYREQGAFHEAVTNQILDDLSAVCKPRFMRLTAEFNVRGGIYTTVVAEYRQPGWSAPEIVRLP

SEQ ID NO: 47698 - protein, 139 aa, Nitrosomonadaceae bacterium
  misc_feature (1)..(139): tr|A0A2E6USP0|A0A2E6USP0_9PROT NADPH-dependent 7-cyano- 7-deazaguanine reductase OS=Nitrosomonadaceae bacterium OX=2026767 GN=queF PE=3 SV=1
MPKKSIHKLETFPNPSSKRDYHIHMEIPEFTCLCPKTGQPDFATLILDYIPDKKCIELKSLKLYIWSYRDKNAFHEAVTNHILNDLVTAIRPKYMRLIAKFYVRGGIFTNILVEHRKAKWKQKPIVHLEEFEKQSNTRP

SEQ ID NO: 47699 - protein, 139 aa, Nitrosomonadaceae bacterium
  misc_feature (1)..(139): tr|A0A4P5UFX8|A0A4P5UFX8_9PROT NADPH-dependent 7-cyano- 7-deazaguanine reductase OS=Nitrosomonadaceae bacterium OX=2026767 GN=queF PE=3 SV=1
MSDCLTKTLETFLNPAPTRDYHIHMEIPEFTCLCPKTGQPDFATIILDYIPDKICIELKSLKLYIWSYRNENTFHEAATNRILNDLIAALKPRYVRITAKFYVRGGIFTNIVAEYREPKWNPLPTIELTRFESESNTCK

SEQ ID NO: 47700 - protein, 139 aa, Nitrosomonadales bacterium
  misc_feature (1)..(139): tr|A0A524MEQ9|A0A524MEQ9_9PROT NADPH-dependent 7-cyano- 7-deazaguanine reductase OS=Nitrosomonadales bacterium OX=2026761 GN=queF PE=3 SV=1
MPIQPTKKLETFLNPTPSRDYHIHMEIPEFTCLCPKTGQPDFATLILDYIPDKRCIELKSLKLYIWSYRNENTFHEAVTNRILDDMVVAIKPKYMHLTAKFYVRGGIFTNIVAEHRKSGWKPKPAVNLKEFEKQSNICK

SEQ ID NO: 47701 - protein, 139 aa, Nitrosomonadales bacterium
  misc_feature (1)..(139): tr|A0A1E4GB51|A0A1E4GB51_9PROT NADPH-dependent 7-cyano- 7-deazaguanine reductase OS=Nitrosomonadales bacterium SCN 54-20 OX=1660164 GN=queF PE=3 SV=1
MPSNPGKNLETFPNPAQERDYHIHMEIPEFTCLCPKTGQPDFATLILDYIPDKKCVELKSLKLYIWSFRDENAFHEAVTNRIADDLVTAMEPRYLRLTAKFYVRGGIFTTVVADHRQSGWAPLPSVDLLHFDSQPSTRG

SEQ ID NO: 47702 - protein, 140 aa, Nitrosomonas aestuarii
  misc_feature (1)..(140): tr|A0A1I3YPU7|A0A1I3YPU7_9PROT NADPH-dependent 7-cyano- 7-deazaguanine reductase OS=Nitrosomonas aestuarii OX=5 2441 GN=queF PE=3 SV=1
MSTKPSKHLETFPNPFVKRDYQIHMEIPEFTCVCPKTGQPDFASLILDYIPDKKCVELKSLKLYIWSYRDEAAFHEAVTNQVLEDLVVVLKPRYIRLTARFFVRGGIFTNVIVDHRKSGWKPQSCISLHSFAEQSNIKRY

SEQ ID NO: 47703 - protein, 139 aa, Nitrosomonas communis
  misc_feature (1)..(139): tr|A0A1I4R5X6|A0A1I4R5X6_9PROT NADPH-dependent 7-cyano- 7-deazaguanine reductase OS=Nitrosomonas communis OX=44 574 GN=queF PE=3 SV=1
MASKPSKKLETFDNPFTARDYRIHMEIPEFTCLCPKTGQPDFARLILDYIPDKKCVELKSLKLYIWSYRDEGAFHEAVTNQILDDLVAALRPRYMRLIAKFFVRGGIFTNVIAEHRKKDWKPEPAVFLEAFEEQSNTRG

SEQ ID NO: 47704 - protein, 140 aa, Nitrosomonas communis
  misc_feature (1)..(140): tr|A0A0F7KCD9|A0A0F7KCD9_9PROT NADPH-dependent 7-cyano- 7-deazaguanine reductase OS=Nitrosomonas communis OX=44 574 GN=queF PE=3 SV=1
MASKPSKKLETFDNPFIARDYRIHMEIPEFTCLCPKTGQPDFARLILDYIPDKKCVELKSLKLYIWSYRDEGAFHEAVTNQILDDLVAVLKPRYMRLIAKFFVRGGIFTNVIAEHRKKGWKPEPAVFLEAFEEQSNTRGD

SEQ ID NO: 47705 - protein, 139 aa, Nitrosomonas cryotolerans
  misc_feature (1)..(139): tr|A0A1N6IRH6|A0A1N6IRH6_9PROT NADPH-dependent 7-cyano- 7-deazaguanine reductase OS=Nitrosomonas cryotolerans A TCC 49181 OX=1131553 GN=queF PE=3 SV=1
MTSKPEKKLEVFANPTQKRDYRIHIEIPEFTCLCPKTGQPDFATLILDYIPDKKCIELKSLKLYIWSYRNEGAFHEAVTNLILDDLIAALKPRYIRLIARFYVRGGLFTNIVAEHRKTGWKPLPAVLLEEFDEQSNTRK

SEQ ID NO: 47706 - protein, 139 aa, Nitrosomonas europaea
  misc_feature (1)..(139): tr|A0A1I0A3V3|A0A1I0A3V3_NITER NADPH-dependent 7-cyano- 7-deazaguanine reductase OS=Nitrosomonas europaea OX=91 5 GN=queF PE=3 SV=1
MTTQPSKQLETFENPVQTRDYRIHMEIPEFTCLCPKTGQPDFARLTLDYIPDKKCIELKSLKLYIWSYRDEGAFHEAVTNRILDDLVAAMKPRFIRLTSKFYVRGGIFTNVVAEHRKKGWQPQPPVLLEVFEQQFNTHG

SEQ ID NO: 47707 - protein, 139 aa, Nitrosomonas europaea; identical to SEQ ID NO: 47706
  misc_feature (1)..(139): sp|Q82SM6|QUEF_NITEU NADPH-dependent 7-cyano-7-deazagua nine reductase OS=Nitrosomonas europaea (strain ATCC 19 718 / CIP 103999 / KCTC 2705 / NBRC 14298) OX=228410 GN =queF PE=3 SV=1

SEQ ID NO: 47708 - protein, 139 aa, Nitrosomonas eutropha
  misc_feature (1)..(139): tr|A0A1I7HBB2|A0A1I7HBB2_9PROT NADPH-dependent 7-cyano- 7-deazaguanine reductase OS=Nitrosomonas eutropha OX=91 6 GN=queF PE=3 SV=1
MTTQPSKQLETFENPIQTRDYRIHMEIPEFTCLCPKTGQPDFARLALDYIPDKKCIELKSLKLYIWSYRNEGTFHEAVTNQILDDLVAAMKPRFIRLTSKYYVRGGIFTNVVAEHRKKGWHPQPPVFLEALDEQFNTRG

SEQ ID NO: 47709 - protein, 139 aa, Nitrosomonas eutropha
  misc_feature (1)..(139): sp|Q0AE87|QUEF_NITEC NADPH-dependent 7-cyano-7-deazagua nine reductase OS=Nitrosomonas eutropha (strain DSM 101 675 / C91) OX=335283 GN=queF PE=3 SV=1
MTTQPSKQLETFENPIQTRDYRIHMEIPEFTCLCPKTGQPDFARLTLDYIPDKKCIELKSLKLYIWSYRNEGTFHEAVTNQILDDLVIAMKPRFIRLTSKFYVRGGIFTNVVAEHRKKGWHPQPPVFLESFDEQFNTRS

SEQ ID NO: 47710 - protein, 146 aa, Nitrosomonas halophila
  misc_feature (1)..(146): tr|A0A1H3KX12|A0A1H3KX12_9PROT NADPH-dependent 7-cyano- 7-deazaguanine reductase OS=Nitrosomonas halophila OX=4 4576 GN=queF PE=3 SV=1
MEKTEKATFSRPSKSLETFDNPVRARDYRIHMEIPEFTCLCPKTGQPDFARLTLDYIPDKKCIELKSLKLYIWSYRDEGAFHEAVTNQILDDLVVVLKPRFMRLTSKFYVRGGIFTNVVAEHRKKGWQPQLPVFLEAFDQQSNTRG

SEQ ID NO: 47711 - protein, 139 aa, Nitrosomonas marina
  misc_feature (1)..(139): tr|A0A1H9ZTZ4|A0A1H9ZTZ4_9PROT NADPH-dependent 7-cyano- 7-deazaguanine reductase OS=Nitrosomonas marina OX=917 GN=queF PE=3 SV=1
MSTKPSKQLETFPNPFVKRDYQIHMEIPEFTCVCPKTGQPDFATLTLDYIPDKKCIELKSLKLYIWSYRDEAAFHEAVTNRILEDLVGVLKPRYIRLAARFFVRGGIFTNVIADHQKSGWTPQPLITLHHCDEQSSTRK

SEQ ID NO: 47712 - protein, 139 aa, Nitrosomonas marina
  misc_feature (1)..(139): tr|A0A1H8DM27|A0A1H8DM27_9PROT NADPH-dependent 7-cyano- 7-deazaguanine reductase OS=Nitrosomonas marina OX=917 GN=queF PE=3 SV=1
MSTKPSKQLETFPNPFVKRDYQIHMEIPEFTCVCPKTGQPDFATLILDYIPDKKCIELKSLKLYIWSYRDEAAFHEAVTNQILEDLVGVLKPRYIRLTARFFVRGGIFTNVIVDHRKSGWTPQPIISLHHCDEQSNTRK

SEQ ID NO: 47713 - protein, 157 aa, Nitrosomonas mobilis
  misc_feature (1)..(157): tr|A0A1G5SFW1|A0A1G5SFW1_9PROT NADPH-dependent 7-cyano- 7-deazaguanine reductase OS=Nitrosomonas mobilis OX=516 42 GN=queF PE=3 SV=1
MRILNEKCAIRPESPEVTMSTQPDKHLETFDNPVKTRDYRIHMEIPEFTCLCPKTGQPDFARLTLDYIPDKKCIELKSLKLYIWSYREQGAFHEAVTNQILDDLVTTMKPRFIRLTANFYVRGGIFTNVVAEHRKKGWQPLPPIFLEGFDPQMNFRG

SEQ ID NO: 47714 - protein, 140 aa, Nitrosomonas nitrosa
  misc_feature (1)..(140): tr|A0A3D0FB38|A0A3D0FB38_9PROT NADPH-dependent 7-cyano- 7-deazaguanine reductase OS=Nitrosomonas nitrosa OX=524 42 GN=queF PE=3 SV=1
MPSKPSKKLETFDNPFPARDYRIHMEIPEFTCLCPKTGQPDFARLILDFIPDKKCVELKSLKLYIWSFRNEGVFHEAVTNQILDDLVAVMKPRYMRLTAKFYVRGGIFTNVIVEHRKKGWLPVPPVFLDAIDEQSNITGN

SEQ ID NO: 47715 - protein, 140 aa, Nitrosomonas nitrosa
  misc_feature (1)..(140): tr|A0A1I4M4U9|A0A1I4M4U9_9PROT NADPH-dependent 7-cyano- 7-deazaguanine reductase OS=Nitrosomonas nitrosa OX=524 42 GN=queF PE=3 SV=1
MPSKPSKKLETFDNPFPARDYRIHMEIPEFTCLCPKTGQPDFARLILDFIPDKKCVELKSLKLYIWSFRNEGVFHEAVTNQILDDLVAVMKPRYMRLTAKFYVRGGIFTNVIVEHRKKGWLPDPPVFLDAIDEQSNITGN

SEQ ID NO: 47716 - protein, 139 aa, Nitrosomonas oligotropha
  misc_feature (1)..(139): tr|A0A1H8K9X9|A0A1H8K9X9_9PROT NADPH-dependent 7-cyano- 7-deazaguanine reductase OS=Nitrosomonas oligotropha OX =42354 GN=queF PE=3 SV=1
MASKPEKTLETFPNPFTSRDYHIHMEIPEFTCLCPKTGQPDFATLILDYIPDKKCVELKSLKLYIWSYRNEGVFHEAVTNKILDDLVAVLKPRYIRLTARFYVRGGIFTNVIVDHRKKGWQPKPVVLLQEFNSQSNIRE

SEQ ID NO: 47717 - protein, 139 aa, Nitrosomonas oligotropha
  misc_feature (1)..(139): tr|A0A2T5HZX1|A0A2T5HZX1_9PROT NADPH-dependent 7-cyano- 7-deazaguanine reductase OS=Nitrosomonas oligotropha OX =42354 GN=queF PE=3 SV=1
MASKPEKTLETFPNPFTSRDYHIHMEIPEFTCLCPKTGQPDFATLILDYIPDKKCVELKSLKLYIWSYRNEGVFHEAVTNKILDDLVAVLKPRYIRLTARFYVRGGIFTNVIVDHRKKGWQPKPAVLLQEFNSQSNIRE

SEQ ID NO: 47718 - protein, 139 aa, Nitrosomonas sp.
  misc_feature (1)..(139): tr|A0A1H3PSX1|A0A1H3PSX1_9PROT NADPH-dependent 7-cyano- 7-deazaguanine reductase OS=Nitrosomonas sp. Nm58 OX=20 0126 GN=queF PE=3 SV=1
MASKPSKKLETFDNPFPVRDYRIHMEIPEFTCLCPKTGQPDFARLILDYIPDKKCVELKSLKLYIWSYRNEGVFHEAVTNQILDDLVTALKPRYMRLTAKFYVRGGIFTNVIVEHRKKDWKPAPALFFEPFDEQSNTRG

SEQ ID NO: 47719 - protein, 139 aa, Nitrosomonas sp.
  misc_feature (1)..(139): tr|F8GJ97|F8GJ97_NITSI NADPH-dependent 7-cyano-7-deazag uanine reductase OS=Nitrosomonas sp. (strain Is79A3) OX =261292 GN=queF PE=3 SV=1
MASKLEKTLETFPNPFMGRDYHIHMEIPEFTCLCPKTGQPDFATLILDYIPDKKCVELKSLKLYIWSYRNEGVFHEAVTNKILDDLVAALKPRYIRLIARFYVRGGIFTNVTVDYRKKGWQPKSTILLQEFNSQSNIRE

SEQ ID NO: 47720 - protein, 138 aa, Nitrosomonas stercoris
  misc_feature (1)..(138): tr|A0A4Y1YLN5|A0A4Y1YLN5_9PROT NADPH-dependent 7-cyano- 7-deazaguanine reductase OS=Nitrosomonas stercoris OX=1 444684 GN=queF PE=3 SV=1
MTTQPSKQLEIFENPVQTRDYRIHMEIPEFTCLCPKTGQPDFARLTLDYIPDKKCVELKSLKLYIWSYRDEGTFHEAVTNQILDDLVAAMKPRFIRLTSKFYVRGGIFTNVVVEHRKKGWRPKTQVFLEAFDEQFNTR

SEQ ID NO: 47721 - protein, 139 aa, Nitrosomonas ureae
  misc_feature (1)..(139): tr|A0A1H9BTT2|A0A1H9BTT2_9PROT NADPH-dependent 7-cyano- 7-deazaguanine reductase OS=Nitrosomonas ureae OX=44577 GN=queF PE=3 SV=1
MASKPEKNLETFPNPFINRDYHIHMEIPEFTCLCPKTGQPDFATLILDYVPDKKCIELKSLKLYIWSYRNDGVFHEAVTNLILDDLIAVLKPRYIRLIARFYVRGGIFTNIIVDHRKKGWRSKSMIPIGELSGKLNFRE

SEQ ID NO: 47722 - protein, 139 aa, Nitrosomonas ureae
  misc_feature (1)..(139): tr|A0A0S3AJ94|A0A0S3AJ94_9PROT NADPH-dependent 7-cyano- 7-deazaguanine reductase OS=Nitrosomonas ureae OX=44577 GN=queF PE=3 SV=1
MASKPEKNLETFPNPFINRDYHIHMEIPEFTCLCPKTGQPDFATLILDYVPDKKCIELKSLKLYIWSYRNDGVFHEAVTNLILDDLIAVLKPRYIRLIARFYVRGGIFTNIIVDHRKKGWMSKSMIPIGELSGQLNFRE

SEQ ID NO: 47723 - protein, 139 aa, Nitrosospira briensis
  misc_feature (1)..(139): tr|A0A1I5A6G3|A0A1I5A6G3_9PROT NADPH-dependent 7-cyano- 7-deazaguanine reductase OS=Nitrosospira briensis OX=35 799 GN=queF PE=3 SV=1
MPSSPTKNLEIFDNPAPARDYQIHMEIPEFTCLCPKTGQPDFATLILDYIADEKCIELKSLKLYIWSYRNEATFHEAVTNRIVDDLVAVLEPRYLRLTAKFYVRGGIFTNVVVEHRKSGWQPLPPVDLAKFGSQPPIRE

SEQ ID NO: 47724 - protein, 139 aa, Nitrosospira lacus
  misc_feature (1)..(139): tr|A0A1W6SN51|A0A1W6SN51_9PROT NADPH-dependent 7-cyano- 7-deazaguanine reductase OS=Nitrosospira lacus OX=12884 94 GN=queF PE=3 SV=1
MPSRPTKELEIFPNPTPARDYHIHMEVPEFTCLCPKTGQPDFATLILDYIPDKKCIELKSLKLYIWSYRNEGAFHEAVTNRIVDDLTAVLKPRYLRLAAKFFVRGGIFTTIVAEHRKSGWKPLPAVDLGKFEGQSTTRG

SEQ ID NO: 47725 - protein, 139 aa, Nitrosospira multiformis
  misc_feature (1)..(139): tr|A0A2T5IDF6|A0A2T5IDF6_9PROT NADPH-dependent 7-cyano- 7-deazaguanine reductase OS=Nitrosospira multiformis OX =1231 GN=queF PE=3 SV=1
MPSNPGKNLETFPNPAQERDYHIHMEIPEFTCLCPKTGQPDFATLILDYIPDKKCVELKSLKLYIWSFRDENAFHEAVTNRIVDDLVTALEPRYLRLAAKFYVRGGIFTTVVADHRQSGWAPLPSVDLLRFDSQSSTRG

SEQ ID NO: 47726 - protein, 139 aa, Nitrosospira multiformis
  misc_feature (1)..(139): sp|Q2YBC0|QUEF_NITMU NADPH-dependent 7-cyano-7-deazagua nine reductase OS=Nitrosospira multiformis (strain ATCC 25196 / NCIMB 11849 / C 71) OX=323848 GN=queF PE=3 SV= 1
MPSRPDKNLETFPNPTQERDYHIHMEIPEFTCLCPKTGQPDFATLILDYIPDKKCVELKSLKLYIWSFRDENAFHEAVTNRIVDDLATALQPRYLRLTAKFYVRGGIFTTVVAEHRHSGWTPLPSVDLFHFDSQPSTRG

SEQ ID NO: 47727 - protein, 139 aa, Nitrosospira sp.
  misc_feature (1)..(139): tr|A0A495EG83|A0A495EG83_9PROT NADPH-dependent 7-cyano- 7-deazaguanine reductase OS=Nitrosospira sp. Nsp44 OX=1 945879 GN=queF PE=3 SV=1
MPSSPTKTLEIFPNPTPKRDYQIHMEIPEFTCLCPKTGQPDFATLILDYIPDKKCVELKSLKLYIWSYRNEGAFHEAVTNRIVDDLVTVLKPRYLRLAAKFNVRGGIFTNIVVDHRKTGWEPLPGVDLAKFENASPTRG

SEQ ID NO: 47728 - protein, 139 aa, Nitrosospira sp.
  misc_feature (1)..(139): tr|A0A0C3RRA3|A0A0C3RRA3_9PROT NADPH-dependent 7-cyano- 7-deazaguanine reductase OS=Nitrosospira sp. NpAV OX=58 133 GN=queF PE=3 SV=1
MPSRPTKELEIFPNPTPARDYHIHMEIPEFTCLCPKTGQPDFATLILDYIPDKKCIELKSLKLYIWSYRNEGAFHEAVTNRIVDDLAAVLKPRYLRLTAKFFVRGGIFTNIIVEHRKSGWKPLPLVELGKFEDQSTTRG

SEQ ID NO: 47729 - protein, 139 aa, Nitrosovibrio sp.
  misc_feature (1)..(139): tr|A0A497X7L1|A0A497X7L1_9PROT NADPH-dependent 7-cyano- 7-deazaguanine reductase OS=Nitrosovibrio sp. Nv12 OX=2 135773 GN=queF PE=3 SV=1
MPSSPTKDLEIFANPATGRDYHIHMEIPEFTCLCPKTGQPDFATLILDYIPDRKCVELKSLKLYIWSYRNEETFHEAVTNRIVDDLVAVLKPRYLRLTAKFYVRGGIFTNVVVEHRKPGWNPPPAVDLVRFESQSATRG

SEQ ID NO: 47730 - protein, 139 aa, Nitrosovibrio sp.
  misc_feature (1)..(139): tr|A0A1K1M495|A0A1K1M495_9PROT NADPH-dependent 7-cyano- 7-deazaguanine reductase OS=Nitrosovibrio sp. Nv17 OX=1 855339 GN=queF PE=3 SV=1
MPSQPSKALEVFPNPTPARDYHIHMEIPEFTCLCPKTGQPDFATLILDYVPDRRCVELKSLKLYIWSYRDEDAFHEAVTNRIVDDLSAVLKPRYLRLTARFFVRGGIYTTVVAEHRKRGWKPPPRVELGHFESPSPTRG

SEQ ID NO: 47731 - protein, 139 aa, Nitrosovibrio tenuis
  misc_feature (1)..(139): tr|A0A1H7GRD7|A0A1H7GRD7_9PROT NADPH-dependent 7-cyano- 7-deazaguanine reductase OS=Nitrosovibrio tenuis OX=123 3 GN=queF PE=3 SV=1
MPSTPAKELEIFHNPTPSRDYLIHMEIPEFTCLCPKTGQPDFATLILDYIPDKRCVELKSLKLYIWSYRNEGAFHEAVTNRIVDDLAAALKPRYLRLTAKFYVRGGIFTTVVAEHRKSGWKPLLAVELGAFENQSPTRC

SEQ ID NO: 47732 - protein, 133 aa, Nitrospina gracilis
  misc_feature (1)..(133): tr|M1YG17|M1YG17_NITG3 NADPH-dependent 7-cyano-7-deazag uanine reductase OS=Nitrospina gracilis (strain 3/211) OX=1266370 GN=queF PE=3 SV=1
MSKKQSSKELEVFTNPNPDRDYEINMECPEFTCLCPKTGQPDFATIDITYIPDKLCIELKSLKLYLWSYRDEGAFHEKVINEILDDLVKACRPRYMQVVGEFNVRGGIYTTVSAEHYGKSGTKRKSKTKRPSS

SEQ ID NO: 47733 - protein, 128 aa, Nitrospina sp.
  misc_feature (1)..(128): tr|A0A3D2V0Y0|A0A3D2V0Y0_9BACT NADPH-dependent 7-cyano- 7-deazaguanine reductase OS=Nitrospina sp. OX=2024844 G N=queF PE=3 SV=1
MKKEVLQIETFPNPFPERDYTIDMECPEFTCLCPKTGQPDFATLYISYIPDKLCVELKSLKLYLVSYRNEGGFHEKLTNIILDDLVSACRPRIMKIVGDFNVRGGIHTTVTVEHQAKIKKSANKRVSK

SEQ ID NO: 47734 - protein, 127 aa, Nitrospina sp.
  misc_feature (1)..(127): tr|A0A523MUG1|A0A523MUG1_9BACT NADPH-dependent 7-cyano- 7-deazaguanine reductase OS=Nitrospina sp. OX=2024844 G N=queF PE=3 SV=1
MKKQSSKVIEVFPNPHPERDYEIHMECPEFTCLCPKTGQPDFAEIDILYTPDRKCLELKSLKLYLWSYRNQGAFHEAVTNKILDDLVAACQPRWMQVMGDFNVRGGIHTTVRVEYSAPAKKPGKARS

SEQ ID NO: 47735 - protein, 131 aa, Nitrospinae bacterium
  misc_feature (1)..(131): tr|A0A1G1DEI8|A0A1G1DEI8_9BACT NADPH-dependent 7-cyano- 7-deazaguanine reductase OS=Nitrospinae bacterium RIFCS PLOWO2_01_FULL_39_10 OX=1801683 GN=queF PE=3 SV=1
MRKYGERAVKNIKLLAWDNPYPDRDYKIEISFPEFTCLCPRSGYPDFATFIINYIPHKHIIELKSLKLYLNSYRSQYISHEAVTNKIYDDLNKILKPHFMEVIGDFNERGNVKTVIKVTSDGSRQSKRIKK

SEQ ID NO: 47736 - protein, 122 aa, Nitrospinae bacterium
  misc_feature (1)..(122): tr|A0A351RU23|A0A351RU23_9BACT NADPH-dependent 7-cyano- 7-deazaguanine reductase OS=Nitrospinae bacterium OX=20 26769 GN=queF PE=3 SV=1
MKYGEKAIKNAKLEAWDNPYPGRDYKIEINFPEFTCLCPRSGYPDFATIVINYIPDKYIIELKSLKMYMNSYRNKYISHEAVTNKIYDDLNKILKPHFMEVIGDFNERGNVKTVIRVTSQPD

SEQ ID NO: 47737 - protein, 128 aa, Nitrospira bacterium
  misc_feature (1)..(128): tr|A0A0S8AQ86|A0A0S8AQ86_9BACT NADPH-dependent 7-cyano- 7-deazaguanine reductase OS=Nitrospira bacterium SG8_35 _4 OX=1704025 GN=queF PE=3 SV=1
MNKNDKSKYGKKAIARAKLEKWENPYPDRDYTIDISFSEFTCLCPRSGYPDFAIIRIDYVPNQYIVELKSLKLYLNSFRDESISHESSTNQIFDDLKKLLKPRHLEVTGDFNPRGNVKTVIRVSTGHS

SEQ ID NO: 47738 - protein, 123 aa, Nitrospira bacterium
  misc_feature (1)..(123): tr|A0A2N1UJL4|A0A2N1UJL4_9BACT NADPH-dependent 7-cyano- 7-deazaguanine reductase OS=Nitrospira bacterium HGW-Ni trospira-1 OX=2013825 GN=queF PE=3 SV=1
MKYGEKAIKNVRLSTWENQYPKRDYEIDISFPEFTCLCPISGYPDYATIRIKYIPDEKIVELKSLKLYLNSYRNLYISHEESTNKIFAELKKKLKPRFLEVVGDFNPRGNVKTVIRVSTDQKK

SEQ ID NO: 47739 - protein, 142 aa, Nitrospira defluvii
  misc_feature (1)..(142): tr|D8PBH8|D8PBH8_9BACT NADPH-dependent 7-cyano-7-deazag uanine reductase OS=Nitrospira defluvii OX=330214 GN=qu eF PE=3 SV=1
MAAKGNKKQKPAGATTRLGYNERHAKSGISTPLPDIETFPNQYKGYEITIVIPEYTAICPKTNLPDFGTITLRYQPDKYCLELKALKMYIHAYRNVGIFYENAVNRILQDIVRACRPTKATVTGEFAARGGLRSVIEANYPA

SEQ ID NO: 47740 - protein, 132 aa, Nitrospira japonica
  misc_feature (1)..(132): tr|A0A1W1I4M5|A0A1W1I4M5_9BACT NADPH-dependent 7-cyano- 7-deazaguanine reductase OS=Nitrospira japonica OX=1325 564 GN=queF PE=3 SV=1
MTRRSKTKLGYNDRHAKSGITAPLPDIETFPNQYKGYEITIEIPEYTAICPKTGLPDFGTITIHYMPDKDCLELKSLKMYIHAYRNLGIFYENSVNRVLQDVVTACRPVWAKVTGTFAARGGLRSVIEARYP

SEQ ID NO: 47741 - protein, 138 aa, Nitrospira lenta
  misc_feature (1)..(138): tr|A0A330L2Y4|A0A330L2Y4_9BACT NADPH-dependent 7-cyano- 7-deazaguanine reductase OS=Nitrospira lenta OX=1436998 GN=queF PE=3 SV=1
MKRESARRTSKTTKLGYNERHAKSGITAPLPSIETFPNQYKGYEITIEIPEYTAICPKTNLPDFGTVTIHYMPNKACLELKSLKMYIHAYRDLGIFYENAVNRILHDVVASCRPVWATVTGGFTARGGLSSKIEAKYP

SEQ ID NO: 47742 - protein, 138 aa, Nitrospira moscoviensis
  misc_feature (1)..(138): tr|A0A0K2G922|A0A0K2G922_NITMO NADPH-dependent 7-cyano- 7-deazaguanine reductase OS=Nitrospira moscoviensis OX= 42253 GN=queF PE=3 SV=1
MKREASGRKQRTTKLGYNERHARSGITAPLPDIETFPNQFKGYEITIEIPEYTAICPKTNLPDFGTVTVHYMPDQECLELKSLKMYIHAYRNLGIFYENAVNRILQDVVKACRPVWARVTGTFAARGGLRSVIEAKYP

SEQ ID NO: 47743 - protein, 138 aa, Nitrospira sp.
  misc_feature (1)..(138): tr|A0A177QH01|A0A177QH01_9BACT NADPH-dependent 7-cyano- 7-deazaguanine reductase OS=Nitrospira sp. SCGC AG-212- E16 OX=1799664 GN=queF PE=3 SV=1
MTRETAGRKSKTTKLGYNERHARSGITAPLPDIETFPNQYKGYEITIEIPEYTAICPKTGLADFGTITLHYMPDKQCLELKSLKLYIHAYRNVGIFYENAVNRILQDIVKACRPVWAKVTGTFAARGGLRSVIEARFP

SEQ ID NO: 47744 - protein, 128 aa, Nitrospira sp.
  misc_feature (1)..(128): tr|A0A354BLQ0|A0A354BLQ0_9BACT NADPH-dependent 7-cyano- 7-deazaguanine reductase OS=Nitrospira sp. OX=70125 GN= queF PE=3 SV=1
MGYNERHAKSGINAPLPEIETFPNQYKGYEITIEIPEYTAICPKTNLPDFGTITLHYMPDKACLELKALKMYIHAYRNLGIFYENSVNRILHDVVKACRPVWATVTGTFTARGGLSSKIEARYPPQKL

SEQ ID NO: 47745 - protein, 123 aa, Nitrospiraceae bacterium
  misc_feature (1)..(123): tr|A0A3D1BMS6|A0A3D1BMS6_9BACT NADPH-dependent 7-cyano- 7-deazaguanine reductase OS=Nitrospiraceae bacterium OX =2026770 GN=queF PE=3 SV=1
MKKHLKYGEEAILKAKLEKWDNPYPDRDYNVEINFPEFSCLCPRSGYPDYATIKINYIPDKFIVELKSLKLYLNKFRDQSLSHEAVTNKIFDDLKKLIKPRRLEVIGDFNPRGNVKTVIRVAS

SEQ ID NO: 47746 - protein, 123 aa, Nitrospiraceae bacterium
  misc_feature (1)..(123): tr|A0A349BN16|A0A349BN16_9BACT NADPH-dependent 7-cyano- 7-deazaguanine reductase OS=Nitrospiraceae bacterium OX =2026770 GN=queF PE=3 SV=1
MRYGEEAIKKAELERWDNPYQDRDYVIDISFPEFSCLCPRSGYPDYATIKISYVPDRYIVELRSLKLYLNKYRDQHISHESATNKIYDDLKNLLEPRRIEVTGDWNPRGNVKTVIKVSSETLK

SEQ ID NO: 47747 - protein, 121 aa, Nitrospirae bacterium
  misc_feature (1)..(121): tr|A0A1G1F0R1|A0A1G1F0R1_9BACT NADPH-dependent 7-cyano- 7-deazaguanine reductase OS=Nitrospirae bacterium GWB2_ 47_37 OX=1801692 GN=queF PE=3 SV=1
MRYGEKAIKKIKLEIWDNSNPERDYEINISFPEFTCLCPRSGYPDFATIKINYVPDKKIVELKSLKLYLNSFRDAHISHEEITNKIFTDLEKVLRPRSLEVIGDFNPRGNVKTIIRAASKR

SEQ ID NO: 47748 - protein, 140 aa, Nitrospirae bacterium
  misc_feature (1)..(140): tr|A0A2G4HYH6|A0A2G4HYH6_9BACT NADPH-dependent 7-cyano- 7-deazaguanine reductase OS=Nitrospirae bacterium OX=20 26887 GN=queF PE=3 SV=1
MNRKIVKRKSTTPKLGYDERHAKSGITAPLPDIETFPNQYKGYEITIEIPEYTAICPKTGLPDFGTITLNYVPGKKCLELKSLKMYLHAYRNLGIFYENAVNRILQDIVKACRPIRTKVTGTFAARGGLRSIIEANHPQR

SEQ ID NO: 47749 - protein, 122 aa, Nitrospirales bacterium
  misc_feature (1)..(122): tr|A0A524GCZ2|A0A524GCZ2_9BACT NADPH-dependent 7-cyano- 7-deazaguanine reductase OS=Nitrospirales bacterium OX= 2358460 GN=queF PE=3 SV=1
MKYGENVIKKAKLELWKNPNQERDYHIDISFPEFTCLCPRSGYPDFAVIKIHYIPDKWIVELKALKLYFNSFRTLAVSHEEVTNTIFADLDKKLKPRFLEVIGDFNPRGNVKTIVRVCSDAD

SEQ ID NO: 47750 - protein, 281 aa, Nocardioides sp.
  misc_feature (1)..(281): tr|A0A542RWA4|A0A542RWA4_9BURK NADPH-dependent 7-cyano- 7-deazaguanine reductase OS=Nocardioides sp. SLBN-35 OX =512030 GN=queF PE=3 SV=1
MNTPEQSQLGKASAYIDLYDASLLFPIPRAGKRAEIGITGAAPFFGADLWTAFELSWLNARGKPQVALAHITVPCETPNIVESKSFKLYLNSFNNTRFADAAEVQARIRADISEAVWRGAEHPATVGVKLIAPELFDQEPVHELDGLSLDRLDVECTQYQPAPELLTAEFNEAPVTETLTSNLLKSNCLVTGQPDWGSVQISYSGPQINQERLLQYLVSFRNHNEFHEQCVERIFMDVWTRCKPIKLTVYARYTRRGGLDINPLRTSHPQGLPRNARTARQ

SEQ ID NO: 47751 - protein, 281 aa, Nocardioides sp.
  misc_feature (1)..(281): tr|H0BVG8|H0BVG8_9BURK NADPH-dependent 7-cyano-7-deazag uanine reductase OS=Nocardioides sp. SLBN-35 OX=512030 GN=queF PE=3 SV=1
MNTPEQSQLGKASAYVDQYDASLLFPIPRAGKRAEIGITGAAPFFGADLWTAFELSWLNLRGKPQVALAHITVPCETPNIVESKSFKLYLNSFNNTRFADAAEVQARMRTDISEAVWRGAGQSATVGVKLIAPELFDQEPVHELDGLSLDRLDVECTQYQPAPELLTAEFNEAPVTETLTSNLLKSNCLVTGQPDWGSVQISYSGPQINQEGLLQYLVSFRNHNEFHEQCVERIFMDVWTRCKPIKLTVYARYTRRGGLDINPLRTSHPQALPRNVRTARQ

SEQ ID NO: 47752 - protein, 128 aa, Nodularia sp.
  misc_feature (1)..(128): tr|A0A218Q8Y3|A0A218Q8Y3_9CYAN NADPH-dependent 7-cyano- 7-deazaguanine reductase OS=Nodularia sp. NIES-3585 OX= 1973477 GN=queF PE=3 SV=1
MSDSSPEMKYGEREITEGKLITFPNPRVGRRYDVSISLPEFTCKCPFSGYPDFATIYITYVPDELVVELKALKLYINSYRDRYISHEESANQILDDFVAACDPLEVTVKADFTPRGNVHTVVEVRHQK

SEQ ID NO: 47753 - protein, 128 aa, Nodularia spumigena
  misc_feature (1)..(128): tr|A0ZHU1|A0ZHU1_NODSP NADPH-dependent 7-cyano-7-deazag uanine reductase OS=Nodularia spumigena CCY9414 OX=3136 24 GN=queF PE=3 SV=1
MSNLSPEMKYGEREITEGKLITFPNPRVGRRYDVSISLPEFTCKCPFSGYPDFATIYITYVPDERVVELKALKLYINSYRDRYISHEESANQILDDFVAACDPLEVTVKADFTPRGNVHTVVEVHHQK

SEQ ID NO: 47754 - protein, 128 aa, Nodularia spumigena; identical to SEQ ID NO: 47753
  misc_feature (1)..(128): tr|A0A166JAP5|A0A166JAP5_NODSP NADPH-dependent 7-cyano- 7-deazaguanine reductase OS=Nodularia spumigena CENA596 OX=1819295 GN=queF PE=3 SV=1

SEQ ID NO: 47755 - protein, 162 aa, Nosocomiicoccus massiliensis
  misc_feature (1)..(162): tr|A0A2J6NI23|A0A2J6NI23_9STAP NADPH-dependent 7-cyano- 7-deazaguanine reductase OS=Nosocomiicoccus massiliensi s OX=1232430 GN=queF PE=3 SV=1
MKDDTMKDLTLLGNQNVQYPTTYDNSVLETFDNSHPEMDYMVKFNCPEFTTLCPMTNQPDFATIYISYIPDIKMVESKSLKLYLFSYRNHGGFHEAAVNTIMRDLIDLMDPKYIEVWGKFTPRGGISIDPYANYGKPGTKFEKMAEKRLFEHDMYPEIIDNR

SEQ ID NO: 47756 - protein, 140 aa, Nostoc azollae
  misc_feature (1)..(140): tr|D7E3R3|D7E3R3_NOSA0 NADPH-dependent 7-cyano-7-deazag uanine reductase OS=Nostoc azollae (strain 0708) OX=551 115 GN=queF PE=3 SV=1
MSNSLPDTVTPVNQEMKYGEREIAEGQLIIFPNPRVGRRYNIDITLPEFTCKCPFSGYPDFATIHISYIPDQRVVELKALKLYINSYRDRYISHEESANEILDDFVAACDPLEMTVKADFTPRGNVHTVVEVKHKKEVIF

SEQ ID NO: 47757 - protein, 139 aa, Nostoc calcicola
  misc_feature (1)..(139): tr|A0A1U7IW31|A0A1U7IW31_9NOSO NADPH-dependent 7-cyano- 7-deazaguanine reductase OS=Nostoc calcicola FACHB-389 OX=1357508 GN=queF PE=3 SV=1
MTNNNLPESVSGLSQEMKYGERDIAEGKLITFPNPRVGRRYDINITLPEFTCKCPFSGYPDFATIYITYVPDERVVELKALKLYINSYRDRYISHEESANQILDDFVAACDPLEVTVKTDFTPRGNVHTVVEVRHQKSH

SEQ ID NO: 47758 - protein, 131 aa, Nostoc carneum
  misc_feature (1)..(131): tr|A0A1Z4HQK7|A0A1Z4HQK7_9NOSO NADPH-dependent 7-cyano- 7-deazaguanine reductase OS=Nostoc carneum NIES-2107 OX =1973483 GN=queF PE=3 SV=1
MTNNTTEIKYGEREIAEGQLITFPNPRVGRRYDISITLPEFTCKCPFSGYPDFATIYISYVPDERVVELKALKLYINSYRDRYISHEESANQILDDFVVACDPLEAKVKADFTPRGNVHTVVEVRHQKPAK

SEQ ID NO: 47759 - protein, 139 aa, Nostoc commune
  misc_feature (1)..(139): tr|A0A2R5FLP4|A0A2R5FLP4_NOSCO NADPH-dependent 7-cyano- 7-deazaguanine reductase OS=Nostoc commune NIES-4072 OX =2005467 GN=queF PE=3 SV=1
MTTDKLSESVIQASQEIKYGEREIAEGKLITFPNPRVGRRYDISITLPEFTCKCPFSGYPDFATIYVTYIPDERVVELKALKLYINSYRDRYISHEESANQILDDFVAACDPLEATVKADFTPRGNVHTVVEVRHHKYP

SEQ ID NO: 47760 - protein, 132 aa, Nostoc cycadae; identical to SEQ ID NO: 43981
  misc_feature (1)..(132): tr|A0A2H6LBM7|A0A2H6LBM7_9NOSO NADPH-dependent 7-cyano- 7-deazaguanine reductase OS=Nostoc cycadae WK-1 OX=1861 711 GN=queF PE=3 SV=1

SEQ ID NO: 47761 - protein, 139 aa, Nostoc flagelliforme
  misc_feature (1)..(139): tr|A0A2K8SX63|A0A2K8SX63_9NOSO NADPH-dependent 7-cyano- 7-deazaguanine reductase OS=Nostoc flagelliforme CCNUN1 OX=2038116 GN=queF PE=3 SV=1
MTTDKLSESVTQASEEMKYGERDIAEGKLITFPNPRVGRRYDINITLPEFTCKCPFSGYPDFATIYVTYIPDERVVELKALKLYINSYRDRYISHEESANQILDDFVAACDPLEATVKADFTPRGNVHTVVEVRHHKYP

SEQ ID NO: 47762 - protein, 139 aa, Nostoc linckia
  misc_feature (1)..(139): tr|A0A1Z4LD06|A0A1Z4LD06_NOSLI NADPH-dependent 7-cyano- 7-deazaguanine reductase OS=Nostoc linckia NIES-25 OX=1 091006 GN=queF PE=3 SV=1
MTTNNLPESVSGPSQEMKYGERNIAEGQLITFPNPRLGRRYDISISLPEFTCKCPFSGYPDFATIYITYVPDERVVELKALKLYINSYRDRYVSHEESANQILDDFVAACDPLEVTVKADFSPRGNVHTVVEVRHQKNH

SEQ ID NO: 47763 - protein, 139 aa, Nostoc linckia
  misc_feature (1)..(139): tr|A0A2C6W9N6|A0A2C6W9N6_NOSLI NADPH-dependent 7-cyano- 7-deazaguanine reductase OS=Nostoc linckia z16 OX=16287 51 GN=queF PE=3 SV=1
MTNNNLSESVSQPTQEMKYGERNIAEGELITFPNPRVGRRYDVSISLPEFTCKCPFSGYPDFATIYITYVPDERVVELKALKLYINSYRDRYISHEESANQILDDFVAACDPLEVTVKADFSPRGNVHTVVEVRHQKSH

SEQ ID NO: 47764 - protein, 137 aa, Nostoc minutum
  misc_feature (1)..(137): tr|A0A367S002|A0A367S002_9NOSO NADPH-dependent 7-cyano- 7-deazaguanine reductase OS=Nostoc minutum NIES-26 OX=1 844469 GN=queF PE=3 SV=1
MTTDKLPEITSQPSQEIKYGEREIAEGELITFPNPRVGRRYDINITLPEFTCKCPFSGYPDFATIYITYIPNERVVELKALKLYINSYRDRYISHEESANQILDDFVAACDPLEVTVKADFTPRGNVHTVIEVQHQK

SEQ ID NO: 47765 - protein, 132 aa, Nostoc piscinale
  misc_feature (1)..(132): tr|A0A0M5MHJ1|A0A0M5MHJ1_9NOSO NADPH-dependent 7-cyano- 7-deazaguanine reductase OS=Nostoc piscinale CENA21 OX= 224013 GN=queF PE=3 SV=1
MTQDASEVKYGERNIAEGSLITFPNPRVGRRYDINITLPEFTCKCPFSGYPDFATIYITYIPDERVVELKALKLYINSYRDRYISHEESANQILDDMVAACDPLEITVKADFAPRGNVHTIIEVRHQKASAH

SEQ ID NO: 47766 - protein, 140 aa, Nostoc punctiforme
  misc_feature (1)..(140): tr|B2ITS9|B2ITS9_NOSP7 NADPH-dependent 7-cyano-7-deazag uanine reductase OS=Nostoc punctiforme (strain ATCC 291 33 / PCC 73102) OX=63737 GN=queF PE=3 SV=1
MTTDKLPESVSQTTQEMKYGERDIAEGKLITFPNPRVGRRYDINITLPEFTCKCPFSGYPDFATIYVTYIPDERVVELKALKLYINSYRDRYISHEESANQILDDFVAACDPLEATVKADFTPRGNVHTVVEVRHHKYPS

SEQ ID NO: 47767 - protein, 137 aa, Nostoc punctiforme
  misc_feature (1)..(137): tr|A0A367RTI1|A0A367RTI1_NOSPU NADPH-dependent 7-cyano- 7-deazaguanine reductase OS=Nostoc punctiforme NIES-210 8 OX=1356359 GN=queF PE=3 SV=1
MTTDKSSESASQANQEMKYGERDIAEGKLITFPNPRVGRQYDINITLPEFTCKCPFSGYPDFATIYVSYVPDERVVELKALKLYINSYRDRYISHEESANQILDDFVAACDPLEVTVKADFTPRGNVHTVVEVRHQK

SEQ ID NO: 47768 - protein, 131 aa, Nostoc sp.
  misc_feature (1)..(131): tr|K9QL82|K9QL82_9NOSO NADPH-dependent 7-cyano-7-deazag uanine reductase OS=Nostoc sp. PCC 7107 OX=317936 GN=qu eF PE=3 SV=1
MTQDTSEVKYGERNIAEGNLITFPNPRVGRRYDINITLPEFTCKCPFSGYPDFATIYITYIPDERVVELKALKLYINSYRDRYISHEESANQILDDMVTACDPLEITVKADFAPRGNVHTVIEVHHQKTST

SEQ ID NO: 47769 - protein, 136 aa, Nostoc sp.
  misc_feature (1)..(136): sp|Q8YXQ0|QUEF_NOSS1 NADPH-dependent 7-cyano-7-deazagua nine reductase OS=Nostoc sp. (strain PCC 7120 / SAG 25. 82 / UTEX 2576) OX=103690 GN=queF PE=3 SV=1
MSNSSPETVSQPSQEVKYGEREIAEGQLITFPNPRVGRRYDINITLPEFTCKCPFSGYPDFATIYITYVPDERVVELKALKLYINSYRDRYISHEESANQILDDFVAACDPLEANVKADFTPRGNVHTVVEVRHTK

SEQ ID NO: 47770 - protein, 124 aa, Nostocales cyanobacterium
  misc_feature (1)..(124): tr|A0A1Y0RKC5|A0A1Y0RKC5_9CYAN NADPH-dependent 7-cyano- 7-deazaguanine reductase OS=Nostocales cyanobacterium H T-58-2 OX=1940762 GN=queF PE=3 SV=1
MEIKYGERNIAEGQLITFPNPRVGRRYNINITLPEFTCKCPFSGYPDFATIHITYIPDERVVELKALKLYINSYRDRYISHEESANQILDDFVAACDPIDVTVKADFTPRGNVHTVIEVQHQKS

SEQ ID NO: 47771 - protein, 153 aa, Notoacmeibacter marinus
  misc_feature (1)..(153): tr|A0A231V5F4|A0A231V5F4_9RHIZ NADPH-dependent 7-cyano- 7-deazaguanine reductase OS=Notoacmeibacter marinus OX= 1876515 GN=queF PE=3 SV=1
MTDTSNLKMLGSQTEQPQNPDEAILETVPYSGTAEAPCVVRFTCPEFTSLCPMTGQPDFAHLVIDYVPGPKLVESKSLKLFLTSFRNHGAFHEDCTRMVGRRIAQATECRWLRIGGYWYPRGGIPIDVFWQTGPMPGDVWIPDQGVPPYRGRG

SEQ ID NO: 47772 - protein, 153 aa, Notoacmeibacter sp.
  misc_feature (1)..(153): tr|A0A3L7JA38|A0A3L7JA38_9RHIZ NADPH-dependent 7-cyano- 7-deazaguanine reductase OS=Notoacmeibacter sp. M2BS9Y- 3-1 OX=2448481 GN=queF PE=3 SV=1
MTDTSDLTLLGSKTDQPQNPDEAVLETVPYSGTSEAPCVVRFTCPEFTSLCPMTGQPDFAHLVIDYVPGPKLVESKSLKMFLTSFRNHGAFHEDCTRMVGRRIAEATECQWLRIGGYWYPRGGIPIDVFWQTGPLPADVWIPDQGVPPYRGRG

SEQ ID NO: 47773 - protein, 279 aa, Noviherbaspirillum autotrophicum
  misc_feature (1)..(279): tr|A0A0C2C0G0|A0A0C2C0G0_9BURK NADPH-dependent 7-cyano- 7-deazaguanine reductase OS=Noviherbaspirillum autotrop hicum OX=709839 GN=queF PE=3 SV=1
MSTNNLPEASPLGKPTAYQAEYAPSLLFPIPRQSKREEIGITGTLPFFGVDIWNAYEVSWLNLRGKPQVAIATFTVPADSPNIIESKSFKLYLNSFNQTRLDGPEALLDLLRTDLSAGVGAPVQVKLMLPDAFPSLQMGELEGLLLDRLDIEVNAYQPMPSLLKANHAEAMVEETLVSHLLKSNCLVTGQPDWGSVQIRYVGAQIDQEGLLQYLIGFRNHNEFHEQCVERIFMDIMRQCRPQKLAVYARYTRRGGLDINPWRSNFTTAQRPSNLRNARQ

SEQ ID NO: 47774 - protein, 279 aa, Noviherbaspirillum denitrificans
  misc_feature (1)..(279): tr|A0A254TPJ5|A0A254TPJ5_9BURK NADPH-dependent 7-cyano- 7-deazaguanine reductase OS=Noviherbaspirillum denitrif icans OX=1968433 GN=queF PE=3 SV=1
MTTSNLPEASPLGKPTAYQAEYTPSLLFPIPREQKRIEIGVTGTLPFFGVDIWNAYELSWLNLRGKPQVAIATFTVPADSPNIIESKSFKLYLNSFNQTRIASPEALVDMLRTDLSDGFGATVSVKLTMPDAFSSVAMGELDGLLLDRLDIEVNEYSPNPGLLKANQEDAIVEETFVSHLLKSNCLVTGQPDWGSVQIRYVGPQIDQELLLQYLIGFRNHNEFHEQCVERIFMDIMRQCKPQKLSVYARYTRRGGLDINPWRTNFTTGQRPSNLRNARQ

SEQ ID NO: 47775 - protein, 279 aa, Noviherbaspirillum humi
  misc_feature (1)..(279): tr|A0A239CKQ4|A0A239CKQ4_9BURK NADPH-dependent 7-cyano- 7-deazaguanine reductase OS=Noviherbaspirillum humi OX= 1688639 GN=queF PE=3 SV=1
MTTSDQPGDSPLGKPTEYHAEYAPSVLFPIARQAKREEIGIAGTLPFFGIDIWNAYEVSWLTLRGKPQVGIATLTVPADSPNIIESKSLKLYLNSLNQTRLAGPEALLELLRADLSAGFGAPVQVKLTTPDAFSTLQMGELEGLLLDRLDIEVDQYTPDPGLLRANHEEAIVEETLLSHLLKSNCLVTGQPDWGSVQIRYVGPQIDQERLLKYLIGFRNHNEFHEQCVERIFMDILRQCRPQKLSVYARYTRRGGLDINPWRSNFTTGQRPSNLRNARQ

SEQ ID NO: 47776 - protein, 279 aa, Noviherbaspirillum sp.
  misc_feature (1)..(279): tr|A0A3A3GQC8|A0A3A3GQC8_9BURK NADPH-dependent 7-cyano- 7-deazaguanine reductase OS=Noviherbaspirillum sp. K1S0 2-23 OX=2320865 GN=queF PE=3 SV=1
MSDVSIAAASPLGKPATYRSEYDPSLLFPIARAEKRAELGIAGTLPFFGMDIWNAYEVSWLNARGKPQVAIATFSVPADSPNIIESKSFKLYLNSFNQTRLASPDALVALLRADLSSGFGAPVQVALTLPEAFGELRMGELSGLLLDRLDIEVTEYRPDPSLLSARHDEADVEESLVSHLLKSNCLVTGQPDWGSVQIRYVGAQIDQEGLLRYLIGFREHNEFHEQCVERIFMDILRQCRPQKLSVYARYTRRGGLDINPWRSNFSTGQPPANSRHARQ

SEQ ID NO: 47777 - protein, 279 aa, Noviherbaspirillum sp.
  misc_feature (1)..(279): tr|A0A0Q8RCY3|A0A0Q8RCY3_9BURK NADPH-dependent 7-cyano- 7-deazaguanine reductase OS=Noviherbaspirillum sp. Root 189 OX=1736487 GN=queF PE=3 SV=1
MNTPNLPEASPLGKPTAYQTAYAPSLLFPIARQQKREEIGIAGSLPFFGIDIWNAYELSWLNLRGKPQVAIATFMVPADSPNIIESKSLKLYLNSFNQTRVASPEALTEMLRVDLSDGFGASVQVKLTLPEGFDKLGMGELEGLLLDRLDIEVDRYTPDATGLKANTDEAIVEETLVSHLLKSNCLVTGQPDWGSVQIRYVGPQIDQEALLRYLIGFREHNEFHEQCVERIFMDIMRQCRPQKLAVYARYTRRGGLDINPWRSNFTTGQRPPNVRNARQ

SEQ ID NO: 47778 - protein, 139 aa, Novimethylophilus kurashikiensis
  misc_feature (1)..(139): tr|A0A2R5F3Y4|A0A2R5F3Y4_9PROT NADPH-dependent 7-cyano- 7-deazaguanine reductase OS=Novimethylophilus kurashiki ensis OX=1825523 GN=queF PE=3 SV=1
MSTLPSKSLETFDNPQPERDFHIHMEIPEFTCLCPKTGQPDFATLILDYIPDQKCVELKSLKLYIWSFREEGAFHEAVTNRILDDLVAATQPRFMRLTAKFFVRGGIFTNVVAEHRQSGWQPLPRVDLTQFETQSNTRG

SEQ ID NO: 47779 - protein, 166 aa, Novosphingobium aromaticivorans
  misc_feature (1)..(166): sp|Q2G586|QUEF_NOVAD NADPH-dependent 7-cyano-7-deazagua nine reductase OS=Novosphingobium aromaticivorans (stra in ATCC 700278 / DSM 12444 / CIP 105152 / NBRC 16084 / F199) OX=279238 GN=queF PE=3 SV=1
MPSGAFRCRSGHKAVVMANTPLFLGQNSSLPASPDEAVLDYVANPRPGALYMIRFAAPEFTSLCPVTGQPDFAHLVIDYAPGECIVESKALKLFLGSFRNHAGFHEDVTVGIGQRLFDEMKPQWLRIGGYWYPRGGIPIDVFWQSGPPPAGLWLPDQGVAPYRGRG

SEQ ID NO: 47780 - protein, 148 aa, Novosphingobium barchaimii
  misc_feature (1)..(148): tr|A0A561H9Q0|A0A561H9Q0_9SPHN NADPH-dependent 7-cyano- 7-deazaguanine reductase OS=Novosphingobium barchaimii OX=1420591 GN=queF PE=3 SV=1
MTPLHLGQTSALPASPEEAVLDYVPNPRQGSLYLVRFAAPEFTSLCPVTGQPDFAHLVIDYAPGETIVESKSLKLFLGAFRNHNGFHEDVTVGIGQRLFDEMKPHWLRIGGYWYPRGGIPIDVFWQSGAAPGGLWVPDQGVQGYRGRG

SEQ ID NO: 47781 - protein, 155 aa, Novosphingobium barchaimii
  misc_feature (1)..(155): tr|A0A0J8A629|A0A0J8A629_9SPHN NADPH-dependent 7-cyano- 7-deazaguanine reductase OS=Novosphingobium barchaimii LL02 OX=1114963 GN=queF PE=3 SV=1
MSDTTSPSMPMHLGQQSTLPASPEQAVLDYVPNPRAGSLYLVRFAAPEFTSLCPVTGQPDFAHLVLDYAPGETIVESKSLKLFLGSFRNHCGFHEDVTVGIGQRLVDEMKPRWLRIGGYWYPRGGIPIDVFWQSSAPPEGLWVPDQGVQSYRGRG

SEQ ID NO: 47782 - protein, 153 aa, Novosphingobium fuchskuhlense
  misc_feature (1)..(153): tr|A0A117USV7|A0A117USV7_9SPHN NADPH-dependent 7-cyano- 7-deazaguanine reductase OS=Novosphingobium fuchskuhlen se OX=1117702 GN=queF PE=3 SV=1
MTDIGATPLHLGQTSSLPASPEEAVLDYVPNPRAGSLFLARFAVPEFTSLCPVTGQPDFAHLVIDYAPGETIVESKSLKLFLGSFRNHAGFHEDVTVGIGQRLFAEMRPRWLRIGGYWYPRGGIPIDVFWQSDTPPAGLWVPDQGVAPYRGRG

SEQ ID NO: 47783 - protein, 152 aa, Novosphingobium ginsenosidimutans
  misc_feature (1)..(152): tr|A0A5B8RZJ2|A0A5B8RZJ2_9SPHN NADPH-dependent 7-cyano- 7-deazaguanine reductase OS=Novosphingobium ginsenosidi mutans OX=1176536 GN=queF PE=3 SV=1
MSDTLQPLHLGQTSALPASPEEAVLDYVPNPRPNALYLARFAAPEFTSLCPVTGQPDFAHLVIDYAPGQTIVESKSLKLFLGSFRNHAGFHEDVTVGIGQRLFDEMQPRWLRIGGYWYPRGGIPIDVFWQSGAPPEGLWVPDQGVSGYRGRG

SEQ ID NO: 47784 - protein, 155 aa, Novosphingobium guangzhouense
  misc_feature (1)..(155): tr|A0A2K2G756|A0A2K2G756_9SPHN NADPH-dependent 7-cyano- 7-deazaguanine reductase OS=Novosphingobium guangzhouen se OX=1850347 GN=queF PE=3 SV=1
MTDIPDNSLPLHLGQQTGLPASPEEAVLDYVPNPRVGSLYLVRFAAPEFTSLCPVTGQPDFAHLVIDYAPEATIVESKSLKLFLGSFRNHGAFHEDVTVGIGQRLFDEMKPRWLRIGGYWYPRGGIPIDVFWQSDAPPAGLWVPDQGVPGYRGRG

SEQ ID NO: 47785 - protein, 157 aa, Novosphingobium kunmingense
  misc_feature (1)..(157): tr|A0A2N0HKY4|A0A2N0HKY4_9SPHN NADPH-dependent 7-cyano- 7-deazaguanine reductase OS=Novosphingobium kunmingense OX=1211806 GN=queF PE=3 SV=1
MTDTPSSEAQRPLHLGQTSALPASPEAAVLDYVPNPRRSSLYLVRFAAPEFTSLCPVTGQPDFAHLVIDYAPGETIVESKSLKLFLGSFRNHCGFHEDVTVGIGQRLFDEMEPAWLRIGGYWYPRGGIPIDVFWQSGVAPEGLWVPDQGVQGYRGRG

SEQ ID NO: 47786 - protein, 170 aa, Novosphingobium lindaniclasticum
  misc_feature (1)..(170): tr|T0I5T3|T0I5T3_9SPHN NADPH-dependent 7-cyano-7-deazag uanine reductase OS=Novosphingobium lindaniclasticum LE 124 OX=1096930 GN=queF PE=3 SV=1
MPPRDLKAGPAAPIKAAMTDTSMTPLHLGQTSALPTSPEDAVLDYVPNPRQGSLYLVRFAAPEFTSLCPVTGQPDFAHLVIDYAPGETIVESKSLKLFLGSFRNHNGFHEDVTVGIGQRLFDEMKPRWLRIGGYWYPRGGIPIDVFWQSGTAPEGLWVPDQGVQGYRGRG

SEQ ID NO: 47787 - protein, 153 aa, Novosphingobium malaysiense
  misc_feature (1)..(153): tr|A0A0B1ZWV9|A0A0B1ZWV9_9SPHN NADPH-dependent 7-cyano- 7-deazaguanine reductase OS=Novosphingobium malaysiense OX=1348853 GN=queF PE=3 SV=1
MSETPKPPLHLGQTSTLPSSPEEAVLDYVPNPRAGTLYLVRFAAPEFTSLCPVTGQPDFAHLVIDYAPQATIVESKSLKLFLGAFRNHCGFHEDVTVGIGQRLFDEMQPHWLRIGGYWYPRGGIPIDVFWQSGAAPEGLWVPEQGVQGYRGRG

SEQ ID NO: 47788 - protein, 166 aa, Novosphingobium mathurense
  misc_feature (1)..(166): tr|A0A1U6HLF8|A0A1U6HLF8_9SPHN NADPH-dependent 7-cyano- 7-deazaguanine reductase OS=Novosphingobium mathurense OX=428990 GN=queF PE=3 SV=1
MLVIAARSRHGRGMSETPANPLHLGQQSALPASPTEAVLDYVPNPRAGSLYMVRFAAPEFTSLCPVTGQPDFAHLVIDYAPGETIVESKSLKLFLGSFRNHSGFHEDVTVGIGQRLFDEMKPRWLRIGGYWYPRGGIPIDVFWQSGPVPEGLWVPDQGVQSYRGRG

SEQ ID NO: 47789 - protein, 154 aa, Novosphingobium nitrogenifigens
  misc_feature (1)..(154): tr|F1ZD97|F1ZD97_9SPHN NADPH-dependent 7-cyano-7-deazag uanine reductase OS=Novosphingobium nitrogenifigens DSM 19370 OX=983920 GN=queF PE=3 SV=1
MFFMADIKPLHLGQSSALPASPDEAVLDYVPNPRTGELYLVRFAAPEFTSLCPVTGQPDFAHLVIDYAPGESIVESKSLKLFLGSFRNHAGFHEDVTVGIGKRLFTEMQPRWLRIGGYWYPRGGIPIDVFWQSDAAPAGLWVPDQGVAPYRGRG

SEQ ID NO: 47790 - protein, 153 aa, Novosphingobium pentaromativorans
  misc_feature (1)..(153): tr|G6EE69|G6EE69_9SPHN NADPH-dependent 7-cyano-7-deazag uanine reductase OS=Novosphingobium pentaromativorans U S6-1 OX=1088721 GN=queF PE=3 SV=1
MSDTPANPLHLGQQSALPASPTEAVLDYVPNPRAGSLYMVRFAAPEFTSLCPVTGQPDFAHLVIDYAPGETIVESKSLKLFLGSFRNHSGFHEDVTVGIGQRLFAEMKPRWLRIGGYWYPRGGIPIDVFWQSGAVPDGLWVPDQGVQSYRGRG

SEQ ID NO: 47791 - protein, 148 aa, Novosphingobium pentaromativorans
  misc_feature (1)..(148): tr|A0A2W5P4D5|A0A2W5P4D5_9SPHN NADPH-dependent 7-cyano- 7-deazaguanine reductase OS=Novosphingobium pentaromati vorans OX=205844 GN=queF PE=3 SV=1
MTPLHLGQNSALPASPEAAVLDYVPNPRQGSLYLVRFAAPEFTSLCPVTGQPDFAHLVIDYAPGETIVESKSLKLFLGSFRNHNGFHEDVTVGIGQRLFDEMKPHWLRIGGYWYPRGGIPIDVFWQSGAAPEGLWVPDQGVQGYRGRG

SEQ ID NO: 47792 - protein, 152 aa, Novosphingobium resinovorum
  misc_feature (1)..(152): tr|A0A031JS63|A0A031JS63_9SPHN NADPH-dependent 7-cyano- 7-deazaguanine reductase OS=Novosphingobium resinovorum OX=158500 GN=queF PE=3 SV=1
MTDTSFPLHLGQQSGLPASPEEAQLDYVPNPRVGSLYLVRFAAPEFTSLCPVTGQPDFAHLVIDYAPGETIVESKSLKLFLGSFRNHGAFHEDVTVGIGQRLFNEMKPLWLRIGGYWYPRGGIPIDVFWQSDAPPAGLWVPDQGVPGYRGRG

SEQ ID NO: 47793 - protein, 153 aa, Novosphingobium sediminis
  misc_feature (1)..(153): tr|A0A512AHB5|A0A512AHB5_9SPHN NADPH-dependent 7-cyano- 7-deazaguanine reductase OS=Novosphingobium sediminis O X=707214 GN=queF PE=3 SV=1
MTDIGAIPLHLGQTSSLPASPEEAVLDYVPNPRAGSLFLVRFAAPEFTSLCPVTGQPDFAHLVIDYAPGETIVESKSLKLFLGAFRNHAGFHEDVTVGIGQRLFAEMSPRWLRIGGYWYPRGGIPIDVFWQSDAPPAGLWVPDQGVASYRGRG

SEQ ID NO: 47794 - protein, 155 aa, Novosphingobium sp.
  misc_feature (1)..(155): tr|A0A519QG21|A0A519QG21_9SPHN NADPH-dependent 7-cyano- 7-deazaguanine reductase OS=Novosphingobium sp. OX=1874 826 GN=queF PE=3 SV=1
MSDTPQSSTPLHLGQQSALPASPQAAVLDYVPNPRTGSLYLVRFAAPEFTSLCPVTGQPDFAHLVLDYAPGETIVESKSLKLFLGSFRNHCGFHEDVTVGIGQRLFAEMKPKWLRVGGYWYPRGGIPIDVFWQSDVPPPGLWVPDQGVASYRGRG

SEQ ID NO: 47795 - protein, 150 aa, Novosphingobium sp.
  misc_feature (1)..(150): tr|A0A3B7DVY9|A0A3B7DVY9_9SPHN NADPH-dependent 7-cyano- 7-deazaguanine reductase OS=Novosphingobium sp. THN1 OX =1016987 GN=queF PE=3 SV=1
MTKTPLFLGQNSALPASPDEAVLDYVPNPRPGTLYMIRFAAPEFTSLCPVTGQPDFAHLVIDYAPGETIVESKALKLFLGSFRNHAGFHEDVTVGIGQRLFAEMKPQWLRIGGYWYPRGGIPIDVFWQSDAPPAGLWLPDQGVAPYRGRG

SEQ ID NO: 47796 - protein, 150 aa, Novosphingobium subterraneum
  misc_feature (1)..(150): tr|A0A0B9A8C4|A0A0B9A8C4_9SPHN NADPH-dependent 7-cyano- 7-deazaguanine reductase OS=Novosphingobium subterraneu m OX=48936 GN=queF PE=3 SV=1
MTKTPLFLGQNTALPASPEEAVLDYVPNPRPGTLYMIRFAAPEFTSLCPVTGQPDFAHLVIDYAPGETIVESKALKLFLGSFRNHAGFHEDVTVGIGQRLFAEMKPRWLRIGGYWYPRGGIPIDVFWQSDAPPAGLWLPDQGVAPYRGRG

SEQ ID NO: 47797 - protein, 150 aa, Novosphingobium taihuense
  misc_feature (1)..(150): tr|A0A562JYX2|A0A562JYX2_9SPHN NADPH-dependent 7-cyano- 7-deazaguanine reductase OS=Novosphingobium taihuense O X=260085 GN=queF PE=3 SV=1
MTKTPLFLGQNSSLPASPEEAVLDYVPNPRSGTLYMIRFAAPEFTSLCPVTGQPDFAHLVIDYAPGETIVESKALKLFLGSFRNHAGFHEDVTVGIGQRLFDEMKPQWLRIGGYWYPRGGIPIDVFWQSGPPPAGLWLPDQGVASYRGRG

SEQ ID NO: 47798 - protein, 129 aa, Novosphingobium tardaugens
  misc_feature (1)..(129): tr|U2Y8E4|U2Y8E4_9SPHN NADPH-dependent 7-cyano-7-deazag uanine reductase OS=Novosphingobium tardaugens NBRC 167 25 OX=1219035 GN=queF PE=3 SV=1
MLDYVPNPRPDALYTIRFSAPEFTSLCPVTGAPDFAHLVIDYAPGDTIVESKSLKLFLGSFRNHNGFHEDVTVGIGQRLFAEMRPRWFRIGGYWYPRGGIPIDVFWQSGVAPEGLWVPDQGVANYRGRG

SEQ ID NO: 47799 - protein, 282 aa, Obesumbacterium proteus
  misc_feature (1)..(282): tr|A0A4Q9D4I0|A0A4Q9D4I0_9GAMM NADPH-dependent 7-cyano- 7-deazaguanine reductase OS=Obesumbacterium proteus OX= 82983 GN=queF PE=3 SV=1
MMSYQDHQALAGLTLGKATEYRDSYDASLLQPVPRSMNREPLGLYPDSLPFTGGDIWTLYELSWLNAKGLPQVAIADVELDAFSQNLIESKSFKLYLNSFNQTRFANWDDVQTTLQRDLSHCAQGDVRVQLMKLDDVEGQPIAAFSGECIDNLDIEIDNYEFDAELLKNAADQQNVVEETLVSHLLKSNCLITHQPDWGSVMIQYRGPAIDREALLRYLVSFRHHNEFHEQCVERIFCDIQRFCQPETLSVYARYTRRGGLDINPWRTNTPFVAPKGRLVRQ

SEQ ID NO: 47800 - protein, 281 aa, Obesumbacterium proteus
  misc_feature (1)..(281): tr|A0A1B7KKC9|A0A1B7KKC9_9GAMM NADPH-dependent 7-cyano- 7-deazaguanine reductase OS=Obesumbacterium proteus ATC C 12841 OX=1354268 GN=queF PE=3 SV=1
MSYQDHQALAGLTLGKATEYRDSYDASLLQPVPRSMNRELLGLYPDSLPFTGGDIWTLYELSWLNAKGLPQVAIADVELDAFSQNLIESKSFKLYLNSFNQTRFANWDDVQTTLQRDLSHCAQGDVCVQLMKLDDVEGQPIAAFSGECIDNLDIEIDNYEFDAELLKNAADQQNVVEETLVSHLLKSNCLITHQPDWGSVMIQYRGPAIDREALLRYLVSFRHHNEFHEQCVERIFCDIQRFCQPETLSVYARYTRRGGLDINPWRTNTPFVAPKGRLVRQ

SEQ ID NO: 47801 - protein, 276 aa, Oblitimonas alkaliphila
  misc_feature (1)..(276): tr|A0A0K1XFK6|A0A0K1XFK6_9GAMM NADPH-dependent 7-cyano- 7-deazaguanine reductase OS=Oblitimonas alkaliphila OX= 1697053 GN=queF PE=3 SV=1
MQHPAELSPLGKHSAYVSHYDASLLYPIAREIKWAAMGLAAEQLPYVGEDIWNCYELSWLMPTGKPCVAMMSVRVPANSPNIIESKSFKLYLNSFNQSVFSSTEQLQQVLEQDLSATAGAPVQVTISSLSEAAAAGLQQLAGECIDRLDITVADYHAPAPELLRCQSEAQVEAALHSHLLKSNCPVTGQPDWGSVEVVYRGKELDQASFLAYLVSYRQCQDFHEQCAERIFIDLYRLLQPEYLRVTARYLRRGGIDINPVRCTHAEAFANPRLVRQ

SEQ ID NO: 47802 - protein, 153 aa, Oceanibacterium hippocampi
  misc_feature (1)..(153): tr|A0A1Y5U1M1|A0A1Y5U1M1_9PROT NADPH-dependent 7-cyano- 7-deazaguanine reductase OS=Oceanibacterium hippocampi OX=745714 GN=queF PE=3 SV=1
MSDYDSHLTQLGGPAAIPETPEKAKLERVPNPHPDSLYVARFTCPEFTSLCPVTGQPDFAHLVIDYLPGPWIVESKSLKLYLTSFRNHGAFHEDCTLSIGMRIAREMEARWLRIGGYWYPRGGIPIDVFWQTGEPPKGLWLPDTGVPTYRGRG

SEQ ID NO: 47803 - protein, 154 aa, Oceanibaculum indicum
  misc_feature (1)..(154): tr|K2K0N7|K2K0N7_9PROT NADPH-dependent 7-cyano-7-deazag uanine reductase OS=Oceanibaculum indicum P24 OX=120706 3 GN=queF PE=3 SV=1
MTDSIYSGLTQLGQATGLPDSPEKAVLETVPNPQGDVRYMVRFVAPEFTSLCPLTGQPDFAHLVIDYVPKDRLVESKSLKLFLGSFRNHGAFHEDCTVSIARRLVEVMQPEWLRIGGYWYPRGGIPIDVFYQTGPAPEGVWIPDQGVPPYRGRG

SEQ ID NO: 47804 - protein, 154 aa, Oceanibaculum indicum
  misc_feature (1)..(154): tr|A0A420WR58|A0A420WR58_9PROT NADPH-dependent 7-cyano- 7-deazaguanine reductase OS=Oceanibaculum indicum OX=52 6216 GN=queF PE=3 SV=1
MTDSIYSGLTQLGQNAGLPDSPEKAVLETVPNPQGEVRYMVRFVAPEFTSLCPLTGQPDFAHLVIDYVPKDRLVESKSLKLFLGSFRNHGAFHEDCTVSIARRLVDVMQPEWLRIGGYWYPRGGIPIDVFYQTGPAPEGVWIPDQGVPPYRGRG

SEQ ID NO: 47805 - protein, 153 aa, Oceanicaulis sp.
  misc_feature (1)..(153): tr|A0A2E5UZZ9|A0A2E5UZZ9_9RHOB NADPH-dependent 7-cyano- 7-deazaguanine reductase OS=Oceanicaulis sp. OX=1924941 GN=queF PE=3 SV=1
MTDQRYDNLGQLGATTPLPDNPDTAVLERVANPCDAPYMTRFVCPEFTSLCPVTGAPDFAHLVIDYVPRDWIVESKSLKLYLGSFRNHGAFHEACTTGIGQRLVKELEPVWLRIGGYWYPRGGIPIDVFFATGEPPEGVWIPDQDVPGYRGRG

SEQ ID NO: 47806 - protein, 154 aa, Oceanicaulis sp.
  misc_feature (1)..(154): tr|A0A2E5AHJ2|A0A2E5AHJ2_9RHOB NADPH-dependent 7-cyano- 7-deazaguanine reductase OS=Oceanicaulis sp. OX=1924941 GN=queF PE=3 SV=1
MTDERYSKLDMLGSDARAADTPEEARLERVENPTPNADYMIRFACPEFTSICPVTGQPDFAHLVIDYAPSKWIVESKSLKLYLQSFRNHGAFHEACTTMIGQRLVDELDPKWLRIGGYWYPRGGIPIDVFWQSGEVPAGLYVPDTGVASYRGRG

SEQ ID NO: 47807 - protein, 155 aa, Oceanicella actignis
  misc_feature (1)..(155): tr|A0A1M7T1H7|A0A1M7T1H7_9RHOB NADPH-dependent 7-cyano- 7-deazaguanine reductase OS=Oceanicella actignis OX=118 9325 GN=queF PE=3 SV=1
MTDETDLSAITTLGRAAPQPRSPEEARLDPVPNPKRGTLYLARFTCPEFTSLCPVTGQPDFAHLVIDYAPDAHLVESKSLKLFLTSFRNHGAFHEDCTVEVGRRIQEAIRPLWIRVGGYWYPRGGIPIDVFWQSGPPPEGLWLPDQGVPPYRGRG

SEQ ID NO: 47808 - protein, 268 aa, Oceanicoccus sagamiensis
  misc_feature (1)..(268): tr|A0A1X9NCX2|A0A1X9NCX2_9GAMM NADPH-dependent 7-cyano- 7-deazaguanine reductase OS=Oceanicoccus sagamiensis OX =716816 GN=queF PE=3 SV=1
MKDILLGKDVEYVDTYSPDLLFPIARQQSRDSLGVAAGQLPFTGVDIWNAYELSWLNAKGKPQVACAEFRFPCESSAIVESKSFKLYLNSFNQTVVRDRAELQARLVQDLSACVQAPVDVIIHNVANGNAISQLEGVCLDDLDISLSSYSPDPLLLGNVGQQVEETLYSHLLRSLCPVTAQPDWASIVVQYTGPQINHEGLLKYLIGYRQHQEFHEQCVERIFTDISAACDPQRLSVRALYTRRGGLDINPFRASYPHDPQNIRLNRQ

SEQ ID NO: 47809 - protein, 283 aa, Oceanimonas baumannii
  misc_feature (1)..(283): tr|A0A235CNF7|A0A235CNF7_9GAMM NADPH-dependent 7-cyano- 7-deazaguanine reductase OS=Oceanimonas baumannii OX=12 9578 GN=queF PE=3 SV=1
MTPEQKYQHSDSLAGLELGKQSSYVSEYDPGQLQAVPRSLNRDDLGLQADALPFSGEDLWNLYELSWLNARGKPVVAMGEVRVPATSTHLIESKSFKLYLNSFNQSRFESLTAVEETLARDLSACADGKVMVKLYELQMAPAQFGRLPGHCIDQLDIDIEHYQPVPDLLANATDTEEVCETLHSHLLKSNCLVTGQPDWGSVMIRYQGPRIREDALLRYLVGFRQHNEFHEQCVERIFMDIMQHCKPSELTVYARYTRRGGLDINPYRSNVAGKAANVRLLRQ

SEQ ID NO: 47810 - protein, 283 aa, Oceanimonas doudoroffii
  misc_feature (1)..(283): tr|A0A233RI95|A0A233RI95_9GAMM NADPH-dependent 7-cyano- 7-deazaguanine reductase OS=Oceanimonas doudoroffii OX= 84158 GN=queF PE=3 SV=1
MTPEQKYQQSPALAELPLGKHSDYVSEYDPSQLQAVPRSLNRDDLGLDATALPFSGEDLWNLYELSWLNARGKPMVAMGEVRVPANSTNLIESKSFKLYLNSFNQSRFESLAAVEETLTRDLSACAQGRVSVSLYELQYAPAQFGRLPGHCIDQLDIDIDRYQPDADLLANATDADIVSETLHSHLLKSNCLVTGQPDWGSVMIRYQGPRIHQDALLRYLVGFRQHNEFHEQCVERIFMDLMQHCRPEELTVYARYTRRGGLDINPYRSNVAGKAANVRLLRQ

SEQ ID NO: 47811 - protein, 283 aa, Oceanimonas sp.
  misc_feature (1)..(283): tr|H2FY09|H2FY09_OCESG NADPH-dependent 7-cyano-7-deazag uanine reductase OS=Oceanimonas sp. (strain GK1) OX=511 062 GN=queF PE=3 SV=1
MTPEQKYQQSPSLAGLSLGKQSSYVSEYDPQQLQAVPRSLNRDDLGLEADALPFSGEDLWNLYELSWLNARGKPMVAMGEVRVPATSVNLIESKSFKLYLNSFNQSRFESLAAVEETLARDLSACAQGTVTVKLYELQYAPAQFGRLPGHCIDQLDIDIDRYQPDPALLVDATEPEVVSETLHSHLLKSNCLVTGQPDWGSIMIRYQGPRLRQDALLRYLVGFRQHNEFHEQCVERIFMDLMQHCQPRELTVYARYTRRGGLDINPYRSNVAGKAANVRLQRQ

SEQ ID NO: 47812 - protein, 283 aa, Oceanisphaera arctica
  misc_feature (1)..(283): tr|A0A2P5TRL8|A0A2P5TRL8_9GAMM NADPH-dependent 7-cyano- 7-deazaguanine reductase OS=Oceanisphaera arctica OX=64 1510 GN=queF PE=3 SV=1
MTPEQKYQASKALDDLPLGKQSSYVCEYDAGQLQPVPRSLNRDELGLSADALPFAGEDLWNLYELSWLNRKGKPMVAMGEVRVAATSVNLIESKSFKLYLNSFNQSHFDSLEEVEDILTRDLTLCAQGPVKVKLYELQAAPTQFGMLPGDCIDGLDIEIRHYQPQANLLNNATDPEEVNETLHSNLLKSNCLVTGQPDWGSLMIRYQGPRIRREALLRYLVSFRQHNEFHEQCVERIFMDLMQHCHPKELTVYARYTRRGGLDINPYRSNVAGKAANVRLQRQ

SEQ ID NO: 47813 - protein, 283 aa, Oceanisphaera avium
  misc_feature (1)..(283): tr|A0A1Y0CWF8|A0A1Y0CWF8_9GAMM NADPH-dependent 7-cyano- 7-deazaguanine reductase OS=Oceanisphaera avium OX=1903 694 GN=queF PE=3 SV=1
MTPEQKYQASQALDGLSLGKQSSYVCEYDASLLQGVPRSLNREDLGLTCDSLPFAGEDVWNLYELSWLNQKGKPVVAMGEIRVPITSVNLIESKSFKLYLNSFNQSRFDNLEEVSAILSRDLTLCAQAPVKVSLYDLKNAPSQFGMLSGDCIDELDITVEHYQPHQALLTNMTEQAWVSETLHSHLLKSNCLVTEQPDWGSIMIRYQGPLIKREALLRYIVSFRQHNEFHEQCVERIFMDLLTHCQPKELTVYARYTRRGGLDINPYRSNVAGKAANVRLQRQ

SEQ ID NO: 47814 - protein, 283 aa, Oceanisphaera profunda
  misc_feature (1)..(283): tr|A0A1Y0D7H5|A0A1Y0D7H5_9GAMM NADPH-dependent 7-cyano- 7-deazaguanine reductase OS=Oceanisphaera profunda OX=1 416627 GN=queF PE=3 SV=1
MTPEQKYQSSHALDALALGKQSSYVSEYDASQLQGVPRSLNRDDLGLTSETLPFAGEDLWNLYELSWLNRKGKPVVAMGEVRVPITSLNLIESKSFKLYLNSFNQTAFDNIEEVEEVLTRDLSLCAQAAVKVNLYELQNAPSQFGILSGDCIDQLDIDVQHYQPHPELLQNITDDEWVSETLHSHLLKSNCLVTGQPDWGSVMIRYQGPRINREALLRYLVSFRQHNEFHEQCVERIFMDLLQHAKTKELTVYARYTRRGGLDINPYRSNVAGKAANVRLQRQ

SEQ ID NO: 47815 - protein, 283 aa, Oceanisphaera psychrotolerans
  misc_feature (1)..(283): tr|A0A1J4QC33|A0A1J4QC33_9GAMM NADPH-dependent 7-cyano- 7-deazaguanine reductase OS=Oceanisphaera psychrotolera ns OX=1414654 GN=queF PE=3 SV=1
MTPEQKYQSSSALDALPLGKQSSYVCEYDAGQLQPVPRALNRDDLGLKADALPFAGEDLWNLYELSWLNAKGKPRVAMGEVRVPATSINLIESKSFKLYLNSFNQSRFDSLEEVEDILTRDLSLCAQGQVKVRLYELHSAPSQFGMLPGDCIDDLDIEVSQYQPDAGLLDDAVHSDDVSETLHSHLLKSNCLVTGQPDWGSIMIRYQGPRIRREVLLRYLVSFRQHNEFHEQCVERIFMDLMQHCRPRELTVYARYTRRGGLDINPYRSNVAGKAANVRLHRQ

SEQ ID NO: 47816 - protein, 162 aa, Oceanobacillus arenosus
  misc_feature (1)..(162): tr|A0A3D8PLI3|A0A3D8PLI3_9BACI NADPH-dependent 7-cyano- 7-deazaguanine reductase OS=Oceanobacillus arenosus OX= 1229153 GN=queF PE=3 SV=1
MKDQDLSDLTLLGNQGTSYDFEYNPKVLESFENKHQNRDYFVKFNCPEFTALCPITAQPDFATVYISYIPDVKMVESKSLKLYLFSFRNHGAFHEDTMNIIMNDLIELMDPRYIEVWGKFTPRGGISIDPYCNYGKPGTKYEQMADHRMMNHDMYPEKIDNR

SEQ ID NO: 47817 - protein, 166 aa, Oceanobacillus bengalensis
  misc_feature (1)..(166): tr|A0A494YS85|A0A494YS85_9BACI NADPH-dependent 7-cyano- 7-deazaguanine reductase OS=Oceanobacillus bengalensis OX=1435466 GN=queF PE=3 SV=1
MSGRSQEEGLKDLTLLGNKETNYKTDYTPEVLESVDNIHSNRDYFVKFNCPEFTSLCPITGQPDFATMYISYIPDQKIVESKSLKLYLFSFRNHGDFHEDCVNIIMNDLIELLDPRYIEVWGKFTPRGGISIDPWCNYGKPGTKYEEMATHRLMNHDLNPEKIDNR

SEQ ID NO: 47818 - protein, 166 aa, Oceanobacillus caeni; identical to SEQ ID NO: 44203
  misc_feature (1)..(166): tr|A0A0N0M8H6|A0A0N0M8H6_9BACI NADPH-dependent 7-cyano- 7-deazaguanine reductase OS=Oceanobacillus caeni OX=405 946 GN=queF PE=3 SV=1

SEQ ID NO: 47819 - protein, 162 aa, Oceanobacillus chungangensis
  misc_feature (1)..(162): tr|A0A3D8PHP7|A0A3D8PHP7_9BACI NADPH-dependent 7-cyano- 7-deazaguanine reductase OS=Oceanobacillus chungangensi s OX=1229152 GN=queF PE=3 SV=1
MAEQDLSGLTLLGNQGTSYDFEYNPEVLESFENKHQNRDYFVKFNCPEFTALCPITAQPDFATVYISYIPNVKMVESKSLKLYLFSFRNHGAFHEDTMNIIMNDLIELMDPRYIEVWGKFTPRGGISIDPYCNYGKPGTKYEQMADHRMMNHDMYPEKIDNR

SEQ ID NO: 47820 - protein, 163 aa, Oceanobacillus halophilus
  misc_feature (1)..(163): tr|A0A495A770|A0A495A770_9BACI NADPH-dependent 7-cyano- 7-deazaguanine reductase OS=Oceanobacillus halophilus O X=930130 GN=queF PE=3 SV=1
MKNEDQLADLTLLGNQGTSYNFEYNPDVIETFDNKHPNRDYFVKFNCPEFTALCPITNQPDFATVYISYIPDIKMVESKSLKLYLFSFRNHGAFHEDTMNIIMNDLIKKMNPRYIEVWGKFTPRGGISIDPYCNYGKPGTKYEKMAEHRMMNHDMYPEKIDNR

SEQ ID NO: 47821 - protein, 162 aa, Oceanobacillus iheyensis
  misc_feature (1)..(162): tr|A0A2P1WMD0|A0A2P1WMD0_9BACI NADPH-dependent 7-cyano- 7-deazaguanine reductase OS=Oceanobacillus iheyensis OX =182710 GN=queF PE=3 SV=1
MKEQDLSELTLLGSQGTTYAFDYNPDVLEIFENNHQDRDYFVKFNCPEFTTLCPMTGQPDFATLYISYIPDVKMVESKALKLYLFSFRNHGGFHEDSINVIMNDLIDLMDPRYIEVWGKFTPRGGISIDPYCNYGKPGTKYEKMAEQRLMNHDLYPEKVDNR

SEQ ID NO: 47822 - protein, 165 aa, Oceanobacillus iheyensis
  misc_feature (1)..(165): sp|Q8EPA3|QUEF_OCEIH NADPH-dependent 7-cyano-7-deazagua nine reductase OS=Oceanobacillus iheyensis (strain DSM 14371 / CIP 107618 / JCM 11309 / KCTC 3954 / HTE831) OX =221109 GN=queF PE=3 SV=1
MVGRDENELQDVQLLGSQGTTYDFNYTPEVLEVFDNKHVSRDYFVKFNCPEFTTLCPKTNQPDFGTIYISYIPDIKMVESKSLKLYLFSFRNHGDFHEDCINIIMNDLIDLMNPRYIEVRGKFTPRGGISIDPYCNYGRPGTKFEQMADQRLIQHDMYPEKIDNR

SEQ ID NO: 47823 - protein, 89 aa, Oceanobacillus limi
  misc_feature (1)..(89): tr|A0A1I0FMA6|A0A1I0FMA6_9BACI NADPH-dependent 7-cyano- 7-deazaguanine reductase OS=Oceanobacillus limi OX=9301 31 GN=queF PE=3 SV=1
MVESKSLKLYLFSFRNHGDFHEDSMNIIMNDLIELMDPRYIEVWGKFTPRGGISIDPYCNYGKPGTKYEQMADHRMMNHDMYPEKIDNR

SEQ ID NO: 47824 - protein, 165 aa, Oceanobacillus oncorhynchi
  misc_feature (1)..(165): tr|A0A0A1MU50|A0A0A1MU50_9BACI NADPH-dependent 7-cyano- 7-deazaguanine reductase OS=Oceanobacillus oncorhynchi OX=545501 GN=queF PE=3 SV=1
MAGRSEKDLQGIELLGNKETKYAFDYTPEILETFDNQHPKRDYFVKLNCPEFTTLCPITNQPDFGTIYISYIPDIKMVESKSLKLYLFSFRNHGDFHEDCVNIIMNDLIELMDPRYIEVRGKFTPRGGISIDPYCNYGKAGTKFEKMAENRLMQHDMYPEKIDNR

SEQ ID NO: 47825 - protein, 162 aa, Oceanobacillus picturae
  misc_feature (1)..(162): tr|A0A0U9HB90|A0A0U9HB90_9BACI NADPH-dependent 7-cyano- 7-deazaguanine reductase OS=Oceanobacillus picturae OX= 171693 GN=queF PE=3 SV=1
MKEQDLSELTLLGSQGTTYAFDYNPGVLEIFENNHQDRDYFVKFNCPEFTTLCPMTGQPDFATLYISYIPDVKMVESKALKLYLFSFRNHGGFHEDSINVIMNDLINLMDPRYIEVWGKFTPRGGISIDPYCNYGKPGTKYEKMAEQRLMNHDLYPEKIDNR

SEQ ID NO: 47826 - protein, 162 aa, Oceanobacillus picturae
  misc_feature (1)..(162): tr|W9AD25|W9AD25_9BACI NADPH-dependent 7-cyano-7-deazag uanine reductase OS=Oceanobacillus picturae OX=171693 G N=queF PE=3 SV=1
MKEQDLSELTLLGSQGTTYAFDYNPDVLEIFENNHPDRDYFVKFNCPEFTTLCPMTGQPDFATLYISYIPDVKMVESKALKLYLFSFRNHGGFHEDSINVIMNDLINLMDPRYIEVWGKFTPRGGISIDPYCNYGKPGTKYEKMAEQRLMNHDLYPEKIDNR

SEQ ID NO: 47827 - protein, 162 aa, Oceanobacillus profundus
  misc_feature (1)..(162): tr|A0A417Y9W8|A0A417Y9W8_9BACI NADPH-dependent 7-cyano- 7-deazaguanine reductase OS=Oceanobacillus profundus OX =372463 GN=queF PE=3 SV=1
MKEQDLSGLTLLGNQGTSYVYEYNPEVLEAFENNHQDRDYFVKLNFPEFTTLCPMTGQPDFATIYISYIPDVKMVESKSLKLYLFSYRNHGGFHEDSVNVIMNDLIKLMDPRYIEVWGKFTPRGGISIDPYCNYGKPGTKYEQMAEHRMMNHDMYPEKVDNR

SEQ ID NO: 47828 - protein, 165 aa, Oceanobacillus sojae
  misc_feature (1)..(165): tr|A0A511ZLI4|A0A511ZLI4_9BACI NADPH-dependent 7-cyano- 7-deazaguanine reductase OS=Oceanobacillus sojae OX=582 851 GN=queF PE=3 SV=1
MAGRSEKDLQGIELLGNKETKYAFDYTPEILEVFDNQHPNRDYFVKLNCPEFTTLCPMTNQPDFGTIYISYIPDIKMVESKSLKLYLFSFRNHGDFHEDCVNIIMNDLIELMDPRYIEVRGKFMPRGGISIDPYCNYGKTGTKFEKMAEDRLMQHDMYPETVDNR

SEQ ID NO: 47829 - protein, 166 aa, Oceanobacillus sp.
  misc_feature (1)..(166): tr|A0A345PET9|A0A345PET9_9BACI NADPH-dependent 7-cyano- 7-deazaguanine reductase OS=Oceanobacillus sp. 160 OX=2 052660 GN=queF PE=3 SV=1
MSGRSQEQGLKDLTLLGNQKTDYATDYTPEVLESVDNIHSNRDYFVKFNCPEFTSLCPITGQPDFATMYISYIPDQKIVESKSLKLYLFSFRNHGDFHEDCVNIIMNDLIELLDPRYIEVWGKFTPRGGISIDPWCNYGKPGTKYEDMAMHRLMNHDLNPEKIDNR

SEQ ID NO: 47830 - protein, 166 aa, Oceanobacillus sp.
  misc_feature (1)..(166): tr|A0A498D1I2|A0A498D1I2_9BACI NADPH-dependent 7-cyano- 7-deazaguanine reductase OS=Oceanobacillus sp. YLB-02 O X=2448030 GN=queF PE=3 SV=1
MSGRTEEQGLKDLTLLGNQGTKYATDYAPDVLESVENIHSNRDYFVKFNCPEFTSLCPITGQPDFATMYISYIPDKKIVESKSLKLYLFSFRNHGDFHEDCVNIIMNDLIQLLDPRYIEVWGKFTPRGGISIDPWCNYGKPGTKYDEMAMHRLMNHDLYPEKVDNR

SEQ ID NO: 47831 - protein, 274 aa, Oceanobacter sp.
  misc_feature (1)..(274): tr|A0A2G2JGA7|A0A2G2JGA7_9GAMM NADPH-dependent 7-cyano- 7-deazaguanine reductase OS=Oceanobacter sp. OX=2030817 GN=queF PE=3 SV=1
MGSVTSTDNPLGQLSAYPDEYDAGLLFPIDRDESWKASGQTRADIQFFGVDIWNGYEVSWLNAKGKPVVCRGEFRVPASSPYLIESKSFKLYLNSFNQTRFVDAESARQRMVVDLSEAAGAEVSVQFHAADATYPTAPEAILIDDLDVDIRSYEPDASLLNTQEGSHFSGWLVSHLLKSNCPVTGQPDWGSLYVFYEGNEIDQAGLLAYIVSLRQHQDFHEQCVERTYRDIQERCKPEKLTVYARYVRRGGLDINPFRTSEEGFEALNFQSFRQ

SEQ ID NO: 47832 - protein, 130 aa, Oceanococcus atlanticus
  misc_feature (1)..(130): tr|A0A1Y1SF70|A0A1Y1SF70_9GAMM NADPH-dependent 7-cyano- 7-deazaguanine reductase OS=Oceanococcus atlanticus OX= 1317117 GN=queF PE=3 SV=1
MSTRPSKTLETFPNPKPERDYVISMRMPEFTCLCPKTGQPDFATLYLDFIADELCVELKALKLYLWSFRDEGAFHEDVTNRIADDLVAAINPRYLRLKAEFYVRGGIYTTVVAEHRKAGWTPAPRVDLPA

SEQ ID NO: 47833 - protein, 130 aa, Oceanococcus sp.
  misc_feature (1)..(130): tr|A0A520ST55|A0A520ST55_9GAMM NADPH-dependent 7-cyano- 7-deazaguanine reductase OS=Oceanococcus sp. OX=1958892 GN=queF PE=3 SV=1
MSTRPSKTLETFPNPKPERDYVISMRMPEFTCLCPKTGQPDFATLYLDFIADEMCVELKALKLYLWSFRDDGAFHEDVTNRIADDLVAAINPRYLRLKAEFYVRGGIYTTVVAEHRKAGWTPAPRVDLPA

SEQ ID NO: 47834 - protein, 274 aa, Oceanospirillaceae bacterium
  misc_feature (1)..(274): tr|A0A2E9DMJ2|A0A2E9DMJ2_9GAMM NADPH-dependent 7-cyano- 7-deazaguanine reductase OS=Oceanospirillaceae bacteriu m OX=1899355 GN=queF PE=3 SV=1
MSEHESIKQSPLGQGTRYVNRYDPTLLYPIARDVNWQARGVDRTTLPFRGVDIWNAYELSWLDSRGKPVVRLAEFRIPASSSHIIESKSFKLYLNSYNLTRFGSESEVQSHLRQDLSQAAGADVSVKLFRPDLPVQGGQLEGRCIDDLEIDVEHYTPEPNLLIAGNEVVGETLVSHLLKSNCPVTGQPDWGSLQIRYKGGKIDRKGLLAYIVSYREHGDFHEQCVENIFMDIWQRCRPQKLSVYARYVRRGGLDINPYRTSISDEPGNPRLARQ

SEQ ID NO: 47835 - protein, 273 aa, Oceanospirillaceae bacterium
  misc_feature (1)..(273): tr|A0A2D6DIV3|A0A2D6DIV3_9GAMM NADPH-dependent 7-cyano- 7-deazaguanine reductase OS=Oceanospirillaceae bacteriu m OX=1899355 GN=queF PE=3 SV=1
MDQEKIIAASPLGDKSEYVDQYSPALLFPIPRKEPWRPSFTKRPFYGVDIWNAYEISWLNKQGVPQMAIGEFRLPGDSPNIVESKSFKLYLNSFNQTIVASRDKVQQMMQKDLSEAAGAPMQVRLFGLNEQAMPIMATPGECIDERPIETLVYEPDASLLAAHEDQYRTETLHSHLLKSNCPVTGQPDWATLVVEYEGATLDRSTLLEYIISYRQHGDFHEQCVEQIFLDIMAQCQPKQLTVYARYLRRGGLDINPYRSTRPLDPPNCRTERQ

SEQ ID NO: 47836 - protein, 274 aa, Oceanospirillales bacterium; identical to SEQ ID NO: 47167
  misc_feature (1)..(274): tr|A0A2E5S9D3|A0A2E5S9D3_9GAMM NADPH-dependent 7-cyano- 7-deazaguanine reductase OS=Oceanospirillales bacterium OX=1914300 GN=queF PE=3 SV=1

SEQ ID NO: 47837 - protein, 272 aa, Oceanospirillales bacterium
  misc_feature (1)..(272): tr|A0A2A4XK22|A0A2A4XK22_9GAMM NADPH-dependent 7-cyano- 7-deazaguanine reductase OS=Oceanospirillales bacterium OX=1914300 GN=queF PE=3 SV=1
MALDNAPLGKASDYPDRYDPALLFPVAREENRRRIGLEDGRWPWFGGDLWQAWEISWLRPGGIPDLAWAEIRFPAASPSIIESKSLKLYLNSLNQTVFSSADQVAETITGDLSSASGAAVNVRFLSVDDSDTAIGRPSGYELIDNEPVEDVVYDYAPESLNASGPVVTEQLCSHLLKSNCPVTGQPDWGTVLISYTGSAIGRAGLLRYIVSFRQKQDFHEHCVETLFTDLLNRCKPQSLTVCARYTRRGGLDINPWRSTEPEEQVGPRLIRQ

SEQ ID NO: 47838 - protein, 291 aa, Oceanospirillum linum
  misc_feature (1)..(291): tr|A0A1T1HA89|A0A1T1HA89_OCELI NADPH-dependent 7-cyano- 7-deazaguanine reductase OS=Oceanospirillum linum OX=96 6 GN=queF PE=3 SV=1
MMSDSKQVHRDEQASPETSLLGKETQYVDQYDAGLLFPIPRQPKRDEIGLGQLDAEEGGLPFFGQDIWNAFELSWLNAKGKPEVAVAVFRIPADSENIIESKSFKLYLNSFNQTKLSGCHELQATLEKDLSSAAGAPVMVELHGLDGAIALQVVEPKGRCIDGLDIEVSHYHPEPSLLKNQSELIVEETLYSHLLRSNCPVTGQPDWATVEISYTGKKIDKAGLLAYIISFRQHNDFHEQCVERMFVDLSQRCKPEELTVVARYTRRGGLDINPWRSSNRPDLENRRFVRQ

SEQ ID NO: 47839 - protein, 284 aa, Oceanospirillum multiglobuliferum
  misc_feature (1)..(284): tr|A0A1T4KKD4|A0A1T4KKD4_9GAMM NADPH-dependent 7-cyano- 7-deazaguanine reductase OS=Oceanospirillum multiglobul iferum OX=64969 GN=queF PE=3 SV=1
MTEQSKQAQVEDSLLGKQTEYVDQYDPSLLFPIPRQPKRDDIQLSAISQSEKLPFFGQDIWNAFELSWLNPKGKPEVAVATFRVPASSPNIIESKSFKLYLNSFNQTRLTSTSELQTRLEQDLSAAAGDAVLVELYSMKEAKYLQVAPASGRCIDDLDIEVQHYHPEPKLLKTQSDLIVEEQLHSHLLRSNCPVTGQPDWATVLVRYKGKKIDKAGLLAYIISFRLHNDFHEQCVERMYVDIMQHCEPEELTVEARYTRRGGLDINPWRSSNLPDLANNRLLRQ

SEQ ID NO: 47840 - protein, 281 aa, Oceanospirillum sp.
  misc_feature (1)..(281): tr|A0A2D5GF03|A0A2D5GF03_9GAMM NADPH-dependent 7-cyano- 7-deazaguanine reductase OS=Oceanospirillum sp. OX=2021 254 GN=queF PE=3 SV=1
MTITANPEHSPLGKTTEYVDQYDPSLLYPIPRADKRDEIGLPEISPEGKLPFFGQDIWNAFELSWLNPKGKPQAAVAVFRIPASSPNIIESKSFKLYLNSFNQTKLAEQSELQSRLEKDLSEAAGETVVVELYSLEEAQALQIEQPQGRCIDDLDIEIEHYHPQPDLLKTQSDLVVEEQLYSHLLRSNCPVTGQPDWATVHVSYKGAKIDKAGLLAYIVSFRQHNDFHEQCVERMFVDITQRCQPEELTVVARYTRRGGLDINPWRSSNRPDMDNQRLIRQ

SEQ ID NO: 47841 - protein, 155 aa, Ochrobactrum anthropi
  misc_feature (1)..(155): tr|A0A137XRS0|A0A137XRS0_OCHAN NADPH-dependent 7-cyano- 7-deazaguanine reductase OS=Ochrobactrum anthropi OX=52 9 GN=queF PE=3 SV=1
MSEKTIYSDLKQLGSNASIPQSPEEAILERVANPQAGTPYCVRFTAPEFTSLCPMTGQPDFAHLVIDYVPGQWLVESKSLKLFLFSFRNHGAFHEDCTVTIGKRLVELLEPEWLRIGGYWYPRGGIPIDVFFQTGAAPQNVWIPEQGVPNYRGRG

SEQ ID NO: 47842 - protein, 155 aa, Ochrobactrum anthropi
  misc_feature (1)..(155): tr|A0A011UH82|A0A011UH82_OCHAN NADPH-dependent 7-cyano- 7-deazaguanine reductase OS=Ochrobactrum anthropi OX=52 9 GN=queF PE=3 SV=1
MSEKTIYSDLKQLGSNASIPQNPEDAILERVANPQAGTPYCVRFTAPEFTSLCPMTGQPDFAHLVIDYVPGQWLVESKSLKLFLFSFRNHGAFHEDCTVTIGKRLVELLEPEWLRIGGYWYPRGGIPIDVFFQTGAAPQNVWIPEQGVPNYRGRG

SEQ ID NO: 47843 - protein, 155 aa, Ochrobactrum cytisi
  misc_feature (1)..(155): tr|A0A1J6IJY3|A0A1J6IJY3_9RHIZ NADPH-dependent 7-cyano- 7-deazaguanine reductase OS=Ochrobactrum cytisi OX=4071 52 GN=queF PE=3 SV=1
MSEKTIYSDLKQLGSNASIPQNPEDAILERVANPQAGTPYCVRFTAPEFTSLCPMTGQPDFAHLVIDYVPGQWLVESKSLKLLLFSFRNHGAFHEDCTVTIGKRLVELLEPEWLRIGGYWYPRGGIPIDVFFQTGAAPQNVWIPEQGVPNYRGRG

SEQ ID NO: 47844 - protein, 155 aa, Ochrobactrum gallinifaecis
  misc_feature (1)..(155): tr|A0A502BNI0|A0A502BNI0_9RHIZ NADPH-dependent 7-cyano- 7-deazaguanine reductase OS=Ochrobactrum gallinifaecis OX=215590 GN=queF PE=3 SV=1
MSEKTIYSDLKQLGSSSSIPQSPEQAILERVEKPQAGTPYCVRFTAPEFTSLCPMTGQPDFAHLMIDYVPGKWLVESKSLKLFLFSFRNHGAFHEDCTVTIGKRLVELLEPEWLRIGGYWYPRGGIPIDIFYQTGEAPRNVWIPEQSVPNYRGRG

SEQ ID NO: 47845 - protein, 91 aa, Ochrobactrum grignonense
  misc_feature (1)..(91): tr|A0A256FLI1|A0A256FLI1_9RHIZ NADPH-dependent 7-cyano- 7-deazaguanine reductase OS=Ochrobactrum grignonense OX =94627 GN=queF PE=3 SV=1
MIDYVPGEWLVESKSLKLFLFSFRNHGAFHEDCTVTIGKRLVDLLEPEWLRIGGYWYPRGGIPIDVFYQTGATPQNVWIPEQSVPNYRGRG

SEQ ID NO: 47846 - protein, 155 aa, Ochrobactrum haematophilum
  misc_feature (1)..(155): tr|A0A397L123|A0A397L123_9RHIZ NADPH-dependent 7-cyano- 7-deazaguanine reductase OS=Ochrobactrum haematophilum OX=419474 GN=queF PE=3 SV=1
MSENTIYSGLTQLGKEASIPASPEEAVLEKVANPQHGTRYCVRFTAPEFTSLCPMTGQPDFAHLVIDYVPDRWLVESKSLKLFLFSFRNHGVFHEDCTVTIGKRLVDLLQPEWLRIGGYWYPRGGIPIDVFFQTGAAPQDVWIPEQAVANYRGRG

SEQ ID NO: 47847 - protein, 155 aa, Ochrobactrum haematophilum; identical to SEQ ID NO: 44794
  misc_feature (1)..(155): tr|A0A2P9HNC4|A0A2P9HNC4_9RHIZ NADPH-dependent 7-cyano- 7-deazaguanine reductase OS=Ochrobactrum haematophilum OX=419474 GN=queF PE=3 SV=1

SEQ ID NO: 47848 - protein, 156 aa, Ochrobactrum intermedium
  misc_feature (1)..(156): tr|U4V9D7|U4V9D7_9RHIZ NADPH-dependent 7-cyano-7-deazag uanine reductase OS=Ochrobactrum intermedium 229E OX=13 37887 GN=queF PE=3 SV=1
MSEKTIYSDLKQLGSHASVPQKPEDAVLERVANPQAGTPYCVRFTAPEFTSLCPMTGQPDFAHLVIDYVPGQWLVESKSLKLFLFSFRNHGAFHEDCTVTIGKRLVDLLEPEWLRIGGYWYPRGGIPIDVFFQTGAAPPQNVWIPEQGVPNYRGRG

SEQ ID NO: 47849 - protein, 155 aa, Ochrobactrum intermedium
  misc_feature (1)..(155): tr|C4WK76|C4WK76_9RHIZ NADPH-dependent 7-cyano-7-deazag uanine reductase OS=Ochrobactrum intermedium LMG 3301 O X=641118 GN=queF PE=3 SV=1
MSEKTIYSDLKQLGSHASVPQKPEDAVLERVANPQAGTPYCVRFTAPEFTSLCPMTGQPDFAHLVIDYVPGQWLVESKSLKLFLFSFRNHGAFHEDCTVTIGKRLVDLLEPEWLRIGGYWYPRGGIPIDVFFQTGAAPQNVWIPEQGVPNYRGRG

SEQ ID NO: 47850 - protein, 155 aa, Ochrobactrum lupini; identical to SEQ ID NO: 47842
  misc_feature (1)..(155): tr|A0A256H044|A0A256H044_9RHIZ NADPH-dependent 7-cyano- 7-deazaguanine reductase OS=Ochrobactrum lupini OX=2554 57 GN=queF PE=3 SV=1

SEQ ID NO: 47851 - protein, 155 aa, Ochrobactrum oryzae
  misc_feature (1)..(155): tr|A0A2S7IY65|A0A2S7IY65_9RHIZ NADPH-dependent 7-cyano- 7-deazaguanine reductase OS=Ochrobactrum oryzae OX=3352 86 GN=queF PE=3 SV=1
MSEKTIYSDLKQLGSNASIPQNPEDAILERVINPQAGTAYCVRFTAPEFTSLCPMTGQPDFAHLVIDYVPGQWLVESKSLKLFLFSFRNHGAFHEDCTVTVGKRLVDLLEPEWLRIGGYWYPRGGIPIDVFFQTGATPQDVWIPEQGVANYRGRG

SEQ ID NO: 47852 - protein, 155 aa, Ochrobactrum pecoris
  misc_feature (1)..(155): tr|A0A5C5CK57|A0A5C5CK57_9RHIZ NADPH-dependent 7-cyano- 7-deazaguanine reductase OS=Ochrobactrum pecoris OX=867 683 GN=queF PE=3 SV=1
MSEKTIYSDLKQLGSNTSIPHAPDEAVLERVANPQAGTPYCVRFTAPEFTSLCPMTGQPDFAHLVIDYVPAQWLVESKSLKLFLFSFRNHGAFHEDCTVTIGKRLVELLEPEWLRIGGYWYPRGGIPIDVFFQTGAAPQNVWIPEQGVPNYRGRG

SEQ ID NO: 47853 - protein, 101 aa, Ochrobactrum pseudogrignonense
  misc_feature (1)..(101): tr|A0A256GUT6|A0A256GUT6_9RHIZ NADPH-dependent 7-cyano- 7-deazaguanine reductase OS=Ochrobactrum pseudogrignone nse OX=419475 GN=queF PE=3 SV=1
MTGQPDFAHLMIDYVPGKWLVESKSLKLFLFSFRNHGAFHEDCTVTIGKRLVELLDPEWLRIGGYWYPRGGIPIDVFYQTGETPKNVWIPEQSVPNYRGRG

SEQ ID NO: 47854 - protein, 155 aa, Ochrobactrum pseudogrignonense
  misc_feature (1)..(155): tr|A0A1A9FLC1|A0A1A9FLC1_9RHIZ NADPH-dependent 7-cyano- 7-deazaguanine reductase OS=Ochrobactrum pseudogrignone nse OX=419475 GN=queF PE=3 SV=1
MSEKTIYSDLKQLGSNSTIPQSPEEAVLERVANPQAGTPYCVRFTAPEFTSLCPMTGQPDFAHLMIDYVPGKWLVESKSLKLFLFSFRNHGAFHEDCTVTIGKRLVELLDPEWLRIGGYWYPRGGIPIDVFYQTGETPKNVWFPEQSVPNYRGRG

SEQ ID NO: 47855 - protein, 155 aa, Ochrobactrum quorumnocens
  misc_feature (1)..(155): tr|A0A248UFA8|A0A248UFA8_9RHIZ NADPH-dependent 7-cyano- 7-deazaguanine reductase OS=Ochrobactrum quorumnocens O X=271865 GN=queF PE=3 SV=1
MSEKTIYSDLKQLGSTAAVPQSPEEAVLERVANPQAGTPYCVRFTAPEFTSLCPMTGQPDFAHLMIDYVPGEWLVESKSLKLFLFSFRNHGAFHEDCTVTIGKRLVELLKPEWLRIGGYWYPRGGIPIDVFYQTGAAPQNVWIPEQSVPNYRGRG

SEQ ID NO: 47856 - protein, 155 aa, Ochrobactrum rhizosphaerae
  misc_feature (1)..(155): tr|A0A256FII6|A0A256FII6_9RHIZ NADPH-dependent 7-cyano- 7-deazaguanine reductase OS=Ochrobactrum rhizosphaerae OX=571254 GN=queF PE=3 SV=1
MSEKTIYSDLQQLGSNTTVPQSPEEAVLERVANPQAGTPYCIRFTAPEFTSLCPMTGQPDFAHLMIDYVPGEWLVESKSLKLFLFSFRNHGAFHEDCTVTIGKRLVELLQPEWLRIGGYWYPRGGIPIDVFYQTGAAPQNVWIPEQSVPNYRGRG

SEQ ID NO: 47857 - protein, 155 aa, Ochrobactrum sp.
  misc_feature (1)..(155): tr|A0A4R7WVW4|A0A4R7WVW4_9RHIZ NADPH-dependent 7-cyano- 7-deazaguanine reductase OS=Ochrobactrum sp. LP_5_YM OX =2485134 GN=queF PE=3 SV=1
MSEKTVYSDLKQLGSSASIPQSPEEAVLERVANPQAGTPYCVRFTAPEFTSLCPMTGQPDFAHLMIDYVPGEWLVESKSLKLFLFSFRNHGAFHEDCTVTIGKRLVQLLKPEWLRIGGYWYPRGGIPIDVFYQTGAAPQNVWIPEQSVPNYRGRG

SEQ ID NO: 47858 - protein, 155 aa, Ochrobactrum sp.
  misc_feature (1)..(155): tr|A0A4R2Y600|A0A4R2Y600_9RHIZ NADPH-dependent 7-cyano- 7-deazaguanine reductase OS=Ochrobactrum sp. BH3 OX=586 218 GN=queF PE=3 SV=1
MSEKTIYSDLKQLGSNSTVPQSPEEAVLERVANPQAGTPYCIRFTAPEFTSLCPMTGQPDFAHLMIDYVPGEWLVESKSLKLFLFSFRNHGAFHEDCTVTIGKRLVELLQPEWLRIGGYWYPRGGIPIDVFYQTGAAPQNVWIPEQSVPNYRGRG

SEQ ID NO: 47859 - protein, 155 aa, Ochrobactrum thiophenivorans
  misc_feature (1)..(155): tr|A0A256FWZ9|A0A256FWZ9_9RHIZ NADPH-dependent 7-cyano- 7-deazaguanine reductase OS=Ochrobactrum thiophenivoran s OX=571255 GN=queF PE=3 SV=1
MSEKTIYSELKQLGSNTIAPQSPEEAVLERVANPQAGTPYCVRFTAPEFTSLCPMTGQPDFAHLMIDYVPGNWLVESKSLKLFLFSFRNHGAFHEDCTVTIAKRLVELLEPQWLRIGGYWYPRGGIPIDVFYQTGETPKNVWIPEQSVPNYRGRG

SEQ ID NO: 47860 - protein, 155 aa, Unknown
  misc_feature (1)..(155): tr|A0A2A4Z375|A0A2A4Z375_9PROT NADPH-dependent 7-cyano- 7-deazaguanine reductase OS=OCS116 cluster bacterium OX =2030921 GN=queF PE=3 SV=1
MSKEDIYKNLKSLGSHTELPTDPEQDILERVQNPQADVDYAVRFTAPEFTSLCPMTGQPDFAHLVIDYIPGDWLVESKSLKLYLGAFRNHGAFHEDCTVSIARKLADLLDPKWLRIGGYWYPRGGIPIDVFYQTGEIPAGVWVQDQGVPTYRGRG

SEQ ID NO: 47861 - protein, 291 aa, Odoribacter laneus
  misc_feature (1)..(291): tr|R5UVN9|R5UVN9_9BACT Queuine synthase OS=Odoribacter laneus CAG:561 OX=1263089 GN=BN709_00111 PE=4 SV=1
MEEEKLLGKSIAYPKTYCPDILVAVPRHLNREIYQIDPATSFFYGYDSWHCYEASFLTSNGLPVSGILKLVYPAESEYLVESKSLKLYLGSFQMYRLEDTVEESISLFCRKVAEDLGKCLHTSVGIHFYSNSPANLPFDFSDYEILENLPGISQCIFADYQENPVLLKENCSLSPGEIKVGSHLLKSNCKITRQPDWGSIYIRMKASSLPDRFSLLKYIVSLRDENHFHEEVCEMVFKRLTDFFHPEILSVGCLYTRRGGIDICPVRANRPEYLPLYLPCPDILTQKEFRQ

SEQ ID NO: 47862 - protein, 291 aa, Odoribacter laneus
  misc_feature (1)..(291): tr|H1DFR4|H1DFR4_9BACT Queuine synthase OS=Odoribacter laneus YIT 12061 OX=742817 GN=HMPREF9449_01100 PE=4 SV= 1
MEEEKLLGKSIAYPKTYCPDILVAVPRHLNREIYQIDPATSFFYGYDSWHCYEASFLTSNGLPVSGILKLVYPAESEYLVESKSLKLYLGSFQMYRLEDTVEESISLFCRKVAEDLGKCLHTSVGIHFYSNSPANLPFDFSDYEILENLPGISQCIFADYQENPVLLKENCSLSPGEIKVGSHLLKSNCKITRQPDWGSIYIRMKASSLPDRFSLLKYIVSLRDENHFHEEVCEMVFKRLTDFFYPEILSVGCLYTRRGGIDICPVRANRPEYLPLYLPCPDILTQKEFRQ

SEQ ID NO: 47863 - protein, 292 aa, Odoribacter sp.
  misc_feature (1)..(292): tr|R5P9N6|R5P9N6_9BACT Queuine synthase OS=Odoribacter sp. CAG:788 OX=1262909 GN=BN783_02392 PE=4 SV=1
MQEESKLLGKEIAYPETYCPEILVAVPRRLNREIYGIDRPDSLFCGYDSWHCYEASFLTKQGLPVAGILKLVYASTSEFLVESKSLKLYLGSFNMICLGDSVAEGIAVFKATVARDLSALLHTSVETAFFQTLPDSRPFDFPEYTLLETLPRIAAASFSAYQENPAYLSENVIKYGGEMLVCSHLLKSNCKITHQPDWGSIYIRIKAAHLPDELSLLKYIVSLRDENHFHEEICEMTFKRLTDIFNPEILTVCCLYTRRGGIDICPVRANKAEFIPACLPRADILTASAFRQ

SEQ ID NO: 47864 - protein, 291 aa, Odoribacter sp.
  misc_feature (1)..(291): tr|A0A1Q6IDY0|A0A1Q6IDY0_9BACT NADPH-dependent 7-cyano- 7-deazaguanine reductase QueF OS=Odoribacter sp. 43_10 OX=1897010 GN=BHV82_16235 PE=4 SV=1
MTTEDKLLGKQVEYPQHYCPAILVAVPRRQNREIYGIDHPDHLFCGYDSWHAYEASFILDNGIPVAGMLKITYPASSPSIVESKSLKLYLGSFHMEALGKTLGQAVDRFVATVAADLSALLCTEVKVHFYEDAPSFLPFDFNDYTLLEKEPDTYALQFSVYQENPALLTENIQEAGELKVCSHLLKSNCKITRQPDWGSLYIHLKGRTQPAYASLLKYIVSLRNENHFHEEICEMTFKRLSDLFQPEILMVSCLYTRRGGIDICPCRANKPDYLPHYLPQADILTQRNFRQ

SEQ ID NO: 47865 - protein, 291 aa, Odoribacter splanchnicus
  misc_feature (1)..(291): tr|R6FDY6|R6FDY6_9BACT 7-cyano-7-deazaguanine reductase OS=Odoribacter splanchnicus CAG:14 OX=1263090 GN=BN493 _02204 PE=4 SV=1
MTTEDKLLGKQVEYPQHYCPAILVAVPRRLNREIYGIDHPDRLFCGYDSWHAYEASFILDNGIPVAGMLKITYPASSPSIVESKSLKLYLGSFHMEALGKTLGQAVDRFVATVAADLSALLCTEVKVHFYEDVPSFLPFDFNDYTLLEKEPDTYALQFSVYQENPALLTENIQEAGELKVCSHLLKSNCKITRQPDWGSLYIHLKGRTQPAYASLLKYIVSLRNENHFHEEICEMTFKRLSDLFQPEILMVSCLYTRRGGIDICPCRANKPDYLPHYLPQADILTQRNFRQ

SEQ ID NO: 47866 - protein, 291 aa, Odoribacter splanchnicus; identical to SEQ ID NO: 47864
  misc_feature (1)..(291): tr|A0A412TJ75|A0A412TJ75_9BACT NADPH-dependent 7-cyano- 7-deazaguanine reductase QueF OS=Odoribacter splanchnic us OX=28118 GN=DWW57_18330 PE=4 SV=1

SEQ ID NO: 47867 - protein, 144 aa, Okeania hirsuta
  misc_feature (1)..(144): tr|A0A3N6NQB9|A0A3N6NQB9_9CYAN NADPH-dependent 7-cyano- 7-deazaguanine reductase OS=Okeania hirsuta OX=1458930 GN=queF PE=3 SV=1
MNYSETNHELSQEFNMQEAKYGERNILEGELITFPNPRVGRRYEINITLPEFTCKCPFSGYPDFATIDVKYVPNERVVELKALKLYINSYRDRYISHEESVNQILDDLVAACDPLEVKIKANFYPRGNVHTTIEVEHYKENLDK

SEQ ID NO: 47868 - protein, 275 aa, Oleiagrimonas soli
  misc_feature (1)..(275): tr|A0A099CYM1|A0A099CYM1_9GAMM NADPH-dependent 7-cyano- 7-deazaguanine reductase OS=Oleiagrimonas soli OX=15433 81 GN=queF PE=3 SV=1
MTTPEDSQLGKATAYRNRYAPDLLFPIPRSKGRAELGLRGELPFQGVDLWNAYELSWLDPRGKPMVALAEFHVPADSPAIIESKSFKLYLNSFSGERLDEATLRNRLARDLGDAAGAPVAVHLTPASAFPAQRIEEPEGLLIDALEIDIDVYGPPDPSFLRADTAAAPVRETLLSNLLKSNCPVTGQPDWASLRIDYVGAPIDREGLLRYVVSFREHREFHEHCVERIFMDLLRHCAPTQLDVGARYTRRGGLDINPFRSSEPGRTPGNPRGARQ

SEQ ID NO: 47869 - protein, 275 aa, Oleiagrimonas sp.
  misc_feature (1)..(275): tr|A0A328T1H8|A0A328T1H8_9GAMM NADPH-dependent 7-cyano- 7-deazaguanine reductase OS=Oleiagrimonas sp. MCCC 1A03 011 OX=1926883 GN=queF PE=3 SV=1
MTTPEDSQLGKATAYRNRYAPDLLFPIPRSKGRAELGLHGNLPFQGVDIWNAYELSWLDPRGKPVVALAEFHVPSDSPAIIESKSFKLYLNSFSGERLDEATLVERLARDLGEAAGAPVAVHLTPAADFGAQRIEEPEGVLIDALDLDIDVYGPPDPSFLRADTNAAPVRETLLSNLLKSNCPVTGQPDWASLRIDYVGAPIDREGLLRYIVSFREHREFHEHCVERIFMDLIRHCAPARLDVSARYTRRGGLDINPFRSSESGHTPGNPRGARQ

SEQ ID NO: 47870 - protein, 275 aa, Oleibacter marinus
  misc_feature (1)..(275): tr|A0A1N7PFR4|A0A1N7PFR4_9GAMM NADPH-dependent 7-cyano- 7-deazaguanine reductase OS=Oleibacter marinus OX=48449 8 GN=queF PE=3 SV=1
MMGSVHSETNPLGKTSEYPEQYDAGLLFPIDRNESWKASGDDRSAITFYGVDIWNGYEVSWLTPNGKPVVCVAEFRVPSGSPFLVESKSFKLYLNSFNQTRFENESDVKAVMERDLSLAAGGAVTVAFHGMDYAYPAAPDALCIDDVDVDISSYTPSPELLKVVPDSQFDGWICSHLLKSNCPVTGQPDWGSVYIQYKGQEIDKASLLAYLVSLRQHQDFHEQCVERTFRDIQQRCTPESLTVYARYVRRGGLDINPFRTTEETFEALNFRLQRQ

SEQ ID NO: 47871 - protein, 273 aa, Oleibacter sp.
  misc_feature (1)..(273): tr|A0A2D8AAC5|A0A2D8AAC5_9GAMM NADPH-dependent 7-cyano- 7-deazaguanine reductase OS=Oleibacter sp. OX=2024845 G N=queF PE=3 SV=1
MASVTSEHNPLGKSSEYRDQYDASLLFPIEREESWKAHGLDRHEVPFFGEDIWNGYEISWLNLKGKPLVALAEFRIPASSRYLVESKSFKLYLNSFNQTRFENGSDVRQLMEKDLSAAVGAQVKVVFHPVYHVFPDAPEALCIDNLDIEVSSYELDDSLLQCGEGQFDGWICSHLLKSNCPVTGQPDWGSLFIRYKGPRIDEAGLLAYIVSLRQHQDFHEHCVERTFRDLWLKCKPESLTVYARYVRRGGLDINPFRTSEDSGEAVNFRLPRQ

SEQ ID NO: 47872 - protein, 281 aa, Oleiphilus messinensis
  misc_feature (1)..(281): tr|A0A1Y0IAB9|A0A1Y0IAB9_9GAMM NADPH-dependent 7-cyano- 7-deazaguanine reductase OS=Oleiphilus messinensis OX=1 41451 GN=queF PE=3 SV=1
MSELKNAPLGKQTLYVSEYDPSLLFPIARALNREELNIGTELPFFGIDLWTGYELSWLDYQGKPQVAIAVFRFPCESRYIIESKSFKLYLNSYNQTRFASSHEVRVQLQKDLAGAVGCAVSVDVHPVSRYLTGEGRDTPSNALDQFVLLDELDVTIDDYQYNPQHLSLNEGSQSGHYRYLSHLLKSNCPVTGQPDWATVYIDLQGEAPDPEGLLKYIISFREYQDFHEHCVEKIYVDLMRHLQPQELTVWARYTRRGGMDINPYRSSSNTRQFDFSRTERQ

SEQ ID NO: 47873 - protein, 290 aa, Oleiphilus messinensis
  misc_feature (1)..(290): tr|A0A1H5YQ52|A0A1H5YQ52_9GAMM NADPH-dependent 7-cyano- 7-deazaguanine reductase OS=Oleiphilus messinensis OX=1 41451 GN=queF PE=3 SV=1
MSDSKQVHRDEQASPETSLLGKETQYVDQYDAGLLFPIPRQPKRDEIGLGQLDAEEGGLPFFGQDIWNAFELSWLNAKGKPEVAVAVFRIPADSENIIESKSFKLYLNSFNQTKLSGCHELQATLEKDLSSAAGAPVMVELHGLDGAIALQVVEPKGRCIDGLDIEVSHYHPEPSLLKNQSELIVEETLYSHLLRSNCPVTGQPDWATVEISYTGKKIDKAGLLAYIISFRQHNDFHEQCVERMFVDLSQRCKPEELTVVARYTRRGGLDINPWRSSNRPDLENRRFVRQ

SEQ ID NO: 47874 - protein, 277 aa, Oleispira antarctica
  misc_feature (1)..(277): tr|R4YN33|R4YN33_OLEAN NADPH-dependent 7-cyano-7-deazag uanine reductase OS=Oleispira antarctica RB-8 OX=698738 GN=queF PE=3 SV=1
MASVHSENNPLGKNSAYIDRYDPTLLFPISRAEGWSSVGIERDSLPFFGEDVWNGYEVSWLNDKGIPQVAMAEFRLPATSPFLIESKSFKLYLNSYNQTKFANKEMVEQRMEKDLSAAAGGGVSVDILSLQYRFPAEPKSVCIDDLDISMDKYELDPEILTLATGAEAGDFEGLLVSHLLKSNCPVTGQPDWGSIYIEYKGAHIDEKSLLTYIVSLRTHQDFHEQCVERTFWDIWTRCQPESLTVYARYVRRGGLDINPMRSSDKSKQAVNFRTIRQ

SEQ ID NO: 47875 - protein, 266 aa, Oleispira antarctica
  misc_feature (1)..(266): tr|A0A1Y5I2T3|A0A1Y5I2T3_OLEAN NADPH-dependent 7-cyano- 7-deazaguanine reductase (Fragment) OS=Oleispira antarc tica OX=188908 GN=A9R00_00955 PE=3 SV=1
GKNSAYIDSYDATLLFPISRAESWKAAGIERNTLPFFGEDIWNGYEISWLNDKGIPQVAMAEFRLPATSPFLIESKSFKLYLNSYNQTRFANKETVERRMVRDLSAAAGGEVKVVILPLNYSFPTEPKAVCIDALDISMDKYELDPEVLKLAEGEEAGEYQGMLVSHLLKSNCPVTGQPDWGSIYIEYKGAHIDEKSLLTYLVSLRTHQDFHEQCVERTFWDIWTRCKPESLTVYARYVRRGGLDINPMRSSDSSKAAINFRTIRQ

SEQ ID NO: 47876 - protein, 277 aa, Oleispira sp.
  misc_feature (1)..(277): tr|A0A2E3BEP7|A0A2E3BEP7_9GAMM NADPH-dependent 7-cyano- 7-deazaguanine reductase OS=Oleispira sp. OX=2024846 GN =queF PE=3 SV=1
MASVHSDSNPLGKSSAYIDSYDATLLFPISRAESWKASGIDRDTLPFFGEDIWNGYEISWLNDKGIPQVAMAEFRLPATSPFLIESKSFKLYLNSYNQTRFANKETVEQRMIRDLSAASGGDVKVVILPLNHSFPAEPKALCIDDLDISMDKYELDPSVLALSKGDEAGEFQGMLVSHLLKSNCPVTGQPDWGSIYIEYKGAHIDEATLLTYLVSLRTHQDFHEQCVERTFWDIWTRCKPESLTVYARYVRRGGLDINPMRSSEASKPAINFRTIRQ

SEQ ID NO: 47877 - protein, 150 aa, Oleomonas sp.
  misc_feature (1)..(150): tr|A0A418WEZ9|A0A418WEZ9_9PROT NADPH-dependent 7-cyano- 7-deazaguanine reductase OS=Oleomonas sp. K1W22B-8 OX=2 320859 GN=queF PE=3 SV=1
MTTDLHLLGHHANLPASPGEAVLERIANPHPETDYLVRFVCPEFTSLCPVTGQPDFAHLVIDYVPDGWLVESKALKLYMGSFRNHGAFHEDCTVGIGKRLVAELAPKWLRIGGYWYPRGGIPIDVFYATGPAPQGLWLPDQGVAPYRGRG

SEQ ID NO: 47878 - protein, 286 aa, Oligella ureolytica
  misc_feature (1)..(286): tr|A0A378XJB1|A0A378XJB1_9BURK NADPH-dependent 7-cyano- 7-deazaguanine reductase OS=Oligella ureolytica OX=9024 4 GN=queF PE=3 SV=1
MTNKITDSNLGQDTQYPEQYDPTLLFPIARAETRQGSPAEKTPAWIGGDIWTAFEVSWLDSKGKPIVAIASFEFPQTNRYLIESKSFKLYLNSFNQSKFNSAEEVVALFEQDLSKASGGTVKVDIKLSHEWNNCQLINIPGTSVDELEVEIDTYEPNASLLQLKDETGDDSVQVNILYSNLLKSNCPVTNQPDWGTVIVAYKGKTIDPAAFLKYIVSYRLHNGFHELCVEEIYCDLLTQCAPDELFVMARYTRRGGLDINPWRASSEEIIEAVKELVAPFNRLARQ

SEQ ID NO: 47879 - protein, 290 aa, Oligella urethralis
  misc_feature (1)..(290): tr|A0A095ZBG8|A0A095ZBG8_9BURK NADPH-dependent 7-cyano- 7-deazaguanine reductase OS=Oligella urethralis DNF0004 0 OX=1401065 GN=queF PE=3 SV=1
MPKQISDSNLGQTTQYPNQYDPSLLFPIARVVTREDSRAANTPNWIGADLWTAYEISWLDSRGKPVVAIASFDFAVSNPYLIESKSFKLYLNSFNQSKFDAPEQVIERMTKDLSQAAGGKVTIQLLSPQAWQDAQIIEPLGDCVDDLAISIDCYDANPALLQLLDSETDAEGEQAEQARILYSNLLKSNCPVTNQPDWGTVIIAYQGQTIDPAAFLRYIVSYRQHNGFHELCVEEIYCDLMKYCAPEALFVMARYTRRGGLDINPWRASSQAIIKGMEQLLTPFNRLARQ

SEQ ID NO: 47880 - protein, 290 aa, Oligella urethralis
  misc_feature (1)..(290): tr|A0A2N6QF07|A0A2N6QF07_9BURK NADPH-dependent 7-cyano- 7-deazaguanine reductase OS=Oligella urethralis OX=9024 5 GN=queF PE=3 SV=1
MPKQISDSNLGQTTQYPNQYDPSLLFPIARVVTREDSRAANTPNWIGADLWTAFEISWLDSRGKPVVAIASFDFAVSNPYLIESKSFKLYLNSFNQSKFDAPEQVIERMTKDLSQAAGGKVTIQLLSPQAWQDAQIIEPLGDCVDDLAISIDCYDANPALLQLLDSETDAEGEQAEQARILYSNLLKSNCPVTNQPDWGTVIIAYQGQTIDPAAFLRYIVSYRQHNGFHELCVEEIYCDLMKYCAPEALFVMARYTRRGGLDINPWRASSQAIIKGMEQLLTPFNRLARQ

SEQ ID NO: 47881 - protein, 158 aa, Oligotropha carboxidovorans
  misc_feature (1)..(158): tr|B6JFY3|B6JFY3_OLICO NADPH-dependent 7-cyano-7-deazag uanine reductase OS=Oligotropha carboxidovorans (strain ATCC 49405 / DSM 1227 / KCTC 32145 / OM5) OX=504832 GN =queF PE=3 SV=1
MSRKPRPAATKAPLQLGRPVTLPASPEEAKLDRVPNPHAGTDYLVRFAAPEFTSLCPITGQPDFAHLVIDYVPGNWLVESKALKLYLASFRNHGAFHEDCTVAIGQRLVREIKPRWLRIGGYWYPRGGIPIDVFWQSGRLPKNVWVPDQGVPPYRGRG

SEQ ID NO: 47882 - protein, 162 aa, Olsenella sp.
  misc_feature (1)..(162): tr|A0A1T4LR25|A0A1T4LR25_9ACTN NADPH-dependent 7-cyano- 7-deazaguanine reductase OS=Olsenella sp. KH1P3 OX=1945 884 GN=queF PE=3 SV=1
MSEAGRSETELDGVTLLGNQNTTYRDDYAPEVLETFVNKHQDRDYMVTFECPEFTTLCPKTGQPDFGTIYINYIPNVRMVESKSLKLYLFSFRNHGDFHEDVVNIIMDDLVRLMEPRYIEVFGKFRPRGGISILPFANWANPEFGYGDLVTRRQFEQLGGHE

SEQ ID NO: 47883 - protein, 162 aa, Olsenella umbonata; identical to SEQ ID NO: 47882
  misc_feature (1)..(162): tr|A0A1H9P5I7|A0A1H9P5I7_9ACTN NADPH-dependent 7-cyano- 7-deazaguanine reductase OS=Olsenella umbonata OX=60433 0 GN=queF PE=3 SV=1

SEQ ID NO: 47884 - protein, 278 aa, Unknown
  misc_feature (1)..(278): tr|A0A520S0M5|A0A520S0M5_9GAMM NADPH-dependent 7-cyano- 7-deazaguanine reductase QueF OS=OM182 bacterium OX=251 0334 GN=queF PE=4 SV=1
MERMCSSMVSSLGSDTTDYVTSYRPSLLESVKRTDQRCKLGLKGEQLPFEGYDVWNAYEFTWLNSRGKPEVALVQLKIPVTSTYIVESKSLKLYFCSFSNTSFQDQVKVIETLKADLSEAFGGSVSVTLKNPDQIFREGINIQGGESIDDLDIDISEYHIRPEYLDMEAEVSGAEMLYSDLFMSLCPITGQPDYATVFVNYSGPLISHRGLLCYLVSYREHADFAEQICERIFMDLIERCNLEALSVGLQFSRRGGIDINAYRMSGIKAPTFVRNWRQ

SEQ ID NO: 47885 - protein, 248 aa, Unknown
  misc_feature (1)..(248): tr|A0A0R2SBW1|A0A0R2SBW1_9GAMM QueF_N domain-containing protein OS=OM182 bacterium BACL3 MAG-120507-bin80 OX=1 655577 GN=ABR69_06310 PE=4 SV=1
MFGFDHWQAFELSWLDSSGKPSVAVAELFFDCRSPAIVESKSLKLYLNSFNHERMASTELLASTIKADLEQASGNVVNVLLHSLGEYRALMAKNFAPRLQDNRTVVALDRLPIIDNVAPLDASVIEFIRLDKAPNALSANKETRYTSDLFRSNCPVTNQPDWASLEIKVTGIEIEGASLLSYLCSFREHQGYHEECAERIFVALSNHCRPDSLQVSMNYLRRGGLDINVYRASEAITHADRLARDVRQ

SEQ ID NO: 47886 - protein, 119 aa, Omnitrophica bacterium
  misc_feature (1)..(119): tr|A0A1G1M9C6|A0A1G1M9C6_9BACT NADPH-dependent 7-cyano- 7-deazaguanine reductase OS=Omnitrophica bacterium RIFO XYB12_FULL_50_7 OX=1801835 GN=queF PE=3 SV=1
MTMQPSKKLEIFKNPYPRRDYNVEMECPEFTCLCPKTGQPDFATIHISYVPDEFCVELKSLKLYLWGYRNEGTFHETVTNKILDDLVKAVKPRHMSIEADFFVRGGIHTVITAAYSKKK

SEQ ID NO: 47887 - protein, 124 aa, Omnitrophica bacterium
  misc_feature (1)..(124): tr|A0A1G1KT77|A0A1G1KT77_9BACT NADPH-dependent 7-cyano- 7-deazaguanine reductase OS=Omnitrophica bacterium RIFC SPLOWO2_12_FULL_44_17 OX=1801832 GN=queF PE=3 SV=1
MSTKPNKNLEVFQNPYSQRNYVINFECPEFTCLCPKTGQPDFATIRIEYIPNKFCVELKSLKLYLWSYRNEGTFHEAVTNQILDDLVKATKPRRMKVVGDFYVRGGIHTVVTAEYSKKAVSTPQ

SEQ ID NO: 47888 - protein, 128 aa, Unknown
  misc_feature (1)..(128): tr|A0A1G1NUI5|A0A1G1NUI5_9BACT NADPH-dependent 7-cyano- 7-deazaguanine reductase OS=Omnitrophica WOR_2 bacteriu m RIFCSPLOWO2_02_FULL_50_19 OX=1801865 GN=queF PE=3 SV= 1
MKRSYTAEHAGKGVKDRLPSIEAFPSFHKGYEIKIEIPEYTSVCPKTGLPDFGTITISYMPDKSCIELKSLKYYILGFRNMGIFYENAVNRILKDVVAACKPKRCIVTGEFNVRGGMKTTVTARYGIK

SEQ ID NO: 47889 - protein, 129 aa, Unknown
  misc_feature (1)..(129): tr|A0A0S8IJH2|A0A0S8IJH2_9BACT NADPH-dependent 7-cyano- 7-deazaguanine reductase OS=Omnitrophica WOR_2 bacteriu m SM23_72 OX=1703777 GN=queF PE=3 SV=1
MKKSSYEGLQKNIRKLKTPRIEIWKNQYPDKIYTIHLDVPEFTCICPKTGLPDFAELKIEYSPNTYCVELKSFKMYTIFYRNIGIFHEHVVNKILDDLVRAVHPRWMKITGIFNPRGGITTTVSAEYNK

SEQ ID NO: 47890 - protein, 127 aa, Opitutaceae bacterium
  misc_feature (1)..(127): tr|A0A178IDL1|A0A178IDL1_9BACT NADPH-dependent 7-cyano- 7-deazaguanine reductase OS=Opitutaceae bacterium TSB47 OX=1184151 GN=queF PE=3 SV=1
MADPKLLETFPNPAPERDYVIEHTHHEFTSLCPMTGHPDFGDIVVRYVPDKTCVELKSLKLYFHAYRNEGAFFEAVTNRICDDLGRALRPRSLAVISQWKARGGFSSIVTAEWKPPAKTASRAKKKR

SEQ ID NO: 47891 - protein, 119 aa, Opitutaceae bacterium
  misc_feature (1)..(119): tr|A0A2T6E172|A0A2T6E172_9BACT NADPH-dependent 7-cyano- 7-deazaguanine reductase OS=Opitutaceae bacterium EW11 OX=2161865 GN=queF PE=3 SV=1
MADPKILETFPNPAPHRDYVIEHTHHEFTSLCPMTGHPDFADITVRYVPDKICVELKSLKLYFHAYRNEGIFFEAATNKICDDLGAALKPRKLTIVADWKARGGFSSVITADWSPKKRR

SEQ ID NO: 47892 - protein, 121 aa, Opitutae bacterium
  misc_feature (1)..(121): tr|A0A2A2QSD8|A0A2A2QSD8_9BACT NADPH-dependent 7-cyano- 7-deazaguanine reductase OS=Opitutae bacterium Tous-C5T DCM OX=1982322 GN=queF PE=3 SV=1
MADPKILELFPNPAPHRDYVIAHTQHEFTSMCPITGHPDFAVITVKFTPDKTCVELKSLKLYLHAFRNEGIFFEAVTNKICDDIGAALKPRALTIIADWKGRGGISSLVTCEWSAKQAKKR

SEQ ID NO: 47893 - protein, 140 aa, Opitutae bacterium
  misc_feature (1)..(140): tr|A0A2D8VCW1|A0A2D8VCW1_9BACT NADPH-dependent 7-cyano- 7-deazaguanine reductase OS=Opitutae bacterium OX=20267 71 GN=queF PE=3 SV=1
MTDQNPEHDDLTRLGEGRTEPSRELETFPNRNPDRDYLVELRTSEFSCLCPKTGQPDFADILIRYVPDQKIVESKSLKLYFWSYRDEGVFHEHFANLLLDDLVGALSPRWCRVEVDFNPRGGIGISVMAEHGAAPEGLEG

SEQ ID NO: 47894 - protein, 139 aa, Opitutales bacterium
  misc_feature (1)..(139): tr|A0A2E7PYD6|A0A2E7PYD6_9BACT NADPH-dependent 7-cyano- 7-deazaguanine reductase OS=Opitutales bacterium OX=202 6772 GN=queF PE=3 SV=1
MIDVNPEHENLSELGKGGTQPQRVLETFPNRNPERDYIVDLHTNEFTCLCPKTGQPDFADIVIRYVPDQKIVESKSLKLYLWSYRDEGVFHEHFANLLLDDLVAAIEPRWCRVEVTFNARGGIGITVSADHGAFPEAAY

SEQ ID NO: 47895 - protein, 124 aa, Opitutales bacterium
  misc_feature (1)..(124): tr|A0A2E6N9S5|A0A2E6N9S5_9BACT NADPH-dependent 7-cyano- 7-deazaguanine reductase OS=Opitutales bacterium OX=202 6772 GN=queF PE=3 SV=1
  misc_feature (15)..(15): Xaa can be any naturally occurring amino acid
  misc_feature (44)..(44): Xaa can be any naturally occurring amino acid
  misc_feature (46)..(46): Xaa can be any naturally occurring amino acid
  misc_feature (58)..(58): Xaa can be any naturally occurring amino acid
  misc_feature (114)..(114): Xaa can be any naturally occurring amino acid
MDIETFPNPNPERNXTIQHIQEEFTSTCPMTGHPDYATVVFSYXPXEVCIELKAMKLXLHSFRNKGIFFEAATNQIFEDLYATCKPRWARLETIWRGRGGIRSNVVVEDSQDSXDGPVTFPFSA

SEQ ID NO: 47896 - protein, 117 aa, Opitutus sp.
  misc_feature (1)..(117): tr|A0A1H1PJ22|A0A1H1PJ22_9BACT NADPH-dependent 7-cyano- 7-deazaguanine reductase OS=Opitutus sp. GAS368 OX=1882 749 GN=queF PE=3 SV=1
MADKKILETFPNPAPQRDYVIEHTHHEFTSVCPMTGHPDFADITVRYVADKKCVELKSLKLYFHAYRNEGIFFEAVTNKICDDLGTVLKPRSLTIISKWKARGGFSSVVTAEWKRKR

SEQ ID NO: 47897 - protein, 124 aa, Opitutus sp.
  misc_feature (1)..(124): tr|A0A2T6CZM4|A0A2T6CZM4_9BACT NADPH-dependent 7-cyano- 7-deazaguanine reductase OS=Opitutus sp. ER46 OX=216186 4 GN=queF PE=3 SV=1
MADPKILETFPNPAPQRDYVIEHTHHEFTSLCPITGHPDFAHITVRYVADKICVELKSLKLYFHAFRNEGIFFEAVTNKICDDLGTVLKPRQLTIIADWKARGGFTSVITAEWKPAARKGRSAR

SEQ ID NO: 47898 - protein, 119 aa, Opitutus terrae
  misc_feature (1)..(119): tr|B1ZQ92|B1ZQ92_OPITP NADPH-dependent 7-cyano-7-deazag uanine reductase OS=Opitutus terrae (strain DSM 11246 / JCM 15787 / PB90-1) OX=452637 GN=queF PE=3 SV=1
MADIKILETFPNPAPARDYVIEHTHHEFTSVCPITGHPDFADITVRYVADKICVELKSLKLYFHAYRNEGIFFEAVTNRICDDLGKVLNPRSLMVISEWKARGGFTSRITAEWKRKRKS

SEQ ID NO: 47899 - protein, 160 aa, Orbus hercynius
  misc_feature (1)..(160): tr|A0A495RDB3|A0A495RDB3_9GAMM NADPH-dependent 7-cyano- 7-deazaguanine reductase OS=Orbus hercynius OX=593135 G N=queF PE=3 SV=1
MSTHHNLALLGDKSARYLIDYTPDVLETFDNKHLNNDYFVKFNCPEFTSLCPVTGQPDFASIYIAYVPNIKMVESKSLKFYLFSFRNHGAFHEDCINIIMQDLIALMDPKYIEVWGKFTPRGGISIDPYANYGKPNTRWQDIAVNRLANHDLYPENIDNR

SEQ ID NO: 47900 - protein, 160 aa, Oribacterium sp.
  misc_feature (1)..(160): tr|A0A1I2PW56|A0A1I2PW56_9FIRM NADPH-dependent 7-cyano- 7-deazaguanine reductase OS=Oribacterium sp. WCC10 OX=1 855343 GN=queF PE=3 SV=1
MRENEDLTLLGNQNVKYKYEYDPSVLESFINKHPDNDYFVKFNCPEFTSLCPITGQPDFATIYISYVPDQKMVESKSLKLYLFSFRNHGDFHEDVVNVIMKDLIKLMDPKYIEVWGKFLPRGGLSIDPYCNYGKKGTSWEKVAWDRLTQHDMYPEKIDNR

SEQ ID NO: 47901 - protein, 160 aa, Oribacterium sp.
  misc_feature (1)..(160): tr|A0A1S9BTK1|A0A1S9BTK1_9FIRM NADPH-dependent 7-cyano- 7-deazaguanine reductase OS=Oribacterium sp. C9 OX=1943 579 GN=queF PE=3 SV=1
MRENEDLTLLGNQQVKYKYEYDPSVLESFNNKHPENDYFVKFNCPEFTSLCPITGQPDFATIYISYVPDKKMVESKSLKLYLFSFRNHGDFHEDVVNVIMKDLIRLMDPKYIEVWGKFLPRGGLSIDPYCNYGKKGTAWEKVAWDRLTQHDMYPEKIDNR

SEQ ID NO: 47902 - protein, 153 aa, Oricola cellulosilytica
  misc_feature (1)..(153): tr|A0A4R0PD13|A0A4R0PD13_9RHIZ NADPH-dependent 7-cyano- 7-deazaguanine reductase OS=Oricola cellulosilytica OX= 1429082 GN=queF PE=3 SV=1
MTDGTDQLSQLGKPVSTPDAPEQAQLERVENPHPDTDYVARFTVPEFTSVCPVTGQPDFAHLVLDYVPDRWLVESKSLKLFLTSFRNHGAFHEDCTVHIGRKLVELLEPRWFRIGGYWYPRGGIPIDVFWQHGKLPEGVWAPDQGVAPYRGRG

SEQ ID NO: 47903 - protein, 278 aa, Orrella dioscoreae
  misc_feature (1)..(278): tr|A0A1C3JZV7|A0A1C3JZV7_9BURK NADPH-dependent 7-cyano- 7-deazaguanine reductase OS=Orrella dioscoreae OX=18515 44 GN=queF PE=3 SV=1
MTLDLQHAPLGQTVGYPSQYDPALLFPIARAGARGELGLPADAPLPFAGVDLWNAYEVSWLNARGKPEVALARCVVPAESPNLIESKSFKLYLNSYNQTRMADADTVRARIAADLSAAAGAPVAVELILPAAYGELTLGEPEGECVDGLDVEIDQYAPSAELLAVDAARGVVRETLLSRLLKSNCPVTGQPDWATVQVSYEGPAIDRESLLRYVVGFRQHSGFHEQCVERMFLDILARCQPTSLSVYARYTRRGGLDINPWRGTADHLPPADLRTPQQ

SEQ ID NO: 47904 - protein, 281 aa, Oryzisolibacter propanilivorax
  misc_feature (1)..(281): tr|A0A1G9TJY4|A0A1G9TJY4_9BURK NADPH-dependent 7-cyano- 7-deazaguanine reductase OS=Oryzisolibacter propanilivo rax OX=1527607 GN=queF PE=3 SV=1
MHTPEQSQLGQRSAYVDQYDAGLLFPLPRAPKRLEIGIAGAAPFFGADLWSAYELSWLNERGKPQVAIAHLTVPCETPQLIESKSLKLYLNSFNNTRFVSADEVRARLRADLGEAVWRGSGQSGGVGVRLLAPEQFDAQQVQELDGLLLDRLDLDCTHYQPAPELLEADHTEAPVTETLVSHLLKSNCLVTGQPDWGSVQIAYSGAQIDQAGLLRYLVSFRNHNEFHEQCVERIFMDIWTRCRPIKLAVYARYTRRGGLDINPFRTSHPGPLPANVRTARQ

SEQ ID NO: 47905 - protein, 281 aa, Oryzomicrobium terrae
  misc_feature (1)..(281): tr|A0A5C1EAM6|A0A5C1EAM6_9RHOO NADPH-dependent 7-cyano- 7-deazaguanine reductase OS=Oryzomicrobium terrae OX=17 35038 GN=queF PE=3 SV=1
MTDVSSSRPEHSPLGKAVTYCATYAPELLFPISRDDKRREIGVDPARLPFHGADLWNGYELSWLNPKGKPVAALATFVVPAESPRLIESKSFKLYLNSFNQTSFADAAAVRAVLERDLSAAAGAPVAVTVEPLTTHPAREVGYPQGILLDDLDVACDVYLPAPELLSADPHAAPVEEILVSHLLKSNCLVTGQPDWGCVVVRYRGAPIDRAGLLRYIVSFRNHNEFHEQCVERIYVDILARCRPAFLSVHARYTRRGGLDINPWRSSAPGPMPDNRGEVRQ

SEQ ID NO: 47906 - protein, 141 aa, Oscillatoria acuminata
  misc_feature (1)..(141): tr|K9TCG4|K9TCG4_9CYAN NADPH-dependent 7-cyano-7-deazag uanine reductase OS=Oscillatoria acuminata PCC 6304 OX= 56110 GN=queF PE=3 SV=1
MQSDVSPTATPTDETPQVKYGEREIEEGQLITFPNPRVGRRYDIHITLPEFTCKCPFSGYPDFATIYLSYIPNERVVELKAIKLYINSYRDRYISHEESINQILDDFVAACDPLEATIKGDFHPRGNVHTVIEVRHTKPQT

SEQ ID NO: 47907 - protein, 139 aa, Oscillatoria nigroviridis
  misc_feature (1)..(139): tr|K9VQY7|K9VQY7_9CYAN NADPH-dependent 7-cyano-7-deazag uanine reductase OS=Oscillatoria nigro-viridis PCC 7112 OX=179408 GN=queF PE=3 SV=1
MNNYAPEQTMSQKSSTEAMKYGERQILEGELITFPNPRVGRRYSINITLPEFTCKCPFSGYPDFATIHVTYVPDERVVELKALKLYVNSYRDRYISHEESINQILDDFVAACAPLEATIKGDFSPRGNVHTVIEVSHQK

SEQ ID NO: 47908 - protein, 130 aa, [Oscillatoria] sp.
  misc_feature (1)..(130): tr|D8G3E6|D8G3E6_9CYAN NADPH-dependent 7-cyano-7-deazag uanine reductase OS=[Oscillatoria] sp. PCC 6506 OX=2721 29 GN=queF PE=3 SV=1
MKYGEREILEGELITFPNPRVGRRYDINITLPEFTCKCPFSGYPDFATIYVSYVPNERVVELKALKLYINSYRDRYISHEESINQILDDFVAACEPLEVTVKGDFLPRGNVHTVIEVRHQLGTREEGARG

SEQ ID NO: 47909 - protein, 141 aa, Oscillatoriales cyanobacterium
  misc_feature (1)..(141): tr|A0A1C0VWL6|A0A1C0VWL6_9CYAN NADPH-dependent 7-cyano- 7-deazaguanine reductase OS=Oscillatoriales cyanobacter ium USR001 OX=1880991 GN=queF PE=3 SV=1
MNGSPIDRDLSRELSAQEMKYGEREIVEGELITFPNPRVGRRYEISISLPEFTCKCPFSGYPDFATIYLTYVPDERVVELKALKLYINGYRDRYISHEESVNQILDDFVAACEPLEVTVKGDFWPRGNVHTVVEVKHLKGG

SEQ ID NO: 47910 - protein, 126 aa, Oscillatoriales cyanobacterium
  misc_feature (1)..(126): tr|A0A1J5GVU5|A0A1J5GVU5_9CYAN NADPH-dependent 7-cyano- 7-deazaguanine reductase OS=Oscillatoriales cyanobacter ium CG2_30_44_21 OX=1805292 GN=queF PE=3 SV=1
MTVKYGEQAIAEVTLTTFPNPRIGRDYTVQITLPEYTCKCPFSGYPDFATIYITYTPNRVLVELKAIKLYINSYRDRSISHEEAINQILDDFVKAGDPLRVTVKGDYNPRGNVHTVVEVNYTKETI

SEQ ID NO: 47911 - protein, 290 aa, Osedax symbiont
  misc_feature (1)..(290): tr|S6H8M6|S6H8M6_9GAMM NADPH-dependent 7-cyano-7-deazag uanine reductase OS=Osedax symbiont Rs1 OX=1330036 GN=q ueF PE=3 SV=1
MIKQPQGADQQQKEQQALDASPLGSHTAYVNKYDPSLLFPIERDINWRKRSVDRLSLPFLAHSGAVDIWNGYEISWLNSQGKPIVRVAEFRFDARSSHIVESKSFKLYLNSYNLSHFETEAQVIQQMTKDLSNISGAEVSVSFCHLDQLPRLAHFSGTCIDECEVQINQYSPDLTLLKIDPEQQVAEALYSHILKSNCPVTGQPDWASISIDYQGSMIDQASLLRYLVSYREHGDFHEQCVENIFMDIWQQCKPNKLTVYARYIRRGGLDINPFRSSEQAVAKNLRLARQ

SEQ ID NO: 47912 - protein, 287 aa, Osedax symbiont
  misc_feature (1)..(287): tr|S6GQS3|S6GQS3_9GAMM NADPH-dependent 7-cyano-7-deazag uanine reductase OS=Osedax symbiont Rs2 OX=1330035 GN=q ueF PE=3 SV=1
MTGNNDAVNSEQQQLDTSPLGNHTAYVNKYDASLLFPIEREINWSARNIQRTPLPFLQHSGAVDIWNGYEISWLDTKGKPLVRVAEFRFDARSKYIVESKSFKLYLNSYNLSHFDSESAVLQQMQADLTKASGAQVLIHFHHLDELPPVQCFNGDCIDELDVQIEQYSPDAQLLQINSDKSTAESLYSHILKSNCPVTGQPDWASISIVYAGPAIVRESLLKYLISYREHGDFHEQCVENIFMDIWQQCQPSELTVYARYIRRGGLDINPFRSSLSALADNLRLSRQ

SEQ ID NO: 47913 - protein, 292 aa, Osedax symbiont
  misc_feature (1)..(292): tr|A0A1Y5G6R7|A0A1Y5G6R7_9BACT NADPH-dependent 7-cyano- 7-deazaguanine reductase QueF OS='Osedax' symbiont bact erium Rs2_46_30_T18 OX=1856298 GN=A9R01_18145 PE=3 SV=1
MTANKDTANSDQLQREQQLLDASALGNHTAYVNKYDASLLFPIEREINWSVRNIERHSLPFLQQPGAVDIWNGYEISWLDTKGKPLVRVAEFRFDARSKYIVESKSFKLYLNSYNLSHFNSESAVLEQMQVDLTKASGAQVLIRFHHLDELPAVQRFDGICIDELDVDIEQYSPDAQLLQVNTDKLTAESLYSHVLKSNCPVTGQPDWASISIAYAGPAIVRESLLKYLVSYREHGDFHEQCVENIFMDIWQQCQPSELTVYARYIRRGGLDINPFRSSVSAVAENLRLSRQ

SEQ ID NO: 47914 - protein, 279 aa, Otariodibacter oris
  misc_feature (1)..(279): tr|A0A420XIM7|A0A420XIM7_9PAST NADPH-dependent 7-cyano- 7-deazaguanine reductase OS=Otariodibacter oris OX=1032 623 GN=queF PE=3 SV=1
MDYQDKSLTALKLGQSTEYATSYNPQLLQGVPRQLNRDQLGITAQQPFTKGVDLWTAYEISWLNSKGVPQVAIADIFIDYTSKNLIESKSFKLYLNSFNQTKFTSFQEVQATIQTDLSLCAEGKVEVILKRLDQYQSEQIAHFSGQCIDSQDIEIANYEFDRHILANGTSDHIIEETLVSHLLKSNCLITNQPDWGSIQIHYVGKQIDQEKLLRYLVSFRQHNEFHEQCVERIFCDLMEFAHPEKLTVYARYTRRGGLDINPFRSNFEQAPTNVRLARQ

SEQ ID NO: 47915 - protein, 284 aa, Ottowia oryzae
  misc_feature (1)..(284): tr|A0A2S0MJI0|A0A2S0MJI0_9BURK NADPH-dependent 7-cyano- 7-deazaguanine reductase OS=Ottowia oryzae OX=2109914 G N=queF PE=3 SV=1
MTSPHTPQDSLLGKASGYADQYDAALLFPIPRAPQRASLGIGSQPPFFGADLWTAFELSWLNARGKPQVAVAHIMVPCETTHIVESKSFKLYLNSFNGTAFASEQEVRQRIQADVSAALWQGGAVQSSASVRLVLPADFDREPIHELDGLSLDRLDVDCDRYQPAPDLLTAAFDEQPVEETLTSQLLKSNCPVTGQPDWASAQIRYAGPQIDQAGLLRYIISFRNHSDFHEHCVERMFTDIWQRCRPTKLTVYARYTRRGGLDINPWRTSHPGALPPNVRTARQ

SEQ ID NO: 47916 - protein, 285 aa, Ottowia sp.
  misc_feature (1)..(285): tr|A0A5C7UY48|A0A5C7UY48_9BURK NADPH-dependent 7-cyano- 7-deazaguanine reductase OS=Ottowia sp. OX=1898956 GN=q ueF PE=3 SV=1
MTTPATPHDSPLGRASAYSDQYDPTLLFPIARAPQRAQLGIQGQPPFFGADWWTAYELSWLNARGKPQLAIAHIMVPCDSTHIIESKSFKLYLNSFNGTRIDRTEELVRRLRQDVSAAIWQGGPVQAAAGVRLIAPDDFDREAVHELDGVNLDRLDIDVDGWDEPAPQCLSAAFDEQPVEEALTSRLLKSNCPVTGQPDWGSVQIRYAGPQIDQAGLLRYIISFRRHNDFHEHCVERMFTDIRARCRPTKLSVYARYTRRGGLDINPWRTSHPGPLPPNVRTARQ

SEQ ID NO: 47917 - protein, 288 aa, Ottowia sp.
  misc_feature (1)..(288): tr|A0A5C8J7T0|A0A5C8J7T0_9BURK NADPH-dependent 7-cyano- 7-deazaguanine reductase OS=Ottowia sp. GY511 OX=260327 4 GN=queF PE=3 SV=1
MTSSPAHPATPQDSPLGRASAYADQYDASLLFAIPRAPQRAALGINGQPKFFGADLWTAYELSWLNLRGKPQLAIAHVVVPCESTHIVESKSFKLYLNSFNGTPFGSEAEVKQRLQTDLSAALWQGGPVQQSAGVRLVLPADFDREPIHELDGLSLDRLDIDCDRYQPAPDLLTAALDEQPVEETLTSGLLKSNCPVTGQPDWGSVQIRYAGPQIDQAGLLRYIVSFRGHSDFHEHCVERMFTDIWQRCRPTKLTVYARYTRRGGLDINPWRTSHPGALPSAVRTARQ

SEQ ID NO: 47918 - protein, 279 aa, Oxalobacter formigenes
  misc_feature (1)..(279): tr|C3X6B9|C3X6B9_OXAFO NADPH-dependent 7-cyano-7-deazag uanine reductase OS=Oxalobacter formigenes HOxBLS OX=55 6268 GN=queF PE=3 SV=1
MTSSDDMKESPLGRSTDYPTRYDPSLLYPIERKPMREKLGITGSLPFFGLDFWNAYELSWLNLRGKPQVAIMNFTVSADSPNIVESKSLKLYLNSFTQTRMDETGDLINILRNDLSDAFGSPVQVSLKQPGDFPAIKLQELEGLLLDRLDIAADEYTPDPSFLKSNQEEYPVEETLVSHLLKTNCPVTGQPDWASLQIHYAGPQIDQAGLLKYIISLRSSQEFHEQCVERIFLDILKMCKPQSLTVYARYTRRGGIDINPWRSNFSSGNRPQLMRTARQ

SEQ ID NO: 47919 - protein, 279 aa, Oxalobacter formigenes
  misc_feature (1)..(279): tr|C3XCJ0|C3XCJ0_OXAFO NADPH-dependent 7-cyano-7-deazag uanine reductase OS=Oxalobacter formigenes OXCC13 OX=55 6269 GN=queF PE=3 SV=1
MTSSDKTKNSPLGKSTTYPTQYDPSQLFPIERKPMREKLGITGSLPFFGLDFWNAYELSWLNLRGKPQVGIMNFSVSADSPNIVESKSLKLYLNSFTQTRMDEAGDLIQILRTDLSDAFGSPVQVSIRQPDVFPATRLEELNGLSLDRLDIGTDKYTPDPSFLKSNEEEFPVEETLVSNLLKTNCPVTGQPDWASLQIHYAGPQIDQEGLLKYIISLRSSEDFHEQCVERIFLDILKMCKPQSLTVYARYTRRGGIDINPWRSNFSSGKRPQTLRHARQ

SEQ ID NO: 47920 - protein, 279 aa, Oxalobacter sp.
  misc_feature (1)..(279): tr|A0A3A6NV87|A0A3A6NV87_9BURK NADPH-dependent 7-cyano- 7-deazaguanine reductase OS=Oxalobacter sp. OX=2093374 GN=queF PE=3 SV=1
MTNESTPHESPLGKPASYDGAYDPSLLFPILRATTREEFNLGKTTPFFGIDIWNAYELSWLNMRGKPQVALLSVTVPADSPNIVESKSFKLYINSFSQTKVGGPEAMIELLRADLSAAFGAFVSVSLTPQDAFATLALGEMEGLLLDRLDIDADEYSPNASLLRTITEEPPVEEKLVSHLLRTNCPVTGQPDWASVQIHYVGFAINQEYLLKYLISLRTHNGFHEQCIERIFMDILTQCKPTKLAVYGRFTRRGGVDINPWRTNFTIGGRPSNARNARQ

SEQ ID NO: 47921 - protein, 278 aa, Oxalobacteraceae bacterium
  misc_feature (1)..(278): tr|A0A4Q3IXW7|A0A4Q3IXW7_9BURK NADPH-dependent 7-cyano- 7-deazaguanine reductase OS=Oxalobacteraceae bacterium OX=1871070 GN=queF PE=3 SV=1
MNTPDQSPLGKSSAYQSQYAPELLFPIARQQKRDELGLFADAGTMPFFGVDIWNAYELSWLNMRGKPQVAIATITVPADSPNIVESKSFKLYLNSFNQTRLAGPDALLALLRDDLSDGFGAPVHVTLTSPEAFGAIKMGELDGVLLDRLDVEIDGYSPSPELLSADHENGQVEETLVSHLLKSNCLVTGQPDWGTVQIRYVGPQIDQEGLLKYLIGFREHNEFHEQCVERIFMDVLRQCKPTKLAVYARYTRRGGLDINPWRANFSTGKPPNLRGARQ

SEQ ID NO: 47922 - protein, 279 aa, Oxalobacteraceae bacterium
  misc_feature (1)..(279): tr|A0A3D1J593|A0A3D1J593_9BURK NADPH-dependent 7-cyano- 7-deazaguanine reductase OS=Oxalobacteraceae bacterium OX=1871070 GN=queF PE=3 SV=1
MIIPDQPGASPLGKPAAYKTEYDPSLLFPIARQGKRDELGISGTLPFFGIDIWNAYEVSWLNLRGKPQVAIATITVAADSPNIIESKSFKLYLNSFNQTKFAGSDALLELLRADLSAGFGAPVQIALALADAFVQVQMGELEGLLLDRLDIEVTQYTPDATLLRADAQQPPVEETLVSHLLKSNCLVTGQPDWGSVQIHYIGAPIDQEGLLKYLIGFREHNEFHEQCVERIFMDVLRRCKPQKLAVYARYTRRGGLDINPWRSNFTTGQRPPNVRNARQ

SEQ ID NO: 47923 - protein, 154 aa, Pacificibacter maritimus
  misc_feature (1)..(154): tr|A0A3N4UJC0|A0A3N4UJC0_9RHOB NADPH-dependent 7-cyano- 7-deazaguanine reductase OS=Pacificibacter maritimus OX =762213 GN=queF PE=3 SV=1
MVQTDTSKLTQLGGASDLPASPEAATLERVPHTHEGERYVARFTAPEFTSLCPMTGQPDFGHLMIDYVPRKWLVESKSLKLFLGSFRNHGAFHEDCSVYIGKRLTELLDPEWLRIGAYWYPRGGIPIDVFWASGPEPKDLWIPDQGVPPYRGRG

SEQ ID NO: 47924 - protein, 148 aa, Pacificimonas flava
  misc_feature (1)..(148): tr|M2U551|M2U551_9SPHN NADPH-dependent 7-cyano-7-deazag uanine reductase OS=Pacificimonas flava OX=1234595 GN=q ueF PE=3 SV=1
MEPKFLGQDSPLPTSPEQAGLDYVPNPRTGERYLVRFAAPEFTSLCPVTGQPDFAHLVIDYVPGETIVESKSLKLFLGSFRNHAAFHEDCTVGIGRRLADEMKPEWLRIGGYWYPRGGIPIDVFWQTGAPPADVWVPDQGVAPYRGRG

SEQ ID NO: 47925 - protein, 148 aa, Pacificimonas flava
  misc_feature (1)..(148): tr|A0A219BAA4|A0A219BAA4_9SPHN NADPH-dependent 7-cyano- 7-deazaguanine reductase OS=Pacificimonas flava OX=1234 595 GN=queF PE=3 SV=1
MEPKFLGKDSSLPASPEDAVLDYVPNPRPDERFLVRFTAPEFTSLCPVTGQPDFAQLMIDYVPQETIVESKSLKLFLGSFRNHAAFHEDCTVGIGRRLVDEMKPEWLRIGGYWYPRGGIPIDVFWQTGAPPGGVWVPDQGVPSYRGRG

SEQ ID NO: 47926 - protein, 275 aa, Paenalcaligenes hominis
  misc_feature (1)..(275): tr|A0A1U9JZ55|A0A1U9JZ55_9BURK NADPH-dependent 7-cyano- 7-deazaguanine reductase OS=Paenalcaligenes hominis OX= 643674 GN=queF PE=3 SV=1
MRSSHSISDSPLGNEVHYPTRYDPNVLFAIERAPNRTHLTLPENWLGEDIWYAYELSWLNEKGKPMVAIGRFSFPWHSPFLVESKSFKLYLNSLNETHFAAQEDVKALLVRDLSALTQSEVDVQLYLLEHYEGPRAQPLEGTCIDQLDVAITHYQPAPELLTCNADQGTRTETLVSHLLKSNCPVTGQPDWGTVQISYTGTAIDHTALLRYIVSFRKHTEFHEHCVERIYHDLMQRCQPEKLFVMARYTRRGGLDINPWRSNYVKTVPNQRTERQ

SEQ ID NO: 47927 - protein, 167 aa, Paenibacillaceae bacterium
  misc_feature (1)..(167): tr|A0A1H1THI2|A0A1H1THI2_9BACL NADPH-dependent 7-cyano- 7-deazaguanine reductase OS=Paenibacillaceae bacterium GAS479 OX=1882832 GN=queF PE=3 SV=1
MSEQGRSSEELSGVTLLGNQGTQYPMTYAPEVLESFVNKHPDRDYRVKFNCPEFTSLCPMTGQPDFATIYIAYIPDKLMVESKALKLYLFSFRNHGDFHEDCMNIIMNDLIKLMEPRFIEVWGKFTPRGGISIDPYCNWGRPGTKYEQMAEYRLMNLDLYPEKIDNR

SEQ ID NO: 47928 - protein, 164 aa, Paenibacillaceae bacterium
  misc_feature (1)..(164): tr|A0A1Y3QKH2|A0A1Y3QKH2_9BACL NADPH-dependent 7-cyano- 7-deazaguanine reductase OS=Paenibacillaceae bacterium ZCTH02-B3 OX=1861638 GN=queF PE=3 SV=1
MPEKSGRAPGLTHLGSGETRYAFSYDPDLLETFENRHPDRDYFVKFNCPEFTTLCPITGQPDFGAIYISYIPDRKMVESKSLKLYLFSFRNHGGFHEDCVNTIMNDLIRVMEPRYIEVWGKFMPRGGISIDPFCNWGRPGTKYERMAEYRLLNHDMYPEKVDNR

SEQ ID NO: 47929 - protein, 165 aa, Paenibacillus agaridevorans
  misc_feature (1)..(165): tr|A0A2R5F2C9|A0A2R5F2C9_9BACL NADPH-dependent 7-cyano- 7-deazaguanine reductase OS=Paenibacillus agaridevorans OX=171404 GN=queF PE=3 SV=1
MEGRQKEELDRITLLGNQGTKYPFHYAPEVLESFDNKHPGRDYFVKFNCPEFTSLCPITGQPDFATIYISYIPDVKMVESKSLKLYLFSFRNHGDFHEDCMNIIMNDLIKLMDPRFIEVWGKFTPRGGISIDPYCNWGRPGTKFEEMASYRLMNHDLYPEKVDNR

SEQ ID NO: 47930 - protein, 165 aa, Paenibacillus algorifonticola
  misc_feature (1)..(165): tr|A0A1I2IK13|A0A1I2IK13_9BACL NADPH-dependent 7-cyano- 7-deazaguanine reductase OS=Paenibacillus algorifontico la OX=684063 GN=queF PE=3 SV=1
MSGRKEGELQGISLLGNQGTAYTFEYSPEILESFDNKHPYRDYFVKFNCPEFTSLCPMTGQPDFATIYISYVPDVKMVESKSLKLYLFSFRNHGDFHEDCVNIIMNDLIKLMDPRYIEVWGKFTPRGGISIDPYCNYGKPGTKYEQMAENRLMNHDLYPEKIDNR

SEQ ID NO: 47931 - protein, 163 aa, Paenibacillus alvei
  misc_feature (1)..(163): tr|S9SPL2|S9SPL2_PAEAL NADPH-dependent 7-cyano-7-deazag uanine reductase OS=Paenibacillus alvei TS-15 OX=111710 8 GN=queF PE=3 SV=1
MAGRNEAELHLKQLGLKTEYPSDYAPDILESFDNKHPNRDYFVKFNCPEFTSLCPITGQPDFATIYISYIPDVKCVESKSLKLYLFSFRNHGDFHEDCVNIIMNDLIKLLDPRYIEVWGKFTPRGGISIDPYCNYGQPGTKYEGMAAHRLMNHDMYPEKVDNR

SEQ ID NO: 47932 - protein, 163 aa, Paenibacillus alvei
  misc_feature (1)..(163): tr|K5ACD6|K5ACD6_PAEA2 NADPH-dependent 7-cyano-7-deazag uanine reductase OS=Paenibacillus alvei (strain ATCC 63 44 / DSM 29 / NBRC 3343 / NCIMB 9371 / NCTC 6352) OX=12 06781 GN=queF PE=3 SV=1
MAGRNEAELNLTQLGVKTEYPSDYAPDILESFDNKHPNRDYFVKFNCPEFTSLCPITGQPDFATIYISYIPGVKCVESKSLKLYLFSFRNHGDFHEDCVNIIMNDLIKLLDPRYIEVWGKFTPRGGISIDPYCNYGQPGTKYVEMAAHRLMNHDMYPEKVDNR

SEQ ID NO: 47933 - protein, 163 aa, Paenibacillus amylolyticus
  misc_feature (1)..(163): tr|A0A100VHQ1|A0A100VHQ1_PAEAM NADPH-dependent 7-cyano- 7-deazaguanine reductase OS=Paenibacillus amylolyticus OX=1451 GN=queF PE=3 SV=1
MRQPEEMQDVTLLGNQNVKYTFEYDPGILESFDNKHPYRDYFVKFNCPEFTSLCPITGQPDFATIYISYIPDIKMVESKSLKLYLFSFRNHGDFHEDCVNIIMNDLIKLMDPRYIEVWGKFTPRGGISIDPYTNYGKPGTKYEQMADHRMMNHDMYPETIDNR

SEQ ID NO: 47934 - protein, 163 aa, Paenibacillus amylolyticus
  misc_feature (1)..(163): tr|A0A1R1BX05|A0A1R1BX05_PAEAM NADPH-dependent 7-cyano- 7-deazaguanine reductase OS=Paenibacillus amylolyticus OX=1451 GN=queF PE=3 SV=1
MRQPEEMQDVTLLGNQNVKYTFEYDPGILENFDNKHPYRDYFVKFNCPEFTSLCPITGQPDFATIYISYIPDIKMVESKSLKLYLFSFRNHGDFHEDCVNIIMNDLIKLMDPRYIEVWGKFTPRGGISIDPYTNYGKPGTKYEQMADHRMMNHDMYPETIDNR

SEQ ID NO: 47935 - protein, 165 aa, Paenibacillus antarcticus
  misc_feature (1)..(165): tr|A0A168QTQ0|A0A168QTQ0_9BACL NADPH-dependent 7-cyano- 7-deazaguanine reductase OS=Paenibacillus antarcticus O X=253703 GN=queF PE=3 SV=1
MPGRQPTEMEDLTLLGNQGTKYLVEYDPSILESFDNKHAYRDYFVKFNCPEFTSLCPITGQPDFATIYISYMPDVRMVESKSLKLYLFSFRNHGDFHEDCMNIIMNDLIKLMDPKYIEVWGKFTPRGGISIDPYCNYGRPETKYEEMAQHRLMNHDMYPETIDNR

SEQ ID NO: 47936 - protein, 163 aa, Paenibacillus aquistagni
  misc_feature (1)..(163): tr|A0A1X7LYK8|A0A1X7LYK8_9BACL NADPH-dependent 7-cyano- 7-deazaguanine reductase OS=Paenibacillus aquistagni OX =1852522 GN=queF PE=3 SV=1
MAGRSQEELPLTHLGQQTSYKSTYAPEVLEAFPNKHPYRDYFIKFNCPEFTSLCPMTGQPDFATMYISYIADQKCVESKSLKLYLFSFRNQGDFHEDCVNIIMNDLIELLDPRYIEVWGKFTPRGGISIDPYCNYGKPGTVYEDMARQRLMQHDLYPEKVDNR

SEQ ID NO: 47937 - protein, 165 aa, Paenibacillus baekrokdamisoli
  misc_feature (1)..(165): tr|A0A3G9J528|A0A3G9J528_9BACL NADPH-dependent 7-cyano- 7-deazaguanine reductase OS=Paenibacillus baekrokdamiso li OX=1712516 GN=queF PE=3 SV=1
MAGRDEAALEGISLLGNQGTQYAATYTPSILEAFDNKHPYRDYRVKFNCPEFTSLCPITGQPDFATIYIAYIPDLKMVESKSLKLYLFSFRNHGDFHEDCINIIMNDLINLMSPRYIEVWGKFTPRGGISIDPYCNYGRPGTKYEEMASYRMMNHDLYPEKVDNR

SEQ ID NO: 47938 - protein, 163 aa, Paenibacillus barcinonensis
  misc_feature (1)..(163): tr|A0A2V4WLN2|A0A2V4WLN2_PAEBA NADPH-dependent 7-cyano- 7-deazaguanine reductase OS=Paenibacillus barcinonensis OX=198119 GN=queF PE=3 SV=1
MRQPDEMQDVTLLGNQNVKYTFEYDPGILESFDNKHPYRDYFVKFNCPEFTSLCPITGQPDFATIYISYIPDIKMVESKSLKLYLFSFRNHGDFHEDCVNIIMNDLIKLMDPRFIEVWGKFTPRGGISIDPYTNYGKPGTKYEQMAEHRMMNHDMNPETIDNR

SEQ ID NO: 47939 - protein, 165 aa, Paenibacillus barengoltzii
  misc_feature (1)..(165): tr|R9LI86|R9LI86_9BACL NADPH-dependent 7-cyano-7-deazag uanine reductase OS=Paenibacillus barengoltzii G22 OX=1 235795 GN=queF PE=3 SV=1
MAGRKPEEMQDVTLLGNQGVKYPFDYAPEVLETFDNKHPYRDYFVKFNCPEFTSLCPITGQPDFATIYISYIPDIKMVESKSLKLYLFSFRNHGDFHEDCVNIIMNDLIKLMDPKYIEVWGKFTPRGGISIDPYCNYGRPGTKYEAMAEHRLLNHDMYPEKVDNR

SEQ ID NO: 47940 - protein, 165 aa, Paenibacillus beijingensis
  misc_feature (1)..(165): tr|A0A0D5NJE5|A0A0D5NJE5_9BACL NADPH-dependent 7-cyano- 7-deazaguanine reductase OS=Paenibacillus beijingensis OX=1126833 GN=queF PE=3 SV=1
MEGRTKEELQGVTLLGNQGTKYKFEYTPEILESFVNKHPQRDYFVKFNCPEFTSLCPMTGQPDFATIYISYIPDQLMVESKSLKLYLFSFRNHGDFHEDCMNIIMNDLIALMNPRYIEVWGKFTPRGGISIDPYCNWGRPGTKYEAMADHRLMNHDLYPEKVDNR

SEQ ID NO: 47941 - protein, 166 aa, Paenibacillus borealis
  misc_feature (1)..(166): tr|A0A089LBS3|A0A089LBS3_9BACL NADPH-dependent 7-cyano- 7-deazaguanine reductase OS=Paenibacillus borealis OX=1 60799 GN=queF PE=3 SV=1
MSEGRLKEEMQEVTLLGNQGTKYKFGYAPEILEAFDNKHPGRDYFVKFNCPEFTSLCPVTGQPDFGVMYISYIPDIKMVESKSLKLYLFSFRNHGDFHEDCVNIIMNDLISLMEPRYIEVWGKFTPRGGISIDPYCNWGRPGTKYEAMAEHRLMNHDLYPEKVDNR

SEQ ID NO: 47942 - protein, 166 aa, Paenibacillus borealis
  misc_feature (1)..(166): tr|A0A1R0YFS7|A0A1R0YFS7_9BACL NADPH-dependent 7-cyano- 7-deazaguanine reductase OS=Paenibacillus borealis OX=1 60799 GN=queF PE=3 SV=1
MSEGRLKEEMQEVTLLGNQGTQYKFGYDPEILEVFDNKHPGRDYFVKFNCPEFTSLCPVTGQPDFGVMYISYVPEQKMVESKSLKLYLFSFRNHGDFHEDCVNIIMNDLISLMEPRYIEVWGKFTPRGGISIDPYCNWGRPGTKYEAMAEHRLINHDLYPEKVDNR

SEQ ID NO: 47943 - protein, 165 aa, Paenibacillus bovis
  misc_feature (1)..(165): tr|A0A172ZE72|A0A172ZE72_9BACL NADPH-dependent 7-cyano- 7-deazaguanine reductase OS=Paenibacillus bovis OX=1616 788 GN=queF PE=3 SV=1
MSGRQQDEMQDLTLLGNQGTKYTFEYDPSILESFDNKHTYRDYFVKFNCPEFTSLCPITGQPDFATIYISYIPDVKMVESKSLKLYLFSFRNHGDFHEDCMNIILNDLVKLMDPRYIEVWGKFTPRGGISIDPYTNYGKPGTKYEQMAEHRMMNHDMYPETIDNR

SEQ ID NO: 47944 - protein, 165 aa, Paenibacillus catalpae
  misc_feature (1)..(165): tr|A0A1I1Z6L4|A0A1I1Z6L4_9BACL NADPH-dependent 7-cyano- 7-deazaguanine reductase OS=Paenibacillus catalpae OX=1 045775 GN=queF PE=3 SV=1
MSGRSEEELQGISLLGNQGTRYPMEYSPAVLEAFDNKHPYRDYFVKFNCPEFTSLCPMTGQPDFATIYISYIPDIKMVESKSLKLYLFSFRNHGDFHEDCMNIIMNDLIELMQPRYIEVWGKFTPRGGISIDPYCNYGKPGTKFEQMAEQRLFNHDMYPEKVDNR

SEQ ID NO: 47945 - protein, 165 aa, Paenibacillus cellulosilyticus
  misc_feature (1)..(165): tr|A0A2V2YWQ7|A0A2V2YWQ7_9BACL NADPH-dependent 7-cyano- 7-deazaguanine reductase OS=Paenibacillus cellulosilyti cus OX=375489 GN=queF PE=3 SV=1
MTGRQHEEMSDLTLLGNQGTKYPFEYAPSVLETFDNKHPYRDYFVKFNCPEFTSLCPITGQPDFATIYISYIPDVKMVESKSLKLYLFSFRNHGDFHEDCMNIIMNDLIKLMEPRYIEVWGKFTPRGGISIDPYCNYGKPGTKFEDMATQRLMQHDMYPEKVDNR

SEQ ID NO: 47946 - protein, 164 aa, Paenibacillus chitinolyticus
  misc_feature (1)..(164): tr|A0A410WS43|A0A410WS43_9BACL NADPH-dependent 7-cyano- 7-deazaguanine reductase OS=Paenibacillus chitinolyticu s OX=79263 GN=queF PE=3 SV=1
MAGRNQEELDLTLLGNQQTQYPFNYAPQVLESFDNKHPYRDYFVKFNCPEFTSLCPITGQPDFATIYISYMPDAKMVESKSLKLYLFSFRNHGDFHEDCMNIIMNDLIKLMDPKYIEVWGKFTPRGGISIDPYCNYGRPGTKYEQMAEHRLMNHDLYPEKVDNR

SEQ ID NO: 47947 - protein, 165 aa, Paenibacillus contaminans
  misc_feature (1)..(165): tr|A0A329N0L9|A0A329N0L9_9BACL NADPH-dependent 7-cyano- 7-deazaguanine reductase OS=Paenibacillus contaminans O X=450362 GN=queF PE=3 SV=1
MTGRSQEELTGVTQLGSQGTEYRFSYSPAILESFENKHPGRDYFVKFNCPEFTSLCPMTGQPDFATLYISYIPDRRMVESKSLKLYLFSFRNHGDFHEDCMNIIMNDLIALMDPRYIEVWGKFTPRGGISIDPYCNWGRPGTKYEQMAEHRLLNHDLYPEKVDNR

SEQ ID NO: 47948 - protein, 165 aa, Paenibacillus crassostreae
  misc_feature (1)..(165): tr|A0A167GR65|A0A167GR65_9BACL NADPH-dependent 7-cyano- 7-deazaguanine reductase OS=Paenibacillus crassostreae OX=1763538 GN=queF PE=3 SV=1
MSGRQHHEMEDITLLGNQGTKYLTEYDPSILESFDNKHPYRDYFVKFNCPEFTSLCPITGQPDFATIYISYIPSIRMVESKSLKLYLFSFRNHGDFHEDCMNIIMNDLIKLMDPKYIEVWGKFTPRGGISIDPYCNYGQSGTKYEEMAQYRLMNHDMYPEKVDNR

SEQ ID NO: 47949 - protein, 165 aa, Paenibacillus curdlanolyticus
  misc_feature (1)..(165): tr|E0I7X0|E0I7X0_9BACL NADPH-dependent 7-cyano-7-deazag uanine reductase OS=Paenibacillus curdlanolyticus YK9 O X=717606 GN=queF PE=3 SV=1
MAGRQHEELGDLTLLGNQGTKYPFEYAPGVLETFDNKHPYRDYMVKFNCPEFTSLCPITGQPDFATIYISYIPDIKMVESKSLKLYLFSFRNHGDFHEDCMNIIMNDLIALMDPRYIEVWGKFTPRGGISIDPYCNYGKPGTKYEQVAEQRLFQHDMYPEKVDNR

SEQ ID NO: 47950 - protein, 166 aa, Paenibacillus darwinianus
  misc_feature (1)..(166): tr|A0A015NNC4|A0A015NNC4_9BACL NADPH-dependent 7-cyano- 7-deazaguanine reductase OS=Paenibacillus darwinianus O X=1380763 GN=queF PE=3 SV=1
MTAGRSAEELKDITLLGNQGTSYTFSYDPKLLESFDNKHQGRPYFVKFNCPEFTSLCPMTGQPDFATIYISYIPDVRMVESKSLKLYLFSFRNHGDFHEDCVNIIMNDLIGLMDPLYIEVWGKFTPRGGISIDPYCNYGKPGTKYEAMAEHRLMNHDLYPEKVDNR

SEQ ID NO: 47951 - protein, 163 aa, Paenibacillus dendritiformis
  misc_feature (1)..(163): tr|A0A2W4GMG4|A0A2W4GMG4_9BACL NADPH-dependent 7-cyano- 7-deazaguanine reductase OS=Paenibacillus dendritiformi s OX=130049 GN=queF PE=3 SV=1
MAGRNEAELQLKHLGGKTEYATDYAPHVLEAFDNKHPNRDYFVKFNCPEFTSLCPMTGQPDFATMYISYIPDRKCVESKSLKLYMFSFRNHGDFHEDCVNIIMNDLIGLLDPKYIEVWGKFTPRGGISIDPYCNYGRPGTKYEEMAAYRLMNHDLYPETVDNR

SEQ ID NO: 47952 - protein, 163 aa, Paenibacillus dendritiformis; identical to SEQ ID NO: 47951
  misc_feature (1)..(163): tr|H3SNA5|H3SNA5_9BACL NADPH-dependent 7-cyano-7-deazag uanine reductase OS=Paenibacillus dendritiformis C454 O X=1131935 GN=queF PE=3 SV=1

SEQ ID NO: 47953 - protein, 167 aa, Paenibacillus donghaensis
  misc_feature (1)..(167): tr|A0A2Z2K8R1|A0A2Z2K8R1_9BACL NADPH-dependent 7-cyano- 7-deazaguanine reductase OS=Paenibacillus donghaensis O X=414771 GN=queF PE=3 SV=1
MSTEGRTAEEMPQVTLLGNQGTQYKFSYDPGILEVFDNKHPGRDYFVKFNCPEFTSLCPVTGQPDFATLYISYIPEQRMVESKSLKLYLFSFRNHGDFHEDCVNIIMNDLIALMDPRYIEVWGKFTPRGGISIDPYCNWGRPGTKYEAMAEHRLLNHDLYPEKIDNR

SEQ ID NO: 47954 - protein, 166 aa, Paenibacillus durus
  misc_feature (1)..(166): tr|A0A089HPU4|A0A089HPU4_PAEDU NADPH-dependent 7-cyano- 7-deazaguanine reductase OS=Paenibacillus durus OX=4425 1 GN=queF PE=3 SV=1
MSEGRLKEEMPDVTLLGNQGTQYKFGYAPEVLETFDNKHPGRDYFVKFNCPEFTSLCPVTGQPDFATLYISYIPEIKMVESKSLKLYLFSFRNHGDFHEDCVNIIMNDLIKLMDPRYIEVWGKFTPRGGISIDPYCNYGRPGTKYEAMAEHRLLNHDLYPETIDNR

SEQ ID NO: 47955 - protein, 166 aa, Paenibacillus durus; identical to SEQ ID NO: 47954
  misc_feature (1)..(166): tr|A0A0F7CIV0|A0A0F7CIV0_PAEDU NADPH-dependent 7-cyano- 7-deazaguanine reductase OS=Paenibacillus durus ATCC 35 681 OX=1333534 GN=queF PE=3 SV=1

SEQ ID NO: 47956 - protein, 164 aa, Paenibacillus elgii
  misc_feature (1)..(164): tr|A0A165RIW8|A0A165RIW8_9BACL NADPH-dependent 7-cyano- 7-deazaguanine reductase OS=Paenibacillus elgii OX=1896 91 GN=queF PE=3 SV=1
MAGRKEDELDLTLLGNQQTKYPMNYAPEMLESFDNKHPYRDYFVKFNCPEFTSLCPITGQPDFATIYISYIPDLKMVESKSLKLYLFSFRNHGDFHEDCMNIIMNDLIKLMDPKYIEVWGKFTPRGGISIDPYCNYGRPGTKYEQMAEHRLLNHDLYPEKVDNR

SEQ ID NO: 47957 - protein, 157 aa, Paenibacillus etheri
  misc_feature (1)..(157): tr|A0A0W1B078|A0A0W1B078_9BACL NADPH-dependent 7-cyano- 7-deazaguanine reductase OS=Paenibacillus etheri OX=130 6852 GN=queF PE=3 SV=1
MQEVTLLGNQGTQYKFGYDPDILEVFDNKHPGRDYFVKFNCPEFTSLCPVTGQPDFATLYISYIPEQKMVESKSLKLYLFSFRNHGDFHEDCVNIIMNDLISLMDPRYIEVWGKFTPRGGISIDPYCNYGRPGTKYEAIAEHRLINHDLYPEKVDNR

SEQ ID NO: 47958 - protein, 165 aa, Paenibacillus faecis
  misc_feature (1)..(165): tr|A0A5D0CZF7|A0A5D0CZF7_9BACL NADPH-dependent 7-cyano- 7-deazaguanine reductase OS=Paenibacillus faecis OX=862 114 GN=queF PE=3 SV=1
MSGRKPEEMQDVTLLGNQGVKYPSTYAPEMLESFDNKHPYRDYFVKFNCPEFTSLCPITGQPDFATIYISYIPDIKMVESKSLKLYLFSFRNHGDFHEDCVNIMMNDLIRLMDPKYIEVWGKFTPRGGISIDPYCNYGRPGTKYETMAEHRLLNHDMYPEKVDNR

SEQ ID NO: 47959 - protein, 166 aa, Paenibacillus ferrarius
  misc_feature (1)..(166): tr|A0A1V4HDQ0|A0A1V4HDQ0_9BACL NADPH-dependent 7-cyano- 7-deazaguanine reductase OS=Paenibacillus ferrarius OX= 1469647 GN=queF PE=3 SV=1
MSAGRSNEDLKEITLLGNQGTQYVFSYNPAVLEAFDNKHPNRDYFVKFNFPEFTSLCPVTGQPDFATLYISYIPNIKMVESKSLKLYLFSFRNHGDFHEDCVNIIMNDLIALMDPRYIEVWGKFTPRGGISIDPYCNWGQPGTKFEAMAEHRLMNHDLYPEKIDNR

SEQ ID NO: 47960 - protein, 167 aa, Paenibacillus ginsengarvi
  misc_feature (1)..(167): tr|A0A3B0BIJ9|A0A3B0BIJ9_9BACL NADPH-dependent 7-cyano- 7-deazaguanine reductase OS=Paenibacillus ginsengarvi O X=400777 GN=queF PE=3 SV=1
MTEAGRTEGELAGVTLLGNQGTDYRFQYSPDILESFENKHPGRDYFVKFNCPEFTSLCPMTGQPDFATLYISYIPDRRMVESKSLKLYLFSFRNHGDFHEDCMNIIMNDLIALMEPRYIEVWGKFTPRGGISIDPYCNWGQPGTKYERMAEHRLLNHDLYPEKVDNR

SEQ ID NO: 47961 - protein, 165 aa, Paenibacillus glacialis
  misc_feature (1)..(165): tr|A0A168NN33|A0A168NN33_9BACL NADPH-dependent 7-cyano- 7-deazaguanine reductase OS=Paenibacillus glacialis OX= 494026 GN=queF PE=3 SV=1
MPGRQPIEMEDLTLLGNQGTKYLVEYDPSILESFDNKHAYRDYFVKFNCPEFTSLCPITGQPDFATIYISYMPDVRMVESKSLKLYLFSFRNHGDFHEDCMNVIMNDLIKLMDPKYIEVWGKFTPRGGISIDPYCNYGRPETKYEEMAHHRLMNHDMYPETIDNR

SEQ ID NO: 47962 - protein, 165 aa, Paenibacillus glucanolyticus
  misc_feature (1)..(165): tr|A0A163KNC2|A0A163KNC2_9BACL NADPH-dependent 7-cyano- 7-deazaguanine reductase OS=Paenibacillus glucanolyticu s OX=59843 GN=queF PE=3 SV=1
MAGRKKEEMQDVTLLGNQGTKYTFEYDPSILESFDNKHAYRDYFVKFNCPEFTSLCPITGQPDFATIYISYIPDIKMVESKSLKLYLFSFRNHGDFHEDCMNIIMNDLIKLMDPRYIEVWGKFTPRGGISIDPYCNYGRPGTKYEDIAANRLMNHDLYPETVDNR

SEQ ID NO: 47963 - protein, 166 aa, Paenibacillus graminis
  misc_feature (1)..(166): tr|A0A089M9R9|A0A089M9R9_9BACL NADPH-dependent 7-cyano- 7-deazaguanine reductase OS=Paenibacillus graminis OX=1 89425 GN=queF PE=3 SV=1
MSEGRLKEEMQEVTLLGNQGTTYKFGYDPDILEVFDNKHPGRDYFVKFNCPEFTSLCPVTGQPDFGAMYISYIPEQKMVESKSLKLYLFSFRNHGDFHEDCVNIIMNDLISLMEPRYIEVWGKFTPRGGISIDPYCNWGRPGTKYEAMAEHRLINHDLYPEKVDNR

SEQ ID NO: 47964 - protein, 165 aa, Paenibacillus hemerocallicola
  misc_feature (1)..(165): tr|A0A5C4T8Q4|A0A5C4T8Q4_9BACL NADPH-dependent 7-cyano- 7-deazaguanine reductase OS=Paenibacillus hemerocallico la OX=1172614 GN=queF PE=3 SV=1
MAGRTEDELERITLLGNQGTDYRFQYAPDVLETFDNKHPERDYFVKFNCPEFTSLCPMTGQPDFATLYISYIPDRRMVESKSLKLYLFSFRNHGDFHEDCMNIIMNDLIALMEPRYIEVWGKFTPRGGISIDPYCNWGRPGTKYEQMAEHRLLNHDLYPEKVDNR

SEQ ID NO: 47965 - protein, 167 aa, Paenibacillus herberti; identical to SEQ ID NO: 47927
  misc_feature (1)..(167): tr|A0A229NYD8|A0A229NYD8_9BACL NADPH-dependent 7-cyano- 7-deazaguanine reductase OS=Paenibacillus herberti OX=1 619309 GN=queF PE=3 SV=1

SEQ ID NO: 47966 - protein, 165 aa, Paenibacillus ihbetae
  misc_feature (1)..(165): tr|A0A1B2DXL8|A0A1B2DXL8_9BACL NADPH-dependent 7-cyano- 7-deazaguanine reductase OS=Paenibacillus ihbetae OX=18 70820 GN=queF PE=3 SV=1
MAGRQREEMQDVTLLGNQGTKYTFEYDPGILESFDNKHPYRDYFVKFNCPEFTSLCPITGQPDFATIYISYIPDIKMVESKSLKLYLFSFRNHGDFHEDCVNIIMNDLIKLMDPRYIEVWGKFTPRGGISIDPYCNYGRPGTKYEEMAAQRLMNHDLYPEKVDNR

SEQ ID NO: 47967 - protein, 164 aa, Paenibacillus illinoisensis
  misc_feature (1)..(164): tr|A0A2W0C750|A0A2W0C750_9BACL NADPH-dependent 7-cyano- 7-deazaguanine reductase OS=Paenibacillus illinoisensis OX=59845 GN=queF PE=3 SV=1
MTRQPDEMKDVTLLGNQGVKYTFEYDPGILESFDNKHPYRDYFVKFNCPEFTSLCPITGQPDFATIYISYIPDVKMVESKSLKLYLFSFRNHGDFHEDCVNIIMNDLIKLMDPRYIEVWGKFTPRGGISIDPYTNYGKPGTKYEQMAEHRMMNHDMYPETIDNR

SEQ ID NO: 47968 - protein, 166 aa, Paenibacillus jilunlii; identical to SEQ ID NO: 47963
  misc_feature (1)..(166): tr|A0A1G9KCJ7|A0A1G9KCJ7_9BACL NADPH-dependent 7-cyano- 7-deazaguanine reductase OS=Paenibacillus jilunlii OX=6 82956 GN=queF PE=3 SV=1

SEQ ID NO: 47969 - protein, 165 aa, Paenibacillus kribbensis
  misc_feature (1)..(165): tr|A0A222WSM8|A0A222WSM8_9BACL NADPH-dependent 7-cyano- 7-deazaguanine reductase OS=Paenibacillus kribbensis OX =172713 GN=queF PE=3 SV=1
MTGRKPEEMTDVTLLGNQGTQYTFAYDPAILESFDNKHPYRDYFVKFNCPEFTSLCPITGQPDFATIYISYIPDIKMVESKSLKLYLFSFRNHGDFHEDCVNIIMNDLIKLMDPRYIEVWGKFTPRGGISIDPYTNYGKPGTKYEQMAEHRMMNHDMYPETVDNR

SEQ ID NO: 47970 - protein, 165 aa, Paenibacillus lactis
  misc_feature (1)..(165): tr|G4HI42|G4HI42_9BACL NADPH-dependent 7-cyano-7-deazag uanine reductase OS=Paenibacillus lactis 154 OX=743719 GN=queF PE=3 SV=1
MAGRQREEMQEVTLLGNQGTKYTFEYDPGILESFDNKHPYRDYFVKFNCPEFTSLCPITGQPDFATIYISYIPDIKMVESKSLKLYLFSFRNHGDFHEDCVNIIMNDLIKLMDPRYIEVWGKFTPRGGISIDPYCNYGRPGTKYEEMAAQRLMNHDLYPEKVDNR

SEQ ID NO: 47971 - protein, 172 aa, Paenibacillus larvae
  misc_feature (1)..(172): tr|A0A2A5K0I4|A0A2A5K0I4_PAELB NADPH-dependent 7-cyano- 7-deazaguanine reductase OS=Paenibacillus larvae subsp. larvae (strain NRRL B-3650 / LMG 16245) OX=741161 GN=q ueF PE=3 SV=1
MLFEKERTEVSHEKGIEGLTLLGNQKTQYPTQYDPGVLESFDNKKPDRDYFVKFNCPEFTSLCPMTGQPDFATIYISYIPDQKMVESKSLKLYLFSFRNHGDFHEHCVNVIMDDLIELMQPKYIEVWGKFTPRGGISIDPYCNYGKPGTKYEQMAEHRMMNHDMYPEQVDNR

SEQ ID NO: 47972 - protein, 172 aa, Paenibacillus larvae
  misc_feature (1)..(172): tr|A0A1V0US90|A0A1V0US90_9BACL NADPH-dependent 7-cyano- 7-deazaguanine reductase OS=Paenibacillus larvae subsp. pulvifaciens OX=1477 GN=queF PE=3 SV=1
MLFEKERTEVSHEKGIEGLTLLGNQKTQYPTQYDPGVLEAFDNKKPDRDYFVKFNCPEFTSLCPMTGQPDFATIYISYIPDQKMVESKSLKLYLFSFRNHGDFHEHCVNVIMDDLIELMQPKYIEVWGKFTPRGGISIDPYCNYGKPGTKYEQMAEHRMMNHDMYPEQVDNR

SEQ ID NO: 47973 - protein, 165 aa, Paenibacillus lautus
  misc_feature (1)..(165): tr|A0A1R1B2I4|A0A1R1B2I4_PAELA NADPH-dependent 7-cyano- 7-deazaguanine reductase OS=Paenibacillus lautus OX=140 1 GN=queF PE=3 SV=1
MAGRQKEEMEDVTLLGNQGTKYTFEYDPGILESFDNKHPYRDYFVKFNCPEFTSLCPITGQPDFATIYISYIPDIKMVESKSLKLYLFSFRNHGDFHEDCVNIIMNDLIKLMDPRYIEVWGKFTPRGGISIDPYCNYGRPGTKYEEIAANRLMNHDLYPEKVDNR

SEQ ID NO: 47974 - protein, 165 aa, Paenibacillus lentus
  misc_feature (1)..(165): tr|A0A3Q8SDH4|A0A3Q8SDH4_9BACL NADPH-dependent 7-cyano- 7-deazaguanine reductase OS=Paenibacillus lentus OX=133 8368 GN=queF PE=3 SV=1
MTGRQNDELQDLTLLGNQNVQYSFTYDPDILESFDNKHPYRDYFVKFNCPEFTSLCPITGQPDFATIYISYIPDIKMVESKSLKLYLFSFRNHGDFHEDCVNIIMNDLIKLMDPRYIEVWGKFTPRGGISIDPYCNYGRPGTKYESMAEQRLIQHDMYPEKIDNR

SEQ ID NO: 47975 - protein, 165 aa, Paenibacillus macerans
  misc_feature (1)..(165): tr|A0A090ZBY5|A0A090ZBY5_PAEMA NADPH-dependent 7-cyano- 7-deazaguanine reductase OS=Paenibacillus macerans OX=4 4252 GN=queF PE=3 SV=1
MAGRKPEEMQDVTLLGNQGVKYPFNYAPEVLESFDNKHPYRDYFVKFNCPEFTSLCPITGQPDFATIYISYIPDVKMVESKSLKLYLFSFRNHGDFHEDCVNIIMNDLIKLMDPKYIEVWGKFTPRGGISIDPYCNYGRPGTKYEAMAEHRLLNHDMYPEKIDNR

SEQ ID NO: 47976 - protein, 165 aa, Paenibacillus macquariensis
  misc_feature (1)..(165): tr|A0A1N6UX97|A0A1N6UX97_9BACL NADPH-dependent 7-cyano- 7-deazaguanine reductase OS=Paenibacillus macquariensis OX=948756 GN=queF PE=3 SV=1
MPGRQPTEMEDLTLLGNQGTKYLVEYDPSILESFDNKHAYRDYFVKFNCPEFTSLCPITGQPDFATIYISYMPDIRMVESKSLKLYLFSFRNHGDFHEDCMNVIMNDLIKLMDPKYIEVWGKFTPRGGISIDPYCNYGRPDTKYEEMAHHRLMNHDMYPETIDNR

SEQ ID NO: 47977 - protein, 165 aa, Paenibacillus macquariensis; identical to SEQ ID NO: 47976
  misc_feature (1)..(165): tr|A0A168FMI9|A0A168FMI9_PAEMC NADPH-dependent 7-cyano- 7-deazaguanine reductase OS=Paenibacillus macquariensis OX=1468 GN=queF PE=3 SV=1

SEQ ID NO: 47978 - protein, 167 aa, Paenibacillus montanisoli
  misc_feature (1)..(167): tr|A0A328TWU2|A0A328TWU2_9BACL NADPH-dependent 7-cyano- 7-deazaguanine reductase OS=Paenibacillus montanisoli O X=2081970 GN=queF PE=3 SV=1
MSGRSKEELQSGGVTHLGNQGTSYLFNYSPEVLESFDNKHIGRDYWVKFNCPEFTSLCPITGQPDFATIYISYIPDVKMVESKSLKLYLFSFRNHGDFHEDCMNIIMNDLIALMNPRYIEVWGKFTPRGGISIDPYCNWGRPGTKFEEMAQYRLMNHDLYPEKVDNR

SEQ ID NO: 47979 - protein, 193 aa, Paenibacillus mucilaginosus
  misc_feature (1)..(193): tr|F8FIL7|F8FIL7_PAEMK NADPH-dependent 7-cyano-7-deazag uanine reductase OS=Paenibacillus mucilaginosus (strain KNP414) OX=1036673 GN=queF PE=3 SV=1
MKLPRRRPFTAPRAFRYNEREARKKGAYLMAGRKEDELDLTLLGSERTKYPMNYAPEMLESFDNKHPYRDYFVKFNCPEFTSLCPITGQPDFATIYISYIPDQKMVESKSLKLYLFSFRNHGDFHEDCMNIIMNDLIKLMDPKYIEVWGKFTPRGGISIDPYCNYGRPGTKYEAMAEHRLLNHDLYPEKVDNR

SEQ ID NO: 47980 - protein, 164 aa, Paenibacillus mucilaginosus
  misc_feature (1)..(164): tr|H6NKN9|H6NKN9_9BACL NADPH-dependent 7-cyano-7-deazag uanine reductase OS=Paenibacillus mucilaginosus 3016 OX =1116391 GN=queF PE=3 SV=1
MAGRKEDELDLTLLGSERTKYPMNYAPEMLESFDNKHPYRDYFVKFNCPEFTSLCPITGQPDFATIYISYIPDQKMVESKSLKLYLFSFRNHGDFHEDCMNIIMNDLIKLMDPKYIEVWGKFTPRGGISIDPYCNYGRPGTKYEAMAEHRLLNHDLYPEKVDNR

SEQ ID NO: 47981 - protein, 165 aa, Paenibacillus nanensis
  misc_feature (1)..(165): tr|A0A3A1V0F7|A0A3A1V0F7_9BACL NADPH-dependent 7-cyano- 7-deazaguanine reductase OS=Paenibacillus nanensis OX=3 93251 GN=queF PE=3 SV=1
MGGRNKEELNGITHLGNQGTQYPFNYAPEVLETFENKHQNRDYFVKFNCPEFTSLCPITGQPDFATIYISYIPDVLMVESKALKLYLFSFRNHGDFHEDCMNIIMNDLIKLMNPRYIEVWGKFTPRGGISIDPYCNWGRPGTKYEAMAEHRLMNHDMYPEKVDNR

SEQ ID NO: 47982 - protein, 164 aa, Paenibacillus naphthalenovorans
  misc_feature (1)..(164): tr|A0A0U2MZ47|A0A0U2MZ47_9BACL NADPH-dependent 7-cyano- 7-deazaguanine reductase OS=Paenibacillus naphthalenovo rans OX=162209 GN=queF PE=3 SV=1
MAGRKEDELELTLLGSQQTRYPMTYAPEMLESFDNKHPYRDYFVKFNCPEFTSLCPITGQPDFATIYISYIPDRKMVESKSLKLYLFSFRNHGDFHEDCVNIIMNDLIKLMDPKYIEVWGKFTPRGGISIDPYCNYGRPGTKYEQMAEHRLLNHDLYPEKVDNR

SEQ ID NO: 47983 - protein, 126 aa, Paenibacillus nuruki
  misc_feature (1)..(126): tr|A0A1E3L6F8|A0A1E3L6F8_9BACL PreQ(1) synthase OS=Paen ibacillus nuruki OX=1886670 GN=queF PE=4 SV=1
MDTLYSIQQITEITGLSAHTLRYYEKIGLVQDIYRDAKGYRQYTETDILWLDFLIRLKETGMPIREMKKFADLRSEGETTVSLRKELLEHHYQYVQSQIRQQQHHLAKIVDKVQYYATLEEQAKQN

SEQ ID NO: 47984 - protein, 165 aa, Paenibacillus nuruki
  misc_feature (1)..(165): tr|A0A1E3KZH5|A0A1E3KZH5_9BACL NADPH-dependent 7-cyano- 7-deazaguanine reductase OS=Paenibacillus nuruki OX=188 6670 GN=queF PE=3 SV=1
MSGRQPDEMQDLTLLGNQGTKYNFEYDPSILENFDNKHPYRDYFVKFNCPEFTSLCPITGQPDFATIYISYIPDQKMVESKSLKLYLFSFRNHGDFHEDCMNIILNDLVKLMDPRYIEVWGKFTPRGGISIDPYTNYGKPGTKYEQMAEHRMMNHDMYPETIDNR

SEQ ID NO: 47985 - protein, 157 aa, Paenibacillus odorifer
  misc_feature (1)..(157): tr|A0A1R0XS07|A0A1R0XS07_9BACL NADPH-dependent 7-cyano- 7-deazaguanine reductase OS=Paenibacillus odorifer OX=1 89426 GN=queF PE=3 SV=1
MQEVTLLGNQGTQYKFGYDPDILEVFDNKHPGRDYFVKFNCPEFTSLCPVTGQPDFATLYISYIPEQKMVESKSLKLYLFSFRNHGDFHEDCVNIIMNDLISLMDPRYIEVWGKFTPRGGISIDPYCNYGRPGTKYEAMAEHRLINHDLYPEKVYNR

SEQ ID NO: 47986 - protein, 157 aa, Paenibacillus odorifer
  misc_feature (1)..(157): tr|A0A1R0WRT8|A0A1R0WRT8_9BACL NADPH-dependent 7-cyano- 7-deazaguanine reductase OS=Paenibacillus odorifer OX=1 89426 GN=queF PE=3 SV=1
MQEVTLLGNQGTQYKFGYDPDILEVFDNKHPGRDYFVKFNCPEFTSLCPVTGQPDFATLYISYIPEQKMVESKSLKLYLFSFRNHGDFHEDCVNIIMNDLISLMDPRYIEVWGKFTPRGGISIDPYCNYGRPGTKYEAMAEHRLINHDLYPEKVDNR

SEQ ID NO: 47987 - protein, 173 aa, Paenibacillus oryzae
  misc_feature (1)..(173): tr|A0A1A5YP78|A0A1A5YP78_9BACL NADPH-dependent 7-cyano- 7-deazaguanine reductase OS=Paenibacillus oryzae OX=184 4972 GN=queF PE=3 SV=1
MKHNTKQTSEGRDSRELDGLTLLGNQGTAYAFSYAPEVLEHFENKHQGRDYFVKFNCPEFTSLCPITGQPDFATIYISYIPDVRMVESKSLKLYLFSFRNHGDFHEDCMNIIMNDLIKLMDPRYIEVWGKFTPRGGISIDPYCNWGRPGTKYEDMAQHRLMNHDLYPEKVDNR

SEQ ID NO: 47988 - protein, 165 aa, Paenibacillus oryzisoli
  misc_feature (1)..(165): tr|A0A198A6A2|A0A198A6A2_9BACL NADPH-dependent 7-cyano- 7-deazaguanine reductase OS=Paenibacillus oryzisoli OX= 1850517 GN=queF PE=3 SV=1
MAGRSNEDLKEITLLGNQGTKYVFNYDPTLLEAFDNKHPDRAYFVKFNFPEFTSLCPVTGQPDFATLYISYIPTIKMVESKSLKLYLFSFRNHGDFHEDCVNIIMNDLIELMNPRYIEVWGKFTPRGGISIDPYCNWGQPGTKYETMAEHRLMNHDMYPEKIDNR

SEQ ID NO: 47989 - protein, 198 aa, Paenibacillus pabuli
  misc_feature (1)..(198): tr|A0A327PJH1|A0A327PJH1_9BACL NADPH-dependent 7-cyano- 7-deazaguanine reductase OS=Paenibacillus pabuli OX=147 2 GN=queF PE=3 SV=1
MYLGNEVSFTLQADSPVHIYREASGFDGNKERLRTMRQPDEMQDLTLLGNQGVKYTFEYDPGILENFDNKHPYRDYFVKFNCPEFTSLCPITGQPDFATIYISYIPDVKMVESKSLKLYLFSFRNHGDFHEDCVNIIMNDLIKLMDPRFIEVWGKFTPRGGISIDPYTNYGKPGTKYEQMAEHRMMNHDMYPETIDNR

SEQ ID NO: 47990 - protein, 167 aa, Paenibacillus paeoniae
  misc_feature (1)..(167): tr|A0A371PMY1|A0A371PMY1_9BACL NADPH-dependent 7-cyano- 7-deazaguanine reductase OS=Paenibacillus paeoniae OX=2 292705 GN=queF PE=3 SV=1
MAGRNQEELVQGGITHLGNQGTKYPFTYAPEVLESFDNKHPGRDYFVKFNCPEFTSLCPITGQPDFATIYISYIPDVKMVESKSLKLYLFSFRNHGDFHEDCMNIMMNDLIALMNPRYIEVWGKFTPRGGISIDPYCNWGRPGTKYEAIAEHRLMNHDLYPEKVDNR

SEQ ID NO: 47991 - protein, 169 aa, Paenibacillus pasadenensis
  misc_feature (1)..(169): tr|A0A2N5N144|A0A2N5N144_9BACL NADPH-dependent 7-cyano- 7-deazaguanine reductase OS=Paenibacillus pasadenensis OX=217090 GN=queF PE=3 SV=1
MSEIEQGRSKEELSGVTLLGNQGTQYPVTYAPQVLESFVNKHPGRDYRVKFNCPEFTSLCPMTGQPDFATITIAYIPDELMVESKSLKLYLFSFRNHGDFHEDCMNIIMNDLIALMQPKFIEVWGKFTPRGGISIDPYCNWGRPGTKYEQMAERRMMNLDLYPEKIDNR

SEQ ID NO: 47992 - protein, 166 aa, Paenibacillus pectinilyticus
  misc_feature (1)..(166): tr|A0A1C0ZR64|A0A1C0ZR64_9BACL NADPH-dependent 7-cyano- 7-deazaguanine reductase OS=Paenibacillus pectinilyticu s OX=512399 GN=queF PE=3 SV=1
MSAGRSNEDLKEITLLGNQGTKYIFNYDPTLLEAFDNKHPDRAYFVKFNFPEFTSLCPVTGQPDFATLYISYIPTIKMVESKSLKLYLFSFRNHGDFHEDCVNIIMNDLIDLMNPRYIEVWGKFTPRGGISIDPYCNWGQPGTKYEAMAEHRLMNHDLYPEKIDNR

SEQ ID NO: 47993 - protein, 165 aa, Paenibacillus peoriae
  misc_feature (1)..(165): tr|A0A0K2F4T0|A0A0K2F4T0_9BACL NADPH-dependent 7-cyano- 7-deazaguanine reductase OS=Paenibacillus peoriae OX=59 893 GN=queF PE=3 SV=1
MTGRTPEEMIDVTLLGNQGTQYTFAYDPAILESFDNKHPYRDYFVKFNCPEFTSLCPITGQPDFATIYISYIPDIKMVESKSLKLYLFSFRNHGDFHEDCVNIIMNDLIKLMDPRYIEVWGKFTPRGGISIDPYTNYGKPGTKYEQIAEHRMMNHDMYPEKIDNR

SEQ ID NO: 47994 - protein, 165 aa, Paenibacillus peoriae
  misc_feature (1)..(165): tr|A0A2S6NWA5|A0A2S6NWA5_9BACL NADPH-dependent 7-cyano- 7-deazaguanine reductase OS=Paenibacillus peoriae OX=59 893 GN=queF PE=3 SV=1
MTGRTPEEMTDVTLLGNQGTQYTFAYDPAILESFDNKHPYRDYFVKFNCPEFTSLCPITGQPDFATIYISYIPDIKMVESKSLKLYLFSFRNHGDFHEDCVNIIMNDLIKLMDPRYIEVWGKFTPRGGISIDPYTNYGKPGTKYEQIAEHRMMNHDMYPEKIDNR

SEQ ID NO: 47995 - protein, 165 aa, Paenibacillus pini
  misc_feature (1)..(165): tr|W7YSQ4|W7YSQ4_9BACL NADPH-dependent 7-cyano-7-deazag uanine reductase OS=Paenibacillus pini JCM 16418 OX=123 6976 GN=queF PE=3 SV=1
MPGRQSNEMEDLTLLGNQGTKYVFEYAPEVLESFDNKHAYRDYFVKFNFPEFTSLCPITGQPDFATLHISYIPDVKMVESKSLKLYLFSFRNHGDFHEDCINIIMNDLIKLMNPRYIEVWGKFTPRGGISIDPYCNYGRPDSKYEQMAEHRMMNHDLYPEKIDNR

SEQ ID NO: 47996 - protein, 167 aa, Paenibacillus pinisoli
  misc_feature (1)..(167): tr|A0A3A6PET2|A0A3A6PET2_9BACL NADPH-dependent 7-cyano- 7-deazaguanine reductase OS=Paenibacillus pinisoli OX=1 276110 GN=queF PE=3 SV=1
MAGRNQEELIQGGITQLGNQGTKYPFNYAPEVLESFDNKHPGRDYFVKFNCPEFTSLCPITGQPDFATIYISYIPDVKMVESKSLKLYLFSFRNHGDFHEDCMNIIMNDLIGLMNPRYIEVWGKFTPRGGISIDPYCNWGRPGTKYEAMAEHRLMNHDMYPEKVDNR

SEQ ID NO: 47997 - protein, 165 aa, Paenibacillus polymyxa; identical to SEQ ID NO: 47969
  misc_feature (1)..(165): tr|A0A5B8J3W5|A0A5B8J3W5_PAEPO NADPH-dependent 7-cyano- 7-deazaguanine reductase OS=Paenibacillus polymyxa OX=1 406 GN=queF PE=3 SV=1

SEQ ID NO: 47998 - protein, 165 aa, Paenibacillus polymyxa
  misc_feature (1)..(165): tr|A0A2N9Z4J9|A0A2N9Z4J9_PAEPO NADPH-dependent 7-cyano- 7-deazaguanine reductase OS=Paenibacillus polymyxa OX=1 406 GN=queF PE=3 SV=1
MTGRTPEEMTDVTLLGNQGTQYTFTYDPAILESFDNKHPYRDYFVKFNCPEFTSLCPITGQPDFATIYISYIPDIKMVESKSLKLYLFSFRNHGDFHEDCVNIIMNDLIKLMDPRYIEVWGKFTPRGGISIDPYTNYGKPGTKYEQIAEHRMMNHDMYPEKIDNR

SEQ ID NO: 47999 - protein, 163 aa, Paenibacillus polysaccharolyticus; identical to SEQ ID NO: 47938
  misc_feature (1)..(163): tr|A0A1G5GHJ9|A0A1G5GHJ9_9BACL NADPH-dependent 7-cyano- 7-deazaguanine reductase OS=Paenibacillus polysaccharol yticus OX=582692 GN=queF PE=3 SV=1

SEQ ID NO: 48000 - protein, 163 aa, Paenibacillus popilliae
  misc_feature (1)..(163): tr|M9M533|M9M533_PAEPP NADPH-dependent 7-cyano-7-deazag uanine reductase OS=Paenibacillus popilliae ATCC 14706 OX=1212764 GN=queF PE=3 SV=1
MTGRNEAELQLKHLGGKTEYATDYAPHVLEAFDNKHPDRDYFVKFNCPEFTSLCPMTGQPDFATMYISYIPDRKCVESKSLKLYMFSFRNHGDFHEDCINIIMNDLIGLLDPKYIEIWGKFTPRGGISIDPYCNYGRPGTKFEEMAAYRLMNHDLYPETVDNR

SEQ ID NO: 48001 - protein, 165 aa, Paenibacillus prosopidis
  misc_feature (1)..(165): tr|A0A368VXP9|A0A368VXP9_9BACL NADPH-dependent 7-cyano- 7-deazaguanine reductase OS=Paenibacillus prosopidis OX =630520 GN=queF PE=3 SV=1
MEGRNKEELNGVTLLGNQGTQYLFNYAPDILETFVNKHPNRDYFVKFNCPEFTSLCPMTGQPDFATIYISYIPDLKMVESKSLKLYLFSFRNHGDFHEDCMNIIMNDLIALMEPKYIEVWGKFTPRGGISIDPYCNWGQPGTKYEQMAEHRLMNHDMYPEKIDNR

SEQ ID NO: 48002 - protein, 165 aa, Paenibacillus rhizosphaerae
  misc_feature (1)..(165): tr|A0A1R1F1W8|A0A1R1F1W8_9BACL NADPH-dependent 7-cyano- 7-deazaguanine reductase OS=Paenibacillus rhizosphaerae OX=297318 GN=queF PE=3 SV=1
MSGRQPHEMKDLTLLGNQGTKYVFQYDPELLESFDNKHAYRDYFVKFNFPEFTSLCPITGQPDFATLHISYIPDQKMVESKSLKLYLFSFRNHGDFHEDCMNIIMNDLIKLMDPRYIEVWGKFTPRGGISIDPYCNYGRPGTKYEQWAEQRMINHDLYPEKIDNR

SEQ ID NO: 48003 - protein, 164 aa, Paenibacillus rigui
  misc_feature (1)..(164): tr|A0A229UIQ4|A0A229UIQ4_9BACL NADPH-dependent 7-cyano- 7-deazaguanine reductase OS=Paenibacillus rigui OX=5543 12 GN=queF PE=3 SV=1
MSGRNQEELELQLLGSQKTAYPMTYAPEMLETFDNKHPYRDYFVKFNCPEFTSLCPITGQPDFATIYISYMPDQKMVESKSLKLYLFSFRNHGDFHEDCMNIIMNDLIKLMDPKYIEVWGKFTPRGGISIDPYCNYGRPGTKYEQMAEHRLLNHDLYPEKVDNR

SEQ ID NO: 48004 - protein, 166 aa, Paenibacillus riograndensis
  misc_feature (1)..(166): tr|A0A0E4HEL6|A0A0E4HEL6_9BACL NADPH-dependent 7-cyano- 7-deazaguanine reductase OS=Paenibacillus riograndensis SBR5 OX=1073571 GN=queF PE=3 SV=1
MSEGRLKEEMQEVTLLGNQGTTYTFGYDPDILEVFDNKHPGRDYFVKFNCPEFTSLCPVTGQPDFGAMYISYIPDHKMVESKSLKLYLFSFRNHGDFHEDCVNIIMNDLISLMEPRYIEVWGKFTPRGGISIDPYCNWGRPGTKYEAMAEHRLINHDLYPEKVDNR

SEQ ID NO: 48005 - protein, 166 aa, Paenibacillus riograndensis; identical to SEQ ID NO: 48004
  misc_feature (1)..(166): tr|A0A132U8R2|A0A132U8R2_9BACL NADPH-dependent 7-cyano- 7-deazaguanine reductase OS=Paenibacillus riograndensis OX=483937 GN=queF PE=3 SV=1

SEQ ID NO: 48006 - protein, 166 aa, Paenibacillus sabinae; identical to SEQ ID NO: 47954
  misc_feature (1)..(166): tr|X4ZZK0|X4ZZK0_9BACL NADPH-dependent 7-cyano-7-deazag uanine reductase OS=Paenibacillus sabinae T27 OX=126807 2 GN=queF PE=3 SV=1

SEQ ID NO: 48007 - protein, 166 aa, Paenibacillus selenitireducens
  misc_feature (1)..(166): tr|A0A1T2XKZ6|A0A1T2XKZ6_9BACL NADPH-dependent 7-cyano- 7-deazaguanine reductase OS=Paenibacillus selenitireduc ens OX=1324314 GN=queF PE=3 SV=1
MTTQPNQQPIEGLSLLGNQNTAYTYTYDPNILETFVNKKQDRDYFVKFNCPEFTSLCPMTGQPDFATIYISYVPDVNMVESKSLKLYLFSFRNHGDFHETCVNTIMDDLIAVMDPKYIEVWGKFTPRGGISIDPYCNYGKPGTTWEVIARQRLYQHDMYPESIDNR

SEQ ID NO: 48008 - protein, 163 aa, Paenibacillus silvae; identical to SEQ ID NO: 47938
  misc_feature (1)..(163): tr|A0A2W6N7Z0|A0A2W6N7Z0_9BACL NADPH-dependent 7-cyano- 7-deazaguanine reductase OS=Paenibacillus silvae OX=132 5358 GN=queF PE=3 SV=1

SEQ ID NO: 48009 - protein, 165 aa, Paenibacillus solani
  misc_feature (1)..(165): tr|A0A0M1P146|A0A0M1P146_9BACL NADPH-dependent 7-cyano- 7-deazaguanine reductase OS=Paenibacillus solani OX=170 5565 GN=queF PE=3 SV=1
MSGRQKEEMEDVTLLGNQGTTYTFEYDPGILESFDNKHPYRDYFVKFNCPEFTSLCPITGQPDFATIYISYIPDIKMVESKSLKLYLFSFRNHGDFHEDCVNIIMNDLIKLMDPRYIEVWGKFTPRGGISIDPYCNYGRPGTKYEEIAANRLMNHDLYPEKVDNR

SEQ ID NO: 48010 - protein, 166 aa, Paenibacillus sophorae
  misc_feature (1)..(166): tr|A0A1H8FNH2|A0A1H8FNH2_9BACL NADPH-dependent 7-cyano- 7-deazaguanine reductase OS=Paenibacillus sophorae OX=1 333845 GN=queF PE=3 SV=1
MSEGRLKEEMPDVTLLGNQGTQYKFGYAPEVLESFDNKHPGRDYFVKFNCPEFTSLCPVTGQPDFATLYISYIPEQKMVESKSLKLYLFSFRNHGDFHEDCVNIIMNDLIKLMDPRYIEVWGKFTPRGGISIDPYCNYGRPGTKYEAMAEHRLLNHDLYPETIDNR

SEQ ID NO: 48011 - protein, 166 aa, Paenibacillus sp.; identical to SEQ ID NO: 47942
  misc_feature (1)..(166): tr|A0A089I6D0|A0A089I6D0_9BACL NADPH-dependent 7-cyano- 7-deazaguanine reductase OS=Paenibacillus sp. FSL H7-03 57 OX=1536774 GN=queF PE=3 SV=1

SEQ ID NO: 48012 - protein, 165 aa, Paenibacillus sp.
  misc_feature (1)..(165): tr|A0A1I6PDS1|A0A1I6PDS1_9BACL NADPH-dependent 7-cyano- 7-deazaguanine reductase OS=Paenibacillus sp. 453mf OX= 1761874 GN=queF PE=3 SV=1
MAGRQSDELQDITLLGNQGTKYNFEYDPDILETFDNKHPYRDYFVKFNSPEFTSLCPITGQPDFATIYISYIPDIKMVESKSLKLYLFSFRNHGDFHEDVVNIIMNDLIKLMDPRYIEVWGKFTPRGGISIDPYCNYGRPGTKYEELATQRLFQHDMYPEKIDNR

SEQ ID NO: 48013 - protein, 166 aa, Paenibacillus stellifer
  misc_feature (1)..(166): tr|A0A089N609|A0A089N609_9BACL NADPH-dependent 7-cyano- 7-deazaguanine reductase OS=Paenibacillus stellifer OX= 169760 GN=queF PE=3 SV=1
MSEGRKKEEMPEVTLLGNQGTAYNFGYDPGVLESFDNKHPGRDYFVKFNCPEFTSLCPVTGQPDFATIYISYIPEVKMVESKSLKLYLFSFRNHGDFHEDCVNIIMNDLISLMDPRYIEVWGKFTPRGGISIDPYCNYGRPGTKYETMAEHRLLNHDLYPEKVDNR

SEQ ID NO: 48014 - protein, 176 aa, Paenibacillus swuensis
  misc_feature (1)..(176): tr|A0A172TF24|A0A172TF24_9BACL NADPH-dependent 7-cyano- 7-deazaguanine reductase OS=Paenibacillus swuensis OX=1 178515 GN=queF PE=3 SV=1
MSQPTINGSTPAPGRAQGELQDLTLLGDQQVKYLFEYSPQILESFDNKHPYRDYFVKFNCPEFTSLCPITGQPDFATIYISYIPDEKMVESKSLKLYLFSFRNHGDFHEDCMNIIMNDLIKLMDPRYIEVWGKFTPRGGISIDPYTNYGKPGTKYEEMAFHRMMNHDLYPEKVDNR

SEQ ID NO: 48015 - protein, 163 aa, Paenibacillus taichungensis
  misc_feature (1)..(163): tr|A0A329R354|A0A329R354_9BACL NADPH-dependent 7-cyano- 7-deazaguanine reductase OS=Paenibacillus taichungensis OX=484184 GN=queF PE=3 SV=1
MRQPDEMQDLTLLGNQGVKYTFEYDPGILENFDNKHPYRDYFVKFNCPEFTSLCPITGQPDFATIYISYIPDVKMVESKSLKLYLFSFRNHGDFHEDCVNIIMNDLIKLMDPRYIEVWGKFTPRGGISIDPYTNYGKPGTKYEQMAEHRMMNHDMYPETIDNR

SEQ ID NO: 48016 - protein, 198 aa, Paenibacillus taichungensis
  misc_feature (1)..(198): tr|A0A2V3S8B8|A0A2V3S8B8_9BACL NADPH-dependent 7-cyano- 7-deazaguanine reductase OS=Paenibacillus taichungensis OX=484184 GN=queF PE=3 SV=1
MYLGNEVSFTLQADSPVHIYREASGFDGNKERLRTMRQPDEMQDLTLLGNLGVKYTFEYDPGILENFDNKHPYRDYFVKFNCPEFTSLCPITGQPDFATIYISYIPDVKMVESKSLKLYLFSFRNHGDFHEDCVNIIMNDLIKLMDPRFIEVWGKFTPRGGISIDPYTNYGKPGTKYEQMADHRMMNHDMYPETIDNR

SEQ ID NO: 48017 - protein, 167 aa, Paenibacillus taihuensis
  misc_feature (1)..(167): tr|A0A3D9Q646|A0A3D9Q646_9BACL NADPH-dependent 7-cyano- 7-deazaguanine reductase OS=Paenibacillus taihuensis OX =1156355 GN=queF PE=3 SV=1
MSGRSKEELQEGGVSHLGNQGTQYLFNYSPEVLESFDNKHVGRDYFVKFNCPEFTSLCPITGQPDFATIYISYIPDVKMVESKSLKLYLFSFRNHGDFHEDCMNIIMNDLIALMNPRYIEVWGKFTPRGGISIDPYTNWGRPGTKFEEMAHYRLMNHDLYPEKVDNR

SEQ ID NO: 48018 - protein, 165 aa, Paenibacillus terrae
  misc_feature (1)..(165): tr|G7VYT2|G7VYT2_PAETH NADPH-dependent 7-cyano-7-deazag uanine reductase OS=Paenibacillus terrae (strain HPL-00 3) OX=985665 GN=queF PE=3 SV=1
MTGRTPEEMTDVTLLGNQGTQYTFAYDPAILESFDNKHPYRDYFVKFNCPEFTSLCPITGQPDFATIYISYIPDIKMVESKSLKLYLFSFRNHGDFHEDCVNIIMNDLIKLMDPRYIEVWGKFTPRGGISIDPYTNYGKPGTQYEQMAEHRMMNHDMYPETVDNR

SEQ ID NO: 48019 - protein, 165 aa, Paenibacillus terrae
  misc_feature (1)..(165): tr|A0A4U2PWI5|A0A4U2PWI5_9BACL NADPH-dependent 7-cyano- 7-deazaguanine reductase OS=Paenibacillus terrae OX=159 743 GN=queF PE=3 SV=1
MTGRTPEEMTDVTLLGNQGTQYTFAYDPAILESFDNKHPYRDYFVKFNCPEFTSLCPITGQPDFATIYISYIPDIKMVESKSLKLYLFSFRNHGDFHEDCVNIMMNDLIKLMDPRYIEVWGKFTPRGGISIDPYTNYGKPGTKYEQMAEHRMMNHDMYPETVDNR

SEQ ID NO: 48020 - protein, 165 aa, Paenibacillus thermophilus
  misc_feature (1)..(165): tr|A0A388MLX6|A0A388MLX6_9BACL NADPH-dependent 7-cyano- 7-deazaguanine reductase OS=Paenibacillus thermophilus OX=1181891 GN=queF PE=3 SV=1
MAGRKPEEMQDVTLLGNQGVKYPFDYAPEVLESFDNKHPYRDYFVKFNCPEFTSLCPITGQPDFATIYISYIPDVKMVESKSLKLYLFSFRNHGDFHEDCVNIIMNDLIKLMDPKYIEVWGKFTPRGGISIDPYCNYGRPGTKYEAMAEHRLLNHDMYPEKIDNR

SEQ ID NO: 48021 - protein, 163 aa, Paenibacillus thiaminolyticus
  misc_feature (1)..(163): tr|A0A3A3GCS7|A0A3A3GCS7_PANTH NADPH-dependent 7-cyano- 7-deazaguanine reductase OS=Paenibacillus thiaminolytic us OX=49283 GN=queF PE=3 SV=1
MAGRNEAELQLKHLGGKTEYATDYAPHVLEAFDNKHPNRDYFVKFNCPEFTSLCPMTGQPDFATMYISYIPDQKCVESKSLKLYMFSFRNHGDFHEDCVNIIMNDLIELLDPKYIEVWGKFTPRGGISIDPYCNYGRPGTKYEEMAAYRLMNHDLYPETVDNR

SEQ ID NO: 48022 - protein, 163 aa, Paenibacillus thiaminolyticus
  misc_feature (1)..(163): tr|A0A378ZFL6|A0A378ZFL6_PANTH NADPH-dependent 7-cyano- 7-deazaguanine reductase OS=Paenibacillus thiaminolytic us OX=49283 GN=queF PE=3 SV=1
MAGRNEAELQLKHLGGKTEYATDYAPDVLEAFDNKHPNRDYFVKFNCPEFTSLCPMTGQPDFATMYISYIPDRKCVESKSLKLYMFSFRNHGDFHEDCVNIIMNDLIELLDPKYIEVWGKFTPRGGISIDPYCNYGRPGTKYEEMAAYRLMNHDLYPETVDNR

SEQ ID NO: 48023 - protein, 164 aa, Paenibacillus tianmuensis
  misc_feature (1)..(164): tr|A0A1G4RH04|A0A1G4RH04_9BACL NADPH-dependent 7-cyano- 7-deazaguanine reductase OS=Paenibacillus tianmuensis O X=624147 GN=queF PE=3 SV=1
MAGRKEGELDLTLLGNQQTKYPMNYAPEMLESFDNKHPYRDYFVKFNCPEFTSLCPITGQPDFATIYISYIPDLKMVESKSLKLYLFSFRNHGDFHEDCMNIIMNDLIKLMDPKYIEVWGKFTPRGGISIDPYCNYGRPGTKYEQMAEHRLLNHDLYPEKVDNR

SEQ ID NO: 48024 - protein, 166 aa, Paenibacillus typhae
  misc_feature (1)..(166): tr|A0A1G8GWI5|A0A1G8GWI5_9BACL NADPH-dependent 7-cyano- 7-deazaguanine reductase OS=Paenibacillus typhae OX=117 4501 GN=queF PE=3 SV=1
MSEGRLKEEMPEVTLLGNQGTKYNFGYDPEVLEAFDNKHPGRDYFVKFNCPEFTSLCPVTGQPDFGVMYISYIPDIKMVESKSLKLYLFSFRNHGDFHEDCVNIIMNDLISLMNPRYIEVWGKFTPRGGISIDPYCNWGRPGTKYEAMAEHRLMNHDLYPEKVDNR

SEQ ID NO: 48025 - protein, 164 aa, Paenibacillus tyrfis; identical to SEQ ID NO: 47956
  misc_feature (1)..(164): tr|A0A081NXC7|A0A081NXC7_9BACL NADPH-dependent 7-cyano- 7-deazaguanine reductase OS=Paenibacillus tyrfis OX=150 1230 GN=queF PE=3 SV=1

SEQ ID NO: 48026 - protein, 165 aa, Paenibacillus uliginis
  misc_feature (1)..(165): tr|A0A1X7HNV4|A0A1X7HNV4_9BACL NADPH-dependent 7-cyano- 7-deazaguanine reductase OS=Paenibacillus uliginis N3/9 75 OX=1313296 GN=queF PE=3 SV=1
MAGRQRDEMEDITLLGNQGTKYQFEYDPSILESFDNKHPYRDYFVKFNCPEFTSLCPITGQPDYATIYISYIPDIKMVESKALKLYLFSFRNHGDFHEDCVNIIMNDLIKLMDPRYIEVWGKFTPRGGISIDPYCNYGRPGTKYEEVAAHRLMNHDMYPEKVDNR

SEQ ID NO: 48027 - protein, 165 aa, Paenibacillus vortex
  misc_feature (1)..(165): tr|A0A2R9SYQ4|A0A2R9SYQ4_9BACL NADPH-dependent 7-cyano- 7-deazaguanine reductase OS=Paenibacillus vortex V453 O X=715225 GN=queF PE=3 SV=1
MAGRQKEEMQDVTLLGNQGTKYTFEYDPSILESFDNKHAYRDYFVKFNCPEFTSLCPITGQPDFATIYISYIPDIKMVESKSLKLYLFSFRNHGDFHEDCMNIIMNDLIKLMDPRYIEVWGKFTPRGGISIDPYCNYGRPGTKYEDIAANRLMNHDLYPETVDNR

SEQ ID NO: 48028 - protein, 166 aa, Paenibacillus whitsoniae
  misc_feature (1)..(166): tr|A0A3S0BQ70|A0A3S0BQ70_9BACL NADPH-dependent 7-cyano- 7-deazaguanine reductase OS=Paenibacillus whitsoniae OX =2496558 GN=queF PE=3 SV=1
MSAGRSHEDLQHISLLGNQGTKYIFSYDPTLLEAFDNKHPNRDYFVKFNFPEFTSLCPVTGQPDFATLYISYIPEIKMVESKSLKLYLFSFRNHGDFHEDCVNIIMNDLIKLMDPRYIEVWGKFTPRGGISIDPYCNYGRPGTKYEAMAEHRLMNHDLYPEKIDNR

SEQ ID NO: 48029 - protein, 166 aa, Paenibacillus wynnii
  misc_feature (1)..(166): tr|A0A098M591|A0A098M591_9BACL NADPH-dependent 7-cyano- 7-deazaguanine reductase OS=Paenibacillus wynnii OX=268 407 GN=queF PE=3 SV=1
MSEGRIKEDMLEVTLLGNQGTAYKFGYDPDILEVFDNKHPGRDYFVKFNCPEFTSLCPVTGQPDFGTMYISYIPEQKMVESKSLKLYLFSFRNHGDFHEDCVNIIMNDLIALMEPRYIEVWGKFTPRGGISIDPYCNWGRPGTKYEAMAEHRLMNHDLYPEKIGNR

SEQ ID NO: 48030 - protein, 119 aa, Paenibacillus xerothermodurans
  misc_feature (1)..(119): tr|A0A2W1NB97|A0A2W1NB97_9BACL NADPH-dependent 7-cyano- 7-deazaguanine reductase OS=Paenibacillus xerothermodur ans OX=1977292 GN=queF PE=3 SV=1
MSTKPSRTLLAVPNPHPDREYEVEIESPEFTALCPVTGQPDFATITFKYIPGPSIVELKSLKLYLWSFRDEGHFHEDVTNRILKDFVEQIQPRKLQVVGKFNVRGGIYTTVRAEYEQEK

SEQ ID NO: 48031 - protein, 163 aa, Paenibacillus xylanexedens
  misc_feature (1)..(163): tr|A0A3N6BR24|A0A3N6BR24_9BACL NADPH-dependent 7-cyano- 7-deazaguanine reductase OS=Paenibacillus xylanexedens OX=528191 GN=queF PE=3 SV=1
MRQPDEMQDVTLLGNQNVKYTFEYDPGILENFDNKHPYRDYFVKFNCPEFTSLCPITGQPDFATIYISYIPDIKMVESKSLKLYLFSFRNHGDFHEDCVNIIMNDLIKLMDPRYIEVWGKFTPRGGISIDPYTNYGKPGTKYEQMADHRMMNHDMYPETIDNR

SEQ ID NO: 48032 - protein, 163 aa, Paenibacillus xylanexedens
  misc_feature (1)..(163): tr|A0A1L5LLN0|A0A1L5LLN0_9BACL NADPH-dependent 7-cyano- 7-deazaguanine reductase OS=Paenibacillus xylanexedens OX=528191 GN=queF PE=3 SV=1
MRQPDEMQDVTLLGNQNVKYTFEYDPGILENFDNKHPYRDYFVKFNCPEFTSLCPITGQPDFATIYISYIPDVKMVESKSLKLYLFSFRNHGDFHEDCVNIIMNDLIKLMDPRYIEVWGKFTPRGGISIDPYTNYGKPGTKYEQMADHRMMNHDMYPETIDNR

SEQ ID NO: 48033 - protein, 165 aa, Paenibacillus yonginensis
  misc_feature (1)..(165): tr|A0A1B1MWM3|A0A1B1MWM3_9BACL NADPH-dependent 7-cyano- 7-deazaguanine reductase OS=Paenibacillus yonginensis O X=1462996 GN=queF PE=3 SV=1
MSGRQQEEMQDLTLLGNQGTKYPFNYAPEVLESFDNKHPYRDYFVKFNCPEFTSLCPITGQPDFATIYISYIPDVKMVESKSLKLYLFSFRNHGDFHEDCVNIIMNDLIKLMDPRYIEVWGKFTPRGGISIDPYCNYGKPGTKYEQLAEQRLFNHDLYPEKVDNR

SEQ ID NO: 48034 - protein, 153 aa, Paenimaribius caenipelagi
  misc_feature (1)..(153): tr|A0A547PR89|A0A547PR89_9RHOB NADPH-dependent 7-cyano- 7-deazaguanine reductase OS=Paenimaribius caenipelagi O X=2489174 GN=queF PE=3 SV=1
MSTDTRGLTQLGQDTAQPMSPETAVLERVPAPHKGRDYMVRFTCPEFTSLCPMTGQPDFAHLVIDYVPGDWLVESKSLKLFLHSFRNHGSFHEDCTMTVVTKIEELLAPKWIRIGGYWYPRGGIPIDIFWQSGPVPDDVWIPGQDVPGYRGRG

SEQ ID NO: 48035 - protein, 154 aa, Paenirhodobacter enshiensis
  misc_feature (1)..(154): tr|A0A086XSC9|A0A086XSC9_9RHOB NADPH-dependent 7-cyano- 7-deazaguanine reductase OS=Paenirhodobacter enshiensis OX=1105367 GN=queF PE=3 SV=1
MSETIYDGLTQLGHAAPLPESPEAAILERVPNPQQGIGYLVRFTAPEFTSLCPLTGQPDFAHLMIDYVPGDWLVESKSLKLFLGSFRNHGAFHEDCTISIARRLVETLDPRWLRIGGYWYPRGGIPIDVFWQTGAAPEGVWIPDQGVPPYRGRG

SEQ ID NO: 48036 - protein, 165 aa, Paenisporosarcina antarctica
  misc_feature (1)..(165): tr|A0A4P6ZUH5|A0A4P6ZUH5_9BACL NADPH-dependent 7-cyano- 7-deazaguanine reductase OS=Paenisporosarcina antarctic a OX=417367 GN=queF PE=3 SV=1
MTGRQKEDLQGINLLGNQNVQYDFSYNPGVLESFENKHPYRDYFVKFNCPEFTSLCPITSQPDFATIYISYIPEINMVESKSLKLYLFSFRNHGDFHEDCMNIILNDLIKLMEPRYIEVWGKFTPRGGISIDPYTNYGKPGTKYEEMATHRMMNHDMYPETINNR

SEQ ID NO: 48037 - protein, 166 aa, Paenisporosarcina quisquiliarum
  misc_feature (1)..(166): tr|A0A1H8B1P9|A0A1H8B1P9_9BACL NADPH-dependent 7-cyano- 7-deazaguanine reductase OS=Paenisporosarcina quisquili arum OX=365346 GN=queF PE=3 SV=1
MSGRSHDEGLKDLTLLGNQGTKYSFDYAPEVLESVDNMHSTRDYFVKFNCPEFTSLCPITNQPDFATMYISYIPDKKIVESKSLKLYLFSFRNHGDFHEDCVNIIMNDLIELLDPRYIEVWGKFTPRGGISIDPWCNYGRPGTKYVEMADFRLMNHDLYPEKIDNR

SEQ ID NO: 48038 - protein, 165 aa, Paenisporosarcina sp.
  misc_feature (1)..(165): tr|A0A2T6KGF1|A0A2T6KGF1_9BACL NADPH-dependent 7-cyano- 7-deazaguanine reductase OS=Paenisporosarcina sp. OV554 OX=2135694 GN=queF PE=3 SV=1
MSGRQKEELQGINLLGNQNVQYDFSYNPGVLESFENKHPYRDYFVKFNCPEFTSLCPITSQPDFATIYISYIPDIQMVESKSLKLYLFSFRNHGDFHEDCMNIILNDLVKLMDPRYIEVWGKFTPRGGISIDPYTNYGKPGTKYEEMAAHRLMNHDMYPETIDNR

SEQ ID NO: 48039 - protein, 165 aa, Paenisporosarcina sp.
  misc_feature (1)..(165): tr|S2XIP7|S2XIP7_9BACL NADPH-dependent 7-cyano-7-deazag uanine reductase OS=Paenisporosarcina sp. HGH0030 OX=10 78085 GN=queF PE=3 SV=1
MSGRQKEDLEGISLLGNQNVQYDFSYNPGVLESFDNKHPYRDYFVKFNCPEFTSLCPITSQPDFATIYISYIPDIKMVESKSLKLYLFSFRNHGDFHEDCMNIILNDLVELMDPRYIEVWGKFTPRGGISIDPYTNYGKPGTKYEEMAAHRMMNHDMYPETIDNR

SEQ ID NO: 48040 - protein, 153 aa, Palleronia abyssalis
  misc_feature (1)..(153): tr|A0A2R8BW77|A0A2R8BW77_9RHOB NADPH-dependent 7-cyano- 7-deazaguanine reductase OS=Palleronia abyssalis OX=150 1240 GN=queF PE=3 SV=1
MTTDTSSLTQLGHSTETPASPEEAVLERVPSPHRDADYVVRFTCPEFTSLCPMTGQPDFAHLVIDYVPGDWLVESKSLKLFLTSFRNHGSFHEDCTMTVAARIRDLLDPKWLRIGGYWYPRGGIPIDVFWQTGPAPEGVWIPDQGVPPYRGRG

SEQ ID NO: 48041 - protein, 166 aa, Paludibacter jiangxiensis
  misc_feature (1)..(166): tr|A0A161LDE5|A0A161LDE5_9BACT NADPH-dependent 7-cyano- 7-deazaguanine reductase OS=Paludibacter jiangxiensis O X=681398 GN=queF PE=3 SV=1
MFSILTCRTVSGKSKKFRIMSLHHLGNKTNYPTDYAPELLETFDNKHPGNDYWVRFNCPEFTSLCPITGQPDFATIVIDYIPAQKMVESKSLKLYLFSFRNRGDFHEDCVNIIMKDLIRLMEPKYIEVTGLFTPRGGISIYPYANYGMPGTEFEEMAKYRLKNKNL

SEQ ID NO: 48042 - protein, 298 aa, Paludibacter propionicigenes
  misc_feature (1)..(298): tr|E4T438|E4T438_PALPW GTP cyclohydrolase I/Nitrile oxi doreductase OS=Paludibacter propionicigenes (strain DSM 17365 / JCM 13257 / WB4) OX=694427 GN=Palpr_1336 PE=4 SV=1
MDFNLKDSLLGKQSSTPETYDASLLFRIPRSENRVRYAIEDEHLPFVGFDVWNCYELSFLTDNGLPVSRVLKLVYPASGQFLVESKSLKLYLNAFNMDRFGKTIAIAESRVADLIRTDLSRLLETDVQVSLFGSGSAVGQPFQAFDGVDLCSQIPESVQESIAFTRFVESPDLLRGSVSDVMKSYVFRTDLLRSNCRVTNQPDWGDLFVSMSAQRDVDLSSVMEYLVSFRKENHFHEEVVEMIYKRFWDIFAPESLMVAAMYTRRGGIDINPIRASHSGLIDKILVDGGLMTAKTWRQ

SEQ ID NO: 48043 - protein, 278 aa, Paludibacterium purpuratum
  misc_feature (1)..(278): tr|A0A4R7BCQ9|A0A4R7BCQ9_9NEIS NADPH-dependent 7-cyano- 7-deazaguanine reductase OS=Paludibacterium purpuratum OX=1144873 GN=queF PE=3 SV=1
MTTQQPEHSPLGKKVDYQDHYDPTLLFPIPRRAKREEIGVDEAALPFAGCDIWNGYELSWLNARGKPQIAIATIVIPAESPSLIESKSFKLYLNTFNQTRLDNDQAVIDCLTRDLSHAAGAQVLVTLTRPAAFVAERFAELPGESIDELDIAVDDYSPDPSRLTAHAGDIVEETLCSDLLKSNCLVTGQPDWGSVTVHYRGARIDREGLLRYLIGFRQHNEFHEQCVERIFVDLLRQCRPEVLTVYARYTRRGGLDINPWRSNDPNASAPVNLRTARQ

SEQ ID NO: 48044 - protein, 140 aa, Paludifilum halophilum
  misc_feature (1)..(140): tr|A0A235B5Z9|A0A235B5Z9_9BACL NADPH-dependent 7-cyano- 7-deazaguanine reductase OS=Paludifilum halophilum OX=1 642702 GN=queF PE=3 SV=1
MEKETADQRKYSSIRFDTQDESAIMTDVLETVPYEYPGKDVEVEIPTAEFTSVCPWSGLPDFAEMKITLIPDQHLIEMKSLKYYLTSYRNVGIYQEHATRRILEELVQVAQPKYMKVEALWNPRGGLGTRVVAEYPGEEH

SEQ ID NO: 48045 - protein, 116 aa, Paludisphaera borealis
  misc_feature (1)..(116): tr|A0A1U7CWU4|A0A1U7CWU4_9BACT NADPH-dependent 7-cyano- 7-deazaguanine reductase OS=Paludisphaera borealis OX=1 387353 GN=queF PE=3 SV=1
MAAAVETFPNQFPNREYEIEITCPEFTAVCPKTGQPDFGTIVITYVPAATCLELKSLKLYLFAFRDRGIFYEHTINTILDDLTGSCQPLRMKIVGLFNPRGGMTSRITATYEASGS

SEQ ID NO: 48046 - protein, 136 aa, Panacagrimonas perspica
  misc_feature (1)..(136): tr|A0A4S3KBQ6|A0A4S3KBQ6_9GAMM NADPH-dependent 7-cyano- 7-deazaguanine reductase OS=Panacagrimonas perspica OX= 381431 GN=queF PE=3 SV=1
MTASPSKSLETFPNPNPDRDFVIRMRMPEFTCLCPKTGQPDFGTLYLEYIPERLCVELKSLKLYVWSFRDEGAFHEAVTNRILDDLVRATAPRFMRLTGDFGVRGGIFTHVVAEHRAAGWQPAPAVILPPGEWIKQ

SEQ ID NO: 48047 - protein, 79 aa, Pandoraea apista
  misc_feature (1)..(79): tr|A0A5E5PA33|A0A5E5PA33_9BURK NADPH-dependent 7-cyano- 7-deazaguanine reductase OS=Pandoraea apista OX=93218 G N=queF_1 PE=4 SV=1
MLEMSDAHRYFFTLRDPCFDSTDALEAHVAGELSRCLRIYDLVRTTPVSSVDSQNGLHRQAVASLHDPLHTAAASRSRR

SEQ ID NO: 48048 - protein, 275 aa, Pandoraea apista
  misc_feature (1)..(275): tr|A0A0G4JGP0|A0A0G4JGP0_9BURK NADPH-dependent 7-cyano- 7-deazaguanine reductase OS=Pandoraea apista OX=93218 G N=queF PE=3 SV=1
MTTPNQSPLGKEVAYTEQYTPSLLFPIARAPARAAIGVPDPLPFFGADIWNGYELSWLNEKGKPQIALLTAIVPADSPNIIESKSFKLYLGSFAQTKLANADAARALIQQDLSEAAGAAVQVRLVEPGAFEKLELDELDGLLVDRLDIETDVYAPDATLLKAAEGEPHVDETLVSNLLKSNCPVTGQPDWGSLQIRYVGPPIDQEGLLKYVISYRRHTGFHEQCVEGIFMDILRQCKPSQLAVYARYTRRGGLDINPFRTNFTLPMPDNARTARQ

SEQ ID NO: 48049 - protein, 275 aa, Pandoraea faecigallinarum
  misc_feature (1)..(275): tr|A0A0H3WXF2|A0A0H3WXF2_9BURK NADPH-dependent 7-cyano- 7-deazaguanine reductase OS=Pandoraea faecigallinarum O X=656179 GN=queF PE=3 SV=1
MTTPEQSTLGKEVAYTEHYDPSQLFPIARAPARAQIGVPDTLPFFGADIWNGYELSWLNEKGKPQIALLTAVVPADSPFIIESKSFKLYLGSFAQTKLANPEAARALIQQDLSEAAGAPVQVRLTDPSGFGKLRLDELDGLLVDRLDIDTDVYVPDASLLSAAFDEPHVEETLVSNLLKSNCPVTGQPDWGSLQIRYVGPPIDQEGLLKYVISYRRHTGFHEQCVEGIFMDLLRQCKPSQLAVYARYTRRGGLDINPFRTNFTLPMPDNARTARQ

SEQ ID NO: 48050 - protein, 142 aa, Pandoraea fibrosis
  misc_feature (1)..(142): tr|A0A0B3SVS3|A0A0B3SVS3_9BURK Uncharacterized protein OS=Pandoraea fibrosis OX=1891094 GN=PJ20_11460 PE=4 SV= 1
MNVDHEFVVIPNTIKQQARMRAYEIMFDIPAFRTNEHLHPAEVNVARMKFHYHPRKRLVEFFSFQEYLCKYASLAMTLEQACGSIIDDFFESIEPIQCELIVQNELPDCANVTIRASRGWIDAIHSPAASSPIPGKRIALLT

SEQ ID NO: 48051 - protein, 275 aa, Pandoraea fibrosis
  misc_feature (1)..(275): tr|A0A5E4TJV6|A0A5E4TJV6_9BURK NADPH-dependent 7-cyano- 7-deazaguanine reductase OS=Pandoraea fibrosis OX=18910 94 GN=queF PE=3 SV=1
MTTPDQSPLGKEVAYTEQYTPSLLFPIARAPARAAIGVPDALPFFGADIWNGYELSWLSEKGKPQIALLTAIVPADSPNIIESKSFKLYLGSFAQTKLANVDAARALIQQDLSEAAGAPVQVRLVEPGAFDKLELDELDGLLVDRLDIETDVYTPDATLLKAAEGEPHVDETLVSNLLKSNCPVTGQPDWGSLQIRYVGPPIDQEGLLKYVISYRRHTGFHEQCVEGIFMDILRQCKPSQLAVYARYTRRGGLDINPFRTNFTLPMPDNARTARQ

SEQ ID NO: 48052 - protein, 252 aa, Pandoraea norimbergensis
  misc_feature (1)..(252): tr|A0A0U2WQ88|A0A0U2WQ88_9BURK QueF_N domain-containing protein OS=Pandoraea norimbergensis OX=93219 GN=AT302_ 22535 PE=4 SV=1
MRGYDLWNDYEVAWLDMHERPQIAVLEIVIPCDSPFTLEMSDARRYVSTLRDLRFESAQALEAHVAGALTHCLKSYVLVRATPVRQAVRATCGDESDTVSLDTEPVGVVRGGVQASLLRTVHDAGGAGIAGNRSKAEDAAPGSATLSHECLSSDLLSSRCPLTGGIDLGTVWIDYTGPRICRQTLLAYLLSFRDSEMFHEQCVETVFLDVLAQCAPTRLTVGARFTRRHGLDINPVRSTHAISIRNVRTVRQ

SEQ ID NO: 48053 - protein, 275 aa, Pandoraea norimbergensis
  misc_feature (1)..(275): tr|A0A0U2Y6L3|A0A0U2Y6L3_9BURK NADPH-dependent 7-cyano- 7-deazaguanine reductase OS=Pandoraea norimbergensis OX =93219 GN=queF PE=3 SV=1
MTTPDQSPLGKEVGYTEQYDPSLLFPIARAPARGAIGVPDALPFFGADIWNGYELSWLGDKGKPHIALLTAIVPADSPNIIESKSFKLYLGSFAQTKLANADAARALIQQDLSEAAGASVQVKLVEPSGFGKLQLDELDGLLVDRLDVETDIYSPDASLLKAAQGEPHVEETLVSNLLKSNCPVTGQPDWGSLQIRYNGPPIDQEGLLKYVISYRRHTGFHEQCVEGIFMDIMRQCKPTQLAVYARYTRRGGLDINPFRTNFTQPMPDNARTARQ

SEQ ID NO: 48054 - protein, 275 aa, Pandoraea oxalativorans
  misc_feature (1)..(275): tr|A0A0E3YC25|A0A0E3YC25_9BURK NADPH-dependent 7-cyano- 7-deazaguanine reductase OS=Pandoraea oxalativorans OX= 573737 GN=queF PE=3 SV=1
MTTPEQSSLGKEVAYTEQYDPSQLFPIARAPARAEIGVPDVLPFFGADIWNGYELSWLNEKGKPQIALLTAMVPADSPFIIESKSFKLYLGSFAQTKLANVDAARALIQQDLSEAAGAPVQVRLVEPSGFAKLELDELDGLLVDRLDIDTDIYVPDASLLTAAFDEAPVDETLVSNLLKSNCPVTGQPDWGSLQIRYVGPPINQEGLLKYVISYRRHTGFHEQCVEGIFMDIMRQCKPTQLAVYARYTRRGGLDINPFRTNFTLPMPDNARTARQ

SEQ ID NO: 48055 - protein, 275 aa, Pandoraea pnomenusa
  misc_feature (1)..(275): tr|A0A378YUN2|A0A378YUN2_9BURK NADPH-dependent 7-cyano- 7-deazaguanine reductase OS=Pandoraea pnomenusa OX=9322 0 GN=queF PE=3 SV=1
MTTPDQSPLGKEVAYTEQYDPSLLFPIARAPARAAIGVPDTLPFFGADIWNGYELSWLNEKGKPQIALLTAMVPADSPNIIESKSFKLYLGSFAQTRLANADAARALIQQDLSEAAGAPVQVRLIEPGGFGKLELDELDGLLVDRLDIETDVYAPDATLLKAAFDEPHVDETLVSNLLKSNCPVTGQPDWGSLQIRYVGPPIDQEGLLKYVISYRRHTGFHEQCVEGIFMDILRQCKPSQLAVYARYTRRGGLDINPFRTNFTLPMPDNARTARQ

SEQ ID NO: 48056 - protein, 275 aa, Pandoraea pnomenusa
  misc_feature (1)..(275): tr|A0A518QYZ9|A0A518QYZ9_9BURK NADPH-dependent 7-cyano- 7-deazaguanine reductase OS=Pandoraea pnomenusa OX=9322 0 GN=queF PE=3 SV=1
MTTPDQSPLGKEVAYTEQYDPSLLFPIARAPARAAIGVPDTLPFFGADIWNGYELSWLNEKGKPQIALLTAMVPADSPNIIESKSFKLYLGSFAQTRLANADAARALIQQDLSEAAGAPVQVRLVEPGGFGKLELDELDGLLVDRLDIETDVYAPDAALLKAAFDEPHVDETLVSNLLKSNCPVTGQPDWGSLQIRYVGPPIDQEGLLKYVISYRRHTGFHEQCVEGIFMDILRQCKPSQLAVYARYTRRGGLDINPFRTNFTLPMPDNARTARQ

SEQ ID NO: 48057 - protein, 275 aa, Pandoraea pulmonicola
  misc_feature (1)..(275): tr|A0A378Z4T7|A0A378Z4T7_9BURK NADPH-dependent 7-cyano- 7-deazaguanine reductase OS=Pandoraea pulmonicola OX=93 221 GN=queF_2 PE=3 SV=1
MTTPDQSPLGKEVSYTEQYAPTLLFPIARAPARAAIGVPDALPFFGADIWNGYELSWLNEKGKPQIALLTAIVPADSPNIIESKSFKLYLGSFAQTRLANADAARALIQQDLSEAAGAAVQVRLVEPGGFGKLELDELDGLLVDRLDIETNVYTPDATLLKAAQDEPHVDETLVSNLLKSNCPVTGQPDWGSLQIRYVGPPIDQEGLLKYVISYRRHTGFHEQCVEGIFMDIMRQCKPSQLAVYARYTRRGGLDINPFRTNFTLPMPDNARTARQ

SEQ ID NO: 48058 - protein, 296 aa, Pandoraea pulmonicola
  misc_feature (1)..(296): tr|A0A378YZQ4|A0A378YZQ4_9BURK NADPH-dependent 7-cyano- 7-deazaguanine reductase OS=Pandoraea pulmonicola OX=93 221 GN=queF_1 PE=4 SV=1
MTFRDSHRPPQWELADIDLSAARPLSRQRAAIHPIPRSRLRCRPPSAIVAARGYDLWNHYEVSWLDMHERPQIAVVELVIPCSSPYTLEMADAQRYFLTLREQCFESPEALEAHVAGELSRSLQEYVLVRTTPVRQAVRTTMACAPDTQTLDSEPVGVVRGGVRADLLSRARDAAAAPSSCASSSPFPSTVHECLTSDLLSIRCPLSGGVDYGTVWFDYTGTPICRRSLLAYVLSYRDSEMYIEQCVETLFSDILAQCAPTRLVVSARFTRRHGIDINPVRSTHATSVTNLRTVRQ

SEQ ID NO: 48059 - protein, 275 aa, Pandoraea sp.
  misc_feature (1)..(275): tr|R7X5M7|R7X5M7_9BURK NADPH-dependent 7-cyano-7-deazag uanine reductase OS=Pandoraea sp. SD6-2 OX=1286093 GN=q ueF PE=3 SV=1
MTTPDQSPLGKEVAYTEQYAPSLLFPIARAPARAAIGVPDVLPFFGADIWNGYELSWLNEKGKPQIALLTAIVPADSPNIVESKSFKLYLGSFAQTKLANVDAARALIQQDLSEAAGAAVQVRLVEPAAFVKLELDELDGLLVDRLDIETDVYAPDATLLKAAQGEPHVDETLVSNLLKSNCPVTGQPDWGSLQIRYVGPPIDQEGLLKYVISYRRHTGFHEQCVEGIFMDILRQCKPSQLAVYARYTRRGGLDINPFRTNFTLPMPDNARTARQ

SEQ ID NO: 48060 - protein, 274 aa, Pandoraea sp.
  misc_feature (1)..(274): tr|A0A522ENN0|A0A522ENN0_9BURK NADPH-dependent 7-cyano- 7-deazaguanine reductase OS=Pandoraea sp. OX=1883445 GN =queF PE=3 SV=1
MQAEHSPLGKPVNYTEQYDPALLFPIERQPAREAIGVPAPLPFFGADLWNAYELSWLNPKGKPQIALLTAIVPADSPNIVESKSFKLYLGSFAQTRLANAEAARQLIQQDLSEACGAAVQVRLTEATRFDQLRLAELEGLSLDRLDIETDIYTPDPTLLRANHDEAPVEETLVSNLLKSNCPVTGQPDWGSVQVRYVGAPIDQAGLLKYLISFRNHTGFHEQCVERIFMDILRACAPGKLAVYARYTRRGGLDINPFRTNFNLPLPDNRRNARQ

SEQ ID NO: 48061 - protein, 275 aa, Pandoraea sputorum
  misc_feature (1)..(275): tr|A0A239S9W0|A0A239S9W0_9BURK NADPH-dependent 7-cyano- 7-deazaguanine reductase OS=Pandoraea sputorum OX=93222 GN=queF_1 PE=3 SV=1
MTTPEQSSLGKEVAYTEQYDPSQLFPIARAPARAEIGVPDVLPFFGADIWNGYELSWLNEKGKPQIALLTAMVPADSPFIIESKSFKLYLGSFAQTKLANVDAARALIQQDLSEAAGAPVQVKLVEPSGFAKLELDELDGLLVDRLDIDTDIYVPDASLLTAAFDEAPVDETLVSNLLKSNCPVTGQPDWGSLQIRYVGPPINQEGLLKYVISYRRHTGFHEQCVEGIFMDIMRQCKPTQLAVYARYTRRGGLDINPFRTNFTLPMPDNARTARQ

SEQ ID NO: 48062 - protein, 142 aa, Pandoraea sputorum
  misc_feature (1)..(142): tr|A0A5E5BJS0|A0A5E5BJS0_9BURK NADPH-dependent 7-cyano- 7-deazaguanine reductase OS=Pandoraea sputorum OX=93222 GN=queF_2 PE=4 SV=1
MNVDHEFVVIPNVIKQQARMRAYEVTFDVPAFRTNEHLHPSEQNVARLKFRYHPRRQLVEFFSFQTYLSKYAGLAMTLEQACWSIVDDFFESLEPIRCDLIIQNELSDCTNVTIHASRGWTDSIQLTTGSVSPLERKVAAPI

SEQ ID NO: 48063 - protein, 274 aa, Pandoraea terrae
  misc_feature (1)..(274): tr|A0A5E4TXJ3|A0A5E4TXJ3_9BURK NADPH-dependent 7-cyano- 7-deazaguanine reductase OS=Pandoraea terrae OX=1537710 GN=queF PE=3 SV=1
MTPEKSPLGKEVAYTEQYDPSLLFPIARIAARHEIGVPETLPFFGADLWNGYELSWLNQKGKPQIALVTAIVPADSPNIVESKSFKLYLGSFAQTRLGGSDAVRALLQQDLSEACGASVQVRLTEPSNFGKLQLDELDGLLLDRLDIETDIYVPDASLLRAASGEPPVDETLVSNLLKSNCPVTGQPDWGSVQIRYVGAPIDQEGLLKYIVSFRRHTGFHEQCVERIFMDIMRQCAPSKLAVYARYTRRGGLDINPFRTNFNLPLPDNARTARQ

SEQ ID NO: 48064 - protein, 274 aa, Pandoraea thiooxydans
  misc_feature (1)..(274): tr|A0A0G3EWL0|A0A0G3EWL0_9BURK NADPH-dependent 7-cyano- 7-deazaguanine reductase OS=Pandoraea thiooxydans OX=44 5709 GN=queF PE=3 SV=1
MQAEHSPLGKPVNYTEQYDPALLFPIERQPAREAIGVPAPLPFFGADLWNAYELSWLNPKGKPQIALLTAIVPADSPNIVESKSFKLYLGSFAQTRLANAEAARQLIQQDLSEACGAAVQVRLTEATHFDQLRLAELEGLSLDRLDIETDIYTPDPTLLHANHDEAPVEETLVSNLLKSNCPVTGQPDWGSVQIRYVGAPIDHAGLLKYLISFRNHTGFHEQCVERIFMDILRTCAPGKLAVYARYTRRGGLDINPFRTNFNLPLPDNRRNARQ

SEQ ID NO: 48065 - protein, 275 aa, Pandoraea vervacti
  misc_feature (1)..(275): tr|A0A0C5JW78|A0A0C5JW78_9BURK NADPH-dependent 7-cyano- 7-deazaguanine reductase OS=Pandoraea vervacti OX=65617 8 GN=queF PE=3 SV=1
MTTPEQSTLGKEVAYTEHYDPSQLFPIARAPARAEIGVPDTLPFFGADIWNGYELSWLNEKGKPQIALLTAIVPADSPFIIESKSFKLYLGSFAQTKLANLDAARALIQQDLSEAASAPVQVRLTDPSGFGKLALDELDGLLVDRLDVDTDIYVPDASLLTAAFDEPHVDETLVSNLLKSNCPVTGQPDWGSLQIRYVGPPIDQEGLLKYVISYRRHTGFHEQCVEGIFMDILRQCKPSQLAVYARYTRRGGLDINPFRTNFTLPMPDNARTARQ

SEQ ID NO: 48066 - protein, 155 aa, Pannonibacter indicus
  misc_feature (1)..(155): tr|A0A0K6HSI5|A0A0K6HSI5_9RHOB NADPH-dependent 7-cyano- 7-deazaguanine reductase OS=Pannonibacter indicus OX=46 6044 GN=queF PE=3 SV=1
MSDKTIYQNLTQLGSSTALPQSPEEAVLERVPNPQAGTGYMVRFVAPEFTSLCPITGAPDFAHLVIDYVPADWLVESKSLKLFLGSFRNHGAFHEDCTVSIGKRLVDFLSPQWLRIGGYWYPRGGIPIDVFYQTGPAPEGVWIPEQGVQPYRGRG

SEQ ID NO: 48067 - protein, 155 aa, Pannonibacter phragmitetus
  misc_feature (1)..(155): tr|A0A0U3NAV1|A0A0U3NAV1_9RHOB NADPH-dependent 7-cyano- 7-deazaguanine reductase OS=Pannonibacter phragmitetus OX=121719 GN=queF PE=3 SV=1
MSDKTIYQNLTQLGSSTALPQKPEDAVLERVPNPQAGTGYMVRFVAPEFTSLCPITGAPDFAHLVIDYVPADWLVESKSLKLFLGSFRNHGAFHEDCTVSIGKRLVEFLSPQWLRIGGYWYPRGGIPIDVFYQTGPAPEGVWIPDQGVQPYRGRG

SEQ ID NO: 48068 - protein, 155 aa, Pannonibacter phragmitetus
  misc_feature (1)..(155): tr|A0A379A0N3|A0A379A0N3_9RHOB NADPH-dependent 7-cyano- 7-deazaguanine reductase OS=Pannonibacter phragmitetus OX=121719 GN=queF PE=3 SV=1
MSDKTIYQNLTQLGSSTALPQSPEDAVLERVPNPQAGTGYMVRFVAPEFTSLCPITGAPDFAHLVIDYVPGDWLVESKSLKLFLGSFRNHGAFHEDCTVSIGKRLVDFLSPQWLRIGGYWYPRGGIPIDVFYQTGPAPGGVWIPEQGVQPYRGRG

SEQ ID NO: 48069 - protein, 281 aa, Pantoea alhagi
  misc_feature (1)..(281): tr|A0A1W6B653|A0A1W6B653_9GAMM NADPH-dependent 7-cyano- 7-deazaguanine reductase OS=Pantoea alhagi OX=1891675 G N=queF PE=3 SV=1
MSSYEQHQALAGLTLGKPTAYQDRYEPGLLQAVPRSLNREPLGLYPTHLPFHGADIWTLYELSWLNAKGVPQVAVGEVVLRADSVNLIESKSFKLYLNSFNQTRFADWGEVRQTLERDLRACAQGEVSVALFRLQEIEGQPIGQFDGFCIDEQDISIDDYQFNADYLADAKGEEIVEETLVSHLLKSNCLITHQPDWGSVQIRYRGPRIKREALLRYLVSFRHHNEFHEQCVERIFNDLLRFCQPETLSVYARYTRRGGLDINPWRSNTDFSPSHSRLVRQ

SEQ ID NO: 48070 - protein, 288 aa, Pantoea allii
  misc_feature (1)..(288): tr|A0A2V2BKK7|A0A2V2BKK7_9GAMM NADPH-dependent 7-cyano- 7-deazaguanine reductase OS=Pantoea allii OX=574096 GN= queF PE=3 SV=1
MTSVVTVMSSYQPDPALSNLTLGKPTAYHDRYDNSLLQAVPRSMNREPLGLYPDNLPFTGADIWTLYELSWLNSKGVPQVAVGEVVLDARSHNLIESKSFKLYLNSFNQTRFADWGEVRQTLEQDLRACAEGDVRVALFRLNEIEGQPVGHFAGDCIDEQDIEIEDYGFNADYLVDAAGQERVDETLVSHLLKSNCLITNQPDWGSVMIRYKGPRLNREALLRYIISFRQHNEFHEQCVERIFNDLMRFCQPEQLTVYARYTRRGGLDINPWRSNVAFTPGHSRLVRQ

SEQ ID NO: 48071 - protein, 281 aa, Pantoea allii
  misc_feature (1)..(281): tr|A0A4S3BFB6|A0A4S3BFB6_9GAMM NADPH-dependent 7-cyano- 7-deazaguanine reductase OS=Pantoea allii OX=574096 GN= queF PE=3 SV=1
MTTHEQDQALSNLTLGKPTAYHDQYDNSLLQAVPRSLNREPLGLFPDSLPFTGSDIWTLYELSWLNSKGLPQVAVGEVVLDAQSRNLIESKSFKLYLNSFNQTRFADWGEVRQTLERDLSACAEGEAQVALFRLNEIEGQPIGHFEGCCIDEQDIAIEDYRFNADYLADATGSEIVEETLVSHLLKSNCLITNQPDWGSVMIRYKGPRIDREALLRYLVSFRQHNEFHEQCVERIFNDVMRFCHPEALTVYARYTRRGGLDINPWRTNVPFSPGFSRLVRQ

SEQ ID NO: 48072 - protein, 281 aa, Pantoea ananas
  misc_feature (1)..(281): tr|A0A2S7ZVJ2|A0A2S7ZVJ2_PANAN NADPH-dependent 7-cyano- 7-deazaguanine reductase OS=Pantoea ananas OX=553 GN=qu eF PE=3 SV=1
MTTHEQDQALSNLTLGKPTAYHDQYDNSLLQSVPRSLNREPLGLFPDSLPFTGSDIWTLYELSWLNSKGLPQVAVGEVVLDAQSRNLIESKSFKLYLNSFNQTRFADWGEVRQTLERDLSACAEGEVQVALFRLSEIEGQPVGHFDGCCIDEQDIAIDDYRFNADYLADAAGSEIVEETLVSHLLKSNCLITNQPDWGSVMIRYTGPRIDREALLRYLVSFRQHNEFHEQCVERIFNDVMRFCHPEALTVYARYTRRGGLDINPWRTNVPFSPGFSRLVRQ

SEQ ID NO: 48073 - protein, 288 aa, Pantoea ananas
  misc_feature (1)..(288): tr|A0A2U1D5H4|A0A2U1D5H4_PANAN NADPH-dependent 7-cyano- 7-deazaguanine reductase OS=Pantoea ananas OX=553 GN=qu eF PE=3 SV=1
MTSVVTVMSSYQPDPALSNLTLGKPTAYHDRYDNSLLQAVPRSMNREPLGLYPDNLPFTGGDIWTLYELSWLNSKGVPQVAVGEVVLDAHSRNLIESKSFKLYLNSFNQTRFADWGEVRQTLEQDLRVCAEGEVRVALFRLNEIEGQPVGHFAGYCIDEQDIEIEDYAFNADYLINAAGQEQVEETLVSHLLKSNCLITNQPDWGSVMIRYKGPRLDREALLRYIISFRQHNEFHEQCVERIFNDLMRFCQPEQLTVYARYTRRGGLDINPWRSNVPFTPGHSRLVRQ

SEQ ID NO: 48074 - protein, 288 aa, Pantoea ananatis; identical to SEQ ID NO: 48073
  misc_feature (1)..(288): tr|A0A0H3L3K1|A0A0H3L3K1_PANAA NADPH-dependent 7-cyano- 7-deazaguanine reductase OS=Pantoea ananatis (strain AJ 13355) OX=932677 GN=queF PE=3 SV=1

SEQ ID NO: 48075 - protein, 315 aa, Pantoea ananatis
  misc_feature (1)..(315): tr|D4GLK6|D4GLK6_PANAM NADPH-dependent 7-cyano-7-deazag uanine reductase OS=Pantoea ananatis (strain LMG 20103) OX=706191 GN=queF PE=3 SV=1
MVKSVNASAVCCIIQILTSDRLHLLTLMTSVVTVMSSYQPDPALSNLTLGKPTAYHDRYDNSLLQAVPRSMNREPLGLYPDNLPFTGGDIWTLYELSWLNSKGVPQVAVGEVVLDAHSRNLIESKSFKLYLNSFNQTRFADWGEVRQTLEQDLRVCAEGEVRVALFRLNEIEGQPVGHFAGYCIDEQDIEIEDYAFNADYLINAAGEEQVEETLVSHLLKSNCLITNQPDWGSVMIRYKGPRLDREALLRYIISFRQHNEFHEQCVERIFNDLMRFCQPEQLTVYARYTRRGGLDINPWRSNVPFTPGHSRLVRQ

SEQ ID NO: 48076 - protein, 281 aa, Pantoea anthophila
  misc_feature (1)..(281): tr|A0A506NLY1|A0A506NLY1_9GAMM NADPH-dependent 7-cyano- 7-deazaguanine reductase OS=Pantoea anthophila OX=47093 1 GN=queF PE=3 SV=1
MTTHEQDQALSNLTLGKPTAYHDRYDNGLLQAVPRSLNREPLSLFPESLPFTGGDIWTLYELSWLNSKGLPQVAVGEVVLDAHSRNLIESKSFKLYLNSFNQTRFADWGEVRQTLERDLRACAEGDVRVALFRLNEIEGQPIGHFEGTCIDEQDIAIEDYRFNADYLADAAGSEIVEETLVSHLLKSNCLITHQPDWGSVMIRYKGPRIHREALLRYLVSFRQHNEFHEQCVERIFNDVMRFCHPEALTVYARYTRRGGLDINPWRTNVPFSPGFSRLVRQ

SEQ ID NO: 48077 - protein, 281 aa, Pantoea coffeiphila
  misc_feature (1)..(281): tr|A0A2S9I915|A0A2S9I915_9GAMM NADPH-dependent 7-cyano- 7-deazaguanine reductase OS=Pantoea coffeiphila OX=1465 635 GN=queF PE=3 SV=1
MSSYNNHQALEGLTLGKPTEYHDSYQPALLQAVPRSLNREPLGLYPDNLPFSGADIWTLYELSWLNSKGLPQVAVGEVSLSADSVNLIESKSFKLYLNSFNQTQFSDWGEVRRTLERDLSACAEGEVSVALFRLQEIEGQPIGHFDGHCIDEQDIVIDSYEFNADYLRDATDGEVVEEQLVSHLLKSNCLITNQPDWGSVQISYRGPRIQREALLRYLVSFRHHNEFHEQCVERIFSDIQRFCQPEALSVYARYTRRGGLDINPWRTNADFKPGRSRLVRQ

SEQ ID NO: 48078 - protein, 281 aa, Pantoea conspicua
  misc_feature (1)..(281): tr|A0A1X1BVV7|A0A1X1BVV7_9GAMM NADPH-dependent 7-cyano- 7-deazaguanine reductase OS=Pantoea conspicua OX=472705 GN=queF PE=3 SV=1
MTTHEQDQALSNLTLGKPTAYHDRYDNSLLQAVPRSLNREPLGLFPESLPFNGSDIWTLYELSWLNSKGLPQVAVGEVVLDAHSRNLIESKSFKLYLNSFNQTRFADWGEVRQTLERDLSACADGEVRVALFRLNEVEGQPIGHFDGYCIDEQDIAIDDYRFNADYLADATGSETVEETLVSHLLKSNCLITHQPDWGSVMIRYKGPRIDREALLRYLVSFRQHNEFHEQCVERIFNDLLRFCHPETLTVYARYTRRGGLDINPWRSNVPFSPGYSRLVRQ

SEQ ID NO: 48079 - protein, 281 aa, Pantoea cypripedii
  misc_feature (1)..(281): tr|A0A1X1EXE6|A0A1X1EXE6_PANCY NADPH-dependent 7-cyano- 7-deazaguanine reductase OS=Pantoea cypripedii OX=55209 GN=queF PE=3 SV=1
MSTEQQDQVLSGLTLGKPTAYVDHYDNSLLQAVPRSLNREPLGLFPDNLPFHGADIWTLYELSWLNSKGVPQVAVGEVVLNAASRNLIESKSFKLYLNSFNQTVFADWGDVRQTLERDLSACAEGEVSVALFRISEIEGQPIGHFNGEVIDEQDIEIRDYAFNAEYLAQAAGNDIIEETLVSHVLKSNCLITHQPDWGSVMIRYKGPRIDREALLRYLVSFRQHNEFHEQCVERIFNDIQRFCQPEALTVYARYTRRGGLDINPWRSNVPFSPGYSRLVRQ

SEQ ID NO: 48080 - protein, 281 aa, Pantoea deleyi
  misc_feature (1)..(281): tr|A0A506PYN4|A0A506PYN4_9GAMM NADPH-dependent 7-cyano- 7-deazaguanine reductase OS=Pantoea deleyi OX=470932 GN =queF PE=3 SV=1
MTTHEQDQALSNLTLGKPTAYHDRYDNGLLQAVPRSLNREPLGLFPDSLPFTGGDIWTLYELSWLNSKGLPQVAVGEVVLDAQSRNLIESKSFKLYLNSFNQTRFADWGEVRQTLERDLSACAEGEVRVALFRLSEVEGQPIGHFEGCCIDEQDITIEDYRFNADYLADAAGSERVEETLVSHLLKSNCLITNQPDWGSVMIRYSGPRIDREALLRYLISFRQHNEFHEQCVERIFNDVMRFCHPDTLTVYARYTRRGGLDINPWRTNVPFTPGFSRLVRQ

SEQ ID NO: 48081 - protein, 281 aa, Pantoea dispersa
  misc_feature (1)..(281): tr|A0A437T636|A0A437T636_9GAMM NADPH-dependent 7-cyano- 7-deazaguanine reductase OS=Pantoea dispersa OX=59814 G N=queF PE=3 SV=1
MSSENRDTALSGLTLGKPTAYVDRYDNTLLQAVPRSLNREPLGLYPDNLPFHGADIWTLYELSWLNSKGVPQVAVGEVVLSADSVNLIESKSFKLYLNSFNQTIFADWGAVRQTLERDLSACANGQVSVALFRLSEVEGQPIGHFAGDVIDEQDITISDYGFNADYLASATGSEVVEETLVSHLLKSNCLITNQPDWGSVMIRYQGPRIDREALLRYLISFRQHNEFHEQCVERIFNDIQRFCQPAALTVYARYTRRGGLDINPWRSNVPFTPGYSRLVRQ

SEQ ID NO: 48082 - protein, 281 aa, Pantoea dispersa
  misc_feature (1)..(281): tr|A0A518XF95|A0A518XF95_9GAMM NADPH-dependent 7-cyano- 7-deazaguanine reductase OS=Pantoea dispersa OX=59814 G N=queF PE=3 SV=1
MSSENRNSALSGLTLGKPTAYVDHYDNTLLQSVPRSLNREPLGLYPDTLPFHGADIWTLYELSWLNSKGVPQVAVGEVVLRADSASLIESKSFKLYLNSFNQTVFADWGTVRQTLERDLSACAGGEVSVALFRLSEIEGQPIGHFDGSVIDEQDIIIDDYGFSADYLAQAAGNEVVEETLVSHLLKSNCLITNQPDWGSVMIRYKGPRIDREALLRYIVSFRQHNEFHEQCVERIFNDIQRFCRPEALTVYARYTRRGGLDINPWRSNVPFTPCHSRLVRQ

SEQ ID NO: 48083 - protein, 281 aa, Pantoea eucalypti
  misc_feature (1)..(281): tr|A0A506P781|A0A506P781_9GAMM NADPH-dependent 7-cyano- 7-deazaguanine reductase OS=Pantoea eucalypti OX=470933 GN=queF PE=3 SV=1
MTTHEQDQALSNLTLGKPTAYHDQYDNSLLQSVPRSLNREPLGLFPDSLPFTGSDIWTLYELSWLNSKGLPQVAVGEVVLDAQSRNLIESKSFKLYLNSFNQTRFADWGEVRQTLERDLSACAEGEVQVALFRLSEIEGQPVGHFDGCCIDEQDIAIDDYRFNADYLADAAGSEIVEETLVSHLLKSNCLITNQPDWGSVMIRYTGPRIDHEALLRYLVSFRQHNEFHEQCVERIFNDVMRFCHPEALTVYARYTRRGGLDINPWRTNVPFSPGFSRLVRQ

SEQ ID NO: 48084 - protein, 281 aa, Pantoea latae
  misc_feature (1)..(281): tr|A0A1V9DBH7|A0A1V9DBH7_9GAMM NADPH-dependent 7-cyano- 7-deazaguanine reductase OS=Pantoea latae OX=1964541 GN =queF PE=3 SV=1
MSLYEKDQALSSLTLGKPTAYHDKYDPSLLQAVPRSLNRTPLGLQSDSLPFSGADIWTLYELSWLNSKGVPQVALGEVVLNATSEHLIESKSFKLYLNSFNQTRFADWGEVRQTLERDLGACAQGEVSVALFRLSELEGQPIGQFSGSCIDEQDIEISDYRFNADYLAKAAGSEVVEETLVSHLLKSNCLITNQPDWGSVMIRYKGPRIDREALLRYLISFRQHNEFHEQCVERIFNDLLRFCRPEQLTVYARYTRRGGLDINPWRSNVPFRPGFSRLVRQ

SEQ ID NO: 48085 - protein, 281 aa, Pantoea rodasii
  misc_feature (1)..(281): tr|A0A2M9W8H0|A0A2M9W8H0_9GAMM NADPH-dependent 7-cyano- 7-deazaguanine reductase OS=Pantoea rodasii OX=1076549 GN=queF PE=3 SV=1
MSSENHDRALSGLTLGKPTAYVDRYDNTLLQSVPRSLNREPLGLYPDNLPFQGGDIWTLYELSWLNSKGVPQVAVGEVVLRADSENLIESKSFKLYLNSFNQTIFADWGEVRQTLERDLRACAQGEVSVALFRLSEVEGQPIGHFNGDVIDEQDIEIHDYAFNADYLAHAAGEDVIEETLVSHLLKSNCLITHQPDWGSVMIRYKGPRIDREALLRYLISFRQHNEFHEQCVERIFNDIQRFCQPESLTVYARYTRRGGLDINPWRSNVPFSPTFSRLVRQ

SEQ ID NO: 48086 - protein, 281 aa, Pantoea rodasii
  misc_feature (1)..(281): tr|A0A0B1R651|A0A0B1R651_9GAMM NADPH-dependent 7-cyano- 7-deazaguanine reductase OS=Pantoea rodasii OX=1076549 GN=queF PE=3 SV=1
MSSENRDQALSGLTLGKPTAYVDRYDNTLLQSVPRSLNREPLGLYPDNLPFQGADIWTLYELSWLNSKGVPQVAVGEVVLRADSENLIESKSFKLYLNSFNQTVFADWGEVRQTLERDLRACANGEVGVALFRLSEVEGQPIGHFNGEVIDEQDIEIQDYAFNADYLAQAAGSEVVEETLVSHLLKSNCLITHQPDWGSVMIRYKGPRIDREALLRYLISFRQHNEFHEQCVERIFNDIQRFCLPECLTVYARYTRRGGLDINPWRSNVPFSPTFSRLVRQ

SEQ ID NO: 48087 - protein, 281 aa, Pantoea rwandensis
  misc_feature (1)..(281): tr|A0A1X1CS22|A0A1X1CS22_9GAMM NADPH-dependent 7-cyano- 7-deazaguanine reductase OS=Pantoea rwandensis OX=10765 50 GN=queF PE=3 SV=1
MSSENRDQALSGLTLGKPTAYVDRYDNTLLQSVPRSLNREPLGLYPDSLPFQGADIWTLYELSWLNSKGVPQVAVGEVVLRADSENLIESKSFKLYLNSFNQTVFADWGEVRQTLERDLRACANGEVSVALFRLSEIEGQPIGHFNGDVIDEQDIEIHDYAFNADYLAQAAGSEVVEETLVSHLLKSNCLITHQPDWGSVMIRYKGPRIDREALLRYLISFRQHNEFHEQCVERIFNDIQRFCQPETLTVYARYTRRGGLDINPWRSNVPFSPGFSRLVRQ

SEQ ID NO: 48088 - protein, 280 aa, Pantoea sesami
  misc_feature (1)..(280): tr|A0A1M5UK99|A0A1M5UK99_9GAMM NADPH-dependent 7-cyano- 7-deazaguanine reductase OS=Pantoea sesami OX=1881110 G N=queF PE=3 SV=1
MSYENHQALTGLTLGKSTDYRDTYDASLLQGVPRSLNRDPLGLHADALPFVGGDIWTLYELSWLNARGLPQVAVGHVELDYASVNLVESKSFKLYLNSFNQTKFSSWDDVQHTLERDLSACAQGKVSVSLYRLHELEGQPVAHFNGTCIDDQDIEVENYEFSADYLENAASGKVVEETLVSHLLKSNCLITHQPDWGSVQIQYRGPKIDREKLLRYLVSFRHHNEFHEQCVERIFSDIQRFCQPEKLSVYARYTRRGGLDINPWRTNTDFVPATGRLVRQ

SEQ ID NO: 48089 - protein, 281 aa, Pantoea sp.; identical to SEQ ID NO: 48072
  misc_feature (1)..(281): tr|E0M4Q3|E0M4Q3_9GAMM NADPH-dependent 7-cyano-7-deazag uanine reductase OS=Pantoea sp. aB OX=517433 GN=queF PE =3 SV=1

SEQ ID NO: 48090 - protein, 281 aa, Pantoea sp.
  misc_feature (1)..(281): tr|A0A0F5XUC4|A0A0F5XUC4_9GAMM NADPH-dependent 7-cyano- 7-deazaguanine reductase OS=Pantoea sp. 3.5.1 OX=152206 0 GN=queF PE=3 SV=1
MTTHEQDQALSNLTLGKPTAYHDRYDNSLLQAVPRSLNREPLGLYPDSLPFTGGDIWTLYELSWLNSKGLPQVAVGEVVLDAQSRNLIESKSFKLYLNSFNQTRFADWGEVRQTLERDLSACAEGEVRVALFRLNEVEGQPIGHFDGYCIDEQDIAIDDYRFNADYLADATGSEIVEETLVSHLLKSNCLITHQPDWGSVMIRYNGPRIDREALLRYLVSFRQHNEFHEQCVERIFNDVLRFCHPEALTVYARYTRRGGLDINPWRSNVPFTPGYSRLVRQ

SEQ ID NO: 48091 - protein, 281 aa, Pantoea stewartii
  misc_feature (1)..(281): tr|H3RGX8|H3RGX8_PANSE NADPH-dependent 7-cyano-7-deazag uanine reductase OS=Pantoea stewartii subsp. stewartii DC283 OX=660596 GN=queF PE=3 SV=1
MSSYQPDPALSNLTLGKPTAYHDRYDNSLLQAVPRSMNREPLGLYPDNLPFSGSDIWTLYELSWLNSKGVPQVAVGEVELDARSRNLIESKSFKLYLNSFNQTRFTDWAEVRQTLEQDLRACAEGDVLVALFRLQEIEGQPVGHFAGTCIDEQDIEIEDYGFNADYLIDAAGQEQVQETLVSHLLKSNCLITNQPDWGSVMIRYQGPRIDREALLRYIVSFRQHNEFHEQCVERIFNDLMRFCQPSQLTVYARYTRRGGLDINPWRSNVPFTPGHSRLVRQ

SEQ ID NO: 48092 - protein, 281 aa, Pantoea vagans
  misc_feature (1)..(281): tr|E1SCS7|E1SCS7_PANVC NADPH-dependent 7-cyano-7-deazag uanine reductase OS=Pantoea vagans (strain C9-1) OX=712 898 GN=queF PE=3 SV=1
MTTHEQDQALSNLTLGKPTAYHDRYDNSLLQAVPRSLNREPLGLFPDSLPFTGSDIWTLYELSWLNSKGLPQVAVGEVVLDAQSRNLIESKSFKLYLNSFNQTRFADWGEVRQTLERDLSACAEGEARVALFRLNEIEGQPIGHFEGCCIDEQDIAIEDYRFNADYLADAAGSEIVEETLVSHLLKSNCLITNQPDWGSVMIRYKGPRIAREALLRYLVSFRQHNEFHEQCVERIFNDVMRFCHPEALTVYARYTRRGGLDINPWRTNVPFSPGFSRLVRQ

SEQ ID NO: 48093 - protein, 281 aa, Pantoea vagans; identical to SEQ ID NO: 48086
  misc_feature (1)..(281): tr|A0A0U3UKG6|A0A0U3UKG6_9GAMM NADPH-dependent 7-cyano- 7-deazaguanine reductase OS=Pantoea vagans OX=470934 GN =queF PE=3 SV=1

SEQ ID NO: 48094 - protein, 281 aa, Pantoea wallisii
  misc_feature (1)..(281): tr|A0A1X1D9T6|A0A1X1D9T6_9GAMM NADPH-dependent 7-cyano- 7-deazaguanine reductase OS=Pantoea wallisii OX=1076551 GN=queF PE=3 SV=1
MSSENRDPALSGLTLGKPTAYVDRYDNTLLQSVPRSLNREPLGLYPDNLPFHGADIWTLYELSWLNSKGVPQVAVGEVVLRADSENLIESKSFKLYLNSFNQTIFADWGEVRQTLERDLSHCAKGEVSVALFRLSEVEGQPIGHFSGDVIDEQDITVSDYGFNADYLANATGGEIVEETLVSHLLKSNCLITNQPDWGSVMIRYRGARIDREALLRYLISFRQHNEFHEQCVERIFNDVQRFCHPESLTVYARYTRRGGLDINPWRSNVPFTPGYSRLARQ

SEQ ID NO: 48095 - protein, 154 aa, Parabacteroides acidifaciens
  misc_feature (1)..(154): tr|A0A3D8HDD2|A0A3D8HDD2_9BACT NADPH-dependent 7-cyano- 7-deazaguanine reductase OS=Parabacteroides acidifacien s OX=2290935 GN=queF PE=3 SV=1
MDTRKEENELHLLGGSTVYKQDYAPEVLEAFTNKHQGNDYWVRFNCPEFTSLCPITGQPDFATIYIDYIPDVKMVESKSLKLYLFSFRSHGAFHEDCVNIIMKDLIRLMDPKYIEVTGIFTPRGGISIYPYCNYGRPGTKYEQLAEQRLFNHKQ

SEQ ID NO: 48096 - protein, 150 aa, Parabacteroides chartae
  misc_feature (1)..(150): tr|A0A1T5CNM5|A0A1T5CNM5_9BACT NADPH-dependent 7-cyano- 7-deazaguanine reductase OS=Parabacteroides chartae OX= 1037355 GN=queF PE=3 SV=1
MDEKELSLLGNKTVYKSDYAPEVLEAFTNKHPDNDYWVRFNCPEFTSLCPITGQPDFATIYIDYIPDIKMVESKSLKLYLFSFRNHGDFHEDCVNIIMKDLIKLMDPKYIEVTGIFTPRGGISIHPYCNYGRKGTKFEELAEKRLFAHNS

SEQ ID NO: 48097 - protein, 155 aa, Parabacteroides chinchillae
  misc_feature (1)..(155): tr|A0A1H5YDH4|A0A1H5YDH4_9BACT NADPH-dependent 7-cyano- 7-deazaguanine reductase OS=Parabacteroides chinchillae OX=871327 GN=queF PE=3 SV=1
MDTRQNENELHLLGSSTQYKQDYAPEVLEAFTNKHQDNDYWVQFNCPEFTSLCPITGQPDFATIHIDYIPDIKMVESKSLKLYLFSFRNHGAFHEDCVNIIMKDLIRLMDPKYIEITGIFTPRGGISIYPYCNYGRPGTKYEELAEKRLFNHRIQ

SEQ ID NO: 48098 - protein, 154 aa, Parabacteroides distasonis
  misc_feature (1)..(154): tr|A0A3L7ZMQ5|A0A3L7ZMQ5_9BACT NADPH-dependent 7-cyano- 7-deazaguanine reductase OS=Parabacteroides distasonis OX=823 GN=queF PE=3 SV=1
MDERKQEGELHLLGGSTVYRQDYAPEVLEAFTNKHQENDYWVRFNCPEFTSLCPITGQPDFATIHIDYIPDVKMVESKSLKLYLFSFRNHGAFHEDCVNIIMKDLIRLMDPKYIEVTGIFTPRGGISIYPYCNYGRPNTKFELLAEKRLFDHNQ

SEQ ID NO: 48099 - protein, 157 aa, Parabacteroides distasonis
  misc_feature (1)..(157): sp|A6LIT0|QUEF_PARD8 NADPH-dependent 7-cyano-7-deazagua nine reductase OS=Parabacteroides distasonis (strain AT CC 8503 / DSM 20701 / CIP 104284 / JCM 5825 / NCTC 1115 2) OX=435591 GN=queF PE=3 SV=1
MKEMDERKQEGELHLLGGSTVYKQDYAPEVLEAFTNKHQGNDYWVRFNCPEFTSLCPITGQPDFATIHIDYIPDVKMVESKSLKLYLFSFRNHGAFHEDCVNIIMKDLIKLMDPKYIEITGIFTPRGGISIYPYCNYGRPNTKFEQLAEKRLFDHNQ

SEQ ID NO: 48100 - protein, 154 aa, Parabacteroides goldsteinii
  misc_feature (1)..(154): tr|K5YYL6|K5YYL6_9BACT NADPH-dependent 7-cyano-7-deazag uanine reductase OS=Parabacteroides goldsteinii CL02T12 C30 OX=999418 GN=queF PE=3 SV=1
MDTRKNENELHLLGGSTEYKQDYAPEVLEAFTNKHQGNDYWVRFNCPEFTSLCPITGQPDFATIHIDYIPDVKMVESKSLKLYLFSFRSHGAFHEDCVNIIMKDLIKLMDPKYIEVTGIFTPRGGISIYPYCNYGRPGTKYEQLAEQRLFNHNA

SEQ ID NO: 48101 - protein, 154 aa, Parabacteroides goldsteinii; identical to SEQ ID NO: 48100
  misc_feature (1)..(154): tr|A0A0J6CB88|A0A0J6CB88_9BACT NADPH-dependent 7-cyano- 7-deazaguanine reductase OS=Parabacteroides goldsteinii OX=328812 GN=queF PE=3 SV=1

SEQ ID NO: 48102 - protein, 154 aa, Parabacteroides gordonii
  misc_feature (1)..(154): tr|A0A0F5JL30|A0A0F5JL30_9BACT NADPH-dependent 7-cyano- 7-deazaguanine reductase OS=Parabacteroides gordonii MS -1 = DSM 23371 OX=1203610 GN=queF PE=3 SV=1
MDTRKDENELHLLGGSTEYKQDYAPEVLEAFTNKHPDNDYWVRFNCPEFTSLCPITGQPDFATIHIDYIPDVKMVESKSLKLYLFSFRSHGAFHEDCVNIIMKDLIRLMDPKYIEVTGIFTPRGGISIYPYCNYGRPGTKYEALAEKRLFSHNP

SEQ ID NO: 48103 - protein, 155 aa, Parabacteroides johnsonii
  misc_feature (1)..(155): tr|A0A1Y3Z3F8|A0A1Y3Z3F8_9BACT NADPH-dependent 7-cyano- 7-deazaguanine reductase OS=Parabacteroides johnsonii O X=387661 GN=queF PE=3 SV=1
MDTRKDENELHLLGGSTVYKQDYAPEVLEAFTNKHPDNDYWVRFNCPEFTSLCPITGQPDFATIYIDYIPDVKMVESKSLKLYLFSFRNHGAFHEDCVNIIMKDLIRLMAPKYIEVTGIFTPRGGISIYPYCNYGRPGTKYEGLAEQRLFNHQAR

SEQ ID NO: 48104 - protein, 155 aa, Parabacteroides johnsonii; identical to SEQ ID NO: 48103
  misc_feature (1)..(155): tr|K5YI38|K5YI38_9BACT NADPH-dependent 7-cyano-7-deazag uanine reductase OS=Parabacteroides johnsonii CL02T12C2 9 OX=999419 GN=queF PE=3 SV=1

SEQ ID NO: 48105 - protein, 155 aa, Parabacteroides merdae
  misc_feature (1)..(155): tr|A0A3E4ZS12|A0A3E4ZS12_9BACT NADPH-dependent 7-cyano- 7-deazaguanine reductase OS=Parabacteroides merdae OX=4 6503 GN=queF PE=3 SV=1
MDTRKDENELHLLGGSTVYKQDYAPEVLEAFTNKHPDNDYWVHFNCPEFTSLCPITGQPDFATIYIDYIPDVKMVESKSLKLYLFSFRNHGAFHEDCVNIIMKDLIRLMNPKYIEVTGIFTPRGGISIYPYCNYGRPGTKYEKLAEQRLFNHHAK

SEQ ID NO: 48106 - protein, 155 aa, Parabacteroides merdae
  misc_feature (1)..(155): tr|A0A3R6EZT5|A0A3R6EZT5_9BACT NADPH-dependent 7-cyano- 7-deazaguanine reductase OS=Parabacteroides merdae OX=4 6503 GN=queF PE=3 SV=1
MDTRKDENELHLLGGSTVYKQDYAPEVLEAFTNKHPDNDYWVRFNCPEFTSLCPITGQPDFATIYIDYIPDIKMVESKSLKLYLFSFRNHGAFHEDCVNIIMKDLIRLMNPKYIEVTGIFTPRGGISIYPYCNYGRPGTKYEKLAEQRLFNHHAK

SEQ ID NO: 48107 - protein, 154 aa, Parabacteroides sp.
  misc_feature (1)..(154): tr|E1Z006|E1Z006_9BACT NADPH-dependent 7-cyano-7-deazag uanine reductase OS=Parabacteroides sp. 20_3 OX=469591 GN=queF PE=3 SV=1
MDERKQEGELHLLGGSTVYKQDYAPEVLEAFTNKHQGNDYWVRFNCPEFTSLCPITGQPDFATIHIDYIPDVKMVESKSLKLYLFSFRNHGAFHEDCVNIIMKDLIKLMDPKYIEVTGIFTPRGGISIYPYCNYGRPNTKFEQLAEKRLFDHNQ

SEQ ID NO: 48108 - protein, 154 aa, Parabacteroides sp.; identical to SEQ ID NO: 48107
  misc_feature (1)..(154): tr|C7X6I3|C7X6I3_9BACT NADPH-dependent 7-cyano-7-deazag uanine reductase OS=Parabacteroides sp. D13 OX=563193 G N=queF PE=3 SV=1

SEQ ID NO: 48109 - protein, 274 aa, Paraburkholderia aromaticivorans
  misc_feature (1)..(274): tr|A0A248VEG4|A0A248VEG4_9BURK NADPH-dependent 7-cyano- 7-deazaguanine reductase OS=Paraburkholderia aromaticiv orans OX=2026199 GN=queF PE=3 SV=1
MTPEQSPLGKASTYTEQYDVSLLFPIARKNAREAIGIGAQLPFFGTDIWNAYELSWLNARGKPQIAVATFFVPADSPNIVESKSFKLYLGSFAQTAFESMDAVRDTIRRDVSASCGATVSVHLTAPYEFGKLQMEEFEGLSLDRLDLDTDIYQPDASLLKAALHEAPVEETLFSNLLKSNCPVTGQPDWGSVQIHYVGPQIDHAGLLRYIISYRNHTGFHEQCVERIFIDVLKACKPVKLAVYARYTRRGGLDINPFRTNYNLPMPDNMRLARQ

SEQ ID NO: 48110 - protein, 274 aa, Paraburkholderia aspalathi
  misc_feature (1)..(274): tr|A0A1I7ESE3|A0A1I7ESE3_9BURK NADPH-dependent 7-cyano- 7-deazaguanine reductase OS=Paraburkholderia aspalathi OX=1324617 GN=queF PE=3 SV=1
MTPEQSPLGKASTYTEQYDASLLFPIARKNAREAIGIGAQLPFFGTDIWNAYELSWLNARGKPQIAVATFFVPADSPNIVESKSFKLYLGSFAQTAFESMEVVRDTIKRDVCASCGATVSVHLAAPYEFGKLQMEEFDGLSLDRLDLDTDVYHPDASLLKAAFDESPVEETLVSNLLKSNCPVTGQPDWGSVQIHYVGPQIDHAGLLRYIISYRNHTGFHEQCVERIFIDVLKACRPVKLAVYARYTRRGGLDINPFRTNFNLPMPDNLRLARQ

SEQ ID NO: 48111 - protein, 274 aa, Paraburkholderia azotifigens
  misc_feature (1)..(274): tr|A0A5C6VQQ4|A0A5C6VQQ4_9BURK NADPH-dependent 7-cyano- 7-deazaguanine reductase OS=Paraburkholderia azotifigen s OX=2057004 GN=queF PE=3 SV=1
MTPEQSPLGKPSSYTEQYDASLLFPIARKNARDQIGIGATLPFFGTDIWNAYELSWLNARGKPQIAIATFYVPADSPNIVESKSFKLYLGSFAHTSFDSIEVVRDTIKRDVSAACGSSVSLHLYPPAEFSKLGLDEFEGTSLDRLDLDTEMYLPDASLLSAALDEAPVEETVFSNLLKSNCPVTGQPDWGSVQIHYVGPQIDHAGLLRYIISYRNHTGFHEQCVEKIFLDVLKVCQPVKLAVYARYTRRGGLDINPFRTNFNLPMPDNLRTARQ

SEQ ID NO: 48112 - protein, 274 aa, Paraburkholderia bryophila
  misc_feature (1)..(274): tr|A0A329C7J9|A0A329C7J9_9BURK NADPH-dependent 7-cyano- 7-deazaguanine reductase OS=Paraburkholderia bryophila OX=420952 GN=queF PE=3 SV=1
MTPEQSPLGKASTYTEQYDASLLFPIARKSAREAIGIGAQLPFFGTDIWNAYELSWLNARGKPQIAVATFFVPADSPNIVESKSFKLYLGSFAQTAFESMEAVRDTIKRDVSASCGATVSVHLTAPYEFGKLQMEEFEGLSLDRLELDTDVYQPDASLLSAALDEAPVEETVFSNLLKSNCPVTGQPDWGTVQIHYVGPQIDHAGLLRYIISYRNHTGFHEQCVERIFIDVLKACKPVKLAVYARYTRRGGLDINPFRTNYNLPMPDNMRLARQ

SEQ ID NO: 48113 - protein, 274 aa, Paraburkholderia caballeronis
  misc_feature (1)..(274): tr|A0A1H7Q0H9|A0A1H7Q0H9_9BURK NADPH-dependent 7-cyano- 7-deazaguanine reductase OS=Paraburkholderia caballeron is OX=416943 GN=queF PE=3 SV=1
MTPEQSPLGKPAAYSEQYDASLLFPIPRAAAREAIGIRAQLPFFGTDIWNAYELSWLNARGKPQIAIATFFIPADSANIVESKSFKLYLGSFAQTPFESADVVRETLKRDVSAACGASVSVRLDQPATFGKLQFEEFEGLSLDRLDLDTDVYHPDPSLLKATFDEAPVEETLYSNLLKSNCPVTGQPDWGSVQIHYVGPQIDHAGLLRYIISYRNHTGFHEQCAERMFVDILHACKPIKLAVYARYTRRGGLDINPFRTNYNLPMPDNARLARQ

SEQ ID NO: 48114 - protein, 274 aa, Paraburkholderia caffeinilytica
  misc_feature (1)..(274): tr|A0A346BHH1|A0A346BHH1_9BURK NADPH-dependent 7-cyano- 7-deazaguanine reductase OS=Paraburkholderia caffeinily tica OX=1761016 GN=queF PE=3 SV=1
MTPEQSPLGKASAYTEHYDASLLFPIARKNAREAIGIGAQLPFFGTDIWNAYELSWLNARGKPQIAVATFFVPADSPNIVESKSFKLYLGSFAQTSFESMDMVRDTIKRDVSASCGATVSVHLAAPHEFGKLQMEEFEGLSLDRLDLDADVYQPDASLLKAALDEAPVEETLFSNLLKSNCPVTGQPDWGSVQIHYVGPQIDHAGLLRYIISYRNHTGFHEQCVERIFIDVMKACKPVKLAVYARYTRRGGLDINPFRTNYNLPMPDNMRLARQ

SEQ ID NO: 48115 - protein, 274 aa, Paraburkholderia caledonica
  misc_feature (1)..(274): tr|A0A2Z5M8V8|A0A2Z5M8V8_9BURK NADPH-dependent 7-cyano- 7-deazaguanine reductase OS=Paraburkholderia caledonica OX=134536 GN=queF PE=3 SV=1
MTPEQSPLGKASTYTEQYDASLLFPIARSNARDAIGIGAQLPFFGTDIWNAYELSWLNQRGKPQIAVATFFVPAESPNIVESKSFKLYLGSFAQTAFESIDVVRDTIRRDVSASCGATVSVHLTAPHDFGKLQMEEFEGMSLDRLDLDTNTYQPDASLLKAALDEAPVEETLFSNLLKSNCPVTGQPDWGSVQIHYVGPQIDHAGLLRYIISYRNHTGFHEQCVEKIFIDVLKACEPVKLAVYARYTRRGGLDINPFRTNYNLPMPDNMRLARQ

SEQ ID NO: 48116 - protein, 274 aa, Paraburkholderia caribensis
  misc_feature (1)..(274): tr|A0A0P0R4G7|A0A0P0R4G7_9BURK NADPH-dependent 7-cyano- 7-deazaguanine reductase OS=Paraburkholderia caribensis MBA4 OX=1323664 GN=queF PE=3 SV=1
MTPEQSPLGKPSSYTEQYDASLLFPIARKNAREQIGIGATLPFFGTDIWNAYELSWLNARGKPQIAIATFYVPADSPNIVESKSFKLYLGSFAQTSFDSIETVRDTIKRDVSAACGASVSLHLYPPAEFSKLALDEFEGTSLDRLDLDTDVYLPDASLLKAALDEAPTEETLFSNLLKSNCPVTGQPDWGSVQIHYVGPQIDHASLLRYIISYRNHTGFHEQCVEKIFLDVLKVCQPVKLAVYARYTRRGGLDINPFRTNFNLPMPDNLRTARQ

SEQ ID NO: 48117 - protein, 274 aa, Paraburkholderia caribensis
  misc_feature (1)..(274): tr|A0A2T3Y8I5|A0A2T3Y8I5_9BURK NADPH-dependent 7-cyano- 7-deazaguanine reductase OS=Paraburkholderia caribensis OX=75105 GN=queF PE=3 SV=1
MTPEQSPLGKPSSYTEQYDASLLFPIARKNAREQIGIGATLPFFGTDIWNAYELSWLNARGKPQIAIATFYIPAESPNIVESKSFKLYLGSFAQTSFDSIETVRDTIKRDVSAACKASVSLHLYPPAEFSKLSMDEFEGTSLDRLDLDTDVYLPDASMLKAALDEAPTEETLFSNLLKSNCPVTGQPDWGSVQIHYVGPQIDHASLLRYIISYRNHTGFHEQCVEKIFLDVLKVCQPVKLAVYARYTRRGGLDINPFRTNFNLPMPDNLRTARQ

SEQ ID NO: 48118 - protein, 274 aa, Paraburkholderia diazotrophica
  misc_feature (1)..(274): tr|A0A1H6RNC6|A0A1H6RNC6_9BURK NADPH-dependent 7-cyano- 7-deazaguanine reductase OS=Paraburkholderia diazotroph ica OX=667676 GN=queF PE=3 SV=1
MTPEQSPLGKPATYTEQYDATLLFPIARKNARDQIGIGATLPFFGTDIWNAYELSWLNARGKPQIAIATFYIPADSPNIVESKSFKLYLGSFAQTSFDSIDVVRDAIKRDVSAACGASVSLHLYPPAEFSKLGLDEFEGTSLDRLDLDAEIYQPDAGLLKAALDEAPVEETLFSNLLKSNCPVTGQPDWGSVQIHYVGPQIDHASLLRYIISYRNHTGFHEQCVEKIFTDVLKICQPVKLAVYARYTRRGGLDINPFRTNFNLPMPDNLRTARQ

SEQ ID NO: 48119 - protein, 274 aa, Paraburkholderia dipogonis
  misc_feature (1)..(274): tr|A0A4Y8N782|A0A4Y8N782_9BURK NADPH-dependent 7-cyano- 7-deazaguanine reductase OS=Paraburkholderia dipogonis OX=1211383 GN=queF PE=3 SV=1
MTPEQSPLGKASAYTEQYDASLLFPIARKNAREAIGIGAQLPFFGTDIWNAYELSWLNARGKPQIAVATFFVPADSPNIVESKSFKLYLGSFAQTAFESTEAVRDIIKRDVSASCGASVSVHLAAPYEFGKLQMEEFEGLSLDRLDLDTDVYHPDASLLTAALDEAPVEETLVSNLLKSNCPVTGQPDWGSVQIHYVGPQIDHAGLLRYIISYRNHTGFHEQCVEKIFLDVLKACKPVKLAVYARYTRRGGLDINPFRTNYNLPMPDNMRLARQ

SEQ ID NO: 48120 - protein, 274 aa, Paraburkholderia eburnea
  misc_feature (1)..(274): tr|A0A2S4LVX6|A0A2S4LVX6_9BURK NADPH-dependent 7-cyano- 7-deazaguanine reductase OS=Paraburkholderia eburnea OX =1189126 GN=queF PE=3 SV=1
MTPEQSPLGKASSYTEQYDAKLLFPIPRIGAREQIGIGAQLPFFGTDIWNAYELSWLTPRGKPQIAIATFFIPADSPNIVESKSFKLYLGSFAQTAFGSADEVRDVLKRDVSAACGASVSVKLDQPGAFGKIAFEEFDGLSLDRLDLDADAYHPDPTLLKAAVDEAPVEETLVSNLLKSNCPVTGQPDWGSVQIHYVGPQIDQAGLLRYIISYRNHTGFHEQCAERIFMDILRECKPDRLAVYARYTRRGGLDINPFRTNFNMPMPDNARLARQ

SEQ ID NO: 48121 - protein, 274 aa, Paraburkholderia endofungorum
  misc_feature (1)..(274): tr|A0A2P5KD08|A0A2P5KD08_9BURK NADPH-dependent 7-cyano- 7-deazaguanine reductase OS=Paraburkholderia endofungor um OX=417203 GN=queF PE=3 SV=1
MTPDQSPLGKPVGYAQQYDPTLLFPIERRQGRDAIGVPAVLPFFGTDIWNAYELSWLNERGKPQIALATFHVPAESPNIIESKSFKLYLGSFAQTRIASIDTLRETIHRDVCACAGANVSVRLTPPAEFATLALDELAGTSLDRLDLDTDSYTPDPSLLSADTNQAPVDETVFSNLLKSNCPVTGQPDWGSIQIRYVGPPIDHAGLLRYIVSYRDHTGFHEQCVERIFIDIQRVCKPIKLAVYARYTRRGGLDINPFRTNFNLPLPDNARTARQ

SEQ ID NO: 48122 - protein, 274 aa, Paraburkholderia fungorum
  misc_feature (1)..(274): tr|A0A1H0ZIY2|A0A1H0ZIY2_9BURK NADPH-dependent 7-cyano- 7-deazaguanine reductase OS=Paraburkholderia fungorum O X=134537 GN=queF PE=3 SV=1
MTPEQSPLGKASTYTEQYDASLLFPIARKNAREAIGIGAQLPFFGTDIWNAYELSWLNARGKPQIAVATFFVPADSPNIVESKSFKLYLGSFAQTSFESMDAVRDTIKRDVSASCGATVSVHLTAPYEFGKLQMEEFEGLSLDRLDLDTDVYHPDASLLSAAHDESPVEETLFSNLLKSNCPVTGQPDWGTVQIHYVGPQIDHAGLLRYIISYRNHTGFHEQCVERIFIDLMKVCKPVKLAVYARYTRRGGLDINPFRTNYNLPMPDNMRLARQ

SEQ ID NO: 48123 - protein, 274 aa, Paraburkholderia fungorum
  misc_feature (1)..(274): tr|A0A420GQ45|A0A420GQ45_9BURK NADPH-dependent 7-cyano- 7-deazaguanine reductase OS=Paraburkholderia fungorum O X=134537 GN=queF PE=3 SV=1
MTPEQSPLGKASAYTEQYDASLLFPIARKNAREAIGIGAQLPFFGTDIWNAYELSWLNARGKPQIAVATFFVPADSPNIVESKSFKLYLGSFAQTAFESMDIVRDTIKRDVSASCGATVSVHLSAPYEFGKLQMEEFEGLSLDRLDLDADVYQPDASLLKAALDEAPVEETLFSNLLKSNCPVTGQPDWGSVQIHYVGPQIDHAGLLRYIISYRNHTGFHEQCVERIFIDVMKACRPVKLAVYARYTRRGGLDINPFRTNYNLPMPDNLRLARQ

SEQ ID NO: 48124 - protein, 274 aa, Paraburkholderia ginsengiterrae
  misc_feature (1)..(274): tr|A0A1A9N0V5|A0A1A9N0V5_9BURK NADPH-dependent 7-cyano- 7-deazaguanine reductase OS=Paraburkholderia ginsengite rrae OX=1462993 GN=queF PE=3 SV=1
MTPEQSPLGKPSAYTEQYDASLLFPIARKNAREAIGIGAQLPFFGTDIWNAYELSWLNTRGKPQIAVATFFVPADSPNIVESKSFKLYLGSFAQTAFDSIETVRDTIKRDVSASCGASVSVHLAAPNEFGKLQMDEFEGMSLDRLDLDAEVYQPDASLLKAALDEAPVEETLFSNLLKSNCPVTGQPDWGSVQIHYVGPQIDHAGLLRYIISYRSHTGFHEQCVERIFIDILKACKPVKLAVYARYTRRGGLDINPFRTNYNLPMPDNMRLARQ

SEQ ID NO: 48125 - protein, 274 aa, Paraburkholderia graminis
  misc_feature (1)..(274): tr|B1FWR9|B1FWR9_PARG4 NADPH-dependent 7-cyano-7-deazag uanine reductase OS=Paraburkholderia graminis (strain A TCC 700544 / DSM 17151 / LMG 18924 / NCIMB 13744 / C4D1 M) OX=396598 GN=queF PE=3 SV=1
MTPEQSPLGKASTYTEQYDASLLFPIARKNAREAIGIHAQLPFFGTDIWNAYELSWLNQRGKPQIAVATFFVPADSPNIVESKSFKLYLGSFAQTAFESIEAVRDTIKRDVSASCGATVSVYLTGPHDFGKLKMEEFEGTSLDRLDLDTDVYTPDASLLTAALHEAPVEETVFSNLLKSNCPVTGQPDWGSVQIHYVGPQIDHAGLLRYIISYRNHTGFHEQCVEKIFIDVLKACKPVKLAVYARYTRRGGLDINPFRTNYNLPMPDNMRLARQ

SEQ ID NO: 48126 - protein, 274 aa, Paraburkholderia hospita
  misc_feature (1)..(274): tr|A0A2D0A0Z7|A0A2D0A0Z7_9BURK NADPH-dependent 7-cyano- 7-deazaguanine reductase OS=Paraburkholderia hospita OX =169430 GN=queF PE=3 SV=1
MTPEQSPLGKPSSYTEQYDASLLFPIARKNAREQIGIGATLPFFGTDIWNAYELSWLNARGKPQIAIATFYIPAESPNIVESKSFKLYLGSFAQTSFDSIETVRDTIKRDVSAACGSSVSLHLYPPAEFSKLAMDEFEGTSLDRLDLDTDVYLPDAGLLKAALDEAPVEETLFSNLLKSNCPVTGQPDWGSVQIHYVGPQIDQAGLLRYIISYRNHTGFHEQCVEKIFLDVLKVCQPVKLAVYARYTRRGGLDINPFRTNFNLPMPDNLRTARQ

SEQ ID NO: 48127 - protein, 274 aa, Paraburkholderia hospita
  misc_feature (1)..(274): tr|A0A1H6NA96|A0A1H6NA96_9BURK NADPH-dependent 7-cyano- 7-deazaguanine reductase OS=Paraburkholderia hospita OX =169430 GN=queF PE=3 SV=1
MTPEQSPLGKPSSYTEQYDASLLFPIARKNAREQIGIGATLPFFGTDIWNAYELSWLNARGKPQIAIATFYIPAESPNIVESKSFKLYLGSFAQTSFDSIETVRDTIKRDVSAACGSSVSLHLYPPAEFSKLAMDEFEGTSLDRLDLDTDVYLPDAGLLKAALDEAPVEETLFSNLLKSNCPVTGQPDWGSVQIHYVGPQIDQAGLLRYIISYRNHTGFHEQCVEKIFLDVLKVCRPVKLAVYARYTRRGGLDINPFRTNFNLPMPDNLRTARQ

SEQ ID NO: 48128 - protein, 274 aa, Paraburkholderia insulsa
  misc_feature (1)..(274): tr|A0A2T0ZX75|A0A2T0ZX75_9BURK NADPH-dependent 7-cyano- 7-deazaguanine reductase OS=Paraburkholderia insulsa OX =1441714 GN=queF PE=3 SV=1
MTPEQSPLGKASTYTEQYDASLLFPIARKNAREAIGIGAQLPFFGTDIWNAYELSWLNARGKPQIAVATFFVPADSPNIVESKSFKLYLGSFAQTAFESMDVVRETIKRDVSASCGATVSVHLAAPYEFGKLQMEEFEGLSLDRLDLDTDVYQPDASLLKAALDEAPVEETLFSNLLKSNCPVTGQPDWGSVQIHYVGPQIDHAGLLRYIISYRNHTGFHEQCVERIFIDVLKACRPVKLAVYARYTRRGGLDINPFRTNYNLPMPDNMRLARQ

SEQ ID NO: 48129 - protein, 276 aa, Paraburkholderia megapolitana
  misc_feature (1)..(276): tr|A0A1I3I5G4|A0A1I3I5G4_9BURK NADPH-dependent 7-cyano- 7-deazaguanine reductase OS=Paraburkholderia megapolita na OX=420953 GN=queF PE=3 SV=1
MNTTPEHSPLGKATAYTEQYDASLLFPIARNLAREQIGIGAQLPFFGTDIWNAYELSWLNSRGKPQIAIATVYVPADSANIVESKSFKLYLGSFAQTVFDSADAVRDTIRRDVSAACGATVSVHFASPFEFGKLQLEEFDGLSLDRLDLDTDVYHPDPSLLKSALTEAPVEETLISDLLKSNCPVTGQPDWGSVQIHYVGPQIDHAGLLRYLISYRNHTGFHEQCVERIFIDIMRECQPLKLAVYARYTRRGGLDINPFRTNFNQPMPDNLRTARQ

SEQ ID NO: 48130 - protein, 274 aa, Paraburkholderia monticola
  misc_feature (1)..(274): tr|A0A149PYR6|A0A149PYR6_9BURK NADPH-dependent 7-cyano- 7-deazaguanine reductase OS=Paraburkholderia monticola OX=1399968 GN=queF PE=3 SV=1
MTPEQSPLGKSSTYTEQYDPTLLFPIARSAAREAIGITARLPFFGTDIWNAYELSWLNSRGKPQIAVATFFVPADSPNIVESKSFKLYLGSFAQTAFESAESVRDTIKRDVSASCGSTVSVHLSTPHEFGKLKMEEFDGLSLDRLDLEASVYQPDASLLSAAHGEAPVEETLFSNLLKSNCPVTGQPDWGSVQIHYAGPQIDQAGLLRYIISYRNHTGFHEQCVERIFVDIMKMCKPLKLAVYARYTRRGGLDINPFRTNYNLPMPDNMRLARQ

SEQ ID NO: 48131 - protein, 274 aa, Paraburkholderia phenazinium
  misc_feature (1)..(274): tr|A0A1G7X0V0|A0A1G7X0V0_9BURK NADPH-dependent 7-cyano- 7-deazaguanine reductase OS=Paraburkholderia phenaziniu m OX=60549 GN=queF PE=3 SV=1
MTPEQSPLGKAAAYTEQYDATLLFPIARKAAREAIGIGAQLPFFGTDIWNAYELSWLNGRGKPQIAVATFYVPADSPNIVESKSFKLYLGSFAQSSFESFEAVRETIKKDVSAACGASVSVHLTGPMDFGKLALEEFEGTSLDRLDLDTDVYQPDASLLKAALDEAPVEETVFSNLLKSNCPVTGQPDWGSVQIHYVGPQIDHAGLLRYIVSYRSHTGFHEQCVERIFVDILKICKPLKLAVYARYTRRGGLDINPFRTNFNLPMPDNLRTARQ

SEQ ID NO: 48132 - protein, 274 aa, Paraburkholderia phenazinium
  misc_feature (1)..(274): tr|A0A1N6L469|A0A1N6L469_9BURK NADPH-dependent 7-cyano- 7-deazaguanine reductase OS=Paraburkholderia phenaziniu m OX=60549 GN=queF PE=3 SV=1
MTPEQSPLGKPAAYTEQYDATLLFPIARKAAREAIGIGAQLPFFGTDIWNAYELSWLNGRGKPQIAVATFYVPADSPNIVESKSFKLYLGSFAQTSFESFEAVRDTIKRDVSAVCGASVSVHLTGPMDFGKLALEEFEGTSLDRLDLDTDVYQPDSSLLKAALEESPVEETLFSNLLKSNCPVTGQPDWGSLQIHYVGPQIDHAGLLRYIVSYRNHTGFHEQCVERIFVDVLKICKPLKLAVYARYTRRGGLDINPFRTNFNLPMPDNFRTARQ

SEQ ID NO: 48133 - protein, 274 aa, Paraburkholderia phenoliruptrix
  misc_feature (1)..(274): tr|K0DI77|K0DI77_9BURK NADPH-dependent 7-cyano-7-deazag uanine reductase OS=Paraburkholderia phenoliruptrix BR3 459a OX=1229205 GN=queF PE=3 SV=1
MTPEQSPLGKASTYTEQYDASLLFPIARGNARGAIGIGAQLPFFGTDIWNAYELSWLNQRGKPQIAVATFFVPADSPNIVESKSFKLYLGSFAQTAFDSIEAVRDTIKRDVSASCGSTVSVYLTAPHDFAKLRMEEFEGTPLDRLDLDADVYTPDASLLKAALDEAPVEETVFSNLLKSNCPVTGQPDWGSVQIHYVGPQIDHAGLLRYIISYRNHTGFHEQCVERIFIDVLNACRPVKLAVYARYTRRGGLDINPFRTNYNLPMPDNMRLARQ

SEQ ID NO: 48134 - protein, 274 aa, Paraburkholderia phymatum
  misc_feature (1)..(274): sp|B2JCU2|QUEF_PARP8 NADPH-dependent 7-cyano-7-deazagua nine reductase OS=Paraburkholderia phymatum (strain DSM 17167 / CIP 108236 / LMG 21445 / STM815) OX=391038 GN= queF PE=3 SV=1
MTPEQSPLGKPSSYTEQYDASLLFPIARKNARDQIGIGATLPFFGTDIWNAYELSWLNARGKPQIAIATFYVPADSPNIVESKSFKLYLGSFAQSSFDSIDVVRDTIKRDVSAACGSSVSLHLYPPAEFSKLGLEEFEGTSLDRLDLDAEVYQPDASILKAALDEAPVEETLFSNLLKSNCPVTGQPDWGSVQIHYVGPQIDHAALLRYIISYRNHTGFHEQCVEKIFLDVMKVCQPVKLAVYARYTRRGGLDINPFRTNFNLPMPDNLRTARQ

SEQ ID NO: 48135 - protein, 274 aa, Paraburkholderia phytofirmans
  misc_feature (1)..(274): sp|B2SX29|QUEF_PARPJ NADPH-dependent 7-cyano-7-deazagua nine reductase OS=Paraburkholderia phytofirmans (strain DSM 17436 / LMG 22146 / PsJN) OX=398527 GN=queF PE=3 S V=1
MTPEQSPLGKPSAYTEQYDASLLFPIARKNAREAIGIGAQLPFFGTDIWNAYELSWLNARGKPQIAVATFFVPADSPNIVESKSFKLYLGSFAQTAFESMETVRDTIKRDVSASCGATVSVHLTAPYEFGKLQMEEFEGLSLDRLDLDTDVYHPDASLLTAALDEAPVEETLVSNLLKSNCPVTGQPDWGSVQIHYVGPQIDHAGLLRYIISYRNHTGFHEQCVEKIFLDVLKACKPVKLAVYARYTRRGGLDINPFRTNYNLPMPDNMRLARQ

SEQ ID NO: 48136 - protein, 274 aa, Paraburkholderia piptadeniae
  misc_feature (1)..(274): tr|A0A1N7RX20|A0A1N7RX20_9BURK NADPH-dependent 7-cyano- 7-deazaguanine reductase OS=Paraburkholderia piptadenia e OX=1701573 GN=queF PE=3 SV=1
MTPEQSPLGKPATYTEQYDATLLFPIARKNARDQIGIGATLPFFGTDIWNAYELSWLNARGKPQIAIATFYIPADSPNIVESKSFKLYLGSFAQTSFDSIDVVRNTIKRDVSAACGASVSLHLYPPAEFSKLGLDEFEGTSLDRLDLDAEIYRPDAGLLKAALDEAPVEETLFSNLLKSNCPVTGQPDWGSVQIHYVGPQIDHASLLRYIISYRNHTGFHEQCVEKIFTDVLKVCQPVKLAVYARYTRRGGLDINPFRTNFNLPMPDNLRTARQ

SEQ ID NO: 48137 - protein, 274 aa, Paraburkholderia rhizosphaerae
  misc_feature (1)..(274): tr|A0A4R8M270|A0A4R8M270_9BURK NADPH-dependent 7-cyano- 7-deazaguanine reductase OS=Paraburkholderia rhizosphae rae OX=480658 GN=queF PE=3 SV=1
MTPDQSPLGKPAAYLEQYDASLLFPIARSNAREQIGIGARLPFFGTDIWNAYELSWLNARGKPQIAVATFYVPADSPNIVESKSFKLYLGSFAQTKFDSADIVRDTIRRDVSACCGATVSLHLYGPAEFGKLKLDELDGLSLDRLDLDTEVYQPDASLLKAALDEAPVEETLYSNLLKSNCPVTGQPDWGSVQIHYVGPQIDQASLLRYIISYRTHTGFHEQCVEKMFVDLLDACQPVKLAIYARYTRRGGLDINPFRTNFNLPMPDNLRTARQ

SEQ ID NO: 48138 - protein, 294 aa, Paraburkholderia rhizoxinica
  misc_feature (1)..(294): tr|E5ALS2|E5ALS2_PARRH NADPH-dependent 7-cyano-7-deazag uanine reductase OS=Paraburkholderia rhizoxinica (strai n DSM 19002 / CIP 109453 / HKI 454) OX=882378 GN=queF P E=3 SV=1
MGRNGQPGVSIIPRLSPSRNMTPDQSLLGKPVSYAQQYDPTLLFPIERRQGRDAIGVPAVLPFFGTDIWNAYELSWLNERGKPQIALATFHVPAESPNIIESKSFKLYLGSFAQTRIASIDTLRETIHRDVCACAGANVSVRLTPPAEFATLALDELAGTSLDRLDLDTDSYTPDPSLLSADTHQAPVDETVFSNLLKSNCPVTGQPDWGSIQIRYVGPPIDHAGLLRYIVSYRNHTGFHEQCVERIFIDIQRVCKPIKLAVYARYTRRGGLDINPLRTNFNLPLPDNARTARQ

SEQ ID NO: 48139 - protein, 274 aa, Paraburkholderia rhynchosiae
  misc_feature (1)..(274): tr|A0A2N7VW53|A0A2N7VW53_9BURK NADPH-dependent 7-cyano- 7-deazaguanine reductase OS=Paraburkholderia rhynchosia e OX=487049 GN=queF PE=3 SV=1
MTPEQSPLGKPSSYTEQYDASLLFPIARSNARETIGIGAQLPFFGTDIWNAYELSWLNQRGKPQIAVATFFVPADSPNIVESKSFKLYLGSFAQTAFESIEAVRDTIKRDVSASCGATVSVYLTGPHDFGKLRMEEFEGMSLDRLDLDTDVYTPDASLLKAALDEAPVEETVFSNLLKSNCPVTGQPDWGSVQIHYIGPQIDHAGLLRYIISYRNHTGFHEQCVEKIFIDVMKACKPVKLAVYARYTRRGGLDINPFRTNYNLPMPDNMRLARQ

SEQ ID NO: 48140 - protein, 274 aa, Paraburkholderia ribeironis
  misc_feature (1)..(274): tr|A0A1N7RLV6|A0A1N7RLV6_9BURK NADPH-dependent 7-cyano- 7-deazaguanine reductase OS=Paraburkholderia ribeironis OX=1247936 GN=queF PE=3 SV=1
MTPEQSPLGKSATYTEHYDATLLFPIARKHARDAIGIGAQLPFFGTDIWNAYELSWLNARGKPQIAVATFFVPADSPNIVESKSFKLYLGSFAQTVFESVEAVRDTIRRDVSASCGATVSVHLTTPHEFGRLQMEEFDGLSLDRLDLDTDVYLPDASLLSAAMDEAPVEETLFSNLLKSNCPVTGQPDWGSVQIHYVGPQINQAGLLRYIISYRNHTGFHEQCVERIFVDVLKACKPVKLAVYARYTRRGGLDINPFRTNYNLPMPDNMRLARQ

SEQ ID NO: 48141 - protein, 274 aa, Paraburkholderia sacchari
  misc_feature (1)..(274): tr|A0A0A6Q6Z4|A0A0A6Q6Z4_9BURK NADPH-dependent 7-cyano- 7-deazaguanine reductase OS=Paraburkholderia sacchari O X=159450 GN=queF PE=3 SV=1
MTPEQSPLGKAATYTEHYDASLLFPIPRAGARETIGIGAQLPFFGTDIWNAYELSWLNARGKPQIAIATFFIPADSPNIVESKSFKLYLGSFAQTPFESADVVRDTIKRDVSAACGASVSVRLDQPGAFGKIPFEEFDGLSLDRLDLDTEIYHPDPTLLKSAQDESPVEETLISNLLKSNCPVTGQPDWGSVQIHYVGPQIDQAGLLRYIISYRNHTGFHEQCVERIFMDILRECKPDRLAVYARYTRRGGLDINPFRTNFNMPMPDNARLARQ

SEQ ID NO: 48142 - protein, 274 aa, Paraburkholderia sartisoli
  misc_feature (1)..(274): tr|A0A1H3YF86|A0A1H3YF86_9BURK NADPH-dependent 7-cyano- 7-deazaguanine reductase OS=Paraburkholderia sartisoli OX=83784 GN=queF PE=3 SV=1
MTPEQSPLGKPSSYTEQYDASLLFPIERSAARETIGIGARLPFFGTDIWNAYELSWLNPRGKPQIAVATFFIPADSPNIVESKSFKLYLGSFAHTAFESIDVVRETIRRDVSAASGASVSLHLAPPAEFGKLALEEFEGLSLDRLDLDASVYHPEPSFLTAALDEAPVEETLFSNLLKSNCPVTGQPDWGSVQIHYVGPQIDHAGLLRYIISYRNHTGFHEQCVERIFVDVMRACRPVKLAVYARYTRRGGLDINPFRTNFNLPMPDNLRTARQ

SEQ ID NO: 48143 - protein, 274 aa, Paraburkholderia sediminicola
  misc_feature (1)..(274): tr|A0A3R7G7G5|A0A3R7G7G5_9BURK NADPH-dependent 7-cyano- 7-deazaguanine reductase OS=Paraburkholderia sediminico la OX=458836 GN=queF PE=3 SV=1
MTPEQSPLGKPSAYTEQYDASLLFPIARKNAREAIGIGAQLPFFGTDIWNAYELSWLNARGKPQIAVATFFVPADSPNIVESKSFKLYLGSFAQTAFESMEMVRDTIKRDVSAACGATVSVHLTAPYEFGKLQMEEFEGLSLDRLDLDTDVYQPDASLLKAALDEAPVEETLFSNLLKSNCPVTGQPDWGSVQIHYVGPQIDHAGLLRYIISYRNHTGFHEQCVERIFIDVLKACRPVKLAVYARYTRRGGLDINPFRTNYNLPMPDNLRLARQ

SEQ ID NO: 48144 - protein, 274 aa, Paraburkholderia silvatlantica
  misc_feature (1)..(274): tr|A0A2U0ZRU2|A0A2U0ZRU2_9BURK NADPH-dependent 7-cyano- 7-deazaguanine reductase OS=Paraburkholderia silvatlant ica OX=321895 GN=queF PE=3 SV=1
MTPDQSPLGKASTYTEQYDASLLFPIPRAGAREQIGIGAQLPFFGTDIWNAYELSWLNARGKPQIAIATFFIPADSPNIIESKSFKLYLGSFAQTPFESADAVRDTIRRDVTAACGAPVSVRLDQPGAFGKIPFEEFDGLSLDRLDLDTEIYHPEPTLLKAAFDEAPVEETLISNLLKSNCPVTGQPDWGSVQIHYVGPQIDQAGLLRYIISYRNHTGFHEQCAERIFMDILRECKPDRLAVYARYTRRGGLDINPFRTNFNMPMPDNARLARQ

SEQ ID NO: 48145 - protein, 274 aa, Paraburkholderia sp.
  misc_feature (1)..(274): tr|A0A2S8RKA8|A0A2S8RKA8_9BURK NADPH-dependent 7-cyano- 7-deazaguanine reductase OS=Paraburkholderia sp. BL21I4 N1 OX=1938801 GN=queF PE=3 SV=1
MTPEQSPLGKASTYTEQYDASLLFPIARKNAREAIGIGAQLPFFGTDIWNAYELSWLNARGKPQIAVATFFVPADSPNIVESKSFKLYLGSFAQTAFESMEVVRDTIKRDVSASCGATVSVHLTAPYEFGKLQMEEFEGLSLDRLDLDTDIYQPDASLLSAALDEAPVEETVFSNLLKSNCPVTGQPDWGTVQIHYVGPQIDHAGLLRYIISYRNHTGFHEQCVERIFIDVLKACKPVKLAVYARYTRRGGLDINPFRTNYNLPMPDNMRLARQ

SEQ ID NO: 48146 - protein, 274 aa, Paraburkholderia sp.
  misc_feature (1)..(274): tr|A0A1L6HSU3|A0A1L6HSU3_9BURK NADPH-dependent 7-cyano- 7-deazaguanine reductase OS=Paraburkholderia sp. SOS3 O X=1926494 GN=queF PE=3 SV=1
MTPDQSPLGKPATYTEQYDASLLFPIARSNAREQIGITARLPFFGTDIWNAYELSWLNARGKPQIAIATFFVPADSPNIVESKSFKLYLGSFAQTKFDSIDVVRDTIRRDVSASCGATVSVHLSAPGEFGKLGLEEFDGLSLDRLDLDTDIYVPDASLLKAAHGEAPVEETLYSNLLKSNCPVTGQPDWGSVQIHYVGPQIDQASLLRYIISYRNHTGFHEQCVEKMFVDLLGACQPVKLAIYARYTRRGGLDINPFRTNFNLPMPDNLRTARQ

SEQ ID NO: 48147 - protein, 274 aa, Paraburkholderia sprentiae
  misc_feature (1)..(274): tr|A0A1I9YHQ3|A0A1I9YHQ3_9BURK NADPH-dependent 7-cyano- 7-deazaguanine reductase OS=Paraburkholderia sprentiae WSM5005 OX=754502 GN=queF PE=3 SV=1
MTPEQSPLGKSSTYTEQYDPTLLFPIARSHAREAIGISARLPFFGTDIWNAYELSWLNARGKPQIAVATFFVPADSPNIVESKSFKLYLGSFAQTAFESTESVRDTIKRDVSASCGATVSVHLSTPHEFGKLKMEEFDGLSLDRLELEANVYQPDASLLGAAHDEAPIEETLFSNLLKSNCPVTGQPDWGSVQIHYAGPQIDHAGLLRYIISYRNHTGFHEQCVERIFVDIMKMCKPLKLAVYARYTRRGGLDINPFRTNYNLPMPDNMRLARQ

SEQ ID NO: 48148 - protein, 274 aa, Paraburkholderia susongensis
  misc_feature (1)..(274): tr|A0A1X7JTR9|A0A1X7JTR9_9BURK NADPH-dependent 7-cyano- 7-deazaguanine reductase OS=Paraburkholderia susongensi s OX=1515439 GN=queF PE=3 SV=1
MTPEQSPLGKSSTYTEQYDPTLLFPIARRNAREAIGINAQLPFFGTDIWNAYELSWLNARGKPQIAVATFFVPADSPNIVESKSFKLYLGSFAQTAFESAESVRDTIKRDVSASCGATVSVHLATPHEFGKLRMEEFDGLSLDRLDLDASAYQPDASLLSAAHDEAPVEETLFSNLLKSNCPVTGQPDWGSVQIHYAGPQIDHAGLLRYIISYRNHTGFHEQCVERIFVDIMKMCKPLKLAVYARYTRRGGLDINPFRTNYNLPMPDNLRLARQ

SEQ ID NO: 48149 - protein, 274 aa, Paraburkholderia terrae
  misc_feature (1)..(274): tr|A0A2I8EFV0|A0A2I8EFV0_9BURK NADPH-dependent 7-cyano- 7-deazaguanine reductase OS=Paraburkholderia terrae OX= 311230 GN=queF PE=3 SV=1
MTPEQSPLGKPSSYTEQYDASLLFPIARKNAREQIGIGATLPFFGTDIWNAYELSWLNARGKPQVAIATFFIPADSPNIVESKSFKLYLGSFAQTSFDSIETVRDTIKRDVSAACGSSVSLHLYPPAEFSKLAMDEFEGTSLDRLDLDTDVYLPDASLLKAALDEAPVEETLFSNLLKSNCPVTGQPDWGSVQIHYVGPQIDQAGLLRYIISYRNHTGFHEQCVEKIFLDVLKVCQPVKLAVYARYTRRGGLDINPFRTNFNLPMPDNLRTARQ

SEQ ID NO: 48150 - protein, 274 aa, Paraburkholderia terrae; identical to SEQ ID NO: 48126
  misc_feature (1)..(274): tr|I5CZZ4|I5CZZ4_9BURK NADPH-dependent 7-cyano-7-deazag uanine reductase OS=Paraburkholderia terrae BS001 OX=11 71375 GN=queF PE=3 SV=1

SEQ ID NO: 48151 - protein, 274 aa, Paraburkholderia terricola
  misc_feature (1)..(274): tr|A0A1M6YA91|A0A1M6YA91_9BURK NADPH-dependent 7-cyano- 7-deazaguanine reductase OS=Paraburkholderia terricola OX=169427 GN=queF PE=3 SV=1
MTPEQSPLGKPSAYTEQYDASLLFPIARGNAREAIGISAPLPFFGTDIWNAYELSWLNARGKPQIAVATFFVPADSPNIVESKSFKLYLGSFAQTAFESMDAVRETIKRDVSASCGATVSVHLTAPYEFGKLQMEEFEGLSLDRLDLDTDVYQPDASLLKAALDEAPVEETLFSNLLKSNCPVTGQPDWGSVQIHYIGPQIDHAGLLRYIISYRNHTGFHEQCVEKIFIDVLKACKPVKLAVYARYTRRGGLDINPFRTNYNLPMPDNMRLARQ

SEQ ID NO: 48152 - protein, 274 aa, Paraburkholderia tropica
  misc_feature (1)..(274): tr|A0A1A5XCP6|A0A1A5XCP6_9BURK NADPH-dependent 7-cyano- 7-deazaguanine reductase OS=Paraburkholderia tropica OX =92647 GN=queF PE=3 SV=1
MTPEQSPLGKASSYTEQYDAKLLFPIPRVGAREQIGIGAQLPFFGTDIWNAYELSWLNARGKPQIAIATFFIPADSPNIVESKSFKLYLGSFAQTKFESADDVRDVLKRDVSAACGASVSVKLDQPGAFGKIPFEEFDGLSIDRLDLDAEIYHPDATLLKAALDESPVEETLVSNLLKSNCPVTGQPDWGSVQIHYVGPQIDQAGLLRYIISFRNHTGFHEQCAERIFMDILRECKPDRLAVYARYTRRGGLDINPFRTNFNMPMPDNARLARQ

SEQ ID NO: 48153 - protein, 274 aa, Paraburkholderia tropica
  misc_feature (1)..(274): tr|A0A2W7M878|A0A2W7M878_9BURK NADPH-dependent 7-cyano- 7-deazaguanine reductase OS=Paraburkholderia tropica OX =92647 GN=queF PE=3 SV=1
MTPEQSPLGKASSYTEQYDAKLLFPIPRVGAREQIGIGAQLPFFGTDIWNAYELSWLNARGKPQIAIATFFIPADSPNIVESKSFKLYLGSFAQTKFESADDVRDVLKRDVSAACGASVSVKLDQPGAFGKIPFEEFDGLSIDRLDLDAEVYHPDATLLKAALDESPVEETLVSNLLKSNCPVTGQPDWGSVQIHYVGPQIDQAGLLRYIISFRNHTGFHEQCAERIFMDILRECKPDRLAVYARYTRRGGLDINPFRTNFNMPMPDNARLARQ

SEQ ID NO: 48154 - protein, 274 aa, Paraburkholderia tuberum
  misc_feature (1)..(274): tr|A0A1H1EFE5|A0A1H1EFE5_9BURK NADPH-dependent 7-cyano- 7-deazaguanine reductase OS=Paraburkholderia tuberum OX =157910 GN=queF PE=3 SV=1
MTPEQSPLGKSSTYTEQYDPTLLFPISRSHAREAIGITARLPFFGTDIWNAYELSWLNARGKPQIAVATFFVPADSPNIVESKSFKLYLGSFAQTAFDSAESVRDTIRRDVSASCGATVSVHLSTPHEFGKLKMEEFAGLSLDRLELEASVYQPDASLLSAARDEAPVEETLFSNLLKSNCPVTGQPDWGSVQIHYAGPQIDHAGLLRYIISYRNHTGFHEQCVERIFVDIMKMCKPLKLAVYARYTRRGGLDINPFRTNYNLPMPDNMRLARQ

SEQ ID NO: 48155 - protein, 274 aa, Paraburkholderia unamae
  misc_feature (1)..(274): tr|A0A328WVZ8|A0A328WVZ8_9BURK NADPH-dependent 7-cyano- 7-deazaguanine reductase OS=Paraburkholderia unamae OX= 219649 GN=queF PE=3 SV=1
MTPDQSPLGKPAAYTEQYDASLLFPIPRAGAREQIGIGAQLPFFGTDIWNAYELSWLNARGKPQIAIATFFIPADSPNIIESKSFKLYLGSFAQTPFESADAVRDTIRRDVTAACGASVSVRLEQPGAFGKIPFEEFDGLSLDRLDLDTEIYHPEPTLLKAALDEAPVEETLVSNLLKSNCPVTGQPDWGSVQIHYVGPQIDQAGLLRYIISYRNHTGFHEQCAERIFMDILRECKPDRLAVYARYTRRGGLDINPFRTNFNMPMPDNARLARQ

SEQ ID NO: 48156 - protein, 274 aa, Paraburkholderia xenovorans
  misc_feature (1)..(274): sp|Q145P6|QUEF_PARXL NADPH-dependent 7-cyano-7-deazagua nine reductase OS=Paraburkholderia xenovorans (strain L B400) OX=266265 GN=queF PE=3 SV=1
MTPEQSPLGKASTYTEQYDASLLFPIARKNAREAIGIGAQLPFFGTDIWNAYELSWLNARGKPQIAVATFFVPADSPNIVESKSFKLYLGSFAQTAFESMDAVRDTIRRDVSASCGATVSVHLTAPYKFGKLQMEEFEGLSLDRLDLDTDVYQPDASLLKAALHEAPVEETVFSNLLKSNCPVTGQPDWGSVQIHYVGPQIDHAGLLRYIISYRNHTGFHEQCVERIFVDVLKACKPVKLAVYARYTRRGGLDINPFRTNYNLPMPDNMRLARQ

SEQ ID NO: 48157 - protein, 154 aa, Paracandidimonas soli
  misc_feature (1)..(154): tr|A0A4R3UTF1|A0A4R3UTF1_9BURK NADPH-dependent 7-cyano- 7-deazaguanine reductase OS=Paracandidimonas soli OX=19 17182 GN=queF PE=3 SV=1
MSSSDVSSLSQLGRMVEAPADPQSAVLERVPNPHPDTAYVARFTAPEFTSLCPVTGQPDFAHLVIDYVPQDWLVESKSLKLYLTSFRNHGAFHEDCTVSIGKRLVALLEPRWLRIAGYWYPRGGIPIDVFWQTGNAPDGVWVPDTGVPAYRGRG

SEQ ID NO: 48158 - protein, 269 aa, Parachlamydia acanthamoebae
  misc_feature (1)..(269): tr|F8L1L5|F8L1L5_PARAV NADPH-dependent 7-cyano-7-deazag uanine reductase OS=Parachlamydia acanthamoebae (strain UV7) OX=765952 GN=queF PE=3 SV=1
MLDQSPLGKQTTYITTYSPELLFPIPRTMARNKIGLTSLPFTGLDIWNSYELSWLDQKGKPQIAFAEFHFPYDNPNIVESKSFKLYLNSFNQTKIGSLAELNEILERDLSQVSLGPVTVELYSSADFKKQPMREFSGTCLDFLDIETNAYHVSPEFLSTSSDYVEESIYSELLKSNCLATGQPDWGTIYIRYAGHKIAHEGLLKYIISYRKHSGFHEDCVEKIFYDISTYCKPEKLTVYARYVRRGGLDINPFRSNFETDPVNLRLNRQ

SEQ ID NO: 48159 - protein, 273 aa, Parachlamydia acanthamoebae
  misc_feature (1)..(273): tr|A0A0C1EL00|A0A0C1EL00_9BACT NADPH-dependent 7-cyano- 7-deazaguanine reductase OS=Parachlamydia acanthamoebae OX=83552 GN=queF PE=3 SV=1
MRIFMLDQSPLGKQTTYITTYSPELLFPIPRTMARNKIGLTSLPFTGLDIWNSYELSWLDQKGKPQIAFAEFHFPYDNPNIVESKSFKLYLNSFNQTKIGSLAELNEILERDLSQVSLGPVTVELYSSADFKKQPMREFSGTCLDFLDIETNAYHVSPEFLSTSSDYVEESIYSELLKSNCLATGQPDWGTIYIRYAGHKIAHEGLLKYIISYRKHSGFHEDCVEKIFYDISTYCKPEKLTVYARYVRRGGLDINPFRSNFETDPVNLRLNRQ

SEQ ID NO: 48160 - protein, 270 aa, Parachlamydia sp.
  misc_feature (1)..(270): tr|A0A2H9SRW3|A0A2H9SRW3_9BACT NADPH-dependent 7-cyano- 7-deazaguanine reductase QueF OS=Parachlamydia sp. OX=2 052048 GN=CK425_05570 PE=3 SV=1
MLEQSPLGKQSSYITTYSPELLFPIPRTLARNKIGLKAALPFTGVDIWNSYELSWLNAKGKPQIAFAEFHFPHDNTYIVESKSFKLYLNSFNQTKFATWEQVHATLVKDLSQASGGLAKVFLFSSEEFKKLPLQEFPGTCLDHLDIETDSYQISSHFLSTQPLEVEETVYSELLKSNCLATGQPDWGTVLIRYAGKKILHEGLLKYLISYRNHSGFHEDCVEQIFKDLLTHCQPARLTVYARYVRRGGLDINPFRSNFETSPENVRLNRQ

SEQ ID NO: 48161 - protein, 153 aa, Paracoccus aestuarii
  misc_feature (1)..(153): tr|A0A419A0G3|A0A419A0G3_9RHOB NADPH-dependent 7-cyano- 7-deazaguanine reductase OS=Paracoccus aestuarii OX=453 842 GN=queF PE=3 SV=1
MAHYTDALTQLGSATTLPQHPDEAVLERVPNPQPGQTYAVRFTQPEFTSLCPLTGQPDFAHLVIDYVPGDWLVESKSLKLFLGAFRNHGAFHEDCTVGIGRRIADLLEPQWLRIGGYWYPRGGMPIDVFWQTGAAPAGLWLPDQGVPTYRGRG

SEQ ID NO: 48162 - protein, 153 aa, Paracoccus alcaliphilus
  misc_feature (1)..(153): tr|A0A1H8FLL5|A0A1H8FLL5_9RHOB NADPH-dependent 7-cyano- 7-deazaguanine reductase OS=Paracoccus alcaliphilus OX= 34002 GN=queF PE=3 SV=1
MSHYTDALTQLGAKTPLPQHPDQAVLERVPNPQPGEVYAVRFAQPEFTSLCPITGQPDFAHLVIDYVPGDWLVESKSLKLYLGSFRNHGAFHEDCTVGIGKRLAALLSPLWLRIGGYWFPRGGMPIDVFWQSGAMPEGLWLPDQGVPGYRGRG

SEQ ID NO: 48163 - protein, 154 aa, Paracoccus aminovorans
  misc_feature (1)..(154): tr|A0A1I3C640|A0A1I3C640_9RHOB NADPH-dependent 7-cyano- 7-deazaguanine reductase OS=Paracoccus aminovorans OX=3 4004 GN=queF PE=3 SV=1
MTETIYSGLTQLGGATRLPESPEQAQLERVRNPQADLSYAVRFTAPEFTSLCPMTGQPDFAHLVIDYVPDEWLVESKSLKLYLGSFRNHGAFHEDCTISIARRLVEFLAPRWLRIGGYWYPRGGIPIDVFWQTGPAPDGVWIPDQGVPPYRGRG

SEQ ID NO: 48164 - protein, 154 aa, Paracoccus bengalensis
  misc_feature (1)..(154): tr|A0A3D9XSX7|A0A3D9XSX7_9RHOB NADPH-dependent 7-cyano- 7-deazaguanine reductase OS=Paracoccus bengalensis OX=3 02403 GN=queF PE=3 SV=1
MTETIYSGLKQLGGATRLPESPDQAELERVQNPQADVAYNVRFTAPEFTSLCPMTGQPDFAHLVIDYVPGDWLVESKSLKLYLGSFRNHGAFHEDCTVSIGRRLAGFLKPRWLRIGGYWYPRGGMPIDVFWQTGPMPEAVWIPDQGVPPYRGRG

SEQ ID NO: 48165 - protein, 153 aa, Paracoccus denitrificans
  misc_feature (1)..(153): tr|A0A533I978|A0A533I978_PARDE NADPH-dependent 7-cyano- 7-deazaguanine reductase OS=Paracoccus denitrificans OX =266 GN=queF PE=3 SV=1
MSHYTDNLTQLGQDTKLPNSPDEAVLERVPNPQAGEGYVVRFTQPEFTSLCPMTGQPDFAHMVIDYVPGDWLVESKSLKLFLGSFRNHGAFHEDCTVTIGKRLVETLEPRWLRIGGYWYPRGGMPIDVFWQTGAVPAGIWLPDQGVATYRGRG

SEQ ID NO: 48166 - protein, 154 aa, Paracoccus denitrificans
  misc_feature (1)..(154): sp|A1B9Q2|QUEF_PARDP NADPH-dependent 7-cyano-7-deazagua nine reductase OS=Paracoccus denitrificans (strain Pd 1 222) OX=318586 GN=queF PE=3 SV=1
MTETIYSGLKQLGGATLLPESPDKAELERVRNPQADVAYNVRFTAPEFTSLCPMTGQPDFAHLVIDYVPGEWLVESKSLKLYLGSFRNHGAFHEDCTVSIGRRLAGFLAPRWLRIGGYWYPRGGMPIDVFWQTGPMPEGVWIPDQDVPPYRGRG

SEQ ID NO: 48167 - protein, 153 aa, Paracoccus gahaiensis
  misc_feature (1)..(153): tr|A0A4U0R7Y7|A0A4U0R7Y7_9RHOB NADPH-dependent 7-cyano- 7-deazaguanine reductase OS=Paracoccus gahaiensis OX=17 06839 GN=queF PE=3 SV=1
MSHYTDALTQLGAETRLPASPEEAVLERVPNPQPGQTYVVRFTQPEFTSLCPLTGQPDFAHLVIDYVPGDWLVESKSLKLYLGSFRNHGAFHEDCTVGIGRRIAELLDPAWLRIGGYWYPRGGMPIDVFWQTGAPPAGLWLPDQGVPGYRGRG

SEQ ID NO: 48168 - protein, 153 aa, Paracoccus haeundaensis
  misc_feature (1)..(153): tr|A0A5C4R2B6|A0A5C4R2B6_9RHOB NADPH-dependent 7-cyano- 7-deazaguanine reductase OS=Paracoccus haeundaensis OX= 225362 GN=queF PE=3 SV=1
MSHYTDALTQLGSDTPLPQHPDQAVLERVPNPQPGQTYAVRFTQPEFTSLCPLTGQPDFAHLVIDYVPGDWLVESKSLKLFLGSFRNHGAFHEDCTVGIGRRIAELLQPAWLRIGGYWYPRGGMPIDVFWQTGAAPAGLWLPDQGVPTYRGRG

SEQ ID NO: 48169 - protein, 154 aa, Paracoccus halophilus
  misc_feature (1)..(154): tr|A0A099F3N4|A0A099F3N4_9RHOB NADPH-dependent 7-cyano- 7-deazaguanine reductase OS=Paracoccus halophilus OX=37 6733 GN=queF PE=3 SV=1
MTDSIYSELKQLGAATTLPESPERAELERVRNPQADTAYNVRFTAPEFTSLCPMTGQPDFAHLVIDYVPGAWLVESKSLKLYLGSFRNHGAFHEDCTVRIGRRLADFLEPQWLRIGGYWYPRGGMPIDVFWQSGPMPASVWIPDQGVPPYRGRG

SEQ ID NO: 48170 - protein, 153 aa, Paracoccus hibiscisoli
  misc_feature (1)..(153): tr|A0A4U0QYP6|A0A4U0QYP6_9RHOB NADPH-dependent 7-cyano- 7-deazaguanine reductase OS=Paracoccus hibiscisoli OX=2 023261 GN=queF PE=3 SV=1
MSHYTDALTQLGADTPLPQSPEEAVLERVPNPQPGQTYAVRFTQPEFTSLCPLTGQPDFAHLVIDYVPGDWLVESKSLKLFLGSFRNHGAFHEDCTVGIGRRIADLLDPQWLRIGGYWYPRGGMPIDVFWQTGAVPAGLWLPDQGVPTYRGRG

SEQ ID NO: 48171 - protein, 153 aa, Paracoccus homiensis
  misc_feature (1)..(153): tr|A0A1H9YG47|A0A1H9YG47_9RHOB NADPH-dependent 7-cyano- 7-deazaguanine reductase OS=Paracoccus homiensis OX=364 199 GN=queF PE=3 SV=1
MSHYTDALTQLGAKTDLPDSPESAVLERVPNPQQGETYLVRFTQPEFTSLCPITGQPDFAHLVIDYVPGDWLVESKSLKLFLGSFRNHGAFHEDCTVGIGKRLVGEIAPVWLRIGGYWYPRGGMPIDVFWQTGAAPGNLWLPDQAVPGYRGRG

SEQ ID NO: 48172 - protein, 153 aa, Paracoccus isoporae
  misc_feature (1)..(153): tr|A0A1G7CBW3|A0A1G7CBW3_9RHOB NADPH-dependent 7-cyano- 7-deazaguanine reductase OS=Paracoccus isoporae OX=5912 05 GN=queF PE=3 SV=1
MSHYTDGLTQLGQAAALPASPDEAVLERVPNPQPGEAYVVRFIQPEFTSLCPMTGQPDFAHLVIDYLPQDWLVESKSLKLFLGSFRNHGAFHEDCTVSIGKRLAETLAPQWLRIGGYWYPRGGMPIDVFWQTGAVPDGLWLPDQGVAPYRGRG

SEQ ID NO: 48173 - protein, 154 aa, Paracoccus laeviglucosivorans
  misc_feature (1)..(154): tr|A0A521B4V5|A0A521B4V5_9RHOB NADPH-dependent 7-cyano- 7-deazaguanine reductase OS=Paracoccus laeviglucosivora ns OX=1197861 GN=queF PE=3 SV=1
MTKSIYQNLTQLGGATVMPESPEKAVLERVTNPQADVSYNVRFTAPEFTSLCPMTGQPDFAHLVIDYVPGDWLVESKSLKLFLGSFRNHGAFHEDCTVSIARRLNDFLAPRWLRIGGYWYPRGGIPIDVFWQTGAMPDGVWIPDQGVPPYRGRG

SEQ ID NO: 48174 - protein, 154 aa, Paracoccus pantotrophus; identical to SEQ ID NO: 48164
  misc_feature (1)..(154): tr|A0A1K2F204|A0A1K2F204_PARPN NADPH-dependent 7-cyano- 7-deazaguanine reductase OS=Paracoccus pantotrophus OX= 82367 GN=queF PE=3 SV=1

SEQ ID NO: 48175 - protein, 154 aa, Paracoccus pantotrophus
  misc_feature (1)..(154): tr|A0A1I5IN03|A0A1I5IN03_PARPN NADPH-dependent 7-cyano- 7-deazaguanine reductase OS=Paracoccus pantotrophus OX= 82367 GN=queF PE=3 SV=1
MTETIYSGLKQLGGATRLPESPDKAELERVQNPQADVSYNVRFTAPEFTSLCPMTGQPDFAHLVIDYVPGDWLVESKSLKLYLGSFRNHGAFHEDCTVSIGRRLAGFLAPRWLRIGGYWYPRGGMPIDVFWQTGPVPEAVWIPDQGVPPYRGRG

SEQ ID NO: 48176 - protein, 153 aa, Paracoccus saliphilus
  misc_feature (1)..(153): tr|A0A1N7NQR5|A0A1N7NQR5_9RHOB NADPH-dependent 7-cyano- 7-deazaguanine reductase OS=Paracoccus saliphilus OX=40 5559 GN=queF PE=3 SV=1
MSHYTDALTQLGASSELPQSPEEAVLERVPNPQPGEVYAVRFTQPEFTSLCPITGQPDFAHLVIDYVPGEWLVESKSLKLFLGSFRNHGAFHEDCTVGIGKRLVETLSPQWLRIGGYWYPRGGMPIDVFWQTGAAPSGLWLPDQGVPGYRGRG

SEQ ID NO: 48177 - protein, 161 aa, Paracoccus sanguinis
  misc_feature (1)..(161): tr|A0A1H2R0I8|A0A1H2R0I8_9RHOB NADPH-dependent 7-cyano- 7-deazaguanine reductase OS=Paracoccus sanguinis OX=154 5044 GN=queF PE=3 SV=1
MHRPTGTEMPHYTDSLTQLGRPAALPASPDEAVLERVPNPQPGALYAVRFTQPEFTSLCPLTGQPDFAHLVIDYVPGDWLVESKSLKLFLGSFRNHGAFHEDCTVGIGLRLVETLAPRWLRIGGYWYPRGGMPIDVFWQTGAPPEGLFLPDQGVPPYRGRG

SEQ ID NO: 48178 - protein, 153 aa, Paracoccus sediminis
  misc_feature (1)..(153): tr|A0A238X9D3|A0A238X9D3_9RHOB NADPH-dependent 7-cyano- 7-deazaguanine reductase OS=Paracoccus sediminis OX=121 4787 GN=queF PE=3 SV=1
MPHYTDALTQLGAATDLPASPDRAVLERVPNPQAGEVYAIRFTQPEFTSLCPMTGQPDFAHLVIDYVPGDWLVESKSLKLFLGSFRNHGAFHEDCTVGIGKRLAETISPQWLRIGGYWYPRGGMPIDVFWQTGAAPAGLWLPDQGVAGYRGRG

SEQ ID NO: 48179 - protein, 154 aa, Paracoccus seriniphilus
  misc_feature (1)..(154): tr|A0A239PUM1|A0A239PUM1_9RHOB NADPH-dependent 7-cyano- 7-deazaguanine reductase OS=Paracoccus seriniphilus OX= 184748 GN=queF PE=3 SV=1
MTKDIYRNLRQLGGETRIPASPAEAELERVPNPQADVAYNVRFTAPEFTSLCPMTGQPDFAHLVIDYVPGPWLVESKSLKLFLTSFRNHGAFHEDCTISIARRLADFLEPQWLRIGGYWYPRGGIPIDVFWQTGPMPEAVWIPDQGVPPYRGRG

SEQ ID NO: 48180 - protein, 153 aa, Paracoccus siganidrum
  misc_feature (1)..(153): tr|A0A419A5A7|A0A419A5A7_9RHOB NADPH-dependent 7-cyano- 7-deazaguanine reductase OS=Paracoccus siganidrum OX=12 76757 GN=queF PE=3 SV=1
MSHYTDALTQLGAKTTLPQSPEEAVLERVPNPQPGEAYVVRFTQPEFTSLCPITGQPDFAHLVIDYVPGDWLVESKSLKLYLGSFRNHGAFHEDCTVGIGKRLVGLLAPRWLRIGGYWYPRGGMPIDVFWQSGAVPEGLWLPEQGVAGYRGRG

SEQ ID NO: 48181 - protein, 153 aa, Paracoccus sp.
  misc_feature (1)..(153): tr|A0A3A3DHV8|A0A3A3DHV8_9RHOB NADPH-dependent 7-cyano- 7-deazaguanine reductase OS=Paracoccus sp. JM45 OX=2283 626 GN=queF PE=3 SV=1
MSHYTDALTQLGANTTLPQSPEEAVLERVPNPQPDTLYAVRFTQPEFTSLCPITGQPDFAHLMIDYVPRDWLVESKSLKLFLGSFRNHGAFHEDCTVGIGKRIVDLLDPQWLRIGGYWYPRGGMPIDVFWQTAAAPAGLWLPDQAVPTYRGRG

SEQ ID NO: 48182 - protein, 153 aa, Paracoccus sp.
  misc_feature (1)..(153): tr|A0A2K9EM59|A0A2K9EM59_9RHOB NADPH-dependent 7-cyano- 7-deazaguanine reductase OS=Paracoccus sp. BM15 OX=1529 068 GN=queF PE=3 SV=1
MSHYTDALTQLGQDTPLPQSPQEAVLERVPNPQGDTLYLVRFTQPEFTSLCPLTGQPDFAHLVIDYAPADWLVESKSLKLFLGSFRNHGAFHEDCTVSIGRRLVDLLAPQWLRIGGYWYPRGGMPIDVFWQTGPVPSGLWAPDQGVPGYRGRG

SEQ ID NO: 48183 - protein, 153 aa, Paracoccus tibetensis
  misc_feature (1)..(153): tr|A0A1G5IZ61|A0A1G5IZ61_9RHOB NADPH-dependent 7-cyano- 7-deazaguanine reductase OS=Paracoccus tibetensis OX=33 6292 GN=queF PE=3 SV=1
MSHYTDTLTQLGNATSLPRSPEEAVLERVPNPQAGTAFVVRFTQPEFTSLCPLTGQPDFAHLVIDYVPGDWLVESKSLKLFLGSFRNHGAFHEDCTVGIAKRLVELLDPAWLRIGGYWYPRGGMPIDVFWQTGAAPAGVWVPDQGVAPYRGRG

SEQ ID NO: 48184 - protein, 154 aa, Paracoccus versutus
  misc_feature (1)..(154): tr|A0A3E0BQ92|A0A3E0BQ92_PARVE NADPH-dependent 7-cyano- 7-deazaguanine reductase OS=Paracoccus versutus OX=3400 7 GN=queF PE=3 SV=1
MTETIYSGLKQLGGATRLPESPDQAELERVQNPQADVAYNVRFTVPEFTSLCPMTGQPDFAHLVIDYMPGDWLVESKSLKLYLGSFRNHGAFHEDCTVSIGRRLAGFLKPRWLRIGGYWYPRGGMPIDVFWQTGPMPEAVWIPDQGVPPYRGRG

SEQ ID NO: 48185 - protein, 154 aa, Paracoccus versutus
  misc_feature (1)..(154): tr|A0A369U2P4|A0A369U2P4_PARVE NADPH-dependent 7-cyano- 7-deazaguanine reductase OS=Paracoccus versutus OX=3400 7 GN=queF PE=3 SV=1
MTETIYSGLKQLGGATRLPESPDQAELERVQNPQADVAYNVRFTAPEFTSLCPMTGQPDFAHLVIDYVPGDWLVESKSLKLYLGSFRNHGAFHEDCTVSIGRRLAGFLAPRWLRIGGYWYPRGGMPIDVFWQTGPMPEAVWIPDQGVPPYRGRG

SEQ ID NO: 48186 - protein, 153 aa, Paracoccus zhejiangensis
  misc_feature (1)..(153): tr|A0A2H5EXE4|A0A2H5EXE4_9RHOB NADPH-dependent 7-cyano- 7-deazaguanine reductase OS=Paracoccus zhejiangensis OX =1077935 GN=queF PE=3 SV=1
MSHYTDALTQLGQPTRLPQSPEEAVLERVPNPQADTGYVVRFTQPEFTSLCPLTGQPDFAHLVIDYVPGDWLVESKSLKLFLGSFRNHGAFHEDCTVSIGRRLVDLLSPRWLRIGGYWYPRGGMPIDVFWQTGAAPEGIWIPDQGVPGYRGRG

SEQ ID NO: 48187 - protein, 152 aa, Paracraurococcus sp.
  misc_feature (1)..(152): tr|A0A4R4DR36|A0A4R4DR36_9PROT NADPH-dependent 7-cyano- 7-deazaguanine reductase OS=Paracraurococcus sp. NE82 O X=2527868 GN=queF PE=3 SV=1
MTDTSGLTLLGRPAGLPESPDTAVLERVPNPHPGYRYLVRFAAPEFTSLCPLTGQPDFAHLVIDYVPQDWLVESKSLKLYLSAFRNHGAFHEACTVAIARRLVEVLSPAWLRIGGYWYPRGGIPIDVFYQTGPAPEGVWVPEQGVQPYRGRG

SEQ ID NO: 48188 - protein, 165 aa, Parageobacillus caldoxylosilyticus
  misc_feature (1)..(165): tr|A0A023DC10|A0A023DC10_9BACI NADPH-dependent 7-cyano- 7-deazaguanine reductase OS=Parageobacillus caldoxylosi lyticus NBRC 107762 OX=1220594 GN=queF PE=3 SV=1
MAGRKEEELKDLTLLGNQGTKYLFEYSPEVLEVFENKHPDRDYFVKFNCPEFTSLCPKTGQPDFATIYISYIPDKKCVESKSLKLYLFSFRNHGDFHEDCVNIIMNDLIKVMEPRYIEVWGKFTPRGGISIDPYCNWGRPGTKYEKMAEYRLMNHDLYPEKVDNR

SEQ ID NO: 48189 - protein, 165 aa, Parageobacillus caldoxylosilyticus; identical to SEQ ID NO: 48188
  misc_feature (1)..(165): tr|A0A150L503|A0A150L503_9BACI NADPH-dependent 7-cyano- 7-deazaguanine reductase OS=Parageobacillus caldoxylosi lyticus OX=81408 GN=queF PE=3 SV=1

SEQ ID NO: 48190 - protein, 165 aa, Parageobacillus genomosp.; identical to SEQ ID NO: 48188
  misc_feature (1)..(165): tr|A0A023CST9|A0A023CST9_9BACI NADPH-dependent 7-cyano- 7-deazaguanine reductase OS=Parageobacillus genomosp. 1 OX=1295642 GN=queF PE=3 SV=1

SEQ ID NO: 48191 - protein, 166 aa, Parageobacillus thermantarcticus
  misc_feature (1)..(166): tr|A0A1I0T985|A0A1I0T985_9BACI NADPH-dependent 7-cyano- 7-deazaguanine reductase OS=Parageobacillus thermantarc ticus OX=186116 GN=queF PE=3 SV=1
MMAGRKEEELKNLTLLGNQGTKYLFEYSPEVLEVFENKHPDRDYFVKFNCPEFTTLCPKTGQPDFATIYISYIPDKKCVESKSLKLYLFSFRNHGDFHEDCVNIIMNDLIKVMEPRYIEVWGKFTPRGGISIDPYCNWGRPGTKYEKMAEYRLMNHDLYPEKVDNR

SEQ ID NO: 48192 - protein, 165 aa, Parageobacillus thermoglucosidasius
  misc_feature (1)..(165): tr|A0A178TY46|A0A178TY46_PARTM NADPH-dependent 7-cyano- 7-deazaguanine reductase OS=Parageobacillus thermogluco sidasius OX=1426 GN=queF PE=3 SV=1
MAGRREEELKNLTLLGNQGTKYLFEYSPEVLEVFENKHPDRDYFVKFNCPEFTTLCPKTGQPDFATIYISYIPDKKCVESKSLKLYLFSFRNHGDFHEDCVNIIMNDLIKVMEPRYIEVWGKFTPRGGISIDPYCNWGRPGTKYEKMAEYRLMNHDLYPEKVDNR

SEQ ID NO: 48193 - protein, 166 aa, Parageobacillus thermoglucosidasius
  misc_feature (1)..(166): tr|A0A401XWI3|A0A401XWI3_PARTM NADPH-dependent 7-cyano- 7-deazaguanine reductase OS=Parageobacillus thermogluco sidasius OX=1426 GN=queF PE=3 SV=1
MMAGRREEELKNLTLLGNQGTKYLFEYSPEVLEVFENKHPDRDYFVKFNCPEFTTLCPKTGQPDFATIYISYIPDKKCVESKSLKLYLFSFRNHGDFHEDCVNIIMNDLIKVMEPRYIEVWGKFTPRGGISIDPYCNWGRPGTKYEKMAEYRLMNHDLYPEKVDNR

SEQ ID NO: 48194 - protein, 114 aa, Parageobacillus toebii; identical to SEQ ID NO: 46131
  misc_feature (1)..(114): tr|A0A3M0F080|A0A3M0F080_9BACI NADPH-dependent 7-cyano- 7-deazaguanine reductase OS=Parageobacillus toebii NBRC 107807 OX=1223503 GN=queF PE=3 SV=1

SEQ ID NO: 48195 - protein, 114 aa, Parageobacillus toebii; identical to SEQ ID NO: 46131
  misc_feature (1)..(114): tr|A0A150N658|A0A150N658_9BACI NADPH-dependent 7-cyano- 7-deazaguanine reductase OS=Parageobacillus toebii OX=1 53151 GN=queF PE=3 SV=1

SEQ ID NO: 48196 - protein, 279 aa, Paraglaciecola agarilytica
  misc_feature (1)..(279): tr|K6Y378|K6Y378_9ALTE NADPH-dependent 7-cyano-7-deazag uanine reductase OS=Paraglaciecola agarilytica NO2 OX=1 125747 GN=queF PE=3 SV=1
MQDKTLPSDVLSSLTLGKATQYKEHYSPDLLQGVPRSLNRDELNLGDTLPFKGVDRWNGYELSWLNLKGKPQVAILRCEVPCESVNLIESKSFKLYLNSFNQSKVESILHVQKMISKDLSACAGLPVNVQLYAREAFPGLHLGTLEAQCIDDLDITIDNYELEPSILRVEESEVQETLCSHLLKSNCLITNQPDWGSVLIRYQGRKIDQESVLRYLISFRQHNEFHEQCVERIFSDIMKFCKPQKLTVYARYTRRGGLDINPFRSNFETIYPELRLARQ

SEQ ID NO: 48197 - protein, 279 aa, Paraglaciecola arctica
  misc_feature (1)..(279): tr|K6YT01|K6YT01_9ALTE NADPH-dependent 7-cyano-7-deazag uanine reductase OS=Paraglaciecola arctica BSs20135 OX= 493475 GN=queF PE=3 SV=1
MSEKIDKHTMLAGLSLGKATEYQEIYTPDLLQAVPRSMNRVELNLASELPFYGTDRWNGYELSWLNTKGKPQVAIMRCEVPASSPNLVESKSFKLYLNSFNQSQFDSLDSVTLALTKDLSQCAGEKVKVTLFKPAEFSQMQIASFDAVSIDDLDIEVKGYQLDPSNLTARGELIKETLTSDLLKSNCLITNQPDWGSVLIRYQGQQINHEGLLRYLISFRQHNEFHEQCVERIFCDIMENCKPNKLSVYARYTRRGGLDINPFRSNFEQIYPEVRLARQ

SEQ ID NO: 48198 - protein, 279 aa, Paraglaciecola hydrolytica
  misc_feature (1)..(279): tr|A0A135ZYV5|A0A135ZYV5_9ALTE NADPH-dependent 7-cyano- 7-deazaguanine reductase OS=Paraglaciecola hydrolytica OX=1799789 GN=queF PE=3 SV=1
MDNQADKARILASLSLGKTTPYTETYSPELLQGVPRSLNRDDLNLADDLPFQGVDRWNGYELSWLNAKGKPQVAILQCEVPASSSNLIESKSFKLYLNSFNQSKFASLTQVQNIISQDLSACAKEPVKVIILSPQEFSSLTLSTLDALSLDELDIEVSEYQLNPEVLFSSDEWVEESLCSDLLKSNCLITNQPDWGSVFIRYQGNKIDHEALLRYLISFRQHNEFHEQCVERIFCDIMRYCSPNLLTVYARYTRRGGLDINPFRSNFESIYPEFRLARQ

SEQ ID NO: 48199 - protein, 279 aa, Paraglaciecola mesophila
  misc_feature (1)..(279): tr|K6Z3S2|K6Z3S2_9ALTE NADPH-dependent 7-cyano-7-deazag uanine reductase OS=Paraglaciecola mesophila KMM 241 OX =1128912 GN=queF PE=3 SV=1
MQDKSLPSDILSSLTLGKATQYKEHYSPDLLQGVPRSLNRDELNLGDALPFKGVDRWNGYELSWLNLKGKPEVAILRCEIPCESVNLIESKSFKLYLNSFNQSKIESILHVQKMISKDLSACAGLPVNVELFARETFPGLQLGTLEAQCIDDLDISIDNYDLEPSTLKVEEEQVQETLCSHLLKSNCLITNQPDWGSVLIRYHGRKIEQESVLRYLISFRQHNEFHEQCVERIFSDIMRYCEPQKLTVYARYTRRGGLDINPFRSNFESIYPELRLARQ

SEQ ID NO: 48200 - protein, 279 aa, Paraglaciecola polaris
  misc_feature (1)..(279): tr|K6ZXM9|K6ZXM9_9ALTE NADPH-dependent 7-cyano-7-deazag uanine reductase OS=Paraglaciecola polaris LMG 21857 OX =1129793 GN=queF PE=3 SV=1
MQDKSLPSDILSTLTLGKATLYKEYYSPELLQGVPRSLNRDELNLGDSLPFNGVDRWNGYELSWLNLKGKPQVAILRCEVPCDSVNLVESKSFKLYLNSFNQSKIESIHHVQKMISEDLSACAGLPVNVQLFARKAFPSLKLGTLEAQCIDDLDISIDNYALQPSILTVEEQDVQETLCSHLLKSNCLITNQPDWGSVLIRYQGRKIDQENLLRYLISFRQHNEFHEQCVERIFSDIMRFCKPQKLTVYARYTRRGGLDINPFRSNFESIYPELRLARQ

SEQ ID NO: 48201 - protein, 279 aa, Paraglaciecola psychrophila
  misc_feature (1)..(279): tr|K7A0N3|K7A0N3_9ALTE NADPH-dependent 7-cyano-7-deazag uanine reductase OS=Paraglaciecola psychrophila 170 OX= 1129794 GN=queF PE=3 SV=1
MSEKIDKHTMLAGLSLGKATEYREIYAPDLLQAVPRSMNRVELNLTAELPFSGTDRWNGYELSWLNSKGKPLVAIMRCEVPVSSPNLIESKSFKLYLNSFNQSHFDCIESVVETLTADLSHCAGEKVKVMLFKPAEFAHMQISSFDAVSIDDQDIEVKDYQLAPSILHASGEQVEESLTSDLLKSNCLITNQPDWGSVFVRYQGQQINHEGLLRYLISFRQHNEFHEQCVERIFCDIMAHCKPNKLSVYARYTRRGGLDINPFRSNFEQIYPEVRLARQ

SEQ ID NO: 48202 - protein, 279 aa, Paraglaciecola sp.
  misc_feature (1)..(279): tr|A0A2N1DH99|A0A2N1DH99_9ALTE NADPH-dependent 7-cyano- 7-deazaguanine reductase OS=Paraglaciecola sp. MB-3u-78 OX=2058332 GN=queF PE=3 SV=1
MSETFDKQATLAGLSLGKATEYREIYAPNLLQAVPRSMNRVELNLTAELPFYGTDRWNGYELSWLNSKGKPQVAIMRCEVPVSSPNLVESKSFKLYLNSFNQSHFDSIELVAEALTKDLSQCAGEKVEVILFKPAAFSQMQISSFDAMSIDDLDIEVKDYQLEPSNLSSGGKQIEETLTSDLLKSNCLITNQPDWGSVFIRYQGQQINHEGLLRYLISFRQHNEFHEQCVERIFCDIMAHCKPNKLSVYARYTRRGGLDINPFRSNFEQIYPEVRLARQ

SEQ ID NO: 48203 - protein, 272 aa, Parahaliea aestuarii
  misc_feature (1)..(272): tr|A0A5C9A7J6|A0A5C9A7J6_9GAMM NADPH-dependent 7-cyano- 7-deazaguanine reductase QueF OS=Parahaliea aestuarii O X=1852021 GN=queF PE=4 SV=1
MADIDDKGLLLGRQVPVSEQYAPELLYPIPRCLARDNLGIDGGALPFRGVDLWHAYELSWLDETGRPVSRVGRFTIPATSANLVESKSFKLYLNSLNQERLGDDATACQRICADISAAAGAEVSLELFAPDDPALAGKALPGACLDDQPATWRGGEPDLQQLVPVAGQGMEVHTHLLRSLCPVTGQPDWASVWICTEGGSVEPLGLLEYLLAYRNHQEFHEQCVERIFRDLQAACKPSGLHIQAFYTRRGGLDITPFRTTGKRSPLPRMNRQ

SEQ ID NO: 48204 - protein, 272 aa, Parahaliea aestuarii
  misc_feature (1)..(272): tr|A0A5C8ZT74|A0A5C8ZT74_9GAMM NADPH-dependent 7-cyano- 7-deazaguanine reductase OS=Parahaliea aestuarii OX=185 2021 GN=queF PE=3 SV=1
MADTNDEGLLLGRQVPVSEHYAPELLYPIPRRLARDALGIDASALPFEGVDLWHAYELSWLDGQGRPVSRVGRFSVPAHSANLVESKSFKLYLNSLNQESFESDDEAVQRICTDLSAAAGAEVGLTLFAPDDPGLAGQALPGACLDDLPGRWRAGEPDASQLAQGRAGAMEVHTHLLRSLCPVTGQPDWASVWIAMTGASVDGVSLLNYLLAYRNHQEFHEQCVERIFLDLQSACAPAELHVQAFYTRRGGLDITPFRSTGGRLPLPRMNRQ

SEQ ID NO: 48205 - protein, 276 aa, Paralcaligenes ureilyticus
  misc_feature (1)..(276): tr|A0A4R3LXL4|A0A4R3LXL4_9BURK NADPH-dependent 7-cyano- 7-deazaguanine reductase OS=Paralcaligenes ureilyticus OX=627131 GN=queF PE=3 SV=1
MTDPILANAPLGHDAPYPTAYDPTVLFPIARQNNRQTLALQPLPDWHGADIWNAYELSWLNTRGKPVVATGCFVFSQASPCIIESKSFKLYLNSFNESRYESVESVQRHMEHDLSHAAGAPVDVRLNPLTIGHTENYRPLSGINIDGIDVGIDRYTPAPELLRCVPGATAVSEVLMSDLLKSNCPVTGQPDWGSLQIRYRGPQIDRAALLKYIISLRHHNEFHEHCVERMYCDIWQACRPAELHVYARYTRRGGLDINPWRASVAANVDNRRTVRQ

SEQ ID NO: 48206 - protein, 165 aa, Paraliobacillus ryukyuensis
  misc_feature (1)..(165): tr|A0A366EDA9|A0A366EDA9_9BACI NADPH-dependent 7-cyano- 7-deazaguanine reductase OS=Paraliobacillus ryukyuensis OX=200904 GN=queF PE=3 SV=1
MAGRRDDELQDVSLLGSQGTEYRFDYTPEVLETFDNKHPSRDYFVKFNCPEFTTLCPKTRQPDFGTVYISYIPDVKMVESKSLKLYLFSFRNHGDFHEDSMNIIMNDLIELMDPCYIEVWGKFTPRGGISIDPYCNYGKPGTKYEQMADHRLMNHDMYPEKIDNR

SEQ ID NO: 48207 - protein, 165 aa, Paraliobacillus sp.
  misc_feature (1)..(165): tr|A0A0U1KJ74|A0A0U1KJ74_9BACI NADPH-dependent 7-cyano- 7-deazaguanine reductase OS=Paraliobacillus sp. PM-2 OX =1462524 GN=queF PE=3 SV=1
MAGRKDEDLQDLSLLGSQGTDYHFDYTPEVLETFDNKHPNREYFVKFNCPEFTTLCPKTRQPDFGAVYISYIPGEKMVESKSLKLYLFSFRNHGDFHEDSMNIIMNDLIDLMDPQYIEVWGKFTPRGGISIDPYCNYGKPGTKFEQMATHRLMNHDMYPEKIDNR

SEQ ID NO: 48208 - protein, 153 aa, Paramesorhizobium deserti
  misc_feature (1)..(153): tr|A0A135HZI0|A0A135HZI0_9RHIZ NADPH-dependent 7-cyano- 7-deazaguanine reductase OS=Paramesorhizobium deserti O X=1494590 GN=queF PE=3 SV=1
MTDVKGLTQLGAETRIPASPEEAVLETVPYTRGEGPAAIVRFTCPEFTSLCPMTGQPDFAHIVVDYAPDARLVESKSLKLFLFSFRNHGAFHEDCTLQIGRRIVEATKPLWLRIGGYWYPRGGIPIDVFWQTGTPPEGAWVPETGVAPYRGRG

SEQ ID NO: 48209 - protein, 156 aa, Paramuribaculum intestinale
  misc_feature (1)..(156): tr|A0A2V1IZ18|A0A2V1IZ18_9BACT NADPH-dependent 7-cyano- 7-deazaguanine reductase OS=Paramuribaculum intestinale OX=2094151 GN=queF PE=3 SV=1
MDQNRHDDNLSLLGQSKATQYPTDYAPQLLESFVNRHPDREYLVTLRCPEFTSLCPITGQPDFAQIIINYIPRQRMVESKSLKLYLFSFRNHGDFHEDCVNIILNDLVRLMDPRYIEVKGIFTPRGGIAIHPFASYADDEHQELARQRMLAAMADK

SEQ ID NO: 48210 - protein, 272 aa, Paraperlucidibaca baekdonensis
  misc_feature (1)..(272): tr|A0A3E0H2S2|A0A3E0H2S2_9GAMM NADPH-dependent 7-cyano- 7-deazaguanine reductase OS=Paraperlucidibaca baekdonen sis OX=748120 GN=queF PE=3 SV=1
MDLHTLTQLGQATDYPDSPCAELLQPIPRQFSRQALGIDDDALPFHGVDLWTHYELSWLDPNGKPCVAIGEIRVPANSANIIESKSLKLYFNGLNFTHFANPQAFVKRVETDLSVVAEALVTLTLLPAGVATQLHAFPGVCLDDLPLITETYTPDPSLLKTREGVREQALWHSHLLRTNCPVTDQPDWASVIIHAVGPALDPESLLAYLVSFRRHADFHEQCVERIFHDLMQYAKIEKLTVYARYTRRGGLDINPFRSNFESLTDSLRMARQ

SEQ ID NO: 48211 - protein, 284 aa, Paraphotobacterium marinum
  misc_feature (1)..(284): tr|A0A220VBQ7|A0A220VBQ7_9GAMM NADPH-dependent 7-cyano- 7-deazaguanine reductase OS=Paraphotobacterium marinum OX=1755811 GN=queF PE=3 SV=1
MSKRSTDSGTLHLILGKSTKYPSEYNNTLLKGVSRDLNRATLGLTKNCIPFSGFDLWTLYELSWLNMNGLPQVAIGEVRVSSDSDFIIESKSFKLYLNSFNQTNFKSWQEVANTMQKDLSKVANSSVDVTLLPLEEFNNQFIGFFSGICLEKVFSDLSIEQYQYNPKILTNAKGSEIVEEDLYSNLLKSNCLITNQPDWGSIKISYKGPQICKETLLKYIISLRTHNEFHEQCIERIFLDILQYCKPELLTVYARYTRRGGLDINPYRTNQGKVPSENVRFARQ

SEQ ID NO: 48212 - protein, 275 aa, Paraphotobacterium marinum
  misc_feature (1)..(275): tr|A0A220VFW1|A0A220VFW1_9GAMM NADPH-dependent 7-cyano- 7-deazaguanine reductase OS=Paraphotobacterium marinum OX=1755811 GN=queF PE=3 SV=1
MLLDNSELGKKSAYKDQYDPSLLFPIPRQTKRDEIHISKDYQFEGCDIWNAFEVSWLNSKGKPVVRIMQFRIDANSLNIIESKSFKLYLNSFNNTKFANEKEVLNTLQKDLELNVKGVVSVKSSHVDKFDDVHSIYQINDTCIDDLDIEIDDYEINPSKLKIDSNTITSETITSHLLKSNCLITNQPDWGSLIIKYEGPKINREGLLKYIISFRNHNEFHEQCVERIYMDIMKEIKPQKLLVYARYTRRGGLDINPLRANYKYDSNLEQMRLVRQ

SEQ ID NO: 48213 - protein, 155 aa, Paraprevotella clara
  misc_feature (1)..(155): tr|R5NWK6|R5NWK6_9BACT NADPH-dependent 7-cyano-7-deazag uanine reductase OS=Paraprevotella clara CAG:116 OX=126 3095 GN=queF PE=3 SV=1
MSSEREKEGLQSLGKKTEYRQDYAPEVLEAFENKHPDNDYWVRFNCPEFTSLCPITGQPDFAEIRISYIPDRRMVESKSLKLYLFSFRNHGDFHEDCVNKIMKDLIRLMDPKYIEVTGIFTPRGGISIYPYANYGRKGTKFEQMAEFRMMNHDLK

SEQ ID NO: 48214 - protein, 155 aa, Paraprevotella clara; identical to SEQ ID NO: 48213
  misc_feature (1)..(155): tr|G5SQF7|G5SQF7_9BACT NADPH-dependent 7-cyano-7-deazag uanine reductase OS=Paraprevotella clara YIT 11840 OX=7 62968 GN=queF PE=3 SV=1

SEQ ID NO: 48215 - protein, 155 aa, Paraprevotella xylaniphila
  misc_feature (1)..(155): tr|F3QSJ4|F3QSJ4_9BACT NADPH-dependent 7-cyano-7-deazag uanine reductase OS=Paraprevotella xylaniphila YIT 1184 1 OX=762982 GN=queF PE=3 SV=1
MSSEREKEGLQSLGKKTEYRQDYAPEVLEAFENKHPGNDYWVRFNCPEFTSLCPITGQPDFAEIRISYIPDRRMVESKSLKLYLFSFRNHGDFHEDCVNKIMKDLIRLMDPKYIEVTGIFTPRGGISIYPYANYGRKGTKFEQMAEFRMMNHDLK

SEQ ID NO: 48216 - protein, 279 aa, Pararheinheimera mesophila
  misc_feature (1)..(279): tr|A0A3P3QQQ7|A0A3P3QQQ7_9GAMM NADPH-dependent 7-cyano- 7-deazaguanine reductase OS=Pararheinheimera mesophila OX=1547515 GN=queF PE=3 SV=1
MTKIQTEQLSGLTLGQVTAYIDHYSPELLQAVPRTLGRQAIGLGAELPFVGQDTWHGYELSWLTPKGKPMVALATFVVPFDTPNLIESKSFKLYLNSLNQSKFADISQLYRTMKADLSACAGGPVQVTLHNVNELTAFQPTWLPGRCIDDLDIEVEHYDYKPELLQLNPSGALVEEKLHSHLLKSNCLITSQPDWASLYIHYKGKAIDHASLLKYLISFRSHNEFHEQCVERIYLDVWKLCQPEFLMVYARYTRRGGLDINPLRSSEPCDQPNVRLTRQ

SEQ ID NO: 48217 - protein, 279 aa, Pararheinheimera tangshanensis
  misc_feature (1)..(279): tr|A0A5C8LQA5|A0A5C8LQA5_9GAMM NADPH-dependent 7-cyano- 7-deazaguanine reductase OS=Pararheinheimera tangshanen sis OX=400153 GN=queF PE=3 SV=1
MTKIQTEQLAGLTLGQATAYIDHYSPELLQAVPRTLGRQAIGLGAELPFVGQDTWHGYELSWLTPKGKPMVALATFVVPFDTPNLIESKSFKLYLNSLNQSKFADISQLYRTMKADLSACAGGPVQVTLHNVNELTAFQPTWLPGRCIDDLDIEVEHYDYKPELLQLKPTGALVDEKLHSHLLKSNCLITSQPDWASVYIHYKGKAIDHASLLKYLISFRSHNEFHEQCVERIYLDLWKLCEPEFLMVYARYTRRGGLDINPMRSSEACDQPNLRLTRQ

SEQ ID NO: 48218 - protein, 154 aa, Pararhizobium polonicum
  misc_feature (1)..(154): tr|A0A1C7NW47|A0A1C7NW47_9RHIZ NADPH-dependent 7-cyano- 7-deazaguanine reductase OS=Pararhizobium polonicum OX= 1612624 GN=queF PE=3 SV=1
MTKTDVSGLSQLGQNVAAPQTPEEAVLERVPTSHAGTDFVVRFTAPEFTSLCPMTGQPDFAHIVIDYVPDGWLVESKSLKLYLHSFRNHGAFHEDCTIDIAKRLVDLLAPKWLRIGAYWYPRGGIPIDVFWQTGAPPEGLWLPDQGVQPYRGRG

SEQ ID NO: 48219 - protein, 151 aa, Pararhizobium sp.
  misc_feature (1)..(151): tr|A0A506TYY3|A0A506TYY3_9RHIZ NADPH-dependent 7-cyano- 7-deazaguanine reductase OS=Pararhizobium sp. BGMRC6574 OX=2590452 GN=queF PE=3 SV=1
MSEDGATMLGRASAIPASPEEAVLDRVRDPHAAIRYAVRFVAPEFTSLCPVTGQPDFAHLVIDYVPREWLVESKSLKLYLASFRNHGAFHEECTVSIARRLVDRLEPEWLRIGGYWYPRGGIPIDVFYQTGPAPEGIWIPDQGVPPYRGRG

SEQ ID NO: 48220 - protein, 162 aa, Parasaccharibacter apium
  misc_feature (1)..(162): tr|A0A2S4PE07|A0A2S4PE07_9PROT NADPH-dependent 7-cyano- 7-deazaguanine reductase OS=Parasaccharibacter apium OX =1510841 GN=queF PE=3 SV=1
MTTHPPKGPTAPGTESLSQLGRQTVQPESPETAELERVPAPHKGRRYVVRFTAPEFTSLCPVTGQPDFAHIVIDYIPRDWIVESKSLKLYLTSFRNHGAFHEDCSVTIATRLVELLDPEWLRIGAYWYPRGGMPIDVFWQTGPAPDDVWIPAQDVPGYRGRG

SEQ ID NO: 48221 - protein, 158 aa, Parasaccharibacter apium
  misc_feature (1)..(158): tr|A0A2C6J174|A0A2C6J174_9PROT NADPH-dependent 7-cyano- 7-deazaguanine reductase OS=Parasaccharibacter apium OX =1510841 GN=queF PE=3 SV=1
MSHHPTAPGTDALSQLGRQTIQPESPDKAELERVPAPHKGRRYVVRFTAPEFTSLCPVTGQPDFAHIVIDYIPRNWIVESKSLKLYLTSFRNHGAFHEDCSVTIATRLVELLEPEWLRIGAYWYPRGGMPIDVFWQTGPAPTEVWIPPQDVPGYRGRG

SEQ ID NO: 48222 - protein, 285 aa, Parashewanella curva
  misc_feature (1)..(285): tr|A0A3L8PSS0|A0A3L8PSS0_9GAMM NADPH-dependent 7-cyano- 7-deazaguanine reductase OS=Parashewanella curva OX=233 8552 GN=queF PE=3 SV=1
MTQNHDPYSEAKELKGLTLGQPAQYEAIYNPDVLQAVPRKLNRDAIELTTELPFHGVDVWTGYELSWLNAKGKPMVAIVEFYVDYQSENLIESKSFKLYLNTFNLTRFDSIDDVEKAMIRDLSECAQGKVEVKIIEPKQFGNQRIASLPGTCIDEIDIEVDDYQFNAKYLENCTDEGQIVAETLNSNLLKSNCLITTQPDWGSLMIRYQGPKIDREKLLRYLISFREHNEFHEQCVERIFMDLKRFCNCSKLTVFARYTRRGGLDINPYRSDFEQLNDNVRLARQ

SEQ ID NO: 48223 - protein, 296 aa, Parashewanella spongiae
  misc_feature (1)..(296): tr|A0A3A6TYB4|A0A3A6TYB4_9GAMM NADPH-dependent 7-cyano- 7-deazaguanine reductase OS=Parashewanella spongiae OX= 342950 GN=queF PE=3 SV=1
MWVYFDTETVLMTQNHDPYNEAEALAELTLGKATGYDEVYNPNLLQGVPRKLNRDAISLTSTLPFHGFDIWTGYELSWLNSKGKPMVAIVEVQLSHTSENLIESKSFKLYLNSFNQTKFDSVEQLQQMLKQDLSLCSNGAVTVNIIEPKHFSTQRVIEFPGTCIDNLDIEVNDYSFNPDYLVDGTDDKQIVAETLNSNLLKSNCLITSQPDWGSVMIRYQGPKINREKLLRYLISFRQHNEFHEQCVERIFVDLKKYCHCSKLTVYARYTRRGGLDINPFRSDFEQPSINLRLARQ

SEQ ID NO: 48224 - protein, 148 aa, Parasphingopyxis lamellibrachiae
  misc_feature (1)..(148): tr|A0A3D9FEN6|A0A3D9FEN6_9SPHN NADPH-dependent 7-cyano- 7-deazaguanine reductase OS=Parasphingopyxis lamellibra chiae OX=680125 GN=queF PE=3 SV=1
MDAKHLGKSSSLPSSPEDASLDYVPNPRTGELYLVRFAAPEFTSLCPVTAQPDFAHLVIDYAPGQTIVESKSLKLFLGSFRNHQAFHEDCTVGIGKRLFEEMQPQWLRIGGYWYPRGGIPIDVFWQSGTPPEGLWLPDQGVPPYRGRG

SEQ ID NO: 48225 - protein, 139 aa, Parasutterella excrementihominis
  misc_feature (1)..(139): tr|F3QM03|F3QM03_9BURK NADPH-dependent 7-cyano-7-deazag uanine reductase OS=Parasutterella excrementihominis YI T 11859 OX=762966 GN=queF PE=3 SV=1
MSTAPCKNLETFPNPQPNRDYLIHIEIPEFTSLCPLTGQPDFATLLLDYIPDQKNVELKALKLYMWSYRQEGAFHEAITNKILDDLVAATSPRFIRLKAKWWVRGGIYTTVVAEYRKEGWTPVKPVELPEFESNDPTRG

SEQ ID NO: 48226 - protein, 135 aa, Parcubacteria group
  misc_feature (1)..(135): tr|A0A554L9H6|A0A554L9H6_9BACT NADPH-dependent 7-cyano- 7-deazaguanine reductase OS=Parcubacteria group bacteri um Gr01-1014_3 OX=2017173 GN=G01um10143_54 PE=3 SV=1
MAEWSDRSILRALPNPSTAGYEIKIKNPELTFLGVKNQPDFANVFLTVYPDKHIIELRSLKLYFQQFRDKVVSYERLVNVIYDDLVEVYKPTRLRIVMVLRPRGGISSRLTIDSDWSARGGKEQFKDWVGQADEW

SEQ ID NO: 48227 - protein, 275 aa, Parendozoicomonas haliclonae
  misc_feature (1)..(275): tr|A0A1X7APT6|A0A1X7APT6_9GAMM NADPH-dependent 7-cyano- 7-deazaguanine reductase OS=Parendozoicomonas haliclona e OX=1960125 GN=queF PE=3 SV=1
MSNTVNDSPLGRHSEYKSEYDASLLFPIPRAPKWEALALDSSNLPFTGTDTWNGPELSWLNEKGKPVVMGGAFILPCHSPNIIESKSFKLYLNSFNQTRFGSPEQVQAIMEKDLSAAAGAPVKVALYTLDELTGQGLHHIAGDCIDDLDVTIDTYTLETGFLAANTDAVMTETLYSHLLKSNCPVTGQPDWGTLVIEYTGPQIDREGLLKYLCSFRQHQDFHEQCVERIFMDLKRLCGAEQLTVYARYVRRGGLDINPWRSDCGKVVDNRRLARQ

SEQ ID NO: 48228 - protein, 196 aa, Parvibacter caecicola
  misc_feature (1)..(196): tr|A0A3N0AE08|A0A3N0AE08_9ACTN NADPH-dependent 7-cyano- 7-deazaguanine reductase OS=Parvibacter caecicola OX=74 7645 GN=queF PE=3 SV=1
MKAAEGAGRAAAVSAAGTAPSVSAKPSAPLAAEGFAAREDEGLTKLGSQGTQYPCDYDSSVLETFVNKHQDNDYFVKFNCPEFTSLCPITGQPDFATIYISYVPDVRMVESKSLKLYLFSFRNHGDFHEDCMNIIMKDLIALMDPKYIEVWGKFTPRGGISIDPYCNYGRPGTKWEEVAWQRLSQHDLYPEKVDNR

SEQ ID NO: 48229 - protein, 188 aa, Parvibacter caecicola
  misc_feature (1)..(188): tr|A0A4T9T7Z2|A0A4T9T7Z2_9ACTN NADPH-dependent 7-cyano- 7-deazaguanine reductase OS=Parvibacter caecicola OX=74 7645 GN=queF PE=3 SV=1
MKTDEAPKATATIVAAEPSAPSPVEAVSSREGEGLTQLGSQGTRYSADYDPDVLETFVNKHQDNDYFVKFNCPEFTSLCPITGQPDFATIYISYVPDVRMVESKSLKLYLFSFRNHGDFHEDCMNIIMKDLIALMDPKYIEVWGKFTPRGGISIDPYCNYGRPGTKWEEVAWQRLSQHDLYPEKVDNR

SEQ ID NO: 48230 - protein, 154 aa, Parvibaculum lavamentivorans
  misc_feature (1)..(154): sp|A7HXX4|QUEF_PARL1 NADPH-dependent 7-cyano-7-deazagua nine reductase OS=Parvibaculum lavamentivorans (strain DS-1 / DSM 13023 / NCIMB 13966) OX=402881 GN=queF PE=3 SV=1
MAKKPVKDLKQLGHATPVPASPEEATLERVPNPHPDANYVARFTVPEFTSLCPVTGQPDFAHLVIDYVPGKWLIESKSLKLYLQSFRNHGAFHEDCTLAIGKRLAGTLAPKWLRIGGYWYPRGGIPIDVFWQKGKLPAGVWVPDQGVAPYRGRG

SEQ ID NO: 48231 - protein, 155 aa, Parvibaculum sp.
  misc_feature (1)..(155): tr|A0A2D4VFU5|A0A2D4VFU5_9RHIZ NADPH-dependent 7-cyano- 7-deazaguanine reductase OS=Parvibaculum sp. OX=2024848 GN=queF PE=3 SV=1
MSKKNDPHVVTQLGQNVAPAASPEDAQLERVPNPHPDTDYIARFTAPEFTSLCPVTGQPDFAHLVIDYAPGKWLVESKSLKLYFQSFRNHGAFHEDCTVAIGKRLNTLLKPKWLRIGGYWYPRGGIPIDVFWQTGKLPEGVWVPDQGVQPYRGRG

SEQ ID NO: 48232 - protein, 158 aa, Parvibaculum sp.
  misc_feature (1)..(158): tr|A0A2E1EET3|A0A2E1EET3_9RHIZ NADPH-dependent 7-cyano- 7-deazaguanine reductase OS=Parvibaculum sp. OX=2024848 GN=queF PE=3 SV=1
MAKSPKKPGAGNLTQLGTATPVPASPEEAKLERVPNPHADTNYVARFTVPEFTSICPVTGQPDFAHLVIDYVPGKWLVESKSLKLYLQSFRNHGAFHEDCTVAIGKRLASLLAPKWIRIGGYWYPRGGIPIDVFWQKGKLPAGVWAPDQGVASYRGRG

SEQ ID NO: 48233 - protein, 151 aa, Parvibium lacunae
  misc_feature (1)..(151): tr|A0A368L7M6|A0A368L7M6_9BURK NADPH-dependent 7-cyano- 7-deazaguanine reductase OS=Parvibium lacunae OX=188889 3 GN=queF PE=3 SV=1
MTDTTATFTPPTPKHRPSKQLDTFPNPNPERDYHIHMEIPEFTCLCPLTGQPDFATLILDYIPDQKNVELKSLKFYMWSYRNEGAFHEAVTNQILTDLVAATAPRFMRLTAKWYVRGGIFTNVVAEHRQAGWAPLPHIEFSQFAPQSNTRG

SEQ ID NO: 48234 - protein, 152 aa, Parvularcula bermudensis
  misc_feature (1)..(152): tr|E0TBU2|E0TBU2_PARBH NADPH-dependent 7-cyano-7-deazag uanine reductase OS=Parvularcula bermudensis (strain AT CC BAA-594 / HTCC2503 / KCTC 12087) OX=314260 GN=queF P E=3 SV=1
MTDVPSPQFLGQPSAAPSHPDAARLDPVPNPHPDALYLTRFVVPEFTSLCPVTGQPDFAHLVIDYAPEAHLVESKSLKLLMTSYRNHGAFHEDCTVDIAKRIVAAIAPRWLRISGYWYPRGGIPIDVVYQTGPPPSALYVPETGVPPYRGRG

SEQ ID NO: 48235 - protein, 171 aa, Parvularcula sp.
  misc_feature (1)..(171): tr|A0A357KZX6|A0A357KZX6_9PROT NADPH-dependent 7-cyano- 7-deazaguanine reductase OS=Parvularcula sp. OX=1979207 GN=queF PE=3 SV=1
MNVPVRNTSRKKQRPAKAKQDGALSLSQLGRATAAPASPEAAVLETVPNPQVGVLYLARFTAPEFTSLCPVTGQPDFAHLIIDYAPAKKLIESKSLKLYLGSFRNHGAFHEDCTVAIARRIVAAAQPHWLRIAGYWYPRGGIPIDIFYQTGAAPKGLWVPDTGVPAYRGRG

SEQ ID NO: 48236 - protein, 171 aa, Parvularcula sp.
  misc_feature (1)..(171): tr|A0A355BZA0|A0A355BZA0_9PROT NADPH-dependent 7-cyano- 7-deazaguanine reductase OS=Parvularcula sp. OX=1979207 GN=queF PE=3 SV=1
MNVPVRNTRRKKQRPAKAKQDGALSLSQLGRATAAPASPEAAVLETVPNPQVGVLYLARFTAPEFTSLCPVTGQPDFAHLIIDYAPAKKLIESKSLKLYLGSFRNHGAFHEDCTVAIARRIVAAAQPHWLRIAGYWYPRGGIPIDIFYQTGAAPKGLWVPDTGVPAYRGRG

SEQ ID NO: 48237 - protein, 162 aa, Parvularculaceae bacterium
  misc_feature (1)..(162): tr|A0A520R2J3|A0A520R2J3_9PROT NADPH-dependent 7-cyano- 7-deazaguanine reductase OS=Parvularculaceae bacterium OX=2510335 GN=queF PE=3 SV=1
MNDTRSSDAAQPAATGLTRLGGPGDLPARPEDAVLETAANPHQDTMYLARFAAPEFTSICPVTGQPDFAHLVIDYAPKELIIESKSFKLFLGSFRNHGAFHEDCTVMIAKRLVAAAAPHWLRIAGFWYPRGGIPIDVFYQTGAAPAGLWVPDPGVDAYRGRG

SEQ ID NO: 48238 - protein, 279 aa, Pasteurella aerogenes
  misc_feature (1)..(279): tr|A0A448K1K0|A0A448K1K0_PASAE NADPH-dependent 7-cyano- 7-deazaguanine reductase OS=Pasteurella aerogenes OX=74 9 GN=queF PE=3 SV=1
MHYHDQSLQSLTLGKQTKYAENYDRTLLQPVPRSLNRDNLGITAQQPFTFGADIWTAYEISWLNVKGVPQVAIADVEIDCTSLNLIESKSFKLYLNSFNQSKFSSFDEVCRILQQDLQQCAQGEVKVRLNSLANYHHTPIASFAGDCIDEQDIEVVDYQFNPQLLQHCTGENQVDEVLVSHLLKSNCLITQQPDWGSIQIHYVGKQIDREKLLRYLISYRQHNEFHEQCVERIFCDLMQFAKPEKLTVYARYTRRGGLDINPFRSNFEPIPLNQRLARQ

SEQ ID NO: 48239 - protein, 279 aa, Pasteurella bettyae
  misc_feature (1)..(279): tr|I3DII3|I3DII3_9PAST NADPH-dependent 7-cyano-7-deazag uanine reductase OS=Pasteurella bettyae CCUG 2042 OX=10 95749 GN=queF PE=3 SV=1
MDYQDSSLKKLKLGQKTEYFSNYDRSLLQPVPRALNRDGLGITAHQPFTIGADIWTAYEISWLNPKGLPQVAIADVKIDYRSINLIESKSFKLYLNSFNQTKFESFEQLQSIMQKDLTDCAQGEVTVQLNKLSDYNKQHIQHLDGEYIDEQDIEINNYDFNANLLKNCTKNISVEETLVSQLLKSNCLITNQPDWGTIQIHYIGNQIDREKLLRYLVSFRQHNEFHEQCVERIFCDIMKFAHPEKLTVYARYTRRGGLDINPFRSNFESVPNNQRLARQ

SEQ ID NO: 48240 - protein, 275 aa, Pasteurella caecimuris
  misc_feature (1)..(275): tr|A0A4S2EBC8|A0A4S2EBC8_9PAST NADPH-dependent 7-cyano- 7-deazaguanine reductase OS=Pasteurella caecimuris OX=1 796644 GN=queF PE=3 SV=1
MNKLTSLKLGQKTEYASEYDRTLLQSVPRALNRDDLGITETQPFTIGADIWTAYEISWLNEKGVPQVAIADIYLDQQSQNLIESKSFKLYLNSFNQSKFTDFQQVAQVMQKDLTECAQGEVKVRLNPLSFYQAQKIDHLQGDCIDGQDIDITNYEFNPDWLKDCVSNEKVEEYLVSHLLKSNCLITNQPDWGTLQIHYIGKKINREKLLRYVVSFRQHNEFHEQCVERIFCDLMRYAKPEKLTVYARYTRRGGLDINPFRSNFETLPENLRLARQ

SEQ ID NO: 48241 - protein, 279 aa, Pasteurella canis
  misc_feature (1)..(279): tr|A0A379EUH1|A0A379EUH1_9PAST NADPH-dependent 7-cyano- 7-deazaguanine reductase OS=Pasteurella canis OX=753 GN =queF PE=3 SV=1
MHYQHDSLNKLTLGQKTQYATNYDRTLLQAVPRQLNRDSLGITQTQPFTLGADIWTAYEISWLNSKGVPQVAIADIEIDFQSKNLIESKSFKLYLNSFNQTTFDSFSTVQHTLEQDLADCAKGKVRVQLHPLAKYNQESIAQLNGECIDELDITITHYEFDASVLENCCNEIVVEETLVSHLLKSNCLITNQPDWGSLQIHYVGKQIDREKLLRYIISFRQHNEFHEQCVERIFCDLIQFAQPKKLTVYARYTRRGGLDINPFRSNFETVLTNQRLARQ

SEQ ID NO: 48242 - protein, 285 aa, Pasteurella dagmatis
  misc_feature (1)..(285): tr|C9PR58|C9PR58_9PAST NADPH-dependent 7-cyano-7-deazag uanine reductase OS=Pasteurella dagmatis ATCC 43325 OX= 667128 GN=queF PE=3 SV=1
MKGQNNMHYQDDSLNKLTLGQQTQYVSNYDRTLLQPVPRKLNRDGLGITEQKPFNQGADIWTAYEISWLNPKGVPQVAIADVEIDFRSQNLIESKSFKLYLNSFNQTKFDSFAEVERTLAEDLAQCAQGDVKVTLHSLSKYRAEPIAELSGVCIDEQDIEVESYEFNADILQNCVSEQIVEENLVSHLLKSNCLITQQPDWGSVQIHYVGKQIDREKLLRYLISFRQHNEFHEQCVERIFCDLMRFANPEKLTVYARYTRRGGLDINPFRSNFEPIPHNQRLARQ

SEQ ID NO: 48243 - protein, 278 aa, Pasteurella langaaensis
  misc_feature (1)..(278): tr|A0A2U0SQ43|A0A2U0SQ43_9PAST NADPH-dependent 7-cyano- 7-deazaguanine reductase OS=Pasteurella langaaensis DSM 22999 OX=1122935 GN=queF PE=3 SV=1
MNYESQLKSLKLGQKTEYKAQYDCTLLQPVPRALNRDGLGITTQQPFNQGADIWTAYEISWLNAKGLPQVAIADVEIDFRSVNLIESKSFKLYLNSFNQTHFTSFDEVQRTMQQDLSECAQGDVKVRLNSVEFYTNQPINALAGELIDAQDIEISDYGFNAELLADCTDKNWVEERLVSHLLKSNCLITSQPDWGSLQIHYVGKQINREKLLRYIVSFRQHNEFHEQCVERIFCDIMRFAKPEKLTVYARYTRRGGLDINPFRSNFETVPSNLRLARQ

SEQ ID NO: 48244 - protein, 279 aa, [Pasteurella] mairii
  misc_feature (1)..(279): tr|A0A379B3C2|A0A379B3C2_9PAST NADPH-dependent 7-cyano- 7-deazaguanine reductase OS=[Pasteurella] mairii OX=757 GN=queF PE=3 SV=1
MHYHDQSLQSLPLGKQTKYAENYDRTLLQPVPRSLNRDSLGITARQPFTVGADIWTAYEISWLNTKGVPQVAIADVEIDCTSLNLIESKSFKLYLNSFNQSKFSSFDEVCHILQQDLQQCAQGEVKVRLNSLTNYHHTPIAFFAGDCIDEQGIEIVDYQFNPQLLQHCTGENLVDEVLVSHLLKSNCLITQQPDWGSVQIHYVGKQIDREKLLRYLISYRQHNEFHEQCVERIFCDLMQFAQPEKLTVYARYTRRGGLDINPFRSNFEPIPLNQRLARQ

SEQ ID NO: 48245 - protein, 279 aa, Pasteurella multocida
  misc_feature (1)..(279): sp|Q9CNF6|QUEF_PASMU NADPH-dependent 7-cyano-7-deazagua nine reductase OS=Pasteurella multocida (strain Pm70) O X=272843 GN=queF PE=3 SV=1
MQYQHDSLDKLKLGQQTQYASNYDHTLLQPVPRHLNRDTLGITHTQPFHFGADIWTAYEISWLNLNGLPQVAIADVAIDFQSENLIESKSFKLYLNSFNQSKFATFEEVQQHLTQDLSNCAKGKVSVKLHPLSKYCHEPIVELAGECIDQQDIEINDYQFNPEILTNCTHDQMVKESLVSHLLKSNCLITNQPDWGTLQIRYEGKQIDREKLLRYIISFRQHNEFHEQCVERIFCDLMQFAKPDKLTVYARYTRRGGLDINPFRSNFEAVPDNQRLARQ

SEQ ID NO: 48246 - protein, 179 aa, Pasteurella multocida
  misc_feature (1)..(179): tr|J5NIP8|J5NIP8_PASMD 7-cyano-7-deazaguanine reductase (Fragment) OS=Pasteurella multocida subsp. multocida s tr. Anand1_buffalo OX=1032868 GN=queF PE=4 SV=1
DFQSENLIESKSFKLYLNSFNQSKFATFEEVQQHLTQDLSNCAKGKVSVKLHPLSKFDHEPIVELAGECIDQQDIEINDYQFNPEILTNCTHDQMVKESLVSHLLKSNCLITNQPDWGTLQIRYEGKQIDREKLLRSLFLSVNIMNFMNNALNGFFVISCNLLNQTSSLFMHVILDEED

SEQ ID NO: 48247 - protein, 279 aa, Pasteurella skyensis
  misc_feature (1)..(279): tr|A0A1H7U0P4|A0A1H7U0P4_9PAST NADPH-dependent 7-cyano- 7-deazaguanine reductase OS=Pasteurella skyensis OX=974 81 GN=queF PE=3 SV=1
MNYNDKSLSALTLGQDTDYKSCYDPNLLHAVPRQLNRDQLGITEKQPFTEGSDIWTLYELSWLNSNGIPQVAIADVWLDFKSENLIESKSFKLYLNSFNQTKFDSIEQVEQRLQTDLSQCASGKILVKIRKLSDYNQQQIAQFEGENIDEQSIEVSDYQFSNLYLKDIAEGEVCEETLVSHLLKSNCLITNQPDWGSLQIRYVGKKLNREKLLRYIISFREHNEFHEQCVERIFCDLMQFAQPEKLTVYARYTRRGGLDINPFRSNFEAVPENYRLARQ

SEQ ID NO: 48248 - protein, 279 aa, Pasteurella sp.
  misc_feature (1)..(279): tr|A0A4Y9H0K6|A0A4Y9H0K6_9PAST NADPH-dependent 7-cyano- 7-deazaguanine reductase OS=Pasteurella sp. WM03 OX=255 8280 GN=queF PE=3 SV=1
MNKQNYGLDALKLGQKTDYANEYDHTLLQPVPRALNRDDLGITKAQPFTIGADIWTAYEISWLNEKGVPQVAIADIYLDHQSQNLIESKSFKLYLNSFNQTKFADFNQVAHIMQQDLAECAQGEVKVWLNPLAFYQTQQIDRLQGECIDEQDIEITDYQFNTGWLENCVSDEVVEEYLVSHLLKSNCLITNQPDWGSLQIHYIGKKIDREKLLRYVVSFRQHNEFHEQCVERIFCDLMHYATPEKLTVYARYTRRGGLDINPFRSNFEPLPENLRLARQ

SEQ ID NO: 48249 - protein, 286 aa, Pasteurella testudinis
  misc_feature (1)..(286): tr|A0A1W1V0S6|A0A1W1V0S6_9PAST NADPH-dependent 7-cyano- 7-deazaguanine reductase OS=Pasteurella testudinis DSM 23072 OX=1122938 GN=queF PE=3 SV=1
MTTYQHTSLDQLTLGKHTDYRSEYDPSLLQAVPRKLNRDALGISQRQPFSSGADIWTLYELSWLNQNGLPQVAIADVYLDFRSVNLIESKSFKLYLNSFNQSRFSDWQTVESTLQRDLAHCADGEVKVRLHRLDDYRHQTIAAFDGDCIDQQDIEITDYEFNPDWLQHCTATATGKTAECVHETLVSHLLKSNCLITSQPDWGSVQIEYRGAKINREALLRYLVSFRQHNEFHEQCVERIFCDLMHYAKPEKLKVYARYTRRGGLDINPYRANYPFEAENQRLARQ

SEQ ID NO: 48250 - protein, 280 aa, Pasteurellaceae bacterium
  misc_feature (1)..(280): tr|A0A5C4QAF7|A0A5C4QAF7_9PAST NADPH-dependent 7-cyano- 7-deazaguanine reductase OS=Pasteurellaceae bacterium B K431 OX=2585026 GN=queF PE=3 SV=1
MATYHHSSLDQLTLGKQTDYHSEYDPRLLQAVPRSLNRDSLGISSQQPFNCGADIWTAYEISWLNAKGLPQVAIGDIYLDFQSENLIESKSFKLYLNSFNQSRFDSLQQVEQLIQRDLANCAQGEVKVRLHPLDAYCNQAIDYFQGDCIDEQDIEIDSYEFQPQLLQHCTTAEQVNEVLVSHLLKSNCLITNQPDWGSVQIAYQGAKINREALLRYLVSFRQHNEFHEQCVERIFCDLMHYAKPTKLKVYARYTRRGGLDINPYRANYPLELQNRRLARQ

SEQ ID NO: 48251 - protein, 279 aa, Pasteurellaceae bacterium; identical to SEQ ID NO: 47111
  misc_feature (1)..(279): tr|A0A3Q8GKZ8|A0A3Q8GKZ8_9PAST NADPH-dependent 7-cyano- 7-deazaguanine reductase OS=Pasteurellaceae bacterium 1 2565 OX=2093222 GN=queF PE=3 SV=1

SEQ ID NO: 48252 - protein, 143 aa, Paucibacter aquatile
  misc_feature (1)..(143): tr|A0A2N8L1I3|A0A2N8L1I3_9BURK NADPH-dependent 7-cyano- 7-deazaguanine reductase OS=Paucibacter aquatile OX=207 0761 GN=queF PE=3 SV=1
MPPNPPSAPSKELHVFPNPAPERDYVIQFQVPEFTCHCPLTGQPDFAHFTIDMIADQYCVELKSLKMYFWSYRDEGAFHEKVTNTILEDIVKVTDPRFIRITAKWYVRGGIYTNVVVEHRKKGWKQQPRVDLPAHGFESGLLR

SEQ ID NO: 48253 - protein, 143 aa, Paucibacter sp.
  misc_feature (1)..(143): tr|A0A3N7C1L6|A0A3N7C1L6_9BURK NADPH-dependent 7-cyano- 7-deazaguanine reductase OS=Paucibacter sp. KBW04 OX=21 53361 GN=queF PE=3 SV=1
MPPNPPSRPSKELHVFPNPAPERDYVIQFQVPEFTCHCPLTGQPDFAHFTIDMIADKHCVELKSLKMYFWSYRDEGAFHEKVTNTILEDIVKVTNPRFIRITAKWYVRGGIYTNVVVEHQKKGWKPAPRVDLPTHGFESGLLR

SEQ ID NO: 48254 - protein, 143 aa, Paucibacter sp.
  misc_feature (1)..(143): tr|A0A0U3EPU7|A0A0U3EPU7_9BURK NADPH-dependent 7-cyano- 7-deazaguanine reductase OS=Paucibacter sp. KCTC 42545 OX=1768242 GN=queF PE=3 SV=1
MPPNPPSRPSKELHAFPNPAPERDYVIQFQVPEFTCHCPLTGQPDFAHFTIDMIADKHCVELKSLKMYFWSYRDEGAFHEKVTNTILEDIVRVTQPRFIRITAKWYVRGGIYTNVVVEHQKKGWKPAPRVDLPTHGFESGLLR

SEQ ID NO: 48255 - protein, 157 aa, Paucibacter toxinivorans
  misc_feature (1)..(157): tr|A0A4R6QTL3|A0A4R6QTL3_9BURK NADPH-dependent 7-cyano- 7-deazaguanine reductase OS=Paucibacter toxinivorans OX =270368 GN=queF PE=3 SV=1
MAKTPSKAAPKQREMPPNPPSRPSKELHVFPNPAPERDYVIQFQIPEFTCHCPLTGQPDFAHFTIDMIADKHCVELKSLKMYMWSYRDEGAFHEKVTNTIMDDIIKATNPRFIRITAKWFVRGGIYTNVVVEQAKKGWKPAPRVDLPVHGAESGLLR

SEQ ID NO: 48256 - protein, 276 aa, Paucimonas lemoignei
  misc_feature (1)..(276): tr|A0A2X4AIX4|A0A2X4AIX4_PAULE NADPH-dependent 7-cyano- 7-deazaguanine reductase OS=Paucimonas lemoignei OX=294 43 GN=queF PE=3 SV=1
MHPAAEHSPLGKSSEYIATYTPSLLFPIPRAAKWAELGLTAETLPYQGVDFWNCYELSWLLPSGKPVVAIAEFSIPADSPNIIESKSFKLYLNSLNQTAFADRTELTTTLVKDLSSAAGKPVGVRIRSLADIEREGVASMPGTCIDELELNISSYDRPQPELLRCDGSQVVEESLHSHLLKSNCPVTSQPDWGSVAVEYRGAKLDAGSLLAYIVSFRQHSDFHEQCVERIFMDLQVLLKPEKLTVYARYVRRGGLDINPYRSTEVINPDNRRLARQ

SEQ ID NO: 48257 - protein, 284 aa, Paucimonas lemoignei
  misc_feature (1)..(284): tr|A0A4V2UIQ6|A0A4V2UIQ6_PAULE NADPH-dependent 7-cyano- 7-deazaguanine reductase OS=Paucimonas lemoignei OX=294 43 GN=queF PE=3 SV=1
MPDVGPGAENSAASSPLGKPATYVSEYDPSLLFPIARAEKRAELGITGTLPFFGMDIWNAYEVSWLNSRGKPQVAIATFSIPADSPNIIESKSFKLYLNSFNQTRLSSPEALAERLHTDLSAGFGATVHVNLTLPDAFSQLQMGELSGLPLDRLDIDVDEFQPNPGLLQARQDEAVVEETLVSHLLKSNCLVTGQPDWGSVQIRYVGAQIDQEGLLRYLIGFRQHNEFHEQCVERIFMDILRQCRPQKLSVYARYTRRGGLDINPWRSNFTTGHPPGNARLARQ

SEQ ID NO: 48258 - protein, 164 aa, Pectinatus cerevisiiphilus
  misc_feature (1)..(164): tr|A0A4R3KE21|A0A4R3KE21_9FIRM NADPH-dependent 7-cyano- 7-deazaguanine reductase OS=Pectinatus cerevisiiphilus OX=86956 GN=queF PE=3 SV=1
MREKNEVENITLLGKKNVKYNYDYCPEILETFVNKHPDRDYWVKFNCPEFTSLCPITGQPDFATIYISYIPDKIMVESKSLKLYLVSFRNHGDFHEDVVNIIMDDLIKLMQPRYIEIWGKFLPRGGISIDPYVNYGRPNTKYEKIAQQRFVQHDMAGMDKIDNR

SEQ ID NO: 48259 - protein, 282 aa, Pectobacterium actinidiae
  misc_feature (1)..(282): tr|A0A1V2R0B2|A0A1V2R0B2_9GAMM NADPH-dependent 7-cyano- 7-deazaguanine reductase OS=Pectobacterium actinidiae O X=1507808 GN=queF PE=3 SV=1
MSVYDKHQALSGLTLGKPTPYHDRYDAALLQPVPRSLNRVPLGIYPDNLPFHGADIWTLYELSWLNNRGVPQVAVGEMHLNAESLNLIESKSFKLYLNSFNQTVFDSWESVRATLAKDLADCAQGDVSITLFKLSELEGQPIAGFTGECIDDQDIQIDSYDFNADYLATNEQDAPIVEETLVSHLLKSNCLITHQPDWGSVQIHYRGKRINREALLRYIVSFRHHNEFHEQCVERIFNDIMRYYQPEKLSVYARYTRRGGLDINPWRSNTPFNAPNGRLPRQ

SEQ ID NO: 48260 - protein, 282 aa, Pectobacterium aquaticum
  misc_feature (1)..(282): tr|A0A3R8QEP5|A0A3R8QEP5_9GAMM NADPH-dependent 7-cyano- 7-deazaguanine reductase OS=Pectobacterium aquaticum OX =2204145 GN=queF PE=3 SV=1
MSVYDKHQALSGLTLGKPTPYHDRYDAALLQPVPRSLNRDPLGIYPDSLPFHGADIWTLYELSWLNNRGVPQVAVGEMHLNAESLNLIESKSFKLYLNSFNQTAFDSWESVRATLAKDLAHCAQGDVSITLFKLNELEGQPLAGFTGECIDDQDIQIDSYDFNADYLATNEQDAPVVEETLVSHLLKSNCLITHQPDWGSVQIHYRGKRINREALLRYIVSFRHHNEFHEQCVERIFNDIMHYYQPEKLSVYARYTRRGGLDINPWRSNTPFTAPNGRLPRQ

SEQ ID NO: 48261 - protein, 282 aa, Pectobacterium atrosepticum
  misc_feature (1)..(282): sp|Q6D8F4|QUEF_PECAS NADPH-dependent 7-cyano-7-deazagua nine reductase OS=Pectobacterium atrosepticum (strain S CRI 1043 / ATCC BAA-672) OX=218491 GN=queF PE=3 SV=1
MSVYDKHQALSRLTLGKPTPYHDRYDAALLQPVPRSLNRDPLGIYPDSLPFHGADIWTLYELSWLNNRGVPQVAVGEMHLNAESLNLIESKSFKLYLNSFNQTTFDSWESVRATLANDLAHCAQGDVSVTLFKLSELEGQPLAGFTGECIDDQDIQIDNYNFNADYLATNEQDAPVVEETLVSHLLKSNCLITHQPDWGSVQIHYRGKRINREALLRYIVSFRHHNEFHEQCVERIFNDLMHYYQPEKLSVYARYTRRGGLDINPWRSNTPFNAPNGRLPRQ

SEQ ID NO: 48262 - protein, 282 aa, Pectobacterium betavasculorum
  misc_feature (1)..(282): tr|A0A093S6S6|A0A093S6S6_9GAMM NADPH-dependent 7-cyano- 7-deazaguanine reductase OS=Pectobacterium betavasculor um OX=55207 GN=queF PE=3 SV=1
MSVYDKQQALSGLTLGKPTAYHDRYDAALLQPVPRSLNRDPLGIYPDNLPFHGADIWTLYELSWLNNHGVPQVAVGEMHLNAESRNLIESKSFKLYLNSFNQTKFDSWESVCATLTNDLAHCAQGDVSVTLFKLSELEGQPLTAFTGECIDEQDIQIDSYDFNADYLATNEQDAPVVEETLVSHLLKSNCLITHQPDWGSVQIHYRGKRINREALLRYIVSFRHHNEFHEQCVERIFNDLMHYYQPEKLSVYARYTRRGGLDINPWRSNYAASVPNGRLPRQ

SEQ ID NO: 48263 - protein, 282 aa, Pectobacterium brasiliense
  misc_feature (1)..(282): tr|A0A0M2F6K8|A0A0M2F6K8_9GAMM NADPH-dependent 7-cyano- 7-deazaguanine reductase OS=Pectobacterium brasiliense OX=180957 GN=queF PE=3 SV=1
MSVYDKHQALSGLTLGKPTPYHDRYDAALLQPVPRSLNRDPLGIYPDSLPFHGADIWTLYELSWLNNRGVPQVAVGEMHLNAESLNLIESKSFKLYLNSFNQTAFDSWESVRATLAKDLAHCAQGDVSITLFKLSELEGQPIAGFTGECIDDQDIQIDSYDFNADYLAHNEQDAPVVEETLVSHLLKSNCLITHQPDWGSVQIQYCGKRINREALLRYIVSFRHHNEFHEQCVERIFNDIMRYYQPEKLSVYARYTRRGGLDINPWRSNTPFNAPNGRLPRQ

SEQ ID NO: 48264 - protein, 282 aa, Pectobacterium brasiliense
  misc_feature (1)..(282): tr|A0A086EWG0|A0A086EWG0_9GAMM NADPH-dependent 7-cyano- 7-deazaguanine reductase OS=Pectobacterium brasiliense OX=180957 GN=queF PE=3 SV=1
MSVYDKHQALSGLTLGKPTPYHDRYDAALLQPVPRSLNRDPLGIYPDSLPFHGADIWTLYELSWLNNRGVPQVAVGEMHLNAESLNLIESKSFKLYLNSFNQTAFDSWESVRATLAKDLAHCAQGDVSITLFKLSELEGQLIAGFTGECIDDQDIQIDSYDFNADYLATNEQDTPVVEETLVSHLLKSNCLITHQPDWGSVQIQYCGKRINREALLRYIVSFRHHNEFHEQCVERIFNDIMRYYQPEKLSVYARYTRRGGLDINPWRSNTPFNAPNGRLPRQ

SEQ ID NO: 48265 - protein, 282 aa, Pectobacterium carotovorum
  misc_feature (1)..(282): sp|C6DAH4|QUEF_PECCP NADPH-dependent 7-cyano-7-deazagua nine reductase OS=Pectobacterium carotovorum subsp. car otovorum (strain PC1) OX=561230 GN=queF PE=3 SV=1
MSVYDKHQALSGLTLGKPTPYHDRYDAALLQPVPRSLNRDPLGIHPDSLPFHGADIWTLYELSWLNNRGVPQVAVGEMHLNAESLNLIESKSFKLYLNSFNQTTFDSWESVRATLANDLAHCAQGDVSITLFKLSELEGQPLAGFTGECIDDQDIQIDSYDFNADYLATNEQDAPVVEETLVSHLLKSNCLITHQPDWGSVQIHYRGKRINREALLRYIISFRHHNEFHEQCVERIFNDIMRYYQPEKLSVYARYTRRGGLDINPWRSNTAFNAPNGRLPRQ

SEQ ID NO: 48266 - protein, 282 aa, Pectobacterium carotovorum
  misc_feature (1)..(282): tr|A0A1M5L091|A0A1M5L091_PECCA NADPH-dependent 7-cyano- 7-deazaguanine reductase OS=Pectobacterium carotovorum OX=554 GN=queF PE=3 SV=1
MSVYDKHQALSGLTLGKTTPYHDRYDAALLQPVPRSLNRDPLGIYPDSLPFHGADIWTLYELSWLNNRGVPQVAVGEMHLNAESLNLIESKSFKLYLNSFNQTAFDSWESVRATLAKDLAHCAQGDVSITLFKLSELEGQPIAGFTGECIDDQDIQIDSYDFSADYLATNEQDAPIVEETLVSHLLKSNCLITHQPDWGSVQIHYRGKRINREALLRYIVSFRHHNEFHEQCVERIFNDIMRYYQPEKLSVYARYTRRGGLDINPWRSNTAFNAPNGRLPRQ

SEQ ID NO: 48267 - protein, 282 aa, Pectobacterium odoriferum
  misc_feature (1)..(282): tr|A0A094RX16|A0A094RX16_9GAMM NADPH-dependent 7-cyano- 7-deazaguanine reductase OS=Pectobacterium odoriferum O X=78398 GN=queF PE=3 SV=1
MSVYDKHQALSGLTLGKPTPYHDRYDAALLQPVPRSLNRDPLGIYPDNLPFHGADIWTLYELSWLNNRGVPQVAVGEMHLNAESLNLIESKSFKLYLNSFNQTTFDSWESVRATLAKDLAHCAQGDVNITLFKLSELEGQPLAGFTGECIDDQDIQIDSYDFNADYLATNEQNAPVVEETLVSHLLKSNCLITHQPDWGSVQIHYRGKRINREALLRYIVSFRHHNEFHEQCVERIFNDITRYYQPEKLSVYARYTRRGGLDINPWRSNTAFNAPNGRLPRQ

SEQ ID NO: 48268 - protein, 282 aa, Pectobacterium parmentieri
  misc_feature (1)..(282): tr|A0A0H3I644|A0A0H3I644_PECPM NADPH-dependent 7-cyano- 7-deazaguanine reductase OS=Pectobacterium parmentieri OX=1905730 GN=queF PE=3 SV=1
MSVYDKHQALSGLTLGKATPYHDRYDAALLQPVPRSLNRDPLGIYPDNLPFHGTDIWTLYELSWLNHRGVPQVAVGEMHLNAESLNLIESKSFKLYLNSFNQTTFDDWEGVRATLAKDLAQCAQGDVNVTLFKLSELEGQPLAGFTGECIDDQDIQIDSYDFNADYLATNEQDAPVVEETLVSHLLKSNCLITHQPDWGSVQIHYCGKRINREALLRYIVSFRHHNEFHEQCVERIFNDIMRYYQPEKLSVYARYTRRGGLDINPWRSNYPFNAPTGRLPRQ

SEQ ID NO: 48269 - protein, 282 aa, Pectobacterium peruviense
  misc_feature (1)..(282): tr|A0A0J5XY31|A0A0J5XY31_9GAMM NADPH-dependent 7-cyano- 7-deazaguanine reductase OS=Pectobacterium peruviense O X=2066479 GN=queF PE=3 SV=1
MSVYDKHQALSGLTLGKPTPYHDRYDAALLQPVPRSLNRDPLGIYPDSLPFHGADIWTLYELSWLNNRGVPQVAVGEMHLNAESLNLIESKSFKLYLNSFNQTTFDSWESVHTTLANDLAHCAQGDVSVTLFKLSELEGQPLAGFTGECIDDQDIQIDSYDFNANYLATNEQDAPVVEETLVSHLLKSNCLITHQPDWGSVQIHYRGKRINREALLRYIVSFRHHNEFHEQCVERIFNDLMHYYQPEKLSVYARYTRRGGLDINPWRSNTPFSAPNGRLPRQ

SEQ ID NO: 48270 - protein, 282 aa, Pectobacterium polaris
  misc_feature (1)..(282): tr|A0A3A4AFK0|A0A3A4AFK0_9GAMM NADPH-dependent 7-cyano- 7-deazaguanine reductase OS=Pectobacterium polaris OX=2 042057 GN=queF PE=3 SV=1
MSVYDKHQALSGLTLGKPTPYHDRYDAALLQPVPRSLNRDPLGIYPDSLPFHGADIWTLYELSWLNNRGVPQVAVGEMHLNAESLNLIESKSFKLYLNSFNQTAFDSWESVRATLAKDLAHCAQGDVSITLFKLSELEGQPIAGFTGDCIDDQDIQIDSYDFNADYLATNEQDAPVVEETLVSHLLKSNCLITHQPDWGSVQIHYRGKRINREALLRYIVSFRHHNEFHEQCVERIFNDIMRYYQPEKLSVYARYTRRGGLDINPWRSNTPFNAPNGRLPRQ

SEQ ID NO: 48271 - protein, 282 aa, Pectobacterium polaris
  misc_feature (1)..(282): tr|A0A3S1AUW7|A0A3S1AUW7_9GAMM NADPH-dependent 7-cyano- 7-deazaguanine reductase OS=Pectobacterium polaris OX=2 042057 GN=queF PE=3 SV=1
MSVYDKHQALSGLTLGKPTPYHDLYDAALLQPVPRSLNRDPLGIYPDSLPFHGADIWTLYELSWLNNRGVPQVAVGEMHLNAESLNLIESKSFKLYLNSFNQTAFDSWESVRATLAKDLAHCAQGDVSITLFKLSELEGQPLAGFTGDCIDDQDIQIDSYDFNADYLATNEQDAPVVEETLVSHLLKSNCLITHQPDWGSVQIHYRGKRINREALLRYIVSFRHHNEFHEQCVERIFNDIMRYYQPEKLSVYARYTRRGGLDINPWRSNTPFNAPNGRLPRQ

SEQ ID NO: 48272 - protein, 282 aa, Pectobacterium polonicum
  misc_feature (1)..(282): tr|A0A4U7KJA7|A0A4U7KJA7_9GAMM NADPH-dependent 7-cyano- 7-deazaguanine reductase OS=Pectobacterium polonicum OX =2485124 GN=queF PE=3 SV=1
MSVYDKHQALSGLTLGKPTPYHDHYDAALLQPVPRSLNRDPLGIYPDSLPFHGGDIWTLYELSWLNNRGVPQVAVGEMHLNAESLNLIESKSFKLYLNSFNQTTFDSWESVRTTLANDLAHCAQGDVSVTLFKLSELEGQPLAGFIGECIDDQDIQIDSYDFSADYLATNEQDAPVVEETLVSHLLKSNCLITHQPDWGSVQIHYRGKRINREALLRYIVSFRHHNEFHEQCVERIFNDIMRYYQPEKLSVYARYTRRGGLDINPWRSNTPFNAPTGRLPRQ

SEQ ID NO: 48273 - protein, 282 aa, Pectobacterium punjabense
  misc_feature (1)..(282): tr|A0A2T3VYX9|A0A2T3VYX9_9GAMM NADPH-dependent 7-cyano- 7-deazaguanine reductase OS=Pectobacterium punjabense O X=2108399 GN=queF PE=3 SV=1
MSVYDKHQALSGLTLGKPTPYHDHYDAALLQPVPRSLNRDPLGIYPDSLPFHGEDIWTLYELSWLNNRGVPQVAVGEMHLNAESLNLIESKSFKLYLNSFNQTTFDSWESVRTTLANDLAHCAQGDVSVTLFKLSELEGQPLAGFTGECIDDQDIQIDSYDFSADYLATNEQDAPVVEETLVSHLLKSNCLITHQPDWGSVQIHYRGNRINREALLRYIVSFRHHNEFHEQCVERIFNDIMRYYQPEKLSVYARYTRRGGLDINPWRSNYPFNAPNGRLPRQ

SEQ ID NO: 48274 - protein, 282 aa, Pectobacterium wasabiae
  misc_feature (1)..(282): tr|A0A1D7Z3M4|A0A1D7Z3M4_9GAMM NADPH-dependent 7-cyano- 7-deazaguanine reductase OS=Pectobacterium wasabiae CFB P 3304 OX=1175631 GN=queF PE=3 SV=1
MSVYDKHQALSGLTLGKPTPYHDRYDAALLQPVPRSLNRDPLGIYPDSLPFHGVDIWTLYELSWLNHRGVPQVAVGEMHLNAESQNLIESKSFKLYLNSFNQTIFDDWEGVRATLAKDLAQCAQGDVSITLFKLSELEGQPLAGFIGECIDDQDIQIDSYDFNADYLATNEQDTPVVEETLVSHLLKSNCLITHQPDWGSVQIHYRGKRINREALLRYIVSFRHHNEFHEQCVERIFNDLMRYYQPEKLSVYARYTRRGGLDINPWRSNYLSNVPNGRLPRQ

SEQ ID NO: 48275 - protein, 191 aa, Pedobacter sp.
  misc_feature (1)..(191): tr|A0A519YLS2|A0A519YLS2_9SPHI NADPH-dependent 7-cyano- 7-deazaguanine reductase QueF (Fragment) OS=Pedobacter sp. OX=1411316 GN=EOO89_33245 PE=4 SV=1
MSSSPLGHKTDYVSSYDASLLFPIPRHESRKTLGLLDDLPFYGQDIWTGYELSWLNIKGKPEVAVAEFSVPFDSPNIIELKSFKLYLNSLNQTRFSGFDEVKELLVKDLSAAAESDVSVSLKSLSDSNLLIDFTVKGVCIDGLDISVESYHPQAEHLKANESEQTSETLCSHLLKSNCPVTGQPDWASVFI

SEQ ID NO: 48276 - protein, 154 aa, Pelagibaca sp.
  misc_feature (1)..(154): tr|A0A2D6BA84|A0A2D6BA84_9RHOB NADPH-dependent 7-cyano- 7-deazaguanine reductase OS=Pelagibaca sp. OX=1979400 G N=queF PE=3 SV=1
MTDTIYSNLKQLGGETRIPESPETAELERVANPQADVQYNVRFTAPEFTSLCPMTGQPDFAHLVIDYVPGAWLVESKSLKLYLTSFRNHGAFHEDCTISIARRLVDFLEPAWLRIGGYWYPRGGMPIDVFWQTGAMPRDVWIPDQGVAPYRGRG

SEQ ID NO: 48277 - protein, 150 aa, Pelagibacteraceae bacterium
  misc_feature (1)..(150): tr|A0A2E6J0S1|A0A2E6J0S1_9PROT NADPH-dependent 7-cyano- 7-deazaguanine reductase OS=Pelagibacteraceae bacterium OX=2026775 GN=queF PE=3 SV=1
MKKIKLNYLGRNKNLFNDPDKCLLDPIPNKNYKKDYIVRLTINEFTSLCPVTGQPDFAKFIIDYLPNKSLVESKSFKFFIHSFRNHQCFHENCTIFIAEKLLKSIKPKWIRISGYWFPRGGIPIDIFYENKKPPKNLYIPDTGIKPYKGR

SEQ ID NO: 48278 - protein, 151 aa, Pelagibacteraceae bacterium
  misc_feature (1)..(151): tr|A0A1Z8V121|A0A1Z8V121_9PROT NADPH-dependent 7-cyano- 7-deazaguanine reductase OS=Pelagibacteraceae bacterium TMED65 OX=1986644 GN=queF PE=3 SV=1
MKNTKKPRYLGSKSNVKSSPDSFILDCVNNPHLDHDYSIRFIAPEFTSICPITSQPDFGKIIIDYVPNKLLMESKSFKLFLFSFRDYGGFHEDCTIKISKKIIKYVKPKWIRVASFWNPRGGIPIDIISQTGKKPVNVIVSELNIPIYGNR

SEQ ID NO: 48279 - protein, 154 aa, Pelagibacterales bacterium
  misc_feature (1)..(154): tr|A0A2E6DY44|A0A2E6DY44_9PROT NADPH-dependent 7-cyano- 7-deazaguanine reductase OS=Pelagibacterales bacterium OX=2026776 GN=queF PE=3 SV=1
  misc_feature (10)..(10): Xaa can be any naturally occurring amino acid
  misc_feature (17)..(17): Xaa can be any naturally occurring amino acid
  misc_feature (67)..(67): Xaa can be any naturally occurring amino acid
  misc_feature (71)..(71): Xaa can be any naturally occurring amino acid
MVQKKINKIXALGNKSXIPNEPSEAFLEKVNNPHSDKLYVARFTVPEFTSLCPVTGQPDFANIIIDXIPKXYLLESKSFKLFMQSFRNHGAFHEDVTLYIAKRIIKEIKPVWLRIGGYFYPRGGIPIDVFWQTDNPPKKVWIPENSIQVYKGRN

SEQ ID NO: 48280 - protein, 149 aa, Pelagibacterales bacterium
  misc_feature (1)..(149): tr|A0A2D5FYG3|A0A2D5FYG3_9PROT NADPH-dependent 7-cyano- 7-deazaguanine reductase OS=Pelagibacterales bacterium OX=2026776 GN=queF PE=3 SV=1
MDKIKQLGKKAIFADSPDKAVLEKVKNPHADKLYVARFSAPEFTSLCPVTGQPDFAHIILDYIPNKYLLESKSFKLFIQSFRNHGAFHEDVTLYIAKRIEKEIKPVWLRIGGYFYPRGGIPIDVFWQTDVPPKKVWIPDNNINVYNGRK

SEQ ID NO: 48281 - protein, 153 aa, Pelagibacterium luteolum
  misc_feature (1)..(153): tr|A0A1G7W2I9|A0A1G7W2I9_9RHIZ NADPH-dependent 7-cyano- 7-deazaguanine reductase OS=Pelagibacterium luteolum OX =440168 GN=queF PE=3 SV=1
MNANPLDVTQLGRDVRAAESPEQAVLERVPNPQADTDYVARFTAPEFTSLCPVTGQPDFAHLVIDYVPGDWLVESKSLKLYLTSFRNHGAFHEDCTVSIGRRLTALLEPRWLRIGGYWYPRGGIPIDVFWQTGRPPEHVWLPETGVPTYRGRG

SEQ ID NO: 48282 - protein, 277 aa, Pelagibaculum spongiae
  misc_feature (1)..(277): tr|A0A2V1GY39|A0A2V1GY39_9GAMM NADPH-dependent 7-cyano- 7-deazaguanine reductase OS=Pelagibaculum spongiae OX=2 080658 GN=queF PE=3 SV=1
MKLSIESNPDIPLGKTSEYPQSYDPDLLFPIPRLGKRLELGIDQNQLPFFGVDIWNAWEVSWLNLKGKPCVAIGQIHFPAESEFLVESKSLKLYFNSLNQHRLSSVDALEKLVAADLTHAVGVPVVVTMSHPDRYENCQAPMGQCIDELDVEIDNYSYQPELLKLLEDGEVRHQLLYSHLLKSNCLVTGQPDWGSVWIEYSGQEIDQEALLKYLISFRNHNEFHEQCVERIFTDIKRFCNPQRLTVWARYVRRGGLDINPYRSNCQREFVFERDFRQ

SEQ ID NO: 48283 - protein, 155 aa, Pelagicola litorisediminis
  misc_feature (1)..(155): tr|A0A1Y5RD40|A0A1Y5RD40_9RHOB NADPH-dependent 7-cyano- 7-deazaguanine reductase OS=Pelagicola litorisediminis OX=1312363 GN=queF PE=3 SV=1
MNDDNIYKNLKQLGGETKLPDSPEKAELEKVPNPQADVAYNVRFVAPEFTSLCPMTGQPDFAHLVIDYVPGAWLVESKSLKLFLGSFRNHGAFHEDCTVSIARRLADFLDPQWLRIGGYWYPRGGIPIDVFYQTGPMPEGVWIPDQGVPPYRGRG

SEQ ID NO: 48284 - protein, 154 aa, Pelagicola sp.
  misc_feature (1)..(154): tr|A0A2U2CUK5|A0A2U2CUK5_9RHOB NADPH-dependent 7-cyano- 7-deazaguanine reductase OS=Pelagicola sp. LXJ1103 OX=2 175247 GN=queF PE=3 SV=1
MSDSIYSDLKQLGTMTGLPDDPAKAELERVQNPQADVMYNVRFVAPEFTSLCPMTGQPDFAHLVIDYVPGAWLVESKSLKLFLGSFRNHGAFHEDCTITIARRIADFTEAKWLRIGGYWYPRGGIPIDVHYQTGPMPEGLWIPDQGVPPYRGRG

SEQ ID NO: 48285 - protein, 164 aa, Pelagirhabdus alkalitolerans
  misc_feature (1)..(164): tr|A0A1G6GK76|A0A1G6GK76_9BACI NADPH-dependent 7-cyano- 7-deazaguanine reductase OS=Pelagirhabdus alkalitoleran s OX=1612202 GN=queF PE=3 SV=1
MGRNDQDLTDLSLLGNQETTYDFNYTPEVLETFDNKHPNRDYFVKFNCPEFTTLCPKTNQPDFGTVYLSYIPDEKMVESKSFKLYLFSFRNHGDFHEDSMNIIMNDLIDLMDPKYIEVWGKFTPRGGISIDPYTNYGRPGTKYEKMAEHRMLNHDLYPEKVDNR

SEQ ID NO: 48286 - protein, 154 aa, Pelagivirga sediminicola
  misc_feature (1)..(154): tr|A0A2T7G7R1|A0A2T7G7R1_9RHOB NADPH-dependent 7-cyano- 7-deazaguanine reductase OS=Pelagivirga sediminicola OX =2170575 GN=queF PE=3 SV=1
MSENIYSDLKQLGTNTALPDDPAKAELERVQNPQADVDYNVRFVAPEFTSLCPMTGQPDFAHLVIDYVPGAWLVESKSLKLYLGSFRDHGAFHEDCTVSIARRLAEFTQAKWLRIGGYWYPRGGIPIDVFYQTGPMPEGVWIPDQGVPPYRGRG

SEQ ID NO: 48287 - protein, 291 aa, Pelistega indica
  misc_feature (1)..(291): tr|V8FTA6|V8FTA6_9BURK NADPH-dependent 7-cyano-7-deazag uanine reductase OS=Pelistega indica OX=1414851 GN=queF PE=3 SV=1
MQTVEKNLLHAPLGKSSDYPTQYDPSLLFPISRQIGRDHLSIKPYPEWYGEDVWRAFEVSWLNPKGKPEIAILRFTIPATSSHIIESKSFKLYLNSFNQEKLSWDNLYAHLVQDLSQAAGGTVNIIRENAHTLLMSDKHSPYPDSTVIAPLEAINIDNLDIECSIYEPTASLLKADTDSIRKEVLVSDLLKSNCPVTSQPDWGSVVISYEGPAIDHASLLEYIVSYRTHNGFHEQCVEQIYCDIWQQCQPTFLEVYARYTRRGGLDISPRRASSSATLDKNYPQIIRTPRQ

SEQ ID NO: 48288 - protein, 143 aa, Pelobacter propionicus
  misc_feature (1)..(143): tr|A1AU76|A1AU76_PELPD NADPH-dependent 7-cyano-7-deazag uanine reductase OS=Pelobacter propionicus (strain DSM 2379 / NBRC 103807 / OttBd1) OX=338966 GN=queF PE=3 SV= 1
MTLHENLKSLGSGTTGYRYARPDATLLEAFPSPFAQPDLNPAGAVGTLHIECPEFTCLCPMTGQPDFARIVIDYQPDTLCVESKSLKLYLGSFRMHGEFHEASVNRICNDLVRLISPLWLTVRGEFTPRGGIPFWPTAEYRRP

SEQ ID NO: 48289 - protein, 116 aa, Pelodictyon luteolum
  misc_feature (1)..(116): tr|A0A165LIY4|A0A165LIY4_PELLU NADPH-dependent 7-cyano- 7-deazaguanine reductase OS=Pelodictyon luteolum OX=110 0 GN=queF PE=3 SV=1
MKQEILEVFDNTYPDRDYTIEIVNPEFTSVCPKTGLPDFGTITVSYVPDKTCIELKSLKYYFLEFRNAGIFYENVTNRILDDLVAVSNPRSMTVRTEWKARGGITETVTVSHNASA

SEQ ID NO: 48290 - protein, 116 aa, Pelodictyon luteolum
  misc_feature (1)..(116): sp|Q3B2F0|QUEF_PELLD NADPH-dependent 7-cyano-7-deazagua nine reductase OS=Pelodictyon luteolum (strain DSM 273 / 2530) OX=319225 GN=queF PE=3 SV=1
MKQEILEVFDNTYPDRDYTIEIVNPEFTSVCPKTGLPDFGTITVSYIPDKTCIELKSLKYYFLEFRNAGIFYENVTNRILDDLVAVSSPRSMTVRTEWKARGGITETVTVSHNASA

SEQ ID NO: 48291 - protein, 116 aa, Pelodictyon phaeoclathratiforme
  misc_feature (1)..(116): sp|B4SDY9|QUEF_PELPB NADPH-dependent 7-cyano-7-deazagua nine reductase OS=Pelodictyon phaeoclathratiforme (stra in DSM 5477 / BU-1) OX=324925 GN=queF PE=3 SV=1
MKKDLLELFDNSFPDRDYTIEIVNAEFTSVCPKTGLPDFGTITIRYVPDKSCIELKSLKYYFLEFRNAGIFYENITNRILDDLVTLLQPRSLSVITEWRARGGITETVSVNYSQTL

SEQ ID NO: 48292 - protein, 146 aa, Pelomonas puraquae
  misc_feature (1)..(146): tr|A0A254NBI2|A0A254NBI2_9BURK NADPH-dependent 7-cyano- 7-deazaguanine reductase OS=Pelomonas puraquae OX=43105 9 GN=queF PE=3 SV=1
MREVPKNPPSKPSKDILVFPNPNPERDYVIQFQVPEFTCHCPLTGQPDFAHFTIDMIADELCVELKSLKMYFWSYRNEGAFHEKVTNKILDDIVAVTDPRFIRITAKWYVRGGIYTNVVAEHRKPGWTPAPRVDLPGHGFESGMLG

SEQ ID NO: 48293 - protein, 164 aa, Pelomonas saccharophila
  misc_feature (1)..(164): tr|A0A4R3V8J6|A0A4R3V8J6_PELSC NADPH-dependent 7-cyano- 7-deazaguanine reductase OS=Pelomonas saccharophila OX= 304 GN=queF PE=3 SV=1
MATKKSATAPAKKSKPKMREVPPNPPSKPSKDILVFPNPNPERDYVIQFQVPEFTCHCPLTGQPDFAHFTIDMIADELCVELKSLKMYFWSYRNEGAFHEKVTNKILDDIVKVTDPRFIRITAKWYVRGGIYTNVVAEHRKPGWLPAPRVELPAHGFESGMLGA

SEQ ID NO: 48294 - protein, 146 aa, Pelomonas sp.
  misc_feature (1)..(146): tr|A0A0Q7AV86|A0A0Q7AV86_9BURK NADPH-dependent 7-cyano- 7-deazaguanine reductase OS=Pelomonas sp. Root405 OX=17 36529 GN=queF PE=3 SV=1
MREVPKNPPTKPSKDILVFPNPNPERDYVIQFQVPEFTCHCPLTGQPDFAHFTIDMIADELCVELKSLKMYFWSYRNEGAFHEKVTNTILDDIIKVTDPRFIRITAKWYVRGGIYTNVVVEHRKAGWTPAPRVDLPAHGFESGMLG

SEQ ID NO: 48295 - protein, 160 aa, Pelomonas sp.
  misc_feature (1)..(160): tr|A0A2R7SAF6|A0A2R7SAF6_9BURK NADPH-dependent 7-cyano- 7-deazaguanine reductase OS=Pelomonas sp. HMWF004 OX=20 56841 GN=queF PE=3 SV=1
MATKKPASAPKKPKMREVPKNPPSKPSKDLLVFPNPNPERDYVIQFQVPEFTCHCPLTGQPDFAHFTIDMIADERCVELKSLKMYFWSYRNEGAFHEKVTNTILDDIVKVTDPRFIRITAKWYVRGGIYTNVVAEHRKPGWQPAPRVELPAHGFESGMLG

SEQ ID NO: 48296 - protein, 165 aa, Pelosinus sp.
  misc_feature (1)..(165): tr|A0A075K8A3|A0A075K8A3_9FIRM NADPH-dependent 7-cyano- 7-deazaguanine reductase OS=Pelosinus sp. UFO1 OX=48477 0 GN=queF PE=3 SV=1
MSRNNKELEGITLLGNQNVKYEYSYTPEVLEVFENKHIENDYWVKFNCPEFTTLCPMTGQPDFATIYIKYIPDVKMVESKSLKLYLLSFRNQGDFHEDVVNIIMKDLIRLMQPRYIEVWGKFLPRGGISIDPYCNYGKPDTKYQSLAWHRMQENDLHSLEKIDNR

SEQ ID NO: 48297 - protein, 164 aa, Peptococcaceae bacterium
  misc_feature (1)..(164): tr|A0A3D3WBC7|A0A3D3WBC7_9FIRM NADPH-dependent 7-cyano- 7-deazaguanine reductase OS=Peptococcaceae bacterium OX =2052179 GN=queF PE=3 SV=1
MPNKKSTREGLSLLGNQDVPYRYEYDPGILERFENKHQANDYFVKFNCPEFTSLCPITGQPDFASIYISYVPDVLMVESKSLKLYLFSFRNHGDFHENCINTIMKDLIALMDPKYIEVWGKFTPRGGISIDPYCNYGKPGTAWETTAAKRLHWHDMYPENVDNR

SEQ ID NO: 48298 - protein, 68 aa, Peptococcaceae bacterium
  misc_feature (1)..(68): tr|A0A354FCU8|A0A354FCU8_9FIRM NADPH-dependent 7-cyano- 7-deazaguanine reductase QueF (Fragment) OS=Peptococcac eae bacterium OX=2052179 GN=DDY25_02495 PE=4 SV=1
VTITYIPRDMLVELKSLKYYLNSFRNVGILQEHVVNRVKEDLVKLLNPVTLTVKADFRPRGGIGTCVQ

SEQ ID NO: 48299 - protein, 163 aa, Peptoniphilus asaccharolyticus
  misc_feature (1)..(163): tr|A0A1W1UQ49|A0A1W1UQ49_PEPAS NADPH-dependent 7-cyano- 7-deazaguanine reductase OS=Peptoniphilus asaccharolyti cus DSM 20463 OX=573058 GN=queF PE=3 SV=1
MREKEEMKDITLLGNQGTKMPRDYAPEVLEAFDNKHPGNDYFVKFNCPEFTSLCPITGQPDFATIYISYVPNVKMVESKSLKLYLFSFRNRGDFHEDCMNIIMKDLIKLMDPKYIEVWGKFTPRGGISIDPYCNYGKAGTKWEDVAWNRLSNHDLYPENIDNR

SEQ ID NO: 48300 - protein, 163 aa, Peptoniphilus indolicus
  misc_feature (1)..(163): tr|A0A379DF94|A0A379DF94_9FIRM NADPH-dependent 7-cyano- 7-deazaguanine reductase OS=Peptoniphilus indolicus OX= 33030 GN=queF PE=3 SV=1
MREREEMKNITLLGNQGTKMPGDYAPEVLEAFDNKHTDNDYFVKFNCPEFTSLCPITGQPDFATIYISYVPNVKMVESKSLKLYLFSFRNRGDFHEDCMNIIMKDLIKLMDPKYIEVWGKFTPRGGISIDPYCNYGKAGTKWEEVAWNRLSNHDLYPENIDNR

SEQ ID NO: 48301 - protein, 163 aa, Peptoniphilus indolicus; identical to SEQ ID NO: 48300
  misc_feature (1)..(163): tr|G4D609|G4D609_9FIRM NADPH-dependent 7-cyano-7-deazag uanine reductase OS=Peptoniphilus indolicus ATCC 29427 OX=997350 GN=queF PE=3 SV=1

SEQ ID NO: 48302 - protein, 181 aa, Peredibacter sp.
  misc_feature (1)..(181): tr|A0A2E5CFK9|A0A2E5CFK9_9PROT NADPH-dependent 7-cyano- 7-deazaguanine reductase OS=Peredibacter sp. OX=2024850 GN=queF PE=3 SV=1
MPAKKIAKKAKSASKQRTEKELKGVTLLGSQKTEYSQDYSPEVLESFPNKNPKFDAWTTFVCTEFTSLCPKTGQPDFAKIFINYIADKTMVESKSLKLYLFSFRNHGDFHEDCIQKICNDLYDLMKPKYIEVIGEFTPRGGIAIFPFSSRSNSQAKYKKVKEERFLSYSPGKYSTDLSKVY

SEQ ID NO: 48303 - protein, 276 aa, Perlucidibaca sp.
  misc_feature (1)..(276): tr|A0A2P6AT87|A0A2P6AT87_9GAMM NADPH-dependent 7-cyano- 7-deazaguanine reductase OS=Perlucidibaca sp. HR-E OX=2 094561 GN=queF PE=3 SV=1
MDLHALTTLGQATVYPDTHDAGLLQPIPRRLAREALGLAGDGAAPLPFIGVDLWTHYELSWLEPGGKPVVAVGEIRVPADSPALIESKSLKLYFNSLNFTRFATPADFTALVEGELSQAAGAPVTLTLLPADAPLRFGGLPGRCLDDLPLSIEDRREPDPGLLRCDPSRIVDETWHSHLLRSNCPVTDQPDWGSVVVRCHGPRIDPDSLLAYLVSFRRHADFHEQCVERIFLDLQALTGAALLTVHARYTRRGGLDINPFRSTAEELAGSWRTVRQ

SEQ ID NO: 48304 - protein, 271 aa, Permianibacter aggregans
  misc_feature (1)..(271): tr|A0A4R6UAZ3|A0A4R6UAZ3_9GAMM NADPH-dependent 7-cyano- 7-deazaguanine reductase OS=Permianibacter aggregans OX =1510150 GN=queF PE=3 SV=1
MAQTELLLGKPVLYKDQYDPSLLFPVPRSQNREQLPPNIAFHGVDIWNGYELSWLNEKGKPEVALGEFAVPYDSPNLIESKSFKLYLNSFNGSRFSSMDDVAKKMRTDLSAAAGKSVEVTLKSAGENVMRPQWPGDGVCIDELDVACQDYEVNADLLRCVDNPETARETLYSQLLKSNCPVTGQPDWATVVVRYRGPKIDEGALLQYIVSFRNHAEFHEHCVERMFCDIMQRCHPQQLSVFAKYTRRGGLDINPFRSNYEDWVDNRRAARQ

SEQ ID NO: 48305 - protein, 131 aa, Persephonella hydrogeniphila
  misc_feature (1)..(131): tr|A0A285NK08|A0A285NK08_9AQUI NADPH-dependent 7-cyano- 7-deazaguanine reductase OS=Persephonella hydrogeniphil a OX=198703 GN=queF PE=3 SV=1
MELKYGEREIQEAKLEKWPNPNPEKNYTIDITFPEFTCLCPRSGYPDFATIKITYIPDKYIVELKSLKLYLNKYRNMYISHEEATNKIYDDLYELLQPRFLEVIGDWHPRGNVKTIIKVSSEDQQKEEKSL

SEQ ID NO: 48306 - protein, 128 aa, Persephonella marina
  misc_feature (1)..(128): tr|C0QTY7|C0QTY7_PERMH NADPH-dependent 7-cyano-7-deazag uanine reductase OS=Persephonella marina (strain DSM 14 350 / EX-H1) OX=123214 GN=queF PE=3 SV=1
MSGELKYGEKEIQEAKLEVWPNPNPEKNYTINITFPEFTCLCPRSGYPDFATIKITYVPDQYIVELKSLKLYLNKYRNQYISHEEATNKIYDDLYNLLKPRFLEVIGDWNPRGNVKTVIKISSEEQGK

SEQ ID NO: 48307 - protein, 130 aa, Persephonella sp.
  misc_feature (1)..(130): tr|A0A432RXU9|A0A432RXU9_9AQUI NADPH-dependent 7-cyano- 7-deazaguanine reductase OS=Persephonella sp. OX=206092 2 GN=queF PE=3 SV=1
MEEKRELKYGEKEILEAKLEPWENPYPDRNYNINITFPEFTCLCPRSGYPDFATIKINYIPDKYIVELKSLKLYLNQYRNRYISHEEATNKIYDDLYNLLKPRFLEVIGDWNPRGNVKTIIKVSSEDNKE

SEQ ID NO: 48308 - protein, 128 aa, Persephonella sp.
  misc_feature (1)..(128): tr|A0A432S166|A0A432S166_9AQUI NADPH-dependent 7-cyano- 7-deazaguanine reductase OS=Persephonella sp. OX=206092 2 GN=queF PE=3 SV=1
MEDKLKYGEKEILEAKLEPWENPYPDRNYYIDISFPEFTCLCPRSGYPDFATIKIKYIPDKYIVELKSLKLYLNQYRNKYISHEEATNKIYEDLYNLLKPRFLEVIGDWNPRGNVKTVIKVSSEDNKE

SEQ ID NO: 48309 - protein, 156 aa, Petrimonas mucosa
  misc_feature (1)..(156): tr|A0A1G4G7E4|A0A1G4G7E4_9PORP NADPH-dependent 7-cyano- 7-deazaguanine reductase OS=Petrimonas mucosa OX=164264 6 GN=queF PE=3 SV=1
MSQTENLSLLGKKTAYRQDYAPEVLEAFENKHQGNDYWVTFDCPEFTSLCPITGQPDFATIRIDYIPDVKMVESKSLKIYLFSFRNHGAFHEDCVNIIMKDLIGLMDPKYIEVTGIFTPRGGISIYPYANYGRPGTRYEKFAEQRLFNHSIPINRP

SEQ ID NO: 48310 - protein, 155 aa, Petrimonas sp.
  misc_feature (1)..(155): tr|A0A3G9E1S6|A0A3G9E1S6_9PORP NADPH-dependent 7-cyano- 7-deazaguanine reductase OS=Petrimonas sp. IBARAKI OX=1 978337 GN=queF PE=3 SV=1
MSQTENLSLLGKKTAYKQDYAPEVLEAFENKHQSNDYWVTFDCPEFTSLCPITGQPDFATIRIDYIPDVKMVESKSLKIYLFSFRNHGAFHEDCVNIIMKDLIGLMDPKYIEVTGVFTPRGGISIYPYVNYGRSGTRYERLAEERLFNHSFPLNT

SEQ ID NO: 48311 - protein, 154 aa, Phaeobacter gallaeciensis
  misc_feature (1)..(154): tr|V9WLP1|V9WLP1_9RHOB NADPH-dependent 7-cyano-7-deazag uanine reductase OS=Phaeobacter gallaeciensis DSM 26640 OX=1423144 GN=queF PE=3 SV=1
MTDDIYKDLKQLGGATVMPTSPEEAELERVPNPQADVAYNIRFTAPEFTSLCPMTGQPDFAHLVIDYVPGKWLVESKSLKLFLGSFRNHGAFHEDCTVSIARRLADFLEPQWLRIGGYWYPRGGIPIDVFWQTGPLPDAIWIPDQGVPPYRGRG

SEQ ID NO: 48312 - protein, 154 aa, Phaeobacter gallaeciensis
  misc_feature (1)..(154): tr|A0A1B0ZMZ4|A0A1B0ZMZ4_9RHOB NADPH-dependent 7-cyano- 7-deazaguanine reductase OS=Phaeobacter gallaeciensis O X=60890 GN=queF1,queF PE=3 SV=1
MTNDIYSNLKQLGGETRIPTSPEEAELERVPNPQADVDYNVRFTAPEFTSLCPMTGQPDFAHLVIDYVPGDWLVESKSLKLFLTSFRNHGAFHEDCTISIARRLVDFLDPRWLRIGGYWYPRGGIPIDVFWQTGPLPESVWIPDQGVPPYRGRG

SEQ ID NO: 48313 - protein, 154 aa, Phaeobacter inhibens
  misc_feature (1)..(154): tr|I7EJH1|I7EJH1_PHAIB NADPH-dependent 7-cyano-7-deazag uanine reductase OS=Phaeobacter inhibens (strain ATCC 7 00781 / DSM 17395 / CIP 105210 / JCM 21319 / NBRC 16654 / NCIMB 13546 / BS107) OX=391619 GN=queF PE=3 S
MTDDIYKNLKQLGGATVMPASPEEAELERVPNPQADVAYNIRFTAPEFTSLCPMTGQPDFAHLVIDYVPGKWLVESKSLKLFLGSFRNHGAFHEDCTVSIARRLADFLDPQWLRIGGYWYPRGGIPIDVFWQTGPLPEGVWIPDQGVPPYRGRG

SEQ ID NO: 48314 - protein, 154 aa, Phaeobacter inhibens
  misc_feature (1)..(154): tr|A0A135II56|A0A135II56_9RHOB NADPH-dependent 7-cyano- 7-deazaguanine reductase OS=Phaeobacter inhibens OX=221 822 GN=queF PE=3 SV=1
MTDDIYKDLKQLGGATVMPASPEEAELERVPNPQADVAYNIRFTAPEFTSLCPMTGQPDFAHLVIDYVPGKWLVESKSLKLFLGSFRNHGAFHEDCTVSIARRLADFLDPQWLRIGGYWYPRGGIPIDVFWQTGPLPEGVWIPDQGVPPYRGRG

SEQ ID NO: 48315 - protein, 154 aa, Phaeobacter italicus
  misc_feature (1)..(154): tr|A0A0H5DEV3|A0A0H5DEV3_9RHOB NADPH-dependent 7-cyano- 7-deazaguanine reductase OS=Phaeobacter italicus OX=481 446 GN=queF PE=3 SV=1
MSEDIYQNLKQLGGATVMPSSPEDAELERVENPQADVAYNVRFTAPEFTSLCPMTGQPDFAHLVIDYVPGKWLVESKSLKLFLGSFRNHGAFHEDCTVSIARRLADFLEPQWLRIGGYWYPRGGIPIDVFWQTGPLPDGVWIPDQGVPPYRGRG

SEQ ID NO: 48316 - protein, 154 aa, Phaeobacter piscinae
  misc_feature (1)..(154): tr|A0A0C2L4D3|A0A0C2L4D3_9RHOB NADPH-dependent 7-cyano- 7-deazaguanine reductase OS=Phaeobacter piscinae OX=158 0596 GN=queF PE=3 SV=1
MTDDIYKDLKQLGGATVMPTSPEDAELERVPNPQADVAYNIRFTAPEFTSLCPMTGQPDFAHLVIDYVPGKWLVESKSLKLFLGSFRNHGAFHEDCTVSIARRLADFLAPQWLRIGGYWYPRGGIPIDVFWQTGPLPEGVWIPDQGVPPYRGRG

SEQ ID NO: 48317 - protein, 154 aa, Phaeobacter piscinae
  misc_feature (1)..(154): tr|A0A291FWZ7|A0A291FWZ7_9RHOB NADPH-dependent 7-cyano- 7-deazaguanine reductase OS=Phaeobacter piscinae OX=158 0596 GN=queF PE=3 SV=1
MTDDIYKDLKQLGGATVMPASPEDAELERVPNPQADVAYNIRFTAPEFTSLCPMTGQPDFAHLVIDYVPGKWLVESKSLKLFLGSFRNHGAFHEDCTVSIARRLADFLEPQWLRIGGYWYPRGGIPIDVFWQTGPLPEGVWIPDQGVPPYRGRG

SEQ ID NO: 48318 - protein, 154 aa, Phaeobacter porticola
  misc_feature (1)..(154): tr|A0A1L3I7N2|A0A1L3I7N2_9RHOB NADPH-dependent 7-cyano- 7-deazaguanine reductase OS=Phaeobacter porticola OX=18 44006 GN=queF PE=3 SV=1
MSDDIYKNLKQLGGATVMPSNPDEAELERVPNPQADVAYNVRFTAPEFTSLCPMTGQPDFAHLVIDYVPGPWLVESKSLKLFLGSFRNHGAFHEDCTVSIARRLADFLDPQWLRIGGYWYPRGGIPIDVFWQTGPMPDGVWIPDQGVPPYRGRG

SEQ ID NO: 48319 - protein, 154 aa, Phaeobacter sp.; identical to SEQ ID NO: 48317
  misc_feature (1)..(154): tr|A0A384FVQ5|A0A384FVQ5_9RHOB NADPH-dependent 7-cyano- 7-deazaguanine reductase OS=Phaeobacter sp. S60 OX=1569 353 GN=queF PE=3 SV=1

SEQ ID NO: 48320 - protein, 154 aa, Phaeobacter sp.
  misc_feature (1)..(154): tr|A0A0P6R669|A0A0P6R669_9RHOB NADPH-dependent 7-cyano- 7-deazaguanine reductase OS=Phaeobacter sp. 11ANDIMAR09 OX=1225647 GN=queF PE=3 SV=1
MSEDIYSNLKQLGGETRVPTSPKEAELERVPNPQVDVAYNVRFTAPEFTSLCPMTGQPDFAHLVIDYVPGPWLIESKSLKLFLTSFRNHGAFHEDCTISIARRLAEFLAPQWLRIGGYWYPRGGIPIDVFWQTGPLPHDVWIPDQGVPPYRGRG

SEQ ID NO: 48321 - protein, 154 aa, Phaeospirillum fulvum
  misc_feature (1)..(154): tr|A0A1H6IJ60|A0A1H6IJ60_PHAFV NADPH-dependent 7-cyano- 7-deazaguanine reductase OS=Phaeospirillum fulvum OX=10 82 GN=queF PE=3 SV=1
MSGTIPPGLTQLGQATALPSDPAEAVLEVVPNPHPGSLYLVRFTAPEFTSLCPITGQPDFAHLVIDYAPDAALVESKSLKLFLGSFRNHGAFHEDCTLAIAKRVVAATAPTWLRIAGYWYPRGGIPIDVFWQTGPAPAGLWLPDPGVPSYRGRG

SEQ ID NO: 48322 - protein, 153 aa, Phaeospirillum fulvum
  misc_feature (1)..(153): tr|S9SBR4|S9SBR4_PHAFV NADPH-dependent 7-cyano-7-deazag uanine reductase OS=Phaeospirillum fulvum MGU-K5 OX=131 6936 GN=queF PE=3 SV=1
MSGTSPGLTQLGQATALPSDPAEAVLEVVPNPHPGSLYLVRFTAPEFTSLCPITGQPDFAHLVIDYAPDAALVESKSLKLFLGSFRNHGSFHEDCTLAIAKRVVAATAPTWLRIAGYWYPRGGIPIDVFWQTGPAPAGLWLPDPGVPSYRGRG

SEQ ID NO: 48323 - protein, 153 aa, Phaeospirillum molischianum
  misc_feature (1)..(153): tr|H8FQJ0|H8FQJ0_PHAMO NADPH-dependent 7-cyano-7-deazag uanine reductase OS=Phaeospirillum molischianum DSM 120 OX=1150626 GN=queF PE=3 SV=1
MSGAPPGLTQLGQATALPSDPAEAVLEVVPNPHPGSLYLVRFTAPEFTSLCPITGQPDFAHLVIDYAPDVALVESKSLKLFLGSFRNHGAFHEDCTLGIAKRLVAATAPTWLRIAGYWYPRGGIPIDVFWQTGPAPVGLWLPDPGVPTYRGRG

SEQ ID NO: 48324 - protein, 165 aa, Phascolarctobacterium faecium
  misc_feature (1)..(165): tr|A0A3G9GU56|A0A3G9GU56_9FIRM NADPH-dependent 7-cyano- 7-deazaguanine reductase OS=Phascolarctobacterium faeci um OX=33025 GN=queF PE=3 SV=1
MTSGRDQKELTGVSLLGNKTKYPTDYAPEVLEAFINKHPGNDYFVKFNCPEFTSLCPMTGQPDFAAIYISYVPDQKLVESKSLKLYLFSFRNHGDFHEDCVNIIMKDLIKLMEPKYIEVWGKFTPRGGLAIDPYANYGKPGTEWEAAAKKRLMMHDMYPENVSYR

SEQ ID NO: 48325 - protein, 165 aa, Phascolarctobacterium sp.
  misc_feature (1)..(165): tr|R6I4P2|R6I4P2_9FIRM NADPH-dependent 7-cyano-7-deazag uanine reductase OS=Phascolarctobacterium sp. CAG:207 O X=1262914 GN=queF PE=3 SV=1
MTSGRDQKELTGVSLLGNKTKYPTDYAPEVLEAFINKHPSNDYFVKFNCPEFTSLCPMTGQPDFAAIYISYVPDQKLVESKSLKLYLFSFRNHGDFHEDCVNIIMKDLIKLMEPKYIEVWGKFTPRGGLAIDPYANYGKPGTEWEAAAKKRLMMHDMYPENVSYR

SEQ ID NO: 48326 - protein, 166 aa, Phascolarctobacterium sp.
  misc_feature (1)..(166): tr|A0A316SAX6|A0A316SAX6_9FIRM NADPH-dependent 7-cyano- 7-deazaguanine reductase OS=Phascolarctobacterium sp. O X=2049039 GN=queF PE=3 SV=1
MTSGRTQEELKGVGLLGHKTDYPTDYAPQVLESFVNKHPGNDYFVKFNCPEFTSLCPMTGQPDFATIYISYVPDMKLVESKSLKLYLFSFRNHGDFHEDCVNIIMKDLIKLMEPKYIEVWGKFTPRGGLSIDPYANYGKPGTEWEEVARKRLHYHDMNPEIVNYRK

SEQ ID NO: 48327 - protein, 165 aa, Phascolarctobacterium succinatutens
  misc_feature (1)..(165): tr|R6WLL2|R6WLL2_9FIRM NADPH-dependent 7-cyano-7-deazag uanine reductase OS=Phascolarctobacterium succinatutens CAG:287 OX=1263101 GN=queF PE=3 SV=1
MTSGRSKEELQGVSLLGNKTAYKSDYAPEVLESFPNKHPQNDYWVKFNCPEFTSLCPMTGQPDFATIYISYVPDERLVESKSLKLYLFSFRNHGDFHEDCVNIIMKDLIKLMEPKYIEVWGKFLPRGGLSIDPYANYGKPGTEWEQAAKKRLFMHDMYPETVNNR

SEQ ID NO: 48328 - protein, 165 aa, Phascolarctobacterium succinatutens; identical to SEQ ID NO: 48327
  misc_feature (1)..(165): tr|A0A1Q6R1P6|A0A1Q6R1P6_9FIRM NADPH-dependent 7-cyano- 7-deazaguanine reductase OS=Phascolarctobacterium succi natutens OX=626940 GN=queF PE=3 SV=1

SEQ ID NO: 48329 - protein, 151 aa, Phenylobacterium deserti
  misc_feature (1)..(151): tr|A0A328AD97|A0A328AD97_9CAUL NADPH-dependent 7-cyano- 7-deazaguanine reductase OS=Phenylobacterium deserti OX =1914756 GN=queF PE=3 SV=1
MEETHLTQLGRDVRGFASPEEAVLERVPNPHADSLYLTRFTAPEFTSLCPVTGQPDFAHLVIDYAPADWLVESKSLKLYLTSFRNHGAFHEDCTVAIGRRLVAELEPRWLRIGGYWYPRGGIPIDVFWQTGAPPEGLWLPDQGVPSYRGRG

SEQ ID NO: 48330 - protein, 151 aa, Phenylobacterium hankyongense
  misc_feature (1)..(151): tr|A0A328B0C2|A0A328B0C2_9CAUL NADPH-dependent 7-cyano- 7-deazaguanine reductase OS=Phenylobacterium hankyongen se OX=1813876 GN=queF PE=3 SV=1
MEETHLTQLGRDARGFASPDEAVLERVPNPHPDALYLARFTVPEFTSLCPVTGQPDFAHLVIDYAPAEWLVESKSLKLYLGSFRNHGAFHEDCTVAIGLRLVAELAPRWLRIGGYWFPRGGIPIDVFWQSGAVPDGLWLPDQGVAPYRGRG

SEQ ID NO: 48331 - protein, 151 aa, Phenylobacterium kunshanense
  misc_feature (1)..(151): tr|A0A328BHH9|A0A328BHH9_9CAUL NADPH-dependent 7-cyano- 7-deazaguanine reductase OS=Phenylobacterium kunshanens e OX=1445034 GN=queF PE=3 SV=1
MEDTQLTQLGRDVRGFDSPEAAILECVPNPHPGTTYLVRFTAPEFTSLCPVTGQPDFAHLVIDYVPGEWLVESKSLKLYLGAFRNHGAFHEDCTLAIAKRLVETLSPPWLRIGGYWYPRGGIPIDVFWQTGAAPEGLWLPDQGVAPYRGRG

SEQ ID NO: 48332 - protein, 151 aa, Phenylobacterium sp.
  misc_feature (1)..(151): tr|A0A525JP11|A0A525JP11_9CAUL NADPH-dependent 7-cyano- 7-deazaguanine reductase OS=Phenylobacterium sp. OX=187 1053 GN=queF PE=3 SV=1
MDDTHLTQLGREVRGFASPDAAVLERVPNPQADTLYLARFTAPEFTSLCPVTGQPDFAHLVIDYAPGDWLIESKSLKLYLASFRSHGAFHEDCTVAIGRRIVATAEPRWLRIGGYWFPRGGIPIDVFWQSGPAPEGLWLPDQGVAPYRGRG

SEQ ID NO: 48333 - protein, 151 aa, Phenylobacterium sp.
  misc_feature (1)..(151): tr|A0A0Q8M0D7|A0A0Q8M0D7_9CAUL NADPH-dependent 7-cyano- 7-deazaguanine reductase OS=Phenylobacterium sp. Root70 0 OX=1736591 GN=queF PE=3 SV=1
MDEMHLTQLGRDVRGFDSPETAVLERVPNPQSDTLYLARFTAPEFTSLCPVTGQPDFAHLVIDYAPGDWLIESKSLKLYLGSFRNHGAFHEDCTVAIGRKIVEIAAPRWLRIGGYWFPRGGIPIDVFWQSGPAPQGLWVPDQGVATYRGRG

SEQ ID NO: 48334 - protein, 151 aa, Phenylobacterium zucineum
  misc_feature (1)..(151): tr|A0A227JMB4|A0A227JMB4_9CAUL NADPH-dependent 7-cyano- 7-deazaguanine reductase OS=Phenylobacterium zucineum O X=284016 GN=queF PE=3 SV=1
MTDTHLTQLGQTVPGFAGPEEAVLERVPNPQRDALYLARFTAPEFTSLCPVTGQPDFATLMIDYAPGDWLIESKSLKLYLGSFRNHGAFHEDCTVAIGRKIVEIAQPKWLRIGGYWYPRGGIPIDVFWQTGPAPHGLWLPDQGMPPYRGRG

SEQ ID NO: 48335 - protein, 151 aa, Phenylobacterium zucineum
  misc_feature (1)..(151): tr|B4RF68|B4RF68_PHEZH NADPH-dependent 7-cyano-7-deazag uanine reductase OS=Phenylobacterium zucineum (strain H LK1) OX=450851 GN=queF PE=3 SV=1
MEETHLSQLGRDVRGFDSPEAAVVERVPNPHKGETYLVRFTAPEFTSLCPVTGQPDFAHLVIDYVPGEWLVESKSLKLYLASFRNHGAFHEDCTVAIGKRLVAELAPQWLRIGGYWYPRGGIPIDVFWQTGPAPEGLWLPDQGVAPYRGRG

SEQ ID NO: 48336 - protein, 163 aa, Phorcysia thermohydrogeniphila
  misc_feature (1)..(163): tr|A0A4R1G5W1|A0A4R1G5W1_9BACT NADPH-dependent 7-cyano- 7-deazaguanine reductase OS=Phorcysia thermohydrogeniph ila OX=936138 GN=queF PE=3 SV=1
MERKDFGTVSKLGKKTDYVFDYSPDVLEKFPNKFPNRIYWVSFNCPEFTTLCPITGQPDFATIYIQYIPDKWLVESKSLKLYLFSFRNARGFHEDTVNVIADDLFKLLNPFYLEVYGEFNPRGGISIDPFVQRYQEVDWVVELARERFKLHRIVPPEIRRNRG

SEQ ID NO: 48337 - protein, 138 aa, Phormidesmis priestleyi
  misc_feature (1)..(138): tr|A0A2T1DCP6|A0A2T1DCP6_9CYAN NADPH-dependent 7-cyano- 7-deazaguanine reductase OS=Phormidesmis priestleyi ULC 007 OX=1920490 GN=queF PE=3 SV=1
MTHPQTQETSSAPGVKYGERIIEEGGLITFPNPRPGRRYTIAITLPEFTCKCPFSGYPDFGTIYVTYVPDQRVVELKAIKLYINSYRDRYISHEESANQILDDLVAACDPLEINVRADYTPRGNVHTVVEVNHKKGEA

SEQ ID NO: 48338 - protein, 148 aa, Phormidesmis priestleyi
  misc_feature (1)..(148): tr|A0A0P7ZS41|A0A0P7ZS41_9CYAN NADPH-dependent 7-cyano- 7-deazaguanine reductase OS=Phormidesmis priestleyi Ana OX=1666911 GN=queF1 PE=3 SV=1
MTKGSITTQDIATTTSSEAVLYGERAIQEGRLITFPNPRIGREYTIRITLPEFTCKCPFSGYPDFATIYIDYVPNQKVVELKAIKLYINSYRDRNISHEESVNLIMDDFVAACDPLSVNIKGDFLPRGNVHTVIEVSHQKDIASVRLE

SEQ ID NO: 48339 - protein, 123 aa, Phormidium ambiguum
  misc_feature (1)..(123): tr|A0A1U7IEA7|A0A1U7IEA7_9CYAN NADPH-dependent 7-cyano- 7-deazaguanine reductase OS=Phormidium ambiguum IAM M-7 1 OX=454136 GN=queF PE=3 SV=1
MKYGERLIAEGQLITFPNPRIGRRYDVNISLPEFTCKCPFSGYPDFATIYISYVPNEKVVELKSLKLYINSFRDRYISHEESINQILDDFVAACDPLEATVKGDFAPRGNVHTVIEVSHQRNS

SEQ ID NO: 48340 - protein, 144 aa, Phormidium sp.
  misc_feature (1)..(144): tr|A0A522XJM6|A0A522XJM6_9CYAN NADPH-dependent 7-cyano- 7-deazaguanine reductase OS=Phormidium sp. SL48-SHIP OX =2518363 GN=queF PE=3 SV=1
MHDSQRPPNPTNPPDASAMKYGEREIQDGQLITFPNPRPGRRYEIRISLPEFTCKCPFSGYPDFATIHLVYCPDETVVELKALKLYINRYRDRYISHEESANQILDDFVAACDPLEVTLRADFLPRGNVHTEIEIRHVKGESRT

SEQ ID NO: 48341 - protein, 126 aa, Phormidium sp.
  misc_feature (1)..(126): tr|A0A0N8KPH0|A0A0N8KPH0_9CYAN NADPH-dependent 7-cyano- 7-deazaguanine reductase OS=Phormidium sp. OSCR OX=1666 905 GN=queF1 PE=3 SV=1
MKYGEREIQEGELITFPNPRPGRRYEIRISLPEFTCKCPFSGYPDFATIHLVYVPDETVVELKALKLYINSYRDRYISHEESANQILDDFVAACDPLEVNLRADFLPRGNVHTEIEIRHVKGESGT

SEQ ID NO: 48342 - protein, 143 aa, Phormidium tenue
  misc_feature (1)..(143): tr|A0A1U7J9R4|A0A1U7J9R4_9CYAN NADPH-dependent 7-cyano- 7-deazaguanine reductase OS=Phormidium tenue NIES-30 OX =549789 GN=queF PE=3 SV=1
MTIASASASQYGDRAILQTSVDPLEKWPNPSENVYTIHLEHPEFTALCPRSGYPDFGTIVVDYCPGPWVVELKAFKLYINSFRDQRISHENVANQIADRLWNELQPQGLRVIGDYTRRGGVKTVITVKKGSCKEFEPYTPNVL

SEQ ID NO: 48343 - protein, 144 aa, Phormidium willei
  misc_feature (1)..(144): tr|A0A168U8B8|A0A168U8B8_9CYAN NADPH-dependent 7-cyano- 7-deazaguanine reductase OS=Phormidium willei BDU 13079 1 OX=399101 GN=queF PE=3 SV=1
MHDSQRPPNPTNSPEASSMKYGEREIQEGELITFPNPRPGRRYEIRVSLPEFTCKCPFSGYPDFATIHLVYVPDETVVELKALKLYINSYRDRYISHEESANQILDDFVAACDPLEVNLRADFLPRGNVHTEIEIHHVKGESGT

SEQ ID NO: 48344 - protein, 282 aa, Photobacterium angustum
  misc_feature (1)..(282): tr|Q1ZLJ2|Q1ZLJ2_PHOAS NADPH-dependent 7-cyano-7-deazag uanine reductase OS=Photobacterium angustum (strain S14 / CCUG 15956) OX=314292 GN=queF PE=3 SV=1
MSKYKDAKELAGLTLGKTTEYKDQYDPSLLQAVPRSLNRTDLNISDDELPFTGYDIWTLYELSWLNSKGLPQVAIGEVRLPASSPNLIESKSFKLYLNSFNQTRFESWQGIADTLQIDLSRCAGADVDVTIQPLEDFSEQPIVNFFGACIDDQDIEINDYGFNPALLENGVDEEEVEEILHSHLLKSNCLITSQPDWGSVRIAYKGKRINREKLLRYIISFRNHNEFHEQCVERIFSDIMKYCKPELLTVYARYTRRGGLDINPYRTNMGKSPSDNFRLARQ

SEQ ID NO: 48345 - protein, 282 aa, Photobacterium angustum
  misc_feature (1)..(282): tr|A0A2T3LV40|A0A2T3LV40_PHOAN NADPH-dependent 7-cyano- 7-deazaguanine reductase OS=Photobacterium angustum OX= 661 GN=queF PE=3 SV=1
MSKYKDAKELAGLTLGQTTEYKDQYDPSLLQAVPRSLNRTDLNISDDALPFTGYDIWTLYELSWLNSKGLPQVAIGEVRLPASSPNLIESKSFKLYLNSFNQTRFESWQGIADTLQIDLSRCAGADVDVTIQPLEDFSEQPIVNFFGACIDDQDIEIEDYCFNPALLENSVEEEEVEEILHSHLLKSNCLITSQPDWGSVRIAYKGKRINREKLLRYIISFRNHNEFHEQCVERIFSDIMKYCKPELLTVYARYTRRGGLDINPYRTNMGKSPSDNFRLARQ

SEQ ID NO: 48346 - protein, 129 aa, Photobacterium aphoticum
  misc_feature (1)..(129): tr|A0A090RJH0|A0A090RJH0_9GAMM NADPH dependent preQ0 re ductase OS=Photobacterium aphoticum OX=754436 GN=JCM192 37_900 PE=4 SV=1
MTEELNSHLLKSNCLITSQPDWGSVRISYTGKQIDREKLLRYIVSFRNHNEFHEQCVERIFTDIMKYCQPELLTVYARYTRRGGLDINPYRTNMAKRQAITSAWLANKCQDDDKSSKSADFAGLDWLTH

SEQ ID NO: 48347 - protein, 175 aa, Photobacterium aphoticum
  misc_feature (1)..(175): tr|A0A090QXP8|A0A090QXP8_9GAMM NADPH dependent preQ0 re ductase OS=Photobacterium aphoticum OX=754436 GN=JCM192 37_899 PE=4 SV=1
MSKYQDAKELAGLTLGKTTEYKDQYDPSLLQPVPRSLNRDDLALGDTLPFTGYDIWTLYELSWLNGKGLPQVAIGEVRLPASSPNLIESKSFKLYLNSFNQTQFDSWQQVADLLQKDLSHCAGADVDVTIQPLSDFTGEEIVNFSGECIDDQDIEITDYGFNQRTWKARQSTAST

SEQ ID NO: 48348 - protein, 281 aa, Photobacterium aquae
  misc_feature (1)..(281): tr|A0A0J1GPD6|A0A0J1GPD6_9GAMM NADPH-dependent 7-cyano- 7-deazaguanine reductase OS=Photobacterium aquae OX=119 5763 GN=queF PE=3 SV=1
MSKYKDAKELAGLTLGKTTEYKDQYDPSLLQPVPRSLNRDDLALGDSLPFTGYDIWTLYELSWLNGKGLPQVAIGEVRLPANSPNLIESKSFKLYLNSFNQTRFDNWQQVADQLQKDLSQCAGADVDVTIQPLSDFTNEEVVAFSGTCIDEQDIEISDYAFNPDHLEGAADGEIVTEELNSNLLKSNCLITSQPDWGSVRISYTGKQINREKLLRYIVSFRNHNEFHEQCVERIFTDIMKYCQPELLTVYARYTRRGGLDINPYRTNMGKTPSNNSRMARQ

SEQ ID NO: 48349 - protein, 283 aa, Photobacterium aquimaris
  misc_feature (1)..(283): tr|A0A2T3IGB7|A0A2T3IGB7_9GAMM NADPH-dependent 7-cyano- 7-deazaguanine reductase OS=Photobacterium aquimaris OX =512643 GN=queF PE=3 SV=1
MSKYKDAKELAGLTLGQKTEYKDQYDPSLLQPVPRSLNRTDINISDDALPFTGYDIWTLYELSWLNKKGLPQVAIGEVRLPASSPNLIESKSFKLYLNSFNQTRFDGWQAIADTLQIDLSRCAGEDVDVTIQPLTDFNDQPIVNFFGECIDDQDIEINDYTFKPEYLEGAANNDDIVEEIVHSHLLKSNCLITNQPDWGSVRIAYKGNRIDREQLLRYIVSFRNHNEFHEQCVERIFNDIMRFCQPELLTVYARYTRRGGLDINPYRTNMGKTPSDNFRLARQ

SEQ ID NO: 48350 - protein, 283 aa, Photobacterium aquimaris
  misc_feature (1)..(283): tr|A0A1B8I2Q1|A0A1B8I2Q1_9GAMM NADPH-dependent 7-cyano- 7-deazaguanine reductase OS=Photobacterium aquimaris OX =512643 GN=queF PE=3 SV=1
MSKYKDAKELAGLTLGQKTEYKDQYDPSLLQPVPRSLNRTDINISDDALPFTGYDIWTLYELSWLNKKGLPQVAIGEVRLPASSPNLIESKSFKLYLNSFNQTRFDGWQAIADTLQIDLSRCAGEDVDVTIQPLTDFNDQPIVNFFGECIDDQDIEINDYTFKPEYLEGAADNNDIVEEIVHSHLLKSNCLITNQPDWGSVRIAYKGNRIDREQLLRYIVSFRNHNEFHEQCVERIFNDIMRFCQPELLTVYARYTRRGGLDINPYRTNMGKTPSDNFRLARQ

SEQ ID NO: 48351 - protein, 283 aa, Photobacterium carnosum
  misc_feature (1)..(283): tr|A0A2N4UPH6|A0A2N4UPH6_9GAMM NADPH-dependent 7-cyano- 7-deazaguanine reductase OS=Photobacterium carnosum OX= 2023717 GN=queF PE=3 SV=1
MSKYKDAKELAGLTLGKKTEYKDQYDPSLLQPVPRSLNRTDINISNDALPFTGYDIWTLYELSWLNNKGLPQVAIGEVRLPVTSPNLIESKSFKLYLNSFNQTRFDNWQDIADTLQIDLSRCAGEDVDVTIQPLTDFNEQPIVNFFGECIDDQDIEIKDYVFKPEYLEGAADNNDIVEEIVHSHLLKSNCLITNQPDWGSVRIAYKGNRIDREKLLRYIVSFRNHNEFHEQCVERIFNDIMRFCQPELLTVYARYTRRGGLDINPYRTNMGKTPSDNFRLARQ

SEQ ID NO: 48352 - protein, 282 aa, Photobacterium damsela
  misc_feature (1)..(282): tr|A0A1Q9H3A3|A0A1Q9H3A3_PHODP NADPH-dependent 7-cyano- 7-deazaguanine reductase OS=Photobacterium damsela subs p. piscicida OX=38294 GN=queF PE=3 SV=1
MSKYQGAEELAGLTLGQKTEYKDQYDPSLLQPVPRSLNRDDLHITDDNLPFTGYDIWTLYELSWLNSKGLPQVAIGEVRLPASSPNLIESKSFKLYLNSLNQTRFASWQKVADVLQIDLSACAGQDVDVTIQPLSDFTEEQIVAFSGHNIDDQDIEIDDYQFNPAYLEDAIDDEIVTEELNSNLLKSNCLITSQPDWGSVRISYKGKRINREKLLRYIISFRNHNEFHEQCVERIFTDIMKYCQPELLTVYARYTRRGGLDINPYRTNQGKTPSNNFRMARQ

SEQ ID NO: 48353 - protein, 282 aa, Photobacterium damsela
  misc_feature (1)..(282): tr|A0A1V1V5B6|A0A1V1V5B6_PHODP NADPH-dependent 7-cyano- 7-deazaguanine reductase OS=Photobacterium damsela subs p. piscicida OX=38294 GN=queF PE=3 SV=1
MSKYQGAEELAGLTLGQKTEYKDQYDPSLLQPVPRSLNRDDLHITDDNLPFTGYDIWTLYELSWLNSKGLPQVAIGEVRLPASSPNLIESKSFKLYLNSLNQTRFASWQEVADVLQIDLSACAGQDVDVTIQPLSDFTEEQIVAFSGHNIDDQDIEIDDYQFNPAYLEDAIDDEIVTEELNSNLLKSNCLITSQPDWGSVRISYKGKRINREKLLRYIISFRNHNEFHEQCVERIFTDIMKYCQPELLTVYARYTRRGGLDINPYRTNQGKTPSNNFRMARQ

SEQ ID NO: 48354 - protein, 282 aa, Photobacterium damselae
  misc_feature (1)..(282): tr|D0YW65|D0YW65_PHODD NADPH-dependent 7-cyano-7-deazag uanine reductase OS=Photobacterium damselae subsp. dams elae CIP 102761 OX=675817 GN=queF PE=3 SV=1
MSKYQGAKELAGLTLGQKTEYKDQYDPSLLQPVPRSLNRNDLHITDDNLPFTGYDIWTLYELSWLNSKGLPQVAIGEVRLPASSPNLIESKSFKLYLNSLNQTRFASWQEVADVLQIDLSACAGQDVDVTIQPLSDFTEEQIVAFTGHNIDDQDIEIDDYQFNPAYLEDAIDDEIVTEELNSNLLKSNCLITSQPDWGSVRISYKGKRINREKLLRYIISFRNHNEFHEQCVERIFTDIMKYCQPELLTVYARYTRRGGLDINPYRTNQGKTPSNNFRMARQ

SEQ ID NO: 48355 - protein, 282 aa, Photobacterium damselae; identical to SEQ ID NO: 48354
  misc_feature (1)..(282): tr|A0A2T3QIB2|A0A2T3QIB2_9GAMM NADPH-dependent 7-cyano- 7-deazaguanine reductase OS=Photobacterium damselae OX= 38293 GN=queF PE=3 SV=1

SEQ ID NO: 48356 - protein, 281 aa, Photobacterium frigidiphilum
  misc_feature (1)..(281): tr|A0A2T3JA28|A0A2T3JA28_9GAMM NADPH-dependent 7-cyano- 7-deazaguanine reductase OS=Photobacterium frigidiphilu m OX=264736 GN=queF PE=3 SV=1
MSKYKDAKELAGLTLGQKTDYIDQYDASLLQPVPRSLNRSDLNLGESLPFTGYDIWTLYELSWLNSKGLPQVAIGEVRLPASSPNLIESKSFKLYLNSFNQTRYDSWQQIADTLQKDLTACAGQEVDVTIQPLEDFTDQTVINFAGNCIDDQDIEINNYDFDAQYLKDAAEGEIVTEDLHSHLLKSNCLITNQPDWGSVKISYKGKQINHEKLLRYLVSFRNHNEFHEQCVERIFTDIMKFCQPELLTVYARYTRRGGLDINPYRTNQGKTPSDNFRLARQ

SEQ ID NO: 48357 - protein, 281 aa, Photobacterium gaetbulicola
  misc_feature (1)..(281): tr|A0A0B9H7S5|A0A0B9H7S5_9GAMM NADPH-dependent 7-cyano- 7-deazaguanine reductase OS=Photobacterium gaetbulicola OX=1295392 GN=queF PE=3 SV=1
MSKYQDAKELAGLTLGKTTEYKDHYDPSLLQPVPRSLNRDDLSLGDDLPFTGYDIWTLYELSWLNKKGLPQVAIGEVRLPANSPNLIESKSFKLYLNSFNQTKFDSWQQIADTLQKDLSECAGADVDVTVQPLSDFDDQPIANFFGECIDDQDIEITDYEFDPSHLEGAASEETVTEILHSHLLKSNCLITSQPDWGSVRISYTGKKIDREKLLRYLISFRDHNEFHEQCVERIFTDIMKYCKPELLTVYARYTRRGGLDINPYRTNMGKTPSDNFRLARQ

SEQ ID NO: 48358 - protein, 281 aa, Photobacterium gaetbulicola
  misc_feature (1)..(281): tr|A0A0C5WMR4|A0A0C5WMR4_9GAMM NADPH-dependent 7-cyano- 7-deazaguanine reductase OS=Photobacterium gaetbulicola Gung47 OX=658445 GN=queF PE=3 SV=1
MSKYQDAKELAGLTLGKTTEYKDQYDPSLLQPVPRSLNRDDLSLGDDLPFTGYDIWTLYELSWLNKKGLPQVAIGEVRLPANSPNLIESKSFKLYLNSFNQTKFDNWQQIADTLQKDLTQCAGADVDVTVQPLSDFDNQPIANFFGECIDDQDIEITDYEFDPSHLEGAASEETVTEILHSHLLKSNCLITSQPDWGSVRISYTGKKIDREKLLRYLISFRDHNEFHEQCVERIFTDIMKYCKPELLTVYARYTRRGGLDINPYRTNMGKTPSDNFRLARQ

SEQ ID NO: 48359 - protein, 281 aa, Photobacterium galatheae
  misc_feature (1)..(281): tr|A0A066RIR5|A0A066RIR5_9GAMM NADPH-dependent 7-cyano- 7-deazaguanine reductase OS=Photobacterium galatheae OX =1654360 GN=queF PE=3 SV=1
MSKYKDAKELAGLTLGQKSEYKDQYDPSLLQAVPRKLNRDDLALGDELPFTGYDIWTLYELSWLNNKGLPQVAIGEVRLPASSPNLIESKSFKLYLNSLNNTRIESWQEVADILQKDLSACAGADVDVTIQPLSDFTAQPIVDFGGTCIDEQDIEIDSFDFDPSLLENAAEGEVIEEVLHSHLLKSNCLITSQPDWGSVRISYKGKQINREKLLRYLVSFRNHNEFHEQCVERIFTDLLHFCQPELLTVYARYTRRGGLDINPYRTNQGKTPSDNDRLARQ

SEQ ID NO: 48360 - protein, 281 aa, Photobacterium ganghwense
  misc_feature (1)..(281): tr|A0A0J1HJI9|A0A0J1HJI9_9GAMM NADPH-dependent 7-cyano- 7-deazaguanine reductase OS=Photobacterium ganghwense O X=320778 GN=queF PE=3 SV=1
MSKYQDAKELAGLTLGKTTEYKDQYDPSLLQPVPRSLNRDDLALGDSLPFTGYDIWTLYELSWLNSKGLPQVAIGEVRLPASSPNLIESKSFKLYLNSFNQTRFESWQRVADQLQQDLSNCAGADVDVTIQPLTDFDDQQIVNFSGQCIDEQDIEIDSFDFNPAYLEGAAEGEIVTEELHSHLLKSNCLITSQPDWGSVRISYKGKQINREKLLRYIVSFRNHNEFHEQCVERIFTDIMKYCQPELLTVYARYTRRGGLDINPYRTNMGKTPSDNFRMARQ

SEQ ID NO: 48361 - protein, 281 aa, Photobacterium halotolerans
  misc_feature (1)..(281): tr|A0A0F5V8S9|A0A0F5V8S9_9GAMM NADPH-dependent 7-cyano- 7-deazaguanine reductase OS=Photobacterium halotolerans OX=265726 GN=queF PE=3 SV=1
MSKYKDAKELAGLTLGQKSEYKDQYDPTLLQAVPRKLNRDDLALTDDLPFTGYDIWTLYELSWLNSKGLPQVAIGEVRLPASSPNLIESKSFKLYLNSLNNTRFDSWQEVADILQKDLSACAGMDVDVTIQPLSDFTDQPIVDFSGDCIDDQDIEIASFDFDPDLLMNAASGEVVEETLHSHLLKSNCLITSQPDWGSVRIAYKGKQIDREKLLRYLVSFRNHNEFHEQCVERIFTDLMRFCQPERLTVYARYTRRGGLDINPYRTNQGKTPSNNDRLARQ

SEQ ID NO: 48362 - protein, 283 aa, Photobacterium iliopiscarium
  misc_feature (1)..(283): tr|A0A2T3MIV6|A0A2T3MIV6_9GAMM NADPH-dependent 7-cyano- 7-deazaguanine reductase OS=Photobacterium iliopiscariu m OX=56192 GN=queF PE=3 SV=1
MSKYKDAKELAGLTLGKKTEYKDQYDPSLLQPVPRSLNRTDINISDDALPFTGYDIWTLYELSWLNNKGLPQVAIGEVRLPVTSPNLIESKSFKLYLNSFNQTRFDSWQDIADTLQIDLSRCAGEDVDVTIQPLTDFNEQPIVNFFGECIDDQDIEINDYAFKPEYLEGAADNNDVVEEIVHSHLLKSNCLITNQPDWGSVRIAYKGNRIDREKLLRYIVSFRNHNEFHEQCVERIFNDIIRFCQPELLTVYARYTRRGGLDINPYRTNMGKTPSDNFRLARQ

SEQ ID NO: 48363 - protein, 281 aa, Photobacterium indicum
  misc_feature (1)..(281): tr|A0A2T3L1N2|A0A2T3L1N2_9GAMM NADPH-dependent 7-cyano- 7-deazaguanine reductase OS=Photobacterium indicum OX=8 1447 GN=queF PE=3 SV=1
MSKYKDAKELAGLTLGQKTDYIDQYDASLLQPVPRSLNRSDLNLGESLPFTGYDIWTLYELSWLNSKGLPQVAIGEVRLPASSPNLIESKSFKLYINSFNQTRFDSWQQIADTLQKDLTACAGQEVDVTIQPLEDFTDQTVINFAGNCIDEQDIEINSYDFDAQYLKDAAEGEIVTEDLHSHLLKSNCLITNQPDWGSVKISYKGKQINREKLLRYLVSFRNHNEFHEQCVERIFTDIMKFCQPELLTVYARYTRRGGLDINPYRTNQGKTPSDNFRLARQ

SEQ ID NO: 48364 - protein, 281 aa, Photobacterium jeanii
  misc_feature (1)..(281): tr|A0A178KA75|A0A178KA75_9GAMM NADPH-dependent 7-cyano- 7-deazaguanine reductase OS=Photobacterium jeanii OX=85 8640 GN=queF PE=3 SV=1
MSKYKDASELAGLTLGQKTEYASQYAPSLLQAVPRSLNRDDLALGDDLPFTGYDIWTLYELSWLNNKGLPQVAVGEVRLPANSPNLIESKSFKLYLNSFNQTRFASWQEVVETLHKDLTACAGAEVDVTIQPVTDFTGEEIVNFDGTCIDDQDIEITDYDFDANHLEGAADGEVVTEELHSHLLKSNCLITNQPDWGSVRISYKGKQLNREKLLRYLVSFRNHNEFHEQCVERIFTDIMKFCQPELLTVYARYTRRGGLDINPYRTNQGKTPSNNFRLARQ

SEQ ID NO: 48365 - protein, 283 aa, Photobacterium kishitanii
  misc_feature (1)..(283): tr|A0A2T3QSP9|A0A2T3QSP9_9GAMM NADPH-dependent 7-cyano- 7-deazaguanine reductase OS=Photobacterium kishitanii O X=318456 GN=queF PE=3 SV=1
MSKYKDAKELAGLTLGQKTEYKDQYDPSLLQPVPRSLNRTDLNISDDALPFTGYDIWTLYELSWLNKKGLPQVAIGEVRLPASSPNLIESKSFKLYLNSFNQTRFDGWQDIADTLQIDLSRCAGADVDVTIQPLTDFNEQQIVNFFGECIDDQDIEINDYTFKPEYLEGAADNNDIVEEIVHSHLLKSNCLITNQPDWGSVRIAYKGNRIDREQLLRYIVSFRNHNEFHEQCVERIFNDIMRFCQPELLTVYARYTRRGGLDINPYRTNMGKTPSDNFRLARQ

SEQ ID NO: 48366 - protein, 283 aa, Photobacterium kishitanii
  misc_feature (1)..(283): tr|A0A2T3KDZ9|A0A2T3KDZ9_9GAMM NADPH-dependent 7-cyano- 7-deazaguanine reductase OS=Photobacterium kishitanii O X=318456 GN=queF PE=3 SV=1
MSKYKDAKELAGLTLGQKTEYKDQYDPSLLQPVPRSLNRTDLNISDDALPFTGYDIWTLYELSWLNKKGLPQVAIGEVRLPASSPNLIESKSFKLYLNSFNQTRFDGWQDIADTLQIDLSRCAGAEVDVTIQPLTDFNEQQIVNFFGECIDDQDIEINDYTFKPEYLEGAADNNDIVEEIVHSHLLKSNCLITNQPDWGSVRIAYKGNRIDREQLLRYIVSFRNHNEFHEQCVERIFNDIMRFCQPELLTVYARYTRRGGLDINPYRTNMGKTPSDNFRLARQ

SEQ ID NO: 48367 - protein, 282 aa, Photobacterium leiognathi
  misc_feature (1)..(282): tr|A0A0U1P848|A0A0U1P848_PHOLE NADPH-dependent 7-cyano- 7-deazaguanine reductase OS=Photobacterium leiognathi l rivu.4.1 OX=1248232 GN=queF PE=3 SV=1
MSKYKDAKELAGLTLGKTTEYKDQYDPSLLQAVPRSLNRTDLNISDDALPFTGYDIWTLYELSWLNSKGLPQVAIGEVRLPASSPNLIESKSFKLYLNSFNQTRFESWQDIADTLQIDLSRCAGANVDVTIQPLEDFSEQPIVNFFGACIDDQDIEIDDYSFNPALLEGGVEDDEVEEILHSHLLKSNCLITSQPDWGSVRIAYKGKRINREKLLRYIISFRNHNEFHEQCVERIFSDIMKYCKPELLTVYARYTRRGGLDINPYRTNMGKSPSDNFRLARQ

SEQ ID NO: 48368 - protein, 282 aa, Photobacterium leiognathi
  misc_feature (1)..(282): tr|A0A2G4WN65|A0A2G4WN65_PHOLE NADPH-dependent 7-cyano- 7-deazaguanine reductase OS=Photobacterium leiognathi O X=553611 GN=queF PE=3 SV=1
MSKYKDAKELAGLTLGKTTEYKDQYDPSLLQAVPRSLNRTDLNISDDALPFTGYDIWTLYELSWLNSKGLPQVAIGEVRLPASSPNLIESKSFKLYLNSFNQTRFESWQDIADTLQIDLSRCAGANVDVTIQPLEDFSEQPIVNFFGACIDDQDIEIDDYSFNPALLEGGVEDEEVEEILHSHLLKSNCLITSQPDWGSVRIAYKGKRINREKLLRYIISFRNHNEFHEQCVERIFSDIMKYCKPELLTVYARYTRRGGLDINPYRTNMGKSPSDNFRLARQ

SEQ ID NO: 48369 - protein, 281 aa, Photobacterium lipolyticum
  misc_feature (1)..(281): tr|A0A2T3MT13|A0A2T3MT13_9GAMM NADPH-dependent 7-cyano- 7-deazaguanine reductase OS=Photobacterium lipolyticum OX=266810 GN=queF PE=3 SV=1
MSKYQDAKELAGLTLGQGTEYKDQYDPSLLQPVPRSLNRDDLALGETLPFTGYDIWTLYELSWLNSKGLPQVAIGEVRLPASSPNLIESKSFKLYLNSFNQTKFASWQKVADVLQKDLTQCAGEDVDVTIQPLADFDDQPIVNFSGECIDDQDIEITDYEFDASYLEGAAEEVVVTEELNSHLLKSNCLITSQPDWGSVKISYKGKRINREKLLRYLVSFRNHNEFHEQCVERIFTDIMKFCQPELLTVYARYTRRGGLDINPYRTNQGKTPSNNFRLARQ

SEQ ID NO: 48370 - protein, 281 aa, Photobacterium lutimaris
  misc_feature (1)..(281): tr|A0A2T3IKJ5|A0A2T3IKJ5_9GAMM NADPH-dependent 7-cyano- 7-deazaguanine reductase OS=Photobacterium lutimaris OX =388278 GN=queF PE=3 SV=1
MSKYQDAKELAGLTLGQGTEYKDQYDASLLQPVPRSLNRDDLALGETLPFTGYDIWTLYELSWLNSKGLPQVAIGEVRLPATSPNLIESKSFKLYLNSFNQTKFTSWQEVADILQKDLTQCAGEDVDVTIQPISDFNDQPIANFFGECIDDQDIEITDYEFDSSYLEGAASEENVTEILHSHLLKSNCLITSQPDWGSVRISYTGKKIDREKLLRYLISFRNHNEFHEQCVERIFTDIMKYCKPELLTVYARYTRRGGLDINPYRTNMGKTPSDNFRLARQ

SEQ ID NO: 48371 - protein, 281 aa, Photobacterium marinum
  misc_feature (1)..(281): tr|L8J6X4|L8J6X4_9GAMM NADPH-dependent 7-cyano-7-deazag uanine reductase OS=Photobacterium marinum OX=1056511 G N=queF PE=3 SV=1
MSKYKDAKELAGLTLGKNTEYKDQYDPSLLQPVPRSLNRDDLALGEDLPFTGYDIWTLYELSWLNSKGLPQVAIGEVRLPASSPNLIESKSFKLYLNSFNQTRFASWQEIADILQKDLSDCAGATVDVTVQPLSDFDDQPIANFAGECIDDQDIEITDYSFNPDHLEGAAEGEIVTEELNSHLLKSNCLITSQPDWGSVKISYKGKKLNREKLLRYLISFRNHNEFHEQCVERIFTDLMKYCQPELLTVYARYTRRGGLDINPYRTNQGKTPSNNDRLARQ

SEQ ID NO: 48372 - protein, 283 aa, Photobacterium phosphoreum
  misc_feature (1)..(283): tr|A0A2T3PLX1|A0A2T3PLX1_PHOPO NADPH-dependent 7-cyano- 7-deazaguanine reductase OS=Photobacterium phosphoreum OX=659 GN=queF PE=3 SV=1
MSKYKDAKELAGLTLGKKTEYKDQYDPSLLQPVPRSLNRTDINISDDALPFTGYDIWTLYELSWLNKKGLPQVAIGEVRLPASSPNLIESKSFKLYLNSFNQTHFDSWQDIADTLQIDLSRCAGEDVDVTIQPLTDFNDQPIVNFFGECIDDQDIEISDYSFKPEYLEGAADNNDIVEEIVHSHLLKSNCLITNQPDWGSVRIAYKGNRIDREKLLRYIVSFRNHNEFHEQCVERIFNDIMRFCQPESLTVYARYTRRGGLDINPYRTNMGKTPSDNFRLARQ

SEQ ID NO: 48373 - protein, 283 aa, Photobacterium phosphoreum; identical to SEQ ID NO: 48366
  misc_feature (1)..(283): tr|A0A0B7J8F0|A0A0B7J8F0_PHOPO NADPH-dependent 7-cyano- 7-deazaguanine reductase OS=Photobacterium phosphoreum ANT-2200 OX=1454202 GN=queF PE=3 SV=1

SEQ ID NO: 48374 - protein, 283 aa, Photobacterium piscicola
  misc_feature (1)..(283): tr|A0A1T5I552|A0A1T5I552_9GAMM NADPH-dependent 7-cyano- 7-deazaguanine reductase OS=Photobacterium piscicola OX =1378299 GN=queF PE=3 SV=1
MSKYKDAKELAGLTLGKKTEYKDQYDPSLLQPVPRSLNRTDINISDDALPFTGYDIWTLYELSWLNNKGLPQVAIGEVRLPASSPNLIESKSFKLYLNSFNQTRFDSWQDIADTLQIDLSRCAGEDVDVTIQPLTDFNEQPIVNFFGECIDDQDIEINDYAFKPEYLEGAANNNDVVEEIVHSHLLKSNCLITNQPDWGSVRIAYKGNRIDREKLLRYIVSFRNHNEFHEQCVERIFNDIMRFCQPELLTVYARYTRRGGLDINPYRTNMGKTPSDNFRLARQ

SEQ ID NO: 48375 - protein, 281 aa, Photobacterium profundum
  misc_feature (1)..(281): sp|Q6LN10|QUEF_PHOPR NADPH-dependent 7-cyano-7-deazagua nine reductase OS=Photobacterium profundum (strain SS9) OX=298386 GN=queF PE=3 SV=1
MSKYKDAKELAGLTLGQKTDYIDQYDASLLQPVPRSLNRSDLNLGESLPFTGYDIWTLYELSWLNSKGLPQVAIGEVRLPASSPNLIESKSFKLYLNSFNQTRFDSWQQIADTLQKDLTACAGQEVDVTIQPLEDFTDQTVINFAGNCIDEQDIEINSYDFDAQYLKDAAEGEIVTEDLHSHLLKSNCLITNQPDWGSVKISYKGKQINREKLLRYLVSFRNHNEFHEQCVERIFTDIMKFCQPELLTVYARYTRRGGLDINPYRTNQGKTPSDNFRLARQ

SEQ ID NO: 48376 - protein, 281 aa, Photobacterium profundum
  misc_feature (1)..(281): tr|Q1Z096|Q1Z096_9GAMM NADPH-dependent 7-cyano-7-deazag uanine reductase OS=Photobacterium profundum 3TCK OX=31 4280 GN=queF PE=3 SV=1
MSKYKDAKELAGLTLGQKTDYIDQYDASLLQPVPRSLNRSDLNLGESLPFTGYDIWTLYELSWLNSKGLPQVAIGEVRLPASSPNLIESKSFKLYLNSFNQTRFDSWQQIADTLQKDLTACAGQEVDVTIQPLEDFTDQTVINFAGNCIDDQDIEIDNYDFDAQYLKDAAEGEIVTEDLHSHLLKSNCLITNQPDWGSVKISYKGKQINREKLLRYLVSFRNHNEFHEQCVERIFTDIMKFCKPELLTVYARYTRRGGLDINPYRTNQGKTPSDNFRLARQ

SEQ ID NO: 48377 - protein, 281 aa, Photobacterium proteolyticum
  misc_feature (1)..(281): tr|A0A1Q9GW67|A0A1Q9GW67_9GAMM NADPH-dependent 7-cyano- 7-deazaguanine reductase OS=Photobacterium proteolyticu m OX=1903952 GN=queF PE=3 SV=1
MSKYKDAKELAGLTLGQSTEYKDQYDPSLLQPVPRSLNRDDLALGDNLPFTGYDIWTLYELSWLNSKGLPQVAIGEVRLPASSPNLIESKSFKLYLNSFNQTRFASWQDIADTLQKDLTACAGADVDVTIQPLEDFDNQPIVNFTGECIDNQDIEIADYEFNPDYLEGAAEGDIVSEELNSHLLKSNCLITSQPDWGSVRISYKGKKINREKLLRYLISFRNHNEFHEQCVERIFTDLMKYCQPELLTVYARYTRRGGLDINPYRTNQGKTPSNNFRLARQ

SEQ ID NO: 48378 - protein, 281 aa, Photobacterium rosenbergii
  misc_feature (1)..(281): tr|A0A2T3MU25|A0A2T3MU25_9GAMM NADPH-dependent 7-cyano- 7-deazaguanine reductase OS=Photobacterium rosenbergii OX=294936 GN=queF PE=3 SV=1
MSKYQDAKELAGLTLGKTTEYIDQYDPSLLQPVPRSLNRDDLALGDTLPFTGYDIWTLYELSWLNKKGLPQVAIGEVRLPASSPNLIESKSFKLYLNSFNQTKFDSWQQIADTLQKDLSECAGADVDVTVQPLSDFDDQPIANFFGECIDDQDIEITDYDFDPSHLEGALSDETVTEILHSHLLKSNCLVTSQPDWGSVRISYTGKKIDREKLLRYLISFRDHNEFHEQCVERIFTDIMKFCKPELLTVYARYTRRGGLDINPYRTNMGKTPSDNFRLARQ

SEQ ID NO: 48379 - protein, 281 aa, Photobacterium sanctipauli
  misc_feature (1)..(281): tr|A0A2T3NE07|A0A2T3NE07_9GAMM NADPH-dependent 7-cyano- 7-deazaguanine reductase OS=Photobacterium sanctipauli OX=1342794 GN=queF PE=3 SV=1
MSKYQDAKELAGLTLGQGTEYKDQYDASLLQPVPRSLNRDDLALGDDLPFTGYDIWTLYELSWLNSKGLPQVAIGEVRLPASSPNLIESKSFKLYLNSFNQTKFDSWQQIADTLQKDLTQCAGADVDVTVQPLSDFDDQPIANFFGECIDDQDIEITDYEFDPAHLEGAATEETVTEILHSHLLKSNCLITSQPDWGSVRISYTGKKIDREKLLRYLISFRNHNEFHEQCVERIFTDIMKYCKPELLTVYARYTRRGGLDINPYRTNMGKTPSDNFRLARQ

SEQ ID NO: 48380 - protein, 281 aa, Photobacterium sanguinicancri
  misc_feature (1)..(281): tr|A0A135ZPR8|A0A135ZPR8_9GAMM NADPH-dependent 7-cyano- 7-deazaguanine reductase OS=Photobacterium sanguinicanc ri OX=875932 GN=queF PE=3 SV=1
MSKYKDAAELADLTLGQKTEYADKYDPSLLQAVPRSLNRDDLALGDELPFTGYDIWTLYELSWLNGKGLPQVAIGEVRLPANSPNLIESKSFKLYLNSFNQTRFSDWQEIVETLHKDLSACAGLDVDVTIQPLTDFTDETIVNFTGECIDDQDIEITEYDFSADHLDGAADGDVVTEELHSHLLKSNCLITNQPDWGSVRISYKGKKINREKLLRYLVSFRNHNEFHEQCVERIFSDIMAFCQPELLTVYARYTRRGGLDINPYRTNQGKTPSNNFRLARQ

SEQ ID NO: 48381 - protein, 283 aa, Photobacterium sp.
  misc_feature (1)..(283): tr|A0A1Y6MPM2|A0A1Y6MPM2_9GAMM NADPH-dependent 7-cyano- 7-deazaguanine reductase OS=Photobacterium sp. CECT 919 2 OX=2006083 GN=queF PE=3 SV=1
MSKYKDAKELAGLTLGQKTEYKDQYDPSLLQPVPRSLNRTDINISDDALPFTGYDIWTLYELSWLNKKGLPQVAIGEVRLPASSPNLIESKSFKLYLNSFNQTRFDGWQAIADTLQIDLSRCAGEDVDVTIQPLTDFNDQPIVNFFGECIDDQDIEINDYSFKPEYLEGAADNNDIVEEIVHSHLLKSNCLITNQPDWGSVRIAYKGNRIDREQLLRYIVSFRNHNEFHEQCVERIFNDIMRFCQPELLTVYARYTRRGGLDINPYRTNMGKTPSDNFRLARQ

SEQ ID NO: 48382 - protein, 281 aa, Photobacterium sp.
  misc_feature (1)..(281): tr|A0A3S3REP6|A0A3S3REP6_9GAMM NADPH-dependent 7-cyano- 7-deazaguanine reductase OS=Photobacterium sp. BEI 247 OX=2485123 GN=queF PE=3 SV=1
MSKYKDAKELAGLTLGQSTEYKDQYDPSLLQPVPRSLNRDDLALGDSLPFTGYDIWTLYELSWLNSKGLPQVAIGEVRLPASSPNLIESKSFKLYLNSFNQTRFASWQEIADTLQKDLSACAGADVDVTVQPLEDFDNQPIVNFTGKCIDNQDIEISDYEFNPAYLEGAAEGDIITEELNSHLLKSNCLITSQPDWGSVKISYTGKKINREKLLRYLISFRNHNEFHEQCVERIFTDLQKFCQPELLTVYARYTRRGGLDINPYRTNQGKTPSDNFRLARQ

SEQ ID NO: 48383 - protein, 281 aa, Photobacterium swingsii
  misc_feature (1)..(281): tr|A0A0J8VA33|A0A0J8VA33_9GAMM NADPH-dependent 7-cyano- 7-deazaguanine reductase OS=Photobacterium swingsii OX= 680026 GN=queF PE=3 SV=1
MSKYKDAAELADLTLGQKTEYADKYDPSLLQAVPRSLNRDDLALGDELPFTGYDIWTLYELSWLNGKGLPQVAIGEVRLPANSPNLIESKSFKLYLNSFNQTRFNDWQEIVETLHKDLTACAGQDVDVTIQPLTDFTDEAIVNFSGECIDDQDIEITEYDFNADHLEGAAEGDVVTEELHSHLLKSNCLITNQPDWGSVRISYKGKQINREKLLRYLVSFRNHNEFHEQCVERIFSDIMAFCQPELLTVYARYTRRGGLDINPYRTNQGKTPSNNFRLARQ

SEQ ID NO: 48384 - protein, 283 aa, Photobacterium toruni
  misc_feature (1)..(283): tr|A0A1T4UAN7|A0A1T4UAN7_9GAMM NADPH-dependent 7-cyano- 7-deazaguanine reductase OS=Photobacterium toruni OX=19 35446 GN=queF PE=3 SV=1
MSKYKDAKELAGLTLGKKTEYKDQYDPSLLQPVPRSLNRTDINISDDSLPFTGYDIWTLYELSWLNKKGLPQVAIGEVRLPASSPNLIESKSFKLYLNSFNQTRFDSWQDIADTLQIDLSGCAGEDVDVTIQPLTDFNDQPIVNFFGECIDDQDIEINDYVFKPEYLKGAADNNDVVEEIVHSHLLKSNCLITNQPDWGSVRIAYKGNRIDREKLLRYIVSFRNHNEFHEQCVERIFNDIMRFCQPELLTVYARYTRRGGLDINPYRTNMGKTPSDNFRLARQ

SEQ ID NO: 48385 - protein, 286 aa, Photorhabdus asymbiotica
  misc_feature (1)..(286): tr|C7BKL8|C7BKL8_PHOAA NADPH-dependent 7-cyano-7-deazag uanine reductase OS=Photorhabdus asymbiotica subsp. asy mbiotica (strain ATCC 43949 / 3105-77) OX=553480 GN=que F PE=3 SV=1
MRNNMSLYQDHQALEPLTLGKTTSYHDQYDANLLQAVPRSMNREPLNIFPDNLPFHGADIWTLYELSWLNSRGLPQVAVGHVSLNAKSKNLIESKSFKLYLNSFNQTRFENWQAVEETLQRDLAACADGHVTVTLHHLDHFNNQPISAFTGECIDNQDIDITEYNFNRDYLQGAAQGPLVEEVLVSHLLKSNCLITHQPDWGSVQIHYKGAKINQESLLRYLVSFRHHNEFHEQCVERIFNDLQQLCSPEKLSVYARYTRRGGLDINPWRTNSTDFAPKTGRLARQ

SEQ ID NO: 48386 - protein, 282 aa, Photorhabdus australis
  misc_feature (1)..(282): tr|A0A1C0TYK3|A0A1C0TYK3_9GAMM NADPH-dependent 7-cyano- 7-deazaguanine reductase OS=Photorhabdus australis OX=2 86156 GN=queF PE=3 SV=1
MSLYQDHQALEPLTLGKTTSYHDQYDANLLQAVPRSMNRDPLNIFPDNLPFHGADIWTLYELSWLNSRGLPQVAVGHVSLNAASKNLIESKSFKLYLNSFNQTRFESWQTVEETLQRDLAACADGHVEVTLHHLNHFNNQPISAFTGECIDNQDIDITEYNFNRDYLQGAAQGPLVEEVLVSHLLKSNCLITHQPDWGSVQIHYKGAKINQEALLRYLVSFRHHNEFHEQCVERIFNDLQQLCAPEKLSVYARYTRRGGLDINPWRTNNTDFAPKTGRLARQ

SEQ ID NO: 48387 - protein, 282 aa, Photorhabdus bodei
  misc_feature (1)..(282): tr|A0A329XAZ1|A0A329XAZ1_9GAMM NADPH-dependent 7-cyano- 7-deazaguanine reductase OS=Photorhabdus bodei OX=20296 81 GN=queF PE=3 SV=1
MSLYRDHQALEQLTLGKTTLYRDQYDASLLQAVPRNMNREPLEIFPDNLPFHGADIWTLYELSWLNSRGLPQVAVGHVSLNAISKNLIESKSFKLYLNSFNQTRFENWQAVEETLQRDLAACAEGKVEVALYHLDHFNNQPISAFTGECIDDQDIEVTEYDFNRHYLQDAAQGPLVEEVLVSHLLKSNCLITHQPDWGSVQIHYKGLKINREALLRYLISFRHHNEFHEQCVERIFSDLQQLCAPEKLSVYARYTRRGGLDINPWRTNSEGFVPATGRLARQ

SEQ ID NO: 48388 - protein, 282 aa, Photorhabdus heterorhabditis
  misc_feature (1)..(282): tr|A0A5B0X785|A0A5B0X785_9GAMM NADPH-dependent 7-cyano- 7-deazaguanine reductase OS=Photorhabdus heterorhabditi s OX=880156 GN=queF PE=3 SV=1
MSLYQDHQALKQLTLGKTTSYHDQYDANLLQAIPRSMNREPLKILCDNLPFHGADIWTLYELSWLNSRGLPQVAVGHVSLNATSKNLIESKSFKLYLNSFNQTRFENWQTVEETLQRDLAACAEGHVEVTLHHLDHFNNQPISAFTGECIDNQDIDITEYNFKRDYLQGAAQGPLVEEVLVSHLLKSNCLITHQPDWGSVQIHYKGAKINQEALLRYLVSFRHHNEFHEQCVERIFNDLQQLCAPEKLSVYARYTRRGGLDINPWRTNNADFAPVTGRLARQ

SEQ ID NO: 48389 - protein, 282 aa, Photorhabdus heterorhabditis
  misc_feature (1)..(282): tr|A0A0M9CYZ4|A0A0M9CYZ4_9GAMM NADPH-dependent 7-cyano- 7-deazaguanine reductase OS=Photorhabdus heterorhabditi s OX=880156 GN=queF PE=3 SV=1
MSLYQDHQALEQLTLGKTTSYHDQYDANLLQAIPRSMNREPLKILCDNLPFHGADIWTLYELSWLNSRGLPQVAVGHVSLNATSKNLIESKSFKLYLNSFNQTRFENWQTVEETLQRDLAACAEGHVEVTLHHLDHFNNQPISAFTGECIDNQDIDITEYNFKRDYLQGAAQGPLVEEVLVSHLLKSNCLITHQPDWGSVQIHYKGAKINQEALLRYLVSFRHHNEFHEQCVERIFNDLQQLCAPEKLSVYARYTRRGGLDINPWRTNNADFAPVTGRLARQ

SEQ ID NO: 48390 - protein, 282 aa, Photorhabdus khanii
  misc_feature (1)..(282): tr|W3VB68|W3VB68_9GAMM NADPH-dependent 7-cyano-7-deazag uanine reductase OS=Photorhabdus khanii NC19 OX=1004151 GN=queF PE=3 SV=1
MSLYQDHQALEQLTLGKTTFYRDQYDASLLQAVPRSMNREPLKIFSDNLPFHGADIWTLYELSWLNSRGLPQVAVGHVSLNATSKNLIESKSFKLYLNSFNQTRFENWQIVEETLQRDLAACAEGHVEVILHHLDHFSNQPISAFTGECIDDQEIEVTEYNFNRDYLQGAAQGPLVEEVLVSHLLKSNCLITHQPDWGSIQIRYKGPKINREALLRYLISFRHHNEFHEQCVERVFNDLQQLCVPEKLSVYARYTRRGGLDINPWRTNNEDFVPTTGRLARQ

SEQ ID NO: 48391 - protein, 216 aa, Photorhabdus khanii
  misc_feature (1)..(216): tr|W3VBM3|W3VBM3_9GAMM 7-cyano-7-deazaguanine reductase OS=Photorhabdus khanii NC19 OX=1004151 GN=PTE_00386 PE =4 SV=1
MVSPDLSGDHPYQLRMHLSKNLIESKSFKLYLNSLNQTNFESWDDVHNTIVNDLENCASGSVTLELYPVTDISVQQAGNFEGVCIDEQDINIADFKFSNAYLNNAVDNEYTEETLVSHLLKSNCLITNQPDWGSVQIHYQGRRINREALLRYLVSFRQHNEFHEQCVERVFNDLNYFCKPEYLAVYARYTRRGGLDINPWRSNTPFKPSHFRLARQ

SEQ ID NO: 48392 - protein, 282 aa, Photorhabdus laumondii
  misc_feature (1)..(282): sp|Q7N8Q7|QUEF_PHOLL NADPH-dependent 7-cyano-7-deazagua nine reductase OS=Photorhabdus laumondii subsp. laumond ii (strain DSM 15139 / CIP 105565 / TT01) OX=243265 GN= queF PE=3 SV=1
MSLYRDHQALEQLTLGKTTLYRDQYDASLLQAVPRNMNREPLEIFPDNLPFHGADIWTLYELSWLNNRGLPQVAVGHVSLNAASTNLIESKSFKLYLNSFNQTRFENWQAVEETLQRDLAACAEGEVEVALHHLDHFNNQPISTFTGECIDDQDIEVTEYDFNRHYLQNAAQGPQVEEVLVSHLLKSNCLITHQPDWGSVQIHYKGSKINREALLRYLISFRHHNEFHEQCVERIFSDLQQLCAPEKLSVYARYTRRGGLDINPWRTNSEGFVPATGRLARQ

SEQ ID NO: 48393 - protein, 282 aa, Photorhabdus laumondii
  misc_feature (1)..(282): tr|A0A329VJJ6|A0A329VJJ6_9GAMM NADPH-dependent 7-cyano- 7-deazaguanine reductase OS=Photorhabdus laumondii subs p. clarkei OX=2029685 GN=queF PE=3 SV=1
MSLYRDHQALEQLTLGKTTLYRDQYDASLLQAVPRNMNREPLEIFPDNLPFHGADIWTLYELSWLNSRGLPQVAVGHVSLNAASKNLIESKSFKLYLNSFNQTRFENWQAVEETLQRDLAACAEGEVEVALHHLDHFNNQPISTFTGECIDDQDIEVTEYDFNRHYLQDAAQGPQVEEVLVSHLLKSNCLITHQPDWGSVQIHYKGSKINREALLRYLISFRHHNEFHEQCVERIFSDLQQLCAPEKLSVYARYTRRGGLDINPWRTNSEGFVPATGRLARQ

SEQ ID NO: 48394 - protein, 282 aa, Photorhabdus luminescens
  misc_feature (1)..(282): tr|A0A5C4RFV2|A0A5C4RFV2_PHOLU NADPH-dependent 7-cyano- 7-deazaguanine reductase OS=Photorhabdus luminescens su bsp. sonorensis OX=1173677 GN=queF PE=3 SV=1
MSLYRDHQALEQLTLGKTTLYRDQYDASLLQAVPRNMNREPMGIFPDNLPFHGADIWTLYELSWLNSRGLPQVAVGHVSLNATSKNLIESKSFKLYLNSFNQTHFESWQAVEKTLQRDLAACAEGEVEVTLHHLDHFNNQPISAFTGECIDDQDIEVTEYDFNRHYLQGAAQGPLVEEVLVSHLLKSNCLITHQPDWGSVQIRYQGSKINREALLRYLISFRHHNEFHEQCVERIFNDLQQLCAPKKLSVYARYTRRGGLDINPWRTNSASFVPETSRLARQ

SEQ ID NO: 48395 - protein, 282 aa, Photorhabdus luminescens; identical to SEQ ID NO: 48393
  misc_feature (1)..(282): tr|A0A2S8QUV0|A0A2S8QUV0_PHOLU NADPH-dependent 7-cyano- 7-deazaguanine reductase OS=Photorhabdus luminescens OX =29488 GN=queF PE=3 SV=1

SEQ ID NO: 48396 - protein, 282 aa, Photorhabdus namnaonensis
  misc_feature (1)..(282): tr|A0A1B8YCA4|A0A1B8YCA4_9GAMM NADPH-dependent 7-cyano- 7-deazaguanine reductase OS=Photorhabdus namnaonensis O X=1851568 GN=queF PE=3 SV=1
MSLYRDHQALEQLTLGKTTLYRDQYDASLLQAVPRNMNREPLEIFPDNLPFHGADIWTLYELSWLNSRGLPQVAVGHVSLNATSKNLIESKSFKLYLNSFNQTRFENWQVVEETLQRDLSACAEGKVEVTLHHLDHFNNQPISAFTGECIDDQDIEVTEYDFNRHYLQDAAQGPLVEEVLVSHLLKSNCLITHQPDWGSVQIHYKGAKINREALLRYLISFRHHNEFHEQCVERIFNDLQQLCAPEKLSVYARYTRRGGLDINPWRTNSASFIPAIGRLARQ

SEQ ID NO: 48397 - protein, 282 aa, Photorhabdus sp.
  misc_feature (1)..(282): tr|A0A329WBY9|A0A329WBY9_9GAMM NADPH-dependent 7-cyano- 7-deazaguanine reductase OS=Photorhabdus sp. S9-53 OX=2 029683 GN=queF PE=3 SV=1
MSLYRDHQALEQLTLGKTTLYRDQYDASLLQAVPRNMNREPLEIFPDNLPFHGADIWTLYELSWLNSRGLPQVAVGHVSLNAESKNLIESKSFKLYLNSFNQTRFENWQAVEETLQRDLAACAEGEVEVTLHHLDHFNNQPIAAFTGECIDDQDIEVTEYNFNRHYLQDAAQGPQVEEVLVSHLLKSNCLITHQPDWGSVQIHYKGLKINREALLRYLISFRHHNEFHEQCVERIFSDLQQLCAPEKLSVYARYTRRGGLDINPWRTNSEGFVPATGRLARQ

SEQ ID NO: 48398 - protein, 282 aa, Photorhabdus sp.
  misc_feature (1)..(282): tr|A0A4R4JZM2|A0A4R4JZM2_9GAMM NADPH-dependent 7-cyano- 7-deazaguanine reductase OS=Photorhabdus sp. MEX20-17 O X=2100166 GN=queF PE=3 SV=1
MSLYQDHQALEQLTLGKTTLYRDQYDASLLQAIPRSMNRKPLKIFSDNLPFHGADIWTLYELSWLNSRGLPQVAVGHVSLNATSKNLIESKSFKLYLNSFNQTRFENWQIVEETLQRDLAACAEGHVEVILHHLDHFSSQPISAFTGECIDDQEIEVTEYNFNRDYLQGAAQGPLVEEVLVSHLLKSNCLITHQPDWGSIQIRYKGPKINREALLRYLISFRHHNEFHEQCVERVFNDLQQLCVPEKLSVYARYTRRGGLDINPWRTNNEDFVPTTGRLARQ

SEQ ID NO: 48399 - protein, 106 aa, Photorhabdus temperata
  misc_feature (1)..(106): tr|U7R6M3|U7R6M3_PHOTE QueF_N domain-containing protein OS=Photorhabdus temperata J3 OX=1389415 GN=O185_00315 PE=4 SV=1
MSLYQDHQVLEQLTLGKTTLYHDQYDASLLQAVPRSMNREPLEIFPDNLPFHGADIWTLYELSWLNSRGLPQVAVGHATVMCSRKALSLCALYPTRRIRYQSVAHK

SEQ ID NO: 48400 - protein, 106 aa, Photorhabdus temperata; identical to SEQ ID NO: 48399
  misc_feature (1)..(106): tr|T0PAX5|T0PAX5_PHOTE 7-cyano-7-deazaguanine reductase OS=Photorhabdus temperata subsp. temperata M1021 OX=12 21520 GN=queF PE=4 SV=1

SEQ ID NO: 48401 - protein, 277 aa, Photorhabdus thracensis
  misc_feature (1)..(277): tr|A0A0F7LPS5|A0A0F7LPS5_9GAMM NADPH-dependent 7-cyano- 7-deazaguanine reductase OS=Photorhabdus thracensis OX= 230089 GN=queF PE=3 SV=1
MSNSHFTISELPLGKDTTYPEKYSPDLLHGVPRSLGRSSLSIKDTPEYGEDIWNLYELSWLNKNGLPQVATGRVAINAHSKNLIESKSFKLYLNSLNQTNFENWDDVHNTIVNDLENCASGNVALELYPVTDISVQQAGNFEGVCIDNQDINIADFRFSNAYLNNAIGDEYTEETLVSHLLKSNCLITNQPDWGSVQIHYQGRRINREALLRYLVSFRQHNEFHEQCVERIFNDLNYFCKPEYLAVYARYTRRGGLDINPWRSNTPFKPSHFRLARQ

SEQ ID NO: 48402 - protein, 282 aa, Photorhabdus thracensis
  misc_feature (1)..(282): tr|A0A0F7LL14|A0A0F7LL14_9GAMM NADPH-dependent 7-cyano- 7-deazaguanine reductase OS=Photorhabdus thracensis OX= 230089 GN=queF PE=3 SV=1
MSLYQNHQALEQLTLGKTTFYRDQYDASLLQTVPRNMNREPLKIFPDNLPFHGADIWTLYELSWLNSRGLPQVAVGHVSLNATSKNLIESKSFKLYLNSFNQTHFENWQTVEETLQRDLAACAEGHVEVTLHHLDHFSNQPISAFTGECIDNQDIEVTEYNFNRDYLQGAAQGPLVEEVLVSHLLKSNCLITHQPDWGSLQIRYKGPKINREALLRYLISFRHHNEFHEQCVERIFNDLRQLCVPEKLSVYARYTRRGGLDINPWRTNNEDFIPTTGRLARQ

SEQ ID NO: 48403 - protein, 148 aa, Phreatobacter cathodiphilus
  misc_feature (1)..(148): tr|A0A2S0N9Q9|A0A2S0N9Q9_9PROT NADPH-dependent 7-cyano- 7-deazaguanine reductase OS=Phreatobacter cathodiphilus OX=1868589 GN=queF PE=3 SV=1
MAELMLGKTVGIPASPEAAELDRVPNPHPDTNYVARFVAPEFTSLCPVTGQPDFAHLVIDYVPGDWLVESKSLKLYLTSFRNHGAFHEDCTVAVGKRLRDLLSPRWLRIGGYWYPRGGIPIDVFWQTGAPPEGVWIPDQGVAPYRGRG

SEQ ID NO: 48404 - protein, 148 aa, Phreatobacter oligotrophus
  misc_feature (1)..(148): tr|A0A2T4Z555|A0A2T4Z555_9PROT NADPH-dependent 7-cyano- 7-deazaguanine reductase OS=Phreatobacter oligotrophus OX=1122261 GN=queF PE=3 SV=1
MTDLKLGKTVDIPASPEAAELDRVPNPHPDTDYVARFVAPEFTSLCPVTGQPDFAHLVIDYVPDQWLVESKSLKLYLTSFRNHGAFHEDCTVAIGKRLRDLLGPRWLRIGGYWYPRGGIPIDVFWQTGTPPAGVWIPDQGVAPYRGRG

SEQ ID NO: 48405 - protein, 148 aa, Phreatobacter sp.
  misc_feature (1)..(148): tr|A0A4D7QPA4|A0A4D7QPA4_9PROT NADPH-dependent 7-cyano- 7-deazaguanine reductase OS=Phreatobacter sp. NMCR1094 OX=2570229 GN=queF PE=3 SV=1
MADLKLGKTVGIPASPEEAELDRVPNPHPDTNYVARFAVPEFTSLCPVTGQPDFAHLVIDYVPDQWLVESKSLKLYLSSFRNHGAFHEDCTVAVGRTLVGLLAPRWLRIGGYWYPRGGIPIDVFWQTGEPLQGVWLPDQGVAAYRGRG

SEQ ID NO: 48406 - protein, 148 aa, Phreatobacter stygius
  misc_feature (1)..(148): tr|A0A4D7B384|A0A4D7B384_9PROT NADPH-dependent 7-cyano- 7-deazaguanine reductase OS=Phreatobacter stygius OX=19 40610 GN=queF PE=3 SV=1
MTDLMLGKSVAMPASPDEAVLDRVPNPHQDTNYVTRFTAPEFTSLCPVTGQPDFAHLVIDFVADAWLVESKSLKLYLSSFRNHGAFHEDCTVAIGKRLVGLLQPRWLRIGGYWYPRGGIPIDVFWQTGEVPKGVWLPDQGVAPYRGRG

SEQ ID NO: 48407 - protein, 117 aa, Phycisphaera mikurensis
  misc_feature (1)..(117): tr|I0IDJ3|I0IDJ3_PHYMF NADPH-dependent 7-cyano-7-deazag uanine reductase OS=Phycisphaera mikurensis (strain NBR C 102666 / KCTC 22515 / FYK2301M01) OX=1142394 GN=queF PE=3 SV=1
MIDADLLEFFPNPAPDQPYLIEHVHEEFTSVCPKTGHPDFGEVVIRYRPGEACVELKSLKIYFQGFRDAGIFYEAVTNRVADDLHEAMKPRTLEVETRWRGRGGIRSVITATRGEAG

SEQ ID NO: 48408 - protein, 122 aa, Phycisphaera sp.
  misc_feature (1)..(122): tr|A0A3S5J4A8|A0A3S5J4A8_9BACT NADPH-dependent 7-cyano- 7-deazaguanine reductase OS=Phycisphaera sp. TMED24 OX= 1986832 GN=queF PE=3 SV=1
MPDPSLLETFANPGDAPYVIEHLHEEFTSVCPKTGHPDFGEILFRYEPADCCVELKSLKMYCQSFRQEGIYYEAVTNRLRDDMVQCMQPRWLQIVTMWKGRGGFKSTVVAEFGDVPECWKRP

SEQ ID NO: 48409 - protein, 121 aa, Phycisphaera sp.
  misc_feature (1)..(121): tr|A0A424KF25|A0A424KF25_9BACT NADPH-dependent 7-cyano- 7-deazaguanine reductase OS=Phycisphaera sp. TMED9 OX=1 986611 GN=queF PE=3 SV=1
  misc_feature (58)..(58): Xaa can be any naturally occurring amino acid
  misc_feature (60)..(62): Xaa can be any naturally occurring amino acid
  misc_feature (64)..(64): Xaa can be any naturally occurring amino acid
  misc_feature (78)..(78): Xaa can be any naturally occurring amino acid
  misc_feature (81)..(82): Xaa can be any naturally occurring amino acid
  misc_feature (86)..(87): Xaa can be any naturally occurring amino acid
  misc_feature (89)..(89): Xaa can be any naturally occurring amino acid
  misc_feature (117)..(117): Xaa can be any naturally occurring amino acid
MAEEILEFFDNPGAEPYVIEHRHEEFTSVCPMTGHPDFGTIMLRYQPAAVCVELKSLXLXXXAXRNEGMFFEAVTNKXRDXXARTXXPXWMQVVSDWKGRGGVKSRVIAPWGDVPPXFRAG

SEQ ID NO: 48410 - protein, 80 aa, Phycisphaeraceae bacterium
  misc_feature (1)..(80): tr|A0A2E2B929|A0A2E2B929_9BACT NADPH-dependent 7-cyano- 7-deazaguanine reductase OS=Phycisphaeraceae bacterium OX=2026777 GN=queF PE=3 SV=1
MPKNLCVELKSLKLYFQSFRNEGIFYEAVTNKICDDLAEVMDPKYMEIVTNWKGRGGIRSVITATYGEQGCCDGHCDCED

SEQ ID NO: 48411 - protein, 120 aa, Phycisphaeraceae bacterium
  misc_feature (1)..(120): tr|A0A2E5G6L5|A0A2E5G6L5_9BACT NADPH-dependent 7-cyano- 7-deazaguanine reductase OS=Phycisphaeraceae bacterium OX=2026777 GN=queF PE=3 SV=1
MPDTGLLESFANPSADRDYVIEHVTEEFTSVCPKTGHPDFAVVTMRYCPDHQCVELKSLKLYYQSFRNEGIFYEAVTNTISDDLVILTQPRWLQVVTDWKGRGGIRSQITVNHGPVPIGI

SEQ ID NO: 48412 - protein, 123 aa, Phycisphaerae bacterium
  misc_feature (1)..(123): tr|A0A5C5VT77|A0A5C5VT77_9BACT NADPH-dependent 7-cyano- 7-deazaguanine reductase OS=Phycisphaerae bacterium RAS 1 OX=2528034 GN=queF PE=3 SV=1
MPKPTPPAIDTFENPAPQRDYVIRHVAPEFTSVCPVTGQPDFGTLIIAYVPDKSCVELKSLKLYLQSFRQQGIYYEAVTNRILDDLVLLLSPRRITVQSRWRPRGGMRSVITARYKRPPGRTR

SEQ ID NO: 48413 - protein, 116 aa, Phycisphaerae bacterium
  misc_feature (1)..(116): tr|A0A1Q2MDX0|A0A1Q2MDX0_9BACT NADPH-dependent 7-cyano- 7-deazaguanine reductase OS=Phycisphaerae bacterium SM- Chi-D1 OX=1851148 GN=queF PE=3 SV=1
MSEKVKLELFENPAPQRDYTITTKVPEFTSVCPKTGQPDFGTIIIEYCPDKLCIELKSLKYYMQSFRNKGIFYEALTNEMLDDLVDACKPRWMKITSEFTPRGGISTDVTVIYTKD

SEQ ID NO: 48414 - protein, 64 aa, Phycisphaerales bacterium
  misc_feature (1)..(64): tr|A0A3D0K085|A0A3D0K085_9BACT NADPH-dependent 7-cyano- 7-deazaguanine reductase QueF (Fragment) OS=Phycisphaer ales bacterium OX=2052180 GN=DEO57_03745 PE=4 SV=1
KLYFQSFRDEGIYYEAGTNRIRDDLVEAMQPSWLQVVTNWKGRGGIRSRIIASHGDVPECWARG

SEQ ID NO: 48415 - protein, 117 aa, Phycisphaerales bacterium
  misc_feature (1)..(117): tr|A0A349ULX6|A0A349ULX6_9BACT NADPH-dependent 7-cyano- 7-deazaguanine reductase OS=Phycisphaerales bacterium O X=2052180 GN=queF PE=3 SV=1
MADKKLLETFDNPHPGRDYVIRHVAPEFTSVCPKTAQPDFGTLEIEYVADRLCVELKSLKFYLQGFRNVGVFYEDVVNHILDDLVSVLHPRRMTVTGRFTPRGGMHSIIVAEYPGGR

SEQ ID NO: 48416 - protein, 152 aa, Phyllobacterium bourgognense
  misc_feature (1)..(152): tr|A0A368YVV8|A0A368YVV8_9RHIZ NADPH-dependent 7-cyano- 7-deazaguanine reductase OS=Phyllobacterium bourgognens e OX=314236 GN=queF PE=3 SV=1
MSNYAEQATMLGKDVQIPQHPDEAILDAVPNPQAGTLFLARFACPEFTSLCPVTGQPDFGHLVIDYAPDQTLVESKSLKLFLGSFRNHGAFHEDCTVGIGKRIVEAVKPLWLRIGGYWYPRGGIPIDVFWQTGPVPEGLWLPDQGVPAYRGR

SEQ ID NO: 48417 - protein, 153 aa, Phyllobacterium brassicacearum
  misc_feature (1)..(153): tr|A0A2P7BJJ7|A0A2P7BJJ7_9RHIZ NADPH-dependent 7-cyano- 7-deazaguanine reductase OS=Phyllobacterium brassicacea rum OX=314235 GN=queF PE=3 SV=1
MSHYAEQATMLGKDVKIPQHPDEAMLDAVPNPQAGTLFLARFACPEFTSLCPVTGQPDFGHLVIDYAPDQSLVESKSLKLFLGSFRNHGAFHEDCTVNIGKRIVEAVKPLWLRIGGYWYPRGGIPIDVFWQTGPVPEGLWLPDQGVPPYRGRG

SEQ ID NO: 48418 - protein, 152 aa, Phyllobacterium endophyticum
  misc_feature (1)..(152): tr|A0A2P7AZ40|A0A2P7AZ40_9RHIZ NADPH-dependent 7-cyano- 7-deazaguanine reductase OS=Phyllobacterium endophyticu m OX=1149773 GN=queF PE=3 SV=1
MSHFAQTATMLGKDVKIPQHPDEAVLDAVPNPQAGTLFLARFACPEFTSLCPVTGQPDFGHLVIDYAPDQTLVESKSLKLFLGSFRNHGAFHEDCTVGIGKRIVEAVKPLWLRIGGYWYPRGGIPIDVFWQTGPVPEGLWLPDQGVPAYRGR

SEQ ID NO: 48419 - protein, 153 aa, Phyllobacterium leguminum
  misc_feature (1)..(153): tr|A0A318T7B0|A0A318T7B0_9RHIZ NADPH-dependent 7-cyano- 7-deazaguanine reductase OS=Phyllobacterium leguminum O X=314237 GN=queF PE=3 SV=1
MTDVQGLTQLGTKAEIASSPEEAVLETVPYTRREGPPAIVRFTCPEFTSLCPMTGQPDFAHIVIDYAPDERLVESKSLKLFLFSFRNHGAFHEDCTLEIGRRIVEATKPLWLRIGGYWYPRGGIPIDVFWQTGTPPVGAWVPETGVPSYRGRG

SEQ ID NO: 48420 - protein, 153 aa, Phyllobacterium myrsinacearum
  misc_feature (1)..(153): tr|A0A2S9JJD3|A0A2S9JJD3_9RHIZ NADPH-dependent 7-cyano- 7-deazaguanine reductase OS=Phyllobacterium myrsinacear um OX=28101 GN=queF PE=3 SV=1
MSHYAEQATMLGKDVPIPHDPDEALLDAVPNPQAGTLFLARFTCPEFTSLCPVTGQPDFGHLVIDYAPDQALVESKSLKLFLTSFRNHGAFHEDCTVNIGKRIVEAVKPLWLRIGGYWYPRGGIPIDVFWQTGPVPEGLWLPDQGVPAYRGRG

SEQ ID NO: 48421 - protein, 153 aa, Phyllobacterium salinisoli
  misc_feature (1)..(153): tr|A0A368K850|A0A368K850_9RHIZ NADPH-dependent 7-cyano- 7-deazaguanine reductase OS=Phyllobacterium salinisoli OX=1899321 GN=queF PE=3 SV=1
MTDVQGLTQLGAKTDIAASPEEAVLETVPYTRRDGPPAIVRFTCPEFTSLCPMTGQPDFAHIVIDYAPDARLVESKSLKMFLFSFRNHGAFHEDCTIEIGRRIVEATKPLWLRIGGYWYPRGGIPIDVFWQTGTPPEGAWLPDTGVPPYRGRG

SEQ ID NO: 48422 - protein, 152 aa, Phyllobacterium sophorae
  misc_feature (1)..(152): tr|A0A2P7BKP6|A0A2P7BKP6_9RHIZ NADPH-dependent 7-cyano- 7-deazaguanine reductase OS=Phyllobacterium sophorae OX =1520277 GN=queF PE=3 SV=1
MSHYAEQATMLGKDVKIPQHPDEATLDAVPNPQAGTLFLARFACPEFTSLCPVTGQPDFGHLVIDYAPDQSLVESKSLKLFLGSFRNHGAFHEDCTVGIGKRIVEAVKPLWLRIGGYWYPRGGIPIDVFWQTGPVPEGLWLPDQGVPAYRGR

SEQ ID NO: 48423 - protein, 153 aa, Phyllobacterium sp.
  misc_feature (1)..(153): tr|A0A1H0LB33|A0A1H0LB33_9RHIZ NADPH-dependent 7-cyano- 7-deazaguanine reductase OS=Phyllobacterium sp. OV277 O X=1882772 GN=queF PE=3 SV=1
MSHYAEQATMLGKDVPIPHHPDEALLDAVPNPQAGTLFLARFACPEFTSLCPVTGQPDFGHLVIDYAPDQALLESKSLKLFLTSFRNHGAFHEDCTVSIGKRIVDAVKPLWLRIGGYWYPRGGIPIDVFWQTGPVPEGLWLPDQGVPAYRGRG

SEQ ID NO: 48424 - protein, 152 aa, Phyllobacterium sp.
  misc_feature (1)..(152): tr|J3HM47|J3HM47_9RHIZ NADPH-dependent 7-cyano-7-deazag uanine reductase OS=Phyllobacterium sp. YR531 OX=114434 3 GN=queF PE=3 SV=1
MSHYAESSTMLGKEVKLPQHPDEAILEAVPNPQAGTLFLTRFACPEFTSLCPVTGQPDFGHLVIDYAPGETLLESKSLKLFLGSFRNHGAFHEDCTVSIGKRIVETVKPLWLRIGGYWYPRGGIPIDVFWQTGPIPEGLWLPDQGVPSYRGR

SEQ ID NO: 48425 - protein, 152 aa, Phyllobacterium zundukense
  misc_feature (1)..(152): tr|A0A2N9VWR9|A0A2N9VWR9_9RHIZ NADPH-dependent 7-cyano- 7-deazaguanine reductase OS=Phyllobacterium zundukense OX=1867719 GN=queF PE=3 SV=1
MSHYAEQATMLGKDVKIPQHPDEATLDAVPNPQAGTLFLARFACPEFTSLCPVTGQPDFGHLVIDYAPDQSLVESKSLKLFLGSFRNHGAFHEDCTVSIGKRIVEAVKPLWLRIGGYWYPRGGIPIDVFWQTGPVPEGLWLPDQGVPAYRGR

SEQ ID NO: 48426 - protein, 281 aa, Phytobacter diazotrophicus; identical to SEQ ID NO: 46660
  misc_feature (1)..(281): tr|A0A4R4BD25|A0A4R4BD25_9GAMM NADPH-dependent 7-cyano- 7-deazaguanine reductase OS=Phytobacter diazotrophicus OX=395631 GN=queF PE=3 SV=1

SEQ ID NO: 48427 - protein, 281 aa, Phytobacter ursingii
  misc_feature (1)..(281): tr|A0A0G3Q4C0|A0A0G3Q4C0_9GAMM NADPH-dependent 7-cyano- 7-deazaguanine reductase OS=Phytobacter ursingii OX=197 2431 GN=queF PE=3 SV=1
MSSYDNHQALSGLTLGKTTDYRDRYDASLLQGVPRSLNRDPLGLKAESLPFHGADIWTLYELSWLNARGLPQVAVGHVELNYASINLVESKSFKLYLNSFNQTRFASWDEVRDTLERDLSACAQGAVTVALYRLDEIEGQPIAHFHGSCIDDQDIVIDNYAFDANLLTDAASGKVIEETLVSHLLKSNCLITHQPDWGSVQIQYRGPKIDREKLLRYLVSFRHHNEFHEQCVERIFTDIQRFCQPESLSVYARYTRRGGLDINPWRTNTPFIPATGRLVRQ

SEQ ID NO: 48428 - protein, 281 aa, Phytobacter ursingii
  misc_feature (1)..(281): tr|A0A508UJ93|A0A508UJ93_9GAMM NADPH-dependent 7-cyano- 7-deazaguanine reductase OS=Phytobacter ursingii OX=197 2431 GN=queF PE=3 SV=1
MSSYDNHQALSGLTLGKTTDYRDRYDASLLQGVPRSLNRDPLGLKAESLPFHGADIWTLYELSWLNANGLPQVAVGHVTLNYASINLVESKSFKLYLNSFNQTRFASWEEVRATLERDLSACAQGAVTVALYRLDEIEGQPIAHFHGSCIDDQDIVIDNYAFDANLLTDAASGKVIEETLVSHLLKSNCLITHQPDWGSVQIQYRGPKIDREKLLRYLVSFRHHNEFHEQCVERIFTDIQRFCQPESLSVYARYTRRGGLDINPWRTNTPFIPATGRLVRQ

SEQ ID NO: 48429 - protein, 141 aa, Pigmentiphaga aceris
  misc_feature (1)..(141): tr|A0A5C0AVM6|A0A5C0AVM6_9BURK NADPH-dependent 7-cyano- 7-deazaguanine reductase OS=Pigmentiphaga aceris OX=194 0612 GN=queF PE=3 SV=1
MPSLPSKTLDTFPNPNAGRDYQIHIEVPEFTCLCPLTGQPDFAVLLLDYIPDERCVELKSLKMYTWSFRNEGAFHEAVTNKILDDLVAALDPRYFRLTAKWYVRGGIFTTVVAEHRKPGWTPAPAVALHQFDSLPHGNMRG

SEQ ID NO: 48430 - protein, 139 aa, Pigmentiphaga kullae
  misc_feature (1)..(139): tr|A0A4V2F306|A0A4V2F306_9BURK NADPH-dependent 7-cyano- 7-deazaguanine reductase OS=Pigmentiphaga kullae OX=151 784 GN=queF PE=3 SV=1
MPSQPSKSLDTFANPSPGRDFQIHIEVPEFTCLCPMTGQPDFALLVIDYIPDQLCVELKSLKLYAWSFRNEGKFHEAVTNEILDDLVRALSPRFMRITAKWYVRGGIFTNVVAEHRQAGWTPQPAVQLQEFAPGSNIRG

SEQ ID NO: 48431 - protein, 139 aa, Pigmentiphaga sp.; identical to SEQ ID NO: 44859
  misc_feature (1)..(139): tr|A0A208YBP5|A0A208YBP5_9BURK NADPH-dependent 7-cyano- 7-deazaguanine reductase OS=Pigmentiphaga sp. NML030171 OX=2008676 GN=queF PE=3 SV=1

SEQ ID NO: 48432 - protein, 139 aa, Pigmentiphaga sp.
  misc_feature (1)..(139): tr|A0A3G8GLF0|A0A3G8GLF0_9BURK NADPH-dependent 7-cyano- 7-deazaguanine reductase OS=Pigmentiphaga sp. H8 OX=248 8560 GN=queF PE=3 SV=1
MPSQPSKSLDTFTNPSPGRDFQIHIEVPEFTCLCPMTGQPDFALLIIDYIPDQLCVELKSLKLYAWSFRNEGKFHEAVTNEILDDLVRALSPRFMRITAKWYVRGGIFTNVVAEHRQPGWTPQPAVQLQEFAPGSNIRG

SEQ ID NO: 48433 - protein, 120 aa, Pirellula sp.
  misc_feature (1)..(120): tr|A0A142XVZ4|A0A142XVZ4_9PLAN NADPH-dependent 7-cyano- 7-deazaguanine reductase OS=Pirellula sp. SH-Sr6A OX=16 32865 GN=queF PE=3 SV=1
MPGTPFQDELECFDNSFPDRDYLIEIVCPEFTSMCPKTGQPDFGVLTFRYVPDQKCVELKSLKLYLQKFRNEGIFYENITNRILDDFVNVVQPRTVTLESKWGPRGGISSIITVTHNQKA

SEQ ID NO: 48434 - protein, 132 aa, Pirellula staleyi
  misc_feature (1)..(132): tr|D2R4S2|D2R4S2_PIRSD NADPH-dependent 7-cyano-7-deazag uanine reductase OS=Pirellula staleyi (strain ATCC 2737 7 / DSM 6068 / ICPB 4128) OX=530564 GN=queF PE=3 SV=1
MTQYVIHEKEKPGVSDTPRNLLETFENKFPSRDYTIEIVAPEFTSVCPLTGQPDFGTITLRYTPDAKCVELKSFKFYLQSFRNRGIFYENVTNSIFDDLVAVLEPRHLVLTARFTPRGGISSVIEVVHQKTK

SEQ ID NO: 48435 - protein, 135 aa, Piscibacillus halophilus
  misc_feature (1)..(135): tr|A0A1H9FU64|A0A1H9FU64_9BACI NADPH-dependent 7-cyano- 7-deazaguanine reductase OS=Piscibacillus halophilus OX =571933 GN=queF PE=3 SV=1
MSENYYLPRSGPMPRPNSVEEGREILKNEAFGAPNVQEITFNALEFTAVCPKTGQPDFGRVEISYTPQDKCIESKSLKFYLWSFRDQGAFCESLAAQIADDVMYAIDPKRVEVTVYQSARGGIELTTKAVREHDK

SEQ ID NO: 48436 - protein, 142 aa, Piscinibacter aquaticus
  misc_feature (1)..(142): tr|A0A5C6U013|A0A5C6U013_9BURK NADPH-dependent 7-cyano- 7-deazaguanine reductase OS=Piscinibacter aquaticus OX= 392597 GN=queF PE=3 SV=1
MPPNPPSAPSKELHVFPNPAPERDYVIQFQVPEFTCHCPLTGQPDFAHFTIDMIADKLCVELKSLKMYFWSYRNEGAFHEKVTNTILDDIVKATAPRFVRITAKWYVRGGIYTNVVAEHRKKGWKPQPRVDLPAHAAETGLL

SEQ ID NO: 48437 - protein, 279 aa, Piscirickettsia litoralis
  misc_feature (1)..(279): tr|A0A1E3GF91|A0A1E3GF91_9GAMM NADPH-dependent 7-cyano- 7-deazaguanine reductase OS=Piscirickettsia litoralis O X=1891921 GN=queF PE=3 SV=1
MSSEIELQLESAPLGQKSDYISTYSPDLLFPIPRKQKRDEINVPDALPFNGFDAWNAFELSWLNAKGKPCVALAHFEIDCASVNIVESKSFKLYLNSFNNTKFDSVTEVERILAKDIQAAAEGEVKARVILLSEVENQPILDFSAESIDDLDIECNEYMVKPDYLKADHTQIVEETLSSNLLKSNCLVTGQPDWGSVEIAYYGPKIDRESLLQYIVSFRNHNEFHEQCVERIFMDVMAHCQPERLTVHARYTRRGGLDINPVRSTEKSFKADNLRMARQ

SEQ ID NO: 48438 - protein, 279 aa, Piscirickettsia salmonis
  misc_feature (1)..(279): tr|A0A0K2L5I6|A0A0K2L5I6_PISSA NADPH-dependent 7-cyano- 7-deazaguanine reductase OS=Piscirickettsia salmonis OX =1238 GN=queF PE=3 SV=1
MSSAVERELANAPLGQKSSYISLYSPDLLFPIARKQKRDEINVPDVLPFYGYDIWNAFELSWLNAKGKPCVALAYFEIDCASTNIIESKSFKLYLNSLNNTKFDSAAEVEGLLAKDLQRAVDGVVKVKVILLSEVINQPILDFNGESIDHLDVACHEYRVNPAYLRADQECVLEEMLSSNLLKSNCLVTGQPDWGSVEISYYGPRINREGLLQYIVSFRNHNEFHEQCVERIFMDIMKQCQPERLTVHARYTRRGGLDINPARSTEKLFKADNLRMARQ

SEQ ID NO: 48439 - protein, 280 aa, Piscirickettsia salmonis
  misc_feature (1)..(280): tr|A0A0K2DYJ7|A0A0K2DYJ7_PISSA NADPH-dependent 7-cyano- 7-deazaguanine reductase OS=Piscirickettsia salmonis OX =1238 GN=queF PE=3 SV=1
MSSAVERELANAPLGQKSSYISLYSPDLLFPIARKQKRDEINVPDVLPFYGYDIWNAFELSWLNAKGKPCVALAYFEIDCASTNIIESKSFKLYLNSLNNTKFDSAAEVEGLLAKDLQRAVDGAVKVKVILLSEVINQPILDFNGESIDHLDVACHEYRVNPAYLRADQECVLVEETLSSNLLKSNCLVTGQPDWGSVEISYYGPRINREGLLQYIVSFRNHNEFHEQCVERIFMDITKQCQPEHLTVYARYTRRGGLDINPVRSTEKLFKADNLRMARQ

SEQ ID NO: 48440 - protein, 129 aa, Piscirickettsiaceae bacterium
  misc_feature (1)..(129): tr|A0A2A4SJQ0|A0A2A4SJQ0_9GAMM NADPH-dependent 7-cyano- 7-deazaguanine reductase OS=Piscirickettsiaceae bacteri um OX=2030828 GN=queF PE=3 SV=1
MSTTPSTDLETFPNPNPERDYTIKIDTPEFTCLCPKTGQPDFATMTLEYVPNRSCIELKSFKLYIWSYRDKGAFHEAVTNAILDDLVKACQPRFMRLSADFNVRGGVYTTVIVEHKDPKWTPPTPVQLA

SEQ ID NO: 48441 - protein, 279 aa, Piscirickettsiaceae bacterium
  misc_feature (1)..(279): tr|A0A177W6L9|A0A177W6L9_9GAMM NADPH-dependent 7-cyano- 7-deazaguanine reductase OS=Piscirickettsiaceae bacteri um NZ-RLO1 OX=1810840 GN=queF PE=3 SV=1
MPVGVELELASAPLGQKSNYISIYSPDLLFPIARKQKRDEINVPQVLPFYGCDVWNAFELSWLNAKGKPCVALAYFEIDCASTNIIESKSFKLYLNSLNNTKFDSVTEVQALLAKDIQHAVDGAAKVKVMLLTDVINQPILDFNGESIDHLDVACHEYHVNPTYLRADPGCVLEETLISNLLKSNCLVTGQPDWGSVEISYYGPRINREGLLQYIVSFRNHNEFHEQCVERIFMDIMQQCQPERLTVHARYTRRGGLDINPVRSTEKLFKADNLRMARQ

SEQ ID NO: 48442 - protein, 278 aa, Pistricoccus aurantiacus
  misc_feature (1)..(278): tr|A0A5B8ST40|A0A5B8ST40_9GAMM NADPH-dependent 7-cyano- 7-deazaguanine reductase OS=Pistricoccus aurantiacus OX =1883414 GN=queF PE=3 SV=1
MATERPKILQQAPLGRESAYPEHYDAELLYAIPRAANRQPLGIDETALPFVGEDEWHAFEVSWLNARGKPLVAVTRFRLPADSPYLIESKSWKLYLNSFNQTCFASVERVEQTLVRDLSTAAGAPVAVRLFAVDDPELAVTNLPGECIDHLEVDITRYTPDPTLILVSHEIAEETLHSHLLKSNCPVTGQPDWGSVLIRYRGPKLERKGLLKYLISYRQHQDFHEHCVEHIFMDLMRQARPQSLLIMARYVRRGGLDISPWRATPGERPFESLRLARQ

SEQ ID NO: 48443 - protein, 132 aa, Planctomicrobium piriforme
  misc_feature (1)..(132): tr|A0A1I3DLU8|A0A1I3DLU8_9PLAN NADPH-dependent 7-cyano- 7-deazaguanine reductase OS=Planctomicrobium piriforme OX=1576369 GN=queF PE=3 SV=1
MSANEPSRELLEVFENPFPGRNFVIDTVCPEFTSLCPKTGQPDFGTLTISYIPDQSCFELKSLKMYLQQYRNHGAFYERVTNTILDDLVAMVAPKWMKIEAAFTPRGGIRTTVIVEHPDRPLPSAQPTSTGR

SEQ ID NO: 48444 - protein, 116 aa, Planctomyces sp.
  misc_feature (1)..(116): tr|A0A142YL55|A0A142YL55_9PLAN NADPH-dependent 7-cyano- 7-deazaguanine reductase OS=Planctomyces sp. SH-PL62 OX =1636152 GN=queF PE=3 SV=1
MAGAVETFPNQFPDREYEIEITFPEFTAVCPKTGQPDFGTIVVTYVPAETCLELKSFKLYLFDFRNRGIFYEHSINTILDDLVAACRPRRMTVVGHFNPRGGMTSKITATHQAGRA

SEQ ID NO: 48445 - protein, 127 aa, Planctomyces sp.
  misc_feature (1)..(127): tr|A0A2E8F1I9|A0A2E8F1I9_9PLAN NADPH-dependent 7-cyano- 7-deazaguanine reductase OS=Planctomyces sp. OX=37635 G N=queF PE=3 SV=1
MDRRVLVRDEGAIDAECLLAFRYEYPEQDTQVEVDTDEFTAVCPWTGLPDYGTLTIYYIPGESCIELKSLKYYLLSYRDVGIVQEHAANRILLDLVALCQPRSMKITLDFKVRGGLHTAVTVEYPGN

SEQ ID NO: 48446 - protein, 124 aa, Planctomycetaceae bacterium
  misc_feature (1)..(124): tr|A0A1Z8MN39|A0A1Z8MN39_9PLAN NADPH-dependent 7-cyano- 7-deazaguanine reductase OS=Planctomycetaceae bacterium TMED10 OX=1986833 GN=queF PE=3 SV=1
MSQVSTQILETFDNPFPERDYCIEIVCPEFTSLCPKTGQPDFGVLTFTYCPDARCIELKSLKMYLQQFRDQGIFYENITNSIVEDLVKKIEPRHLKCEAAFSARGGITTKVTVQYPSPDEKKED

SEQ ID NO: 48447 - protein, 133 aa, Planctomycetaceae bacterium
  misc_feature (1)..(133): tr|A0A356QTK2|A0A356QTK2_9PLAN NADPH-dependent 7-cyano- 7-deazaguanine reductase OS=Planctomycetaceae bacterium OX=2026779 GN=queF PE=3 SV=1
MNTLNVNLAPKPSQDILETFDNQFPKRDYLIEIVCPEFTSVCPKTGQPDFGVLTFRYIANTRCVELKSLKLYLQAYRNAGIFYENVSNQIVEDLVSVLEPKHFTLVAQFTPRGGISSCITISQPDGHHLPAAK

SEQ ID NO: 48448 - protein, 108 aa, Planctomycetales bacterium
  misc_feature (1)..(108): tr|A0A1W9T3W9|A0A1W9T3W9_9BACT NADPH-dependent 7-cyano- 7-deazaguanine reductase (Fragment) OS=Planctomycetales bacterium 4572_13 OX=1971638 GN=B6I25_07745 PE=3 SV=1
DNPRPQRDYTITIRCPEFTSVCPKTGQPDFGTILIEYIPDALCIELKSLKFYMQSFRNKGIFYESLTNDILDDLAAACKPRWMQVRSTFTPRGGISTDVCAEYTAQKG

SEQ ID NO: 48449 - protein, 116 aa, Planctomycetales bacterium
  misc_feature (1)..(116): tr|A0A1U7GJ23|A0A1U7GJ23_9BACT NADPH-dependent 7-cyano- 7-deazaguanine reductase OS=Planctomycetales bacterium 71-10 OX=1895807 GN=queF PE=3 SV=1
MPGAVETFANQFPGREYEIEITCPEFTAVCPKTGQPDFGTIIITYVPAETCLELKSLKLYMFDFRNRGIFYEHSINTILDDLVASCTPRRMTVVGLFNPRGGMTSKITATHEAARA

SEQ ID NO: 48450 - protein, 114 aa, Planctomycetes bacterium
  misc_feature (1)..(114): tr|A0A1G2Y7F3|A0A1G2Y7F3_9BACT NADPH-dependent 7-cyano- 7-deazaguanine reductase OS=Planctomycetes bacterium GW F2_42_9 OX=1801958 GN=queF PE=3 SV=1
MDQPKLEFFDNPRPGRDYNISINCPEFTSVCPKTGQPDFGTIIIDYCPDKTCIELKSLKYYMQSFRNKGIFYEAVTNQILDDLVAACQPKRMKITSKFTPRGGITTEVTVQYPG

SEQ ID NO: 48451 - protein, 124 aa, Planctomycetes bacterium
  misc_feature (1)..(124): tr|A0A518CP15|A0A518CP15_9BACT NADPH-dependent 7-cyano- 7-deazaguanine reductase OS=Planctomycetes bacterium Pl a110 OX=2528007 GN=queF PE=3 SV=1
MSDSFKEILETFPNPHPNRDYLIETVCPEFTSVCPKTGQPDFGTLTITYIANEHCFELKSLKLYLQEYRNHGAFYEDVTNLILNDLVKITQPKWMQIIADFTPRGGIRTKVTVEYPSLAIHSQG

SEQ ID NO: 48452 - protein, 119 aa, Planctomycetia bacterium
  misc_feature (1)..(119): tr|A0A257TMB7|A0A257TMB7_9BACT NADPH-dependent 7-cyano- 7-deazaguanine reductase OS=Planctomycetia bacterium 21 -64-5 OX=1970542 GN=queF PE=3 SV=1
MPENFRAALETFDNQFPQREYVIEIVCPEFTSVCPKTGQPDFGTLTITYSPAAKCVELKSLKLYLQQFRNEGIFYEHATNRIFDDLVAVTAPRWMRLKAAFTSRGGISTTVTAEYEVGS

SEQ ID NO: 48453 - protein, 119 aa, Planctomycetia bacterium
  misc_feature (1)..(119): tr|A0A1Z8SUE2|A0A1Z8SUE2_9BACT NADPH-dependent 7-cyano- 7-deazaguanine reductase OS=Planctomycetia bacterium TM ED53 OX=1986839 GN=queF PE=3 SV=1
MSTRPSRNLETFPNPQPGRDFVIHFDCPEFTCLCPMTGQPDFARFELEYIPDQKCIESKSLKLYLWSYRDEGAFHEAITNQILDDMVAACEPRWFKVTGHFYVRGGLTPTITAEHGTKP

SEQ ID NO: 48454 - protein, 118 aa, Planctopirus ephydatiae
  misc_feature (1)..(118): tr|A0A518GSH8|A0A518GSH8_9PLAN NADPH-dependent 7-cyano- 7-deazaguanine reductase OS=Planctopirus ephydatiae OX= 2528019 GN=queF PE=3 SV=1
MPSEFLGILETFPNPFPQRDYSIETICPEFTSLCPKTGQPDYGTLVITYVPDEKCFELKSLKLYLQAFRNHGAFYEQVTNMILDDLVATTSPRSLEVVAQFTPRGGIRSNVTVKYVRD

SEQ ID NO: 48455 - protein, 113 aa, Planctopirus hydrillae
  misc_feature (1)..(113): tr|A0A1C3ELX9|A0A1C3ELX9_9PLAN NADPH-dependent 7-cyano- 7-deazaguanine reductase OS=Planctopirus hydrillae OX=1 841610 GN=queF PE=3 SV=1
MAILETFPNPFPQRDYSIETICPEFTSLCPKTGQPDYGTLVITYVPDEKCFELKSLKLYLQAFRNHGAFYEQVTNMILDDLVAATSPRSLEVVAQFTPRGGIRSNVTVKYAKD

SEQ ID NO: 48456 - protein, 118 aa, Planctopirus limnophila
  misc_feature (1)..(118): tr|D5SQT4|D5SQT4_PLAL2 NADPH-dependent 7-cyano-7-deazag uanine reductase OS=Planctopirus limnophila (strain ATC C 43296 / DSM 3776 / IFAM 1008 / 290) OX=521674 GN=queF PE=3 SV=1
MPSEFLGILETFPNPFPQRDYSIETICPEFTSLCPKTGQPDYGTLVITYVPDEKCFELKSLKLYLQAFRNHGAFYEQVTNMILDDLVAATSPRSLEVVAQFTPRGGIRSNVTVKYAKD

SEQ ID NO: 48457 - protein, 139 aa, Planifilum fimeticola
  misc_feature (1)..(139): tr|A0A2T0LHA4|A0A2T0LHA4_9BACL NADPH-dependent 7-cyano- 7-deazaguanine reductase OS=Planifilum fimeticola OX=20 1975 GN=queF PE=3 SV=1
MGKVTVDHSKYNNIRFDTQDESAIRTDLLETIPYEYPGKDTEVVIPTSEFTSVCPWSGLPDFADLTITFIPDKYLIEMKSLKYYLTSFRNVGIYQEHATNRILKDLVELAKPKYMKVEAIWNPRGGLGTRVVVEHGKRD

SEQ ID NO: 48458 - protein, 139 aa, Planifilum fulgidum
  misc_feature (1)..(139): tr|A0A1I2KJ44|A0A1I2KJ44_9BACL NADPH-dependent 7-cyano- 7-deazaguanine reductase OS=Planifilum fulgidum OX=2019 73 GN=queF PE=3 SV=1
MGKVTVDHSKYANIRFDTQDESAIRTDLLETIPYEYPGKDTEVVIPTSEFTTVCPWSGLPDFADLTITFIPDKYLIEMKSLKYYLTSFRNVGIYQEHATNRILKDLVELAKPKYMKVEAVWNPRGGLGTRVVVEHGKRD

SEQ ID NO: 48459 - protein, 146 aa, Planktothricoides sp.
  misc_feature (1)..(146): tr|A0A0M1JXH4|A0A0M1JXH4_9CYAN NADPH-dependent 7-cyano- 7-deazaguanine reductase OS=Planktothricoides sp. SR001 OX=1705388 GN=queF PE=3 SV=1
METELVAQSQNGESQANFFNPQMKYGEREILEGQLITFPNPRVGRRYEIQVTLPEFTCKCPFSGYPDFATIYITYIPDQKVVELKAIKLYINQYRDRYISHEESVNQILDDFVDACDPLEITIKGDFNPRGNVHTVISVKHEKKID

SEQ ID NO: 48460 - protein, 144 aa, Planktothrix agardhii
  misc_feature (1)..(144): tr|A0A2Z6CIW1|A0A2Z6CIW1_PLAAG NADPH-dependent 7-cyano- 7-deazaguanine reductase OS=Planktothrix agardhii NIES- 204 OX=282423 GN=queF PE=3 SV=1
MSHSYSEPTESATASPEASKYGEREIEEGQLITFPNPRIGRRYFVEIILPEFTCKCPFSGYPDFAKIYLTYLPNERVVELKSIKLYINSYRDRYISHEESINQILDDFVAAVDPLEVSIRGDFNPRGNVHTVVEVEHEKLNPKL

SEQ ID NO: 48461 - protein, 144 aa, Planktothrix agardhii; identical to SEQ ID NO: 48460
  misc_feature (1)..(144): tr|A0A073CJ59|A0A073CJ59_PLAAG NADPH-dependent 7-cyano- 7-deazaguanine reductase OS=Planktothrix agardhii NIVA- CYA 126/8 OX=388467 GN=queF PE=3 SV=1

SEQ ID NO: 48462 - protein, 144 aa, Planktothrix rubescens; identical to SEQ ID NO: 48460
  misc_feature (1)..(144): tr|A0A1J1LAV2|A0A1J1LAV2_PLARU NADPH-dependent 7-cyano- 7-deazaguanine reductase OS=Planktothrix rubescens OX=5 9512 GN=queF PE=3 SV=1

SEQ ID NO: 48463 - protein, 144 aa, Planktothrix sp.
  misc_feature (1)..(144): tr|A0A1T4ZBC1|A0A1T4ZBC1_9CYAN NADPH-dependent 7-cyano- 7-deazaguanine reductase OS=Planktothrix sp. PCC 11201 OX=1729650 GN=queF PE=3 SV=1
MSHPYTEPTEVSTASPEELKYGEREIEEGQLITFPNPRIGRRYQVEITLPEFTCKCPFSGYPDFATIYLTYLPDERVVELKSIKLYINSYRDRYISHEESINQILDDFVAAADPLEVRIKGDFNPRGNVHTVVEVAHQKLNPNL

SEQ ID NO: 48464 - protein, 40 aa, Planktothrix sp.
  misc_feature (1)..(40): tr|A0A354WAL7|A0A354WAL7_9CYAN NADPH-dependent 7-cyano- 7-deazaguanine reductase QueF (Fragment) OS=Planktothri x sp. UBA10369 OX=2055760 GN=DDZ60_04480 PE=4 SV=1
QILDDFVAAADPLEVSIRGDFNPRGNVHTVVEVEHQKVNP

SEQ ID NO: 48465 - protein, 144 aa, Planktothrix tepida
  misc_feature (1)..(144): tr|A0A1J1LIH4|A0A1J1LIH4_9CYAN NADPH-dependent 7-cyano- 7-deazaguanine reductase OS=Planktothrix tepida PCC 921 4 OX=671072 GN=queF PE=3 SV=1
MSHSYTETPESPATSPEALKYGEREIAEGQLITFPNPRIGRRYEVQITLPEFTCKCPFSGYPDFATIYLTYVPNERVVELKSIKLYINSYRDRYISHEESINQILDDFVTAADPLEVRIKGDFNPRGNVHTVVEVQHLRVNPES

SEQ ID NO: 48466 - protein, 164 aa, Planococcus antarcticus
  misc_feature (1)..(164): tr|A0A1C7DC90|A0A1C7DC90_9BACL NADPH-dependent 7-cyano- 7-deazaguanine reductase OS=Planococcus antarcticus DSM 14505 OX=1185653 GN=queF PE=3 SV=1
MAGRNEDTLDHLSLLGNQNTAYKFEYDPEILEPIDNLHSRDYFVKFNCPEFTSLCPQTGQPDFATIYLSFIPDQKLVESKSLKLYLFSFRNHGDFHEDVVNIIMNDLIKLMDPRYIEVWGKFTPRGGLSIDPYTNHGKPGTKYEEMASYRMMNHDMNPETITNR

SEQ ID NO: 48467 - protein, 164 aa, Planococcus citreus
  misc_feature (1)..(164): tr|A0A497YGL9|A0A497YGL9_9BACL NADPH-dependent 7-cyano- 7-deazaguanine reductase OS=Planococcus citreus OX=1373 GN=queF PE=3 SV=1
MAGRNEETLEHLSLLGNQNTRYKFEYDPGILEAIDNLHTRDYFVKFNCPEFTSLCPQTGQPDFATIYLSFIPDKKLVESKALKLYLFSFRNHGDFHEDVVNIIMNDLIELLDPRYIEVWGKFTPRGGLSIDPYTNYGKPGTKYEEMATYRMMNHDMNPETITNR

SEQ ID NO: 48468 - protein, 164 aa, Planococcus donghaensis
  misc_feature (1)..(164): tr|A0A1C7EMH2|A0A1C7EMH2_9BACL NADPH-dependent 7-cyano- 7-deazaguanine reductase OS=Planococcus donghaensis OX= 414778 GN=queF PE=3 SV=1
MAGRNEDTLDHLSLLGNQNTKYKFEYDPDVLEPIDNLHTRDYFVKFNCPEFTSLCPQTGQPDFATIYLSFIPDKTLVESKSLKLYLFSFRNHGDFHEDVVNIIMNDLIKLMDPRYIEVWGKFTPRGGLSIDPYTNYGKPGTKYEEMASYRMMNHDLNPETITNR

SEQ ID NO: 48469 - protein, 164 aa, Planococcus donghaensis; identical to SEQ ID NO: 48468
  misc_feature (1)..(164): tr|E7RDL1|E7RDL1_9BACL NADPH-dependent 7-cyano-7-deazag uanine reductase OS=Planococcus donghaensis MPA1U2 OX=9 33115 GN=queF PE=3 SV=1

SEQ ID NO: 48470 - protein, 164 aa, Planococcus halocryophilus
  misc_feature (1)..(164): tr|A0A1C7DTZ5|A0A1C7DTZ5_9BACL NADPH-dependent 7-cyano- 7-deazaguanine reductase OS=Planococcus halocryophilus OX=1215089 GN=queF PE=3 SV=1
MAGRNEDTLDHLSLLGNQNTKYKFEYAPEILEPIDNLHTRDYFVKFNCPEFTSLCPQTGQPDFATIYLSFIPDKTLVESKSLKLYLFSFRNHGDFHEDVVNIIMNDLIKLMDPRYIEVWGKFTPRGGLSIDPYTNYGKPGTKYEEMASYRMMNHDLNPETITNR

SEQ ID NO: 48471 - protein, 164 aa, Planococcus halotolerans
  misc_feature (1)..(164): tr|A0A365KQL8|A0A365KQL8_9BACL NADPH-dependent 7-cyano- 7-deazaguanine reductase OS=Planococcus halotolerans OX =2233542 GN=queF PE=3 SV=1
MAGRNEDTLDHLTLLGNQDTKYKYEYAPEVLEAIDNMHTRDYFVKFNNPEFTSLCPQTGQPDFATIYLSFIPDKKLVESKSLKLYFFSFRNHGDFHEDVVNIIMNDLIDLLDPRYIEVWGKFTPRGGLSIDPYTNYGKPGTKYEEMASYRMMNHDMNPETITNR

SEQ ID NO: 48472 - protein, 164 aa, Planococcus kocurii
  misc_feature (1)..(164): tr|A0A0U2Y4W4|A0A0U2Y4W4_9BACL NADPH-dependent 7-cyano- 7-deazaguanine reductase OS=Planococcus kocurii OX=1374 GN=queF PE=3 SV=1
MAGRNEDTLEHLELLGNQNTKYKFEYDPDILEPIDNLHSRDYFVKFNCPEFTSLCPQTGQPDFATIYLSFIPDKTLVESKSLKLYLFSFRNHGDFHEDVVNIIMNDLIKLMDPRYIEVWGKFTPRGGLSIDPYTNYGQPGTKYEEMASYRMMNHDMNPETITNR

SEQ ID NO: 48473 - protein, 164 aa, Planococcus maitriensis; identical to SEQ ID NO: 48467
  misc_feature (1)..(164): tr|A0A365K4Y4|A0A365K4Y4_9BACL NADPH-dependent 7-cyano- 7-deazaguanine reductase OS=Planococcus maitriensis OX= 221799 GN=queF PE=3 SV=1

SEQ ID NO: 48474 - protein, 164 aa, Planococcus maritimus
  misc_feature (1)..(164): tr|A0A1C7DWR7|A0A1C7DWR7_PLAMR NADPH-dependent 7-cyano- 7-deazaguanine reductase OS=Planococcus maritimus OX=19 2421 GN=queF PE=3 SV=1
MAGRNEDTLEHLALLGNQNTRYKFEYDPGILEAIDNLHTRDYFVKFNCPEFTSLCPQTGQPDFATIYLSFIPDKKLVESKALKLYLFSFRNHGDFHEDVVNIIMNDLIELLDPRYIEVWGKFTPRGGLSIDPYTNHGKPGTKYEEMATYRMMNHDMNPETITNR

SEQ ID NO: 48475 - protein, 164 aa, Planococcus maritimus
  misc_feature (1)..(164): tr|A0A150W4C8|A0A150W4C8_PLAMR NADPH-dependent 7-cyano- 7-deazaguanine reductase OS=Planococcus maritimus OX=19 2421 GN=queF PE=3 SV=1
MAGRNEETLEHLSLLGNQNTRYKFEYDPGILEAIDNLHPRDYFVKFNCPEFTSLCPQTGQPDFATIYLSFIPDKKLVESKALKLYLFSFRNHGDFHEDVVNIIMNDLIELLDPRYIEVWGKFTPRGGLSIDPYTNYGKPGTKYEEMATYRMMNHDMNPETITNR

SEQ ID NO: 48476 - protein, 164 aa, Planococcus massiliensis
  misc_feature (1)..(164): tr|A0A098ESH3|A0A098ESH3_9BACL NADPH-dependent 7-cyano- 7-deazaguanine reductase OS=Planococcus massiliensis OX =1499687 GN=queF PE=3 SV=1
MTGRNEDTLDHLSLLGNQNTKYKFEYDPDILEPIDNLHTRDYFVKFNCPEFTSLCPQTGQPDFATMYISFIPDKKLVESKSLKLYLFSFRNHGDFHEDVVNIIMNDLIKLMEPRYIEVWGKFTPRGGLSIDPYTNYGKPGTKYEEMASYRIMNHDMYPETITNR

SEQ ID NO: 48477 - protein, 164 aa, Planococcus plakortidis; identical to SEQ ID NO: 48467
  misc_feature (1)..(164): tr|A0A1C7EBJ5|A0A1C7EBJ5_9BACL NADPH-dependent 7-cyano- 7-deazaguanine reductase OS=Planococcus plakortidis OX= 1038856 GN=queF PE=3 SV=1

SEQ ID NO: 48478 - protein, 164 aa, Planococcus rifietoensis; identical to SEQ ID NO: 48467
  misc_feature (1)..(164): tr|A0A0U2XGT7|A0A0U2XGT7_9BACL NADPH-dependent 7-cyano- 7-deazaguanine reductase OS=Planococcus rifietoensis OX =200991 GN=queF PE=3 SV=1

SEQ ID NO: 48479 - protein, 164 aa, Planococcus salinus
  misc_feature (1)..(164): tr|A0A3M8P518|A0A3M8P518_9BACL NADPH-dependent 7-cyano- 7-deazaguanine reductase OS=Planococcus salinus OX=1848 460 GN=queF PE=3 SV=1
MAGRNEDTLDHLTLLGNQDTKYKYAYAPEVLEAIDNMHTRDYFVKFNNPEFTSLCPQTGQPDFATIYLSFIPDKKLVESKSLKLYFFSFRNHGDFHEDVVNIIMNDLIDLLDPRYIEVWGKFTPRGGLSIDPYTNYGKPGTKYEEMASYRMMNHDMNPETITNR

SEQ ID NO: 48480 - protein, 164 aa, Planococcus sp.
  misc_feature (1)..(164): tr|A0A5C5SRV5|A0A5C5SRV5_9BACL NADPH-dependent 7-cyano- 7-deazaguanine reductase OS=Planococcus sp. CPCC 101016 OX=2599617 GN=queF PE=3 SV=1
MAGRNEETLDHLSLLGNQNTKYKFEYDPEILEPIDNLHSRDYFVKFNCPEFTSLCPQTGQPDFATIYLSFIPEKKLVESKSLKLYLFSFRNHGDFHEDVVNIIMNDLINLMDPRYIEVWGKFTPRGGLSIDPYTNYGKPGTKYEEMASYRMMNHDMNPETITNR

SEQ ID NO: 48481 - protein, 164 aa, Planococcus sp.; identical to SEQ ID NO: 48472
  misc_feature (1)..(164): tr|A0A5B0CT55|A0A5B0CT55_9BACL NADPH-dependent 7-cyano- 7-deazaguanine reductase OS=Planococcus sp. ANT_H30 OX= 2597347 GN=queF PE=3 SV=1

SEQ ID NO: 48482 - protein, 164 aa, Planomicrobium glaciei
  misc_feature (1)..(164): tr|A0A1G7Y8H1|A0A1G7Y8H1_9BACL NADPH-dependent 7-cyano- 7-deazaguanine reductase OS=Planomicrobium glaciei OX=4 59472 GN=queF PE=3 SV=1
MAGRNEDTLDHLSLLGNQNTKYQFEYDPDILEAIDNLHTRDYFVKFNCPEFTSLCPQTGQPDFATIYLSFIPDKKLVESKSLKLYLFSFRNHGDFHEDVVNIIMNDLIKLLEPRYIEVWGKFTPRGGLSIDPYTNYGKPGTKYEEMASYRMMNHDMYPETITNR

SEQ ID NO: 48483 - protein, 164 aa, Planomicrobium soli
  misc_feature (1)..(164): tr|A0A2P8H244|A0A2P8H244_9BACL NADPH-dependent 7-cyano- 7-deazaguanine reductase OS=Planomicrobium soli OX=1176 648 GN=queF PE=3 SV=1
MAGRNEDTLDHLSLLGNQNTKYKFEYDPDILEPIDNLHTRDYFVKFNCPEFTSLCPQTGQPDFATIYLSFIPDKKLVESKSLKLYLFSFRNHGDFHEDVVNIIMNDLIKLMDPRYIEVWGKFTPRGGLSIDPYTNYGKPGTKYEEMASYRMMNHDMNPETITNR

SEQ ID NO: 48484 - protein, 164 aa, Planomicrobium sp.
  misc_feature (1)..(164): tr|A0A2I0FJJ2|A0A2I0FJJ2_9BACL NADPH-dependent 7-cyano- 7-deazaguanine reductase OS=Planomicrobium sp. MB-3u-38 OX=2058318 GN=queF PE=3 SV=1
MAGRNEDTLDHLTLLGNQDTKYKYEYAPEVLEAIDNMHSRDYFVKFNNPEFTSLCPQTGQPDFATIYLSFIPDKKLVESKSLKLYFFSFRNHGDFHEDVVNIIMNDLINLLDPRYIEVWGKFTPRGGLSIDPYTNYGKPGTKYEEMASYRMMNHDMNPETITNR

SEQ ID NO: 48485 - protein, 164 aa, Planomicrobium sp.; identical to SEQ ID NO: 48471
  misc_feature (1)..(164): tr|A0A3L7JJI5|A0A3L7JJI5_9BACL NADPH-dependent 7-cyano- 7-deazaguanine reductase OS=Planomicrobium sp. Y74 OX=2 478977 GN=queF PE=3 SV=1

SEQ ID NO: 48486 - protein, 277 aa, Plasticicumulans acidivorans
  misc_feature (1)..(277): tr|A0A317MUM1|A0A317MUM1_9GAMM NADPH-dependent 7-cyano- 7-deazaguanine reductase OS=Plasticicumulans acidivoran s OX=886464 GN=queF PE=3 SV=1
MSDLDRAPLGKPVRYASHYDPTLLCPIPRQLKRDEIGLPAGTPLPFHGLDLWNAYELSWLLPSGKPQVALAEFRVPASSPNIIESKSLKLYLNSFNQTRLAARAALLARLQTDLSAAAGAAVGVELIGPERFAALDFGELDGECIDDLDVTIEHYQPAPQLLRADFSAAPVAETLCSNLLKSNCLVTGQPDWASVQIRYRGAPIDRAGLLGYLVSFREHNEFHEQCVERIYMDLLRQCRPQELRVYARYTRRGGLDINPLRSSDAAVTAVNPRGARQ

SEQ ID NO: 48487 - protein, 275 aa, Plasticicumulans lactativorans
  misc_feature (1)..(275): tr|A0A4R2L405|A0A4R2L405_9GAMM NADPH-dependent 7-cyano- 7-deazaguanine reductase OS=Plasticicumulans lactativor ans OX=1133106 GN=queF PE=3 SV=1
MHELEHAPLGRPVAYVSEYDPGLLFPIARAPQREALGIGTPLPFHGVDLWTAYELSWLAPSGKPQVALARIAVPAGSPCIVESKSLKLYLNSFNQTRLDGPAELRARLERDLGAGFGAPVAVELVGPERFADERLAELDGDCLDGLDIVTDTYTPEPGFLGAAAGAAPVREVLVSHLLKSNCRVTGQPDWASVQIAYAGPPIDHAGLLRYLISFRNHNEFHEPCVERIFIDVLRRCAPTQLSVYARYTRRGGLDINPFRSTDAGAQPPRVRCARQ

SEQ ID NO: 48488 - protein, 281 aa, Plautia stali
  misc_feature (1)..(281): tr|U3U7C4|U3U7C4_9ENTR NADPH-dependent 7-cyano-7-deazag uanine reductase OS=Plautia stali symbiont OX=891974 GN =queF PE=3 SV=1
MSSENRDTALSSLTLGKPTAYVDRYDNTLLQAVPRSLNREPLGLYPDNLPFHGADIWTLYELSWLNSKGVPQVAVGEVVLSADSVNLIESKSFKLYLNSFNQTIFADWGAVRQTLERDLSACANGQVSVALFRLSEVEGQPIGHFAGDVIDEQDITISNYGFNADYLASATGSEVVEETLVSHLLKSNCLITNQPDWGSVMIRYQGPRIDREALLRYLISFRQHNEFHEQCIERIFNDIQRFCQPAALTVYARYTRRGGLDINPWRSNVPFTPGYSRLVRQ

SEQ ID NO: 48489 - protein, 145 aa, Pleionea mediterranea
  misc_feature (1)..(145): tr|A0A316GHQ7|A0A316GHQ7_9GAMM 7-cyano-7-deazaguanine r eductase OS=Pleionea mediterranea OX=523701 GN=C8D97_10 1155 PE=4 SV=1
MNNRVMTWESIDREQLKALPNPSNGAYEIKVKIPEFTFLGVHEQPDFATVYLTFYPTNKIIELKALKQYVYQLRNIVVSYERLINVMYDHLVSVYEPDRLRLVMICNPRGGISSRLTIDSDWGARGGPEKYRDWMSHDDVWDVVL

SEQ ID NO: 48490 - protein, 272 aa, Pleionea mediterranea
  misc_feature (1)..(272): tr|A0A316FVW5|A0A316FVW5_9GAMM NADPH-dependent 7-cyano- 7-deazaguanine reductase OS=Pleionea mediterranea OX=52 3701 GN=queF PE=3 SV=1
MTKQIPLGQSTAYPERYDRELLFPVARQDKRTELGITQSLPFVGKDIWTAYEVSWLNSKGKPQVAIAEFYFPCESPFIVESKSFKLYLNSFNQERLDSMAELKARLITDLSEAVKSDVNVLMFALSEYQSKGLGKLTGACLDDLDIDCEIYDYQPELLTLKSDGALADEVVYSHLLKSNCLITSQPDWATLQIRYQGNAIDHASLLRYIVSFRNHNEFHEQCVERIYTDIMQQCQPKQLTVIARYTRRGGLDINPWRSSHETNIEFMRLARQ

SEQ ID NO: 48491 - protein, 153 aa, Pleomorphomonas diazotrophica
  misc_feature (1)..(153): tr|A0A2N3LZ23|A0A2N3LZ23_9RHIZ NADPH-dependent 7-cyano- 7-deazaguanine reductase OS=Pleomorphomonas diazotrophi ca OX=1166257 GN=queF PE=3 SV=1
MTSDATGAHQLGKATATPASPDEAVLDRVPNPHPDIDYLARFTAPEFTSLCPVTGQPDFAHLVIDYVPDQWLVESKSLKLFLTSFRNHGSFHEDCTIMIARRLVKRLEPRWLRIGGYWYPRGGIPIDVFWQTGAPPKDLWLPDQGVATYRGRG

SEQ ID NO: 48492 - protein, 153 aa, Pleomorphomonas sp.
  misc_feature (1)..(153): tr|A0A4R8FE54|A0A4R8FE54_9RHIZ NADPH-dependent 7-cyano- 7-deazaguanine reductase OS=Pleomorphomonas sp. CF100 O X=2135722 GN=queF PE=3 SV=1
MTSDATGAHQLGKVAATPLSPEEAVLDRVPNPHQDIDYLARFTAPEFTSLCPVTGQPDFAHLVIDYVPDQWLVESKSLKLFLTSFRNHGSFHEDCTIMIARRLVERLDPRWLRIGGYWYPRGGIPIDVFWQTGAPPKDLWLPDQGVATYRGRG

SEQ ID NO: 48493 - protein, 118 aa, Plesiocystis pacifica
  misc_feature (1)..(118): tr|A6FWQ9|A6FWQ9_9DELT NADPH-dependent 7-cyano-7-deazag uanine reductase OS=Plesiocystis pacifica SIR-1 OX=3916 25 GN=queF PE=3 SV=1
MPSQPTRELETFPNPRPERSYEIRFECPEFTCVCPKTGQPDFATIRIRYSPAQTCVELKSLKLYLWSYRDLGAFHEAVTNQILDDLVAATQPRWMVVEGDFYVRGGIKTVVEARHDAE

SEQ ID NO: 48494 - protein, 287 aa, Plesiomonas shigelloides
  misc_feature (1)..(287): tr|A0A2P1VT36|A0A2P1VT36_PLESH NADPH-dependent 7-cyano- 7-deazaguanine reductase OS=Plesiomonas shigelloides OX =703 GN=queF PE=3 SV=1
MTKYHNDPALQGLTLGKSTDYCDQYNPQLLQPVPRALNRDDLQLTGSLPFSGADLWTLYELSWLNNNGVPQVAIGDVYIPATSRNLVESKSFKLYLNSFNQTRFADWESVAATLQRDLSQCAEGDVKVLLHRVDAYPGQAIADFPGACIDEQDIVIDDYHFNADYLQGAASQANGEPMPIAEETLVSHLLKSNCLITHQPDWGSVSIHYRGPQINREALLRYLISFRSHNEFHEQCVERIFTDLKRFCAPEKLTVFARYTRRGGLDINPFRSDWEAMPAQNRRLARQ

SEQ ID NO: 48495 - protein, 287 aa, Plesiomonas shigelloides
  misc_feature (1)..(287): tr|R8AN74|R8AN74_PLESH NADPH-dependent 7-cyano-7-deazag uanine reductase OS=Plesiomonas shigelloides 302-73 OX= 1315976 GN=queF PE=3 SV=1
MTKYHNDPALQGLTLGKSTDYCDQYNPQLLQPVPRALNRDDLQLTGSLPFSGADLWTLYELSWLNNNGVPQVAIGDVYIPATSRNLVESKSFKLYLNSFNQTRFADWESVAATLQRDLSQCAEGDVKVLLHRVDAYPGQAIADFPGECIDEQEIVIDDYHFNADYLQGAASQANGEPMPMVEETLVSHLLKSNCLITRQPDWGSVSIHYRGPQINREALLRYLISFRSHNEFHEQCVERIFTDLKRFCAPEKLTVFARYTRRGGLDINPFRSDWEAMPAQNRRLARQ

SEQ ID NO: 48496 - protein, 136 aa, Pleurocapsa sp.
  misc_feature (1)..(136): tr|A0A2T1CLU7|A0A2T1CLU7_9CYAN NADPH-dependent 7-cyano- 7-deazaguanine reductase OS=Pleurocapsa sp. CCALA 161 O X=2107688 GN=queF PE=3 SV=1
MTTTPQSPTTGDELKYGERAIAEGELITFPNPRIGRKYDIRITLPEFTCKCPFSGYPDFATIYLTYSPDQTVVELKGLKLYINSYRDRYIPHEEVVNQILDDFVAACDPLTASVKGDFTPRGNVHTVIEVHHTKEL

SEQ ID NO: 48497 - protein, 134 aa, Pleurocapsa sp.
  misc_feature (1)..(134): tr|K9SZE8|K9SZE8_9CYAN NADPH-dependent 7-cyano-7-deazag uanine reductase OS=Pleurocapsa sp. PCC 7327 OX=118163 GN=queF PE=3 SV=1
MQAPEREKPEMKYGERAIAQGELITFPNPRIGRRYDIHITLPEFTCKCPFSGYPDFATIYITYCPDEKVVELKALKLYINSYRDRYISHEEAVNQILDDFVAACDPLEAKVKGDFNPRGNVHTVIEVCHHKQSP

SEQ ID NO: 48498 - protein, 281 aa, Pluralibacter gergoviae
  misc_feature (1)..(281): tr|A0A2C5WH50|A0A2C5WH50_PLUGE NADPH-dependent 7-cyano- 7-deazaguanine reductase OS=Pluralibacter gergoviae OX= 61647 GN=queF PE=3 SV=1
MSSYENDRALSGLTLGKSTEYRDIYDASLLQPVPRSLNRDPLGIRADRLPFHGGDIWTLYELSWLNAKGLPQVAVGHVELSDTSVNLVESKSFKLYLNSFNQTRFASWDDVRSTLERDLRACAQGDVSVALYRLDEIEGQPVARFRGTCIDDQDIAIDSYAFSTDHLAGAAGGDVVEETLVSHLLKSNCLITHQPDWGSVQIQYRGPRIDREKLLRYLVSFRHHNEFHEQCVERIFCDIQRFCRPDTLSVYARYTRRGGLDINPWRSNAEFTPATGRLVRQ

SEQ ID NO: 48499 - protein, 281 aa, Pluralibacter gergoviae
  misc_feature (1)..(281): tr|A0A0J5LF39|A0A0J5LF39_PLUGE NADPH-dependent 7-cyano- 7-deazaguanine reductase OS=Pluralibacter gergoviae OX= 61647 GN=queF PE=3 SV=1
MSSYENDRALSGLTLGKSTEYRDIYDASLLQPVPRSLNRDPLGIRADHLPFHGGDIWTLYELSWLNAKGLPQVAVGHVELSDTSVNLVESKSFKLYLNSFNQTRFASWDDVRSTLERDLRACAQGDVSVALYRLDEIEGQPVARFRGTCIDDQDIAIDSYAFSADHLAGAAGGDVVEETLVSHLLKSNCLITHQPDWGSVQIQYRGPRIDREKLLRYLVSFRHHNEFHEQCVERIFCDIQRFCRPEALSVYARYTRRGGLDINPWRSNAEFTPATGRLVRQ

SEQ ID NO: 48500 - protein, 272 aa, Pokkaliibacter plantistimulans
  misc_feature (1)..(272): tr|A0A318CAG2|A0A318CAG2_9GAMM NADPH-dependent 7-cyano- 7-deazaguanine reductase OS=Pokkaliibacter plantistimul ans OX=1635171 GN=queF PE=3 SV=1
MSKTESLLKQAQAPLGEKSAYVDQYDPAQLCPIPRQQIWTGSCYRTDVWTGYEISWLNEKGKPVAAMATFDIPGDSPSIIESKSFKLYLNSFNGYRVASWDRVAEMMARDLSAAAGAQVSVTLQPLHQLLVPSLPEGLCLDDLDVTIDHYLPEASLLSHAKGAGSVVEEVVHSNLLKSNCPVTGQPDWGTVVVRYVGKAIDHESLLRYIVSYRNHGDFHEQCVEQIFTDIMMRCQPEQLTVYARYVRRGGLDINPWRSTSQALPTFYRLPRQ

SEQ ID NO: 48501 - protein, 281 aa, Polaromonas naphthalenivorans
  misc_feature (1)..(281): sp|A1VS34|QUEF_POLNA NADPH-dependent 7-cyano-7-deazagua nine reductase OS=Polaromonas naphthalenivorans (strain CJ2) OX=365044 GN=queF PE=3 SV=1
MNTPEHSELGKSSAYVDQYDASLLFPIPRLAKRLEMGVGATPIFFGADLWTAFELSWLNLRGKPQVALAQFIVPCETPNIIESKSFKLYLNSFNNTRFPDAAEVQARLRADISEAAWRGAPQASTVGVKLLLPEMFDREDVAELDGLSLDRLDVECSRYTPAPDLLSAVFDEPPVSEVLTSNLLKSNCLVTGQPDWGSVRIAYSGPQINQEGLLQYIVSFRNHNEFHEQCVERIFMDLWTRCKPVKLTVYARYTRRGGLDINPFRTSHPQAIPPNIRMARQ

SEQ ID NO: 48502 - protein, 275 aa, Polaromonas sp.
  misc_feature (1)..(275): sp|Q126D2|QUEF_POLSJ NADPH-dependent 7-cyano-7-deazagua nine reductase OS=Polaromonas sp. (strain JS666 / ATCC BAA-500) OX=296591 GN=queF PE=3 SV=1
MNTPEHSQLGKSSAYVDQYDASLLFPIPRAEKRAEIGVTGTPPFFGADMWTAFELSWLNMRGKPQVALAHITVPCESPNIVESKSFKLYLNSFNNTRFSDARDVRERIRADINAAVGAGVGVKTLGPELFDREPVHELDGLSLDRLDVECIHFTPAPELLFAEFDEPPVDETLTSNLLKSNCLVTGQPDWGSVQISYSGPQINQEGLLQYLVSFRNHNEFHEQCVERIFMDVWTRCRPLKLSVYARYTRRGGLDINPFRTSHPQALPANIRMARQ

SEQ ID NO: 48503 - protein, 281 aa, Polaromonas sp.
  misc_feature (1)..(281): tr|A0A068YJZ0|A0A068YJZ0_9BURK NADPH-dependent 7-cyano- 7-deazaguanine reductase OS=Polaromonas sp. CG9_12 OX=1 504672 GN=queF PE=3 SV=1
MNLPEHSELGKPSAYVDQYDASLLFPIPRLAKREELGVGAAPPFFGADLWTAFELSWLNLRGKPQLALAHFTVPCETPNIVESKSFKLYLNSFNNTRFADAAAVQARLRADISEAAWHGAPNASSVGVKLLLPEMFDREPVHELDGLSLDRLDVECSRYTPAPDLLTAVFDEPPVTEVLTSSLLKSNCLVTGQPDWGSVRISYSGPQINQEGLLQYLVSYRNHNEFHEQCVERIFMDVWTRCKPVKLTVYARYTRRGGLDINPFRTSHPQAMPPNVRTARQ

SEQ ID NO: 48504 - protein, 163 aa, [Polyangium] brachysporum
  misc_feature (1)..(163): tr|A0A0G3BIT6|A0A0G3BIT6_9BURK NADPH-dependent 7-cyano- 7-deazaguanine reductase OS=[Polyangium] brachysporum O X=413882 GN=queF PE=3 SV=1
MAKNVNKAAAKPAAAPKQRPMPANPPSAPSKELHVFDNPAPERDYVIQFQIPEFTCHCPLTGQPDFAHFTIDYIADQLCIELKSLKMYMWSFRNEGAFHEKVTNDILTDIVKAVQPRYARIVAKWYVRGGIYTNVVAEHRQKGWKPVEPVQLPQHAAESGLLR

SEQ ID NO: 48505 - protein, 142 aa, Polycyclovorans sp.
  misc_feature (1)..(142): tr|A0A2E2JA23|A0A2E2JA23_9GAMM NADPH-dependent 7-cyano- 7-deazaguanine reductase OS=Polycyclovorans sp. OX=2024 852 GN=queF PE=3 SV=1
MTPHASQSLETFPNPAPTRDYVIRMRLPEFTCLCPKTGQPDFATLYLEYIADQQCVELKSLKLYIWSFRNEGCFHEAVTNRMLDDLVAATRPRFMRLTAVFNVRGGVYTHVTAEHCTPGYVPSLPPPAWHVDPTGAGLTPGV

SEQ ID NO: 48506 - protein, 154 aa, Polymorphobacter sp.
  misc_feature (1)..(154): tr|A0A4Y9EQE0|A0A4Y9EQE0_9SPHN NADPH-dependent 7-cyano- 7-deazaguanine reductase OS=Polymorphobacter sp. DJ1R-1 OX=2511025 GN=queF PE=3 SV=1
MNDENPSGLQHLGQNSRLPASPEAARLDYPANPRAGTDYLVRFVAPEFTSLCPVTGQPDFAHIVIDYVPAATIVESKSLKLFLGAFRNHAAFHEDCTVGIGQRLFAEMAPKWLRIGGYWYPRGGIPIDVFWQSGPPPANVWIPDQGVPGYRGRG

SEQ ID NO: 48507 - protein, 150 aa, Polymorphum gilvum
  misc_feature (1)..(150): tr|F2J2N8|F2J2N8_POLGS NADPH-dependent 7-cyano-7-deazag uanine reductase OS=Polymorphum gilvum (strain LMG 2579 3 / CGMCC 1.9160 / SL003B-26A1) OX=991905 GN=queF PE=3 SV=1
MTHDAPALGRAVALPADPDSATLDRVPNPHADTDYVTRFVCPEFTSICPVTGQPDFAHLVIDYIPDRWLVESKSLKLYLGSFRNHGAFHEDCTVAIGKRLATTLEPRWLRIGGYWYPRGGIPIDVFWQTGKAPDSVWIPDQGVPPYRGRG

SEQ ID NO: 48508 - protein, 275 aa, Polynucleobacter aenigmaticus
  misc_feature (1)..(275): tr|A0A254Q6D4|A0A254Q6D4_9BURK NADPH-dependent 7-cyano- 7-deazaguanine reductase OS=Polynucleobacter aenigmatic us OX=1743164 GN=queF PE=3 SV=1
MSKLSLGQATQYPDQYDPSLLFPITRAENRLKLNIKPNQTLPFVGVDIWNAFELSWLNKKGKPQIALAEFQVPADSPNMIESKSFKLYLNSLNNARFEDESEVREKLIGDLSAVAGSKISTRIHPTEAVAKKGMQEMSGVLMDRLDIEIDPSLSADPALLEVNESFGPIEQCLVSHLLKSNCPVTGQPDWASVQIRYQGRPILEEGLLRYLIGFRQLGEFHEHCVETIFCDIKRQCKPEKLSVYARYTRRGGLDINPFRTDHNAPWPDNMRHARQ

SEQ ID NO: 48509 - protein, 275 aa, Polynucleobacter asymbioticus
  misc_feature (1)..(275): tr|A0A1J0D814|A0A1J0D814_9BURK NADPH-dependent 7-cyano- 7-deazaguanine reductase OS=Polynucleobacter asymbiotic us OX=576611 GN=queF PE=3 SV=1
MATLPLGQSTQYPDQYDPSLLFPIPRTENRAKLGLKEGQALPFVGIDIWNAFELSWLNQKGKPQIALAEFQIPADSPNMIESKSFKLYLNSLNSARFEDEGQVKDRLITDLSAVAGSKVATRIHSTEAVSKKGMQEMSGILMDRLDIEIDPHLPADPSLLGVNESFGPIEQCLVSHLLKSNCPVTGQPDWASVQIRYQGRPILEEGLLRYLIGFRQLGEFHEHCVETIFTDIKRQCKPEKLSVYARYTRRGGLDINPFRTDHNSPWPENTRHARQ

SEQ ID NO: 48510 - protein, 275 aa, Polynucleobacter asymbioticus; identical to SEQ ID NO: 48509
  misc_feature (1)..(275): tr|A4T050|A4T050_POLAQ NADPH-dependent 7-cyano-7-deazag uanine reductase OS=Polynucleobacter asymbioticus (stra in DSM 18221 / CIP 109841 / QLW-P1DMWA-1) OX=312153 GN= queF PE=3 SV=1

SEQ ID NO: 48511 - protein, 275 aa, Polynucleobacter campilacus
  misc_feature (1)..(275): tr|A0A254PTC4|A0A254PTC4_9BURK NADPH-dependent 7-cyano- 7-deazaguanine reductase OS=Polynucleobacter campilacus OX=1743163 GN=queF PE=3 SV=1
MATISLGQATQYPDQYDPSLLFPIPRIENRKKLGLQEGRVLPFVGVDIWNAFELSWLNKKGKPQIALAEFQIPTGSPNMVESKSFKLYLNSLNSTRFEDENEVKERLTTDLSAIAGSKITTRINPTELIAKKGMQEMGGILMDRLDIEIDPNLPADPSLLGVNESFGPIEQCLVSHLLKSNCPVTGQPDWASVQIRYQGRPILEEGLLRYLIGFRQLGEFHEHCVETIFTDIKRQCKPEKLSVYARYTRRGGLDINPFRTDHNSPWPENIRHARQ

SEQ ID NO: 48512 - protein, 277 aa, Polynucleobacter cosmopolitanus
  misc_feature (1)..(277): tr|A0A229FVU2|A0A229FVU2_9BURK NADPH-dependent 7-cyano- 7-deazaguanine reductase OS=Polynucleobacter cosmopolit anus OX=351345 GN=queF PE=3 SV=1
MSTLDQAPLGKNSDNPSQYSPELLFPIARTENRLKIGIKNAEPPFFGIDIWNAYELSWLNAKGKPQLAIATFFVPANSPNIIESKSWKLYLNSLNNHCFQSNEELIQTLKNDLSKAAGASVSVQLNSPEQQCTKGMKEMAGKLLDRLDLEIDPKQLPDAALLTSDTSLGIVEESLVSHLLRSNCPVTAQPDWASIQINYVGPTIDEEGLLRYLISFREHHEFHEHCVEKIFMDIKEKCRPSKLSVYARYTRRGGIDINPFRADYNAEWPDNVRHSRQ

SEQ ID NO: 48513 - protein, 275 aa, Polynucleobacter duraquae
  misc_feature (1)..(275): tr|A0A0E3ZN93|A0A0E3ZN93_9BURK NADPH-dependent 7-cyano- 7-deazaguanine reductase OS=Polynucleobacter duraquae O X=1835254 GN=queF PE=3 SV=1
MSTLSLGQATPYPDQYDPSLLFPIPRSENRLKLNIKPNQALPFVGVDIWNAFELSWLNKKGKPQIALAEFQVPADSPNMIESKSFKLYLNSFNSARFEDEAEVRERLITDLSAFAGSKITTRIHSTEAVTKKGMQEMSGVLMDRLDIEIDPSLSADATLLEVNESFGPIEQCLVSHLLKSNCPVTGQPDWASVQIRYQGRPILEEGLLRYLIGFRQLGEFHEHCVETIFTDIKRQCKPEKLSVYARYTRRGGLDINPFRTDHNSPWPENIRHARQ

SEQ ID NO: 48514 - protein, 275 aa, Polynucleobacter hirudinilacicola
  misc_feature (1)..(275): tr|A0A210RZZ5|A0A210RZZ5_9BURK NADPH-dependent 7-cyano- 7-deazaguanine reductase OS=Polynucleobacter hirudinila cicola OX=1743166 GN=queF PE=3 SV=1
MATIPLGQSSQYPDRYDPSLLFPIPRMENRKKLGLKEDQALPFVGVDIWNAFELSWLNKKGKPQIALAEFQIPADSPNMIESKSFKLYLNSLNSARFEDENEVKERLITDLSAVAGSKITTRINPTEAISKKGMQEMGGILMDRLDIEIDPHLPADPSLLGVNESFGPIEQCLVSHLLKSNCPVTGQPDWASVQIRYQGRPILEEGLLRYLIGFRQLGEFHEHCVETIFTDIKRQCKPEKLSVYARYTRRGGLDINPFRTDHNSPWPDNIRHARQ

SEQ ID NO: 48515 - protein, 275 aa, Polynucleobacter meluiroseus
  misc_feature (1)..(275): tr|A0A240DY50|A0A240DY50_9BURK NADPH-dependent 7-cyano- 7-deazaguanine reductase OS=Polynucleobacter meluiroseu s OX=1938814 GN=queF PE=3 SV=1
MSTLVLGQQSAYPDQYDPSLLFPIPRIVNRQKLGITPTQQLPFLGVDLWNAFELSWLNPKGKPQIALAEFQVPADSPNMIESKSFKLYLNSLNSARFVDADELRERITADLSQVAGSRIHVQINTPEQVAKKGMQEMSGILLDRLDITIDPALSADASLLTVNSAFGPTEQCLVSHLLKSNCPVTGQPDWASVQIRYQGRPIDQEGLLRYLIGFRQLGEFHEHCVETIFCDIKRQCKPEHLSVYARYTRRGGLDINPFRTDHNAVWPENVRHARQ

SEQ ID NO: 48516 - protein, 275 aa, Polynucleobacter paneuropaeus
  misc_feature (1)..(275): tr|A0A2Z4JUM1|A0A2Z4JUM1_9BURK NADPH-dependent 7-cyano- 7-deazaguanine reductase OS=Polynucleobacter paneuropae us OX=2527775 GN=queF PE=3 SV=1
MNSLQLGKSTPYPDQYDPNLLFPIQRSVNRAKLGIKEHAPLPFMGIDIWNAYELSWLNAKGKPQIALAEFQIPADSPNMIESKSFKLYLNSLNNSRFENEDELRQRLIADLSKVAGSQITTRINPTDAIAKQGMEEMGGVLLDRLDIEVDCAAGADPSLLGVNESFSPVEQCLVSHLLKSNCPVTGQPDWASVQIRYQGRPILEEGLLRYLIGFRQLGEFHEHCVETIFCDIKQQCKPEKLSVYARYTRRGGLDINPFRTDYNAVWPDNTRHARQ

SEQ ID NO: 48517 - protein, 275 aa, Polynucleobacter sp.
  misc_feature (1)..(275): tr|A0A258XEN2|A0A258XEN2_9BURK NADPH-dependent 7-cyano- 7-deazaguanine reductase OS=Polynucleobacter sp. 16-46- 70 OX=1970421 GN=queF PE=3 SV=1
MSTLPLGQATQYPDQYDPSLLFPIPRSENRLKLGIQPNQALPFVGVDIWNAFELSWLNQKGKPQIALAEFQVPADSPNMIESKSFKLYLNSLNSARFEDENAVRERLITDLSEVAGSKVATRMSPSDAIAKKGMQEMSGVLMDRLDIEIDPSLRADPSLLQVNESFGPIEQCLVSHLLKSNCPVTGQPDWASVQIRYQGRPILEEGLLRYLIGFRHLGEFHEHCVETIFCDIKRQCKPEKLSVYARYTRRGGLDINPFRTDHNAPWPDNMRHARQ

SEQ ID NO: 48518 - protein, 275 aa, Polynucleobacter sp.
  misc_feature (1)..(275): tr|A0A1G3CTF5|A0A1G3CTF5_9BURK NADPH-dependent 7-cyano- 7-deazaguanine reductase OS=Polynucleobacter sp. GWA2_4 5_21 OX=1801989 GN=queF PE=3 SV=1
MSTIPLGQATQYPDQYDPSLLFPIPRSENRLKLDIKPNQALPFVGVDIWNAFELGWLNKKGKPQIALAEFQIPADSPNMIESKSFKLYLNSLNSARFEDEAEVRERLITDLSAVAGSKIATRINPTEMVAKNGMQEMSGVLMDRLDIEIDPNLSADPALLEVNESFGPIEQCLVSHLLKSNCPVTGQPDWASVQIRYQGRPILEEGLLRYLIGFRQKGEFHEHCVETIFTDIKRQCKPEKLSVYARYTRRGGLDINPFRTDHNAPWPDNTRHARQ

SEQ ID NO: 48519 - protein, 275 aa, Polynucleobacter sphagniphilus
  misc_feature (1)..(275): tr|A0A1R0HDD3|A0A1R0HDD3_9BURK NADPH-dependent 7-cyano- 7-deazaguanine reductase OS=Polynucleobacter sphagniphi lus OX=1743169 GN=queF PE=3 SV=1
MATLPLGQASQYPDQYDPSLLFPIPRSENRAKLGIEANQVLPFVGVDIWNAYELSWLNQRGKPQIALAEFQVPADSPNMIESKSFKLYLNSLNSARFENEDAVRERIITDLSAVAGSKVSTRIYPTDVVAKKGMQEMTGVLIDRLDIEVDPNLSADPGLLGVNDSFGPIEQCLVSHLLKSNCPVTGQPDWASVQIRYQGRPILEEGLLRYLIGFRQLGEFHEHCVETIFSDIKRQCKPEKLSVYARYTRRGGLDINPFRTDHNAPWPDNTRHARQ

SEQ ID NO: 48520 - protein, 277 aa, Polynucleobacter victoriensis
  misc_feature (1)..(277): tr|A0A212TEC7|A0A212TEC7_9BURK NADPH-dependent 7-cyano- 7-deazaguanine reductase OS=Polynucleobacter victoriens is OX=2049319 GN=queF PE=3 SV=1
MSHLEHAPLGKNSENPNQYSPDLLFPISRDENRAKLGIQSQSLPFFGVDIWNAYELSWLNAKGKPQLAIATFMVPANSPNIIESKSWKLYLNSLNNHRFHSNDELIDTLRKDLSKAAGATVTVQLHSPESQSAGGMKELPGKLLDRLDLEINPSQKPTSDLLSSDPSLGLVEETLVTHLLRSNCPVTGQPDWASVQINYVGPTINEEGLLRYLLAFREHQEFHEHCVEKIFIDIKNKCRPNKLSVYARYTRRGGIDINPFRADYNAEWPDNKRHSRQ

SEQ ID NO: 48521 - protein, 275 aa, Polynucleobacter wuianus
  misc_feature (1)..(275): tr|A0A191UHJ7|A0A191UHJ7_9BURK NADPH-dependent 7-cyano- 7-deazaguanine reductase OS=Polynucleobacter wuianus OX =1743168 GN=queF PE=3 SV=1
MATLPLGQSSKYPDQYNPSLLFPIPRVENRKKLGIKEDQVLPFVGVDIWNAFELSWLNKKGKPQIALAEFQIPADSPNMIESKSFKLYLNSLNSARFEDENEVKEQLITDLSAVAGSKVTTRIIPTEAISKKGMQEMGGVLMDRLDIEVDPTLPADPSLLGVNESFGPIEQCLVSHLLKSNCPVTGQPDWASVQIRYQGRPILEEGLLRYLIGFRQLGEFHEHCVETIFTDIKRQCKPEKLSVYARYTRRGGLDINPFRTDHNSPWPENTRHARQ

SEQ ID NO: 48522 - protein, 165 aa, Pontibacillus chungwhensis
  misc_feature (1)..(165): tr|A0A0A2V0Z1|A0A0A2V0Z1_9BACI NADPH-dependent 7-cyano- 7-deazaguanine reductase OS=Pontibacillus chungwhensis BH030062 OX=1385513 GN=queF PE=3 SV=1
MAGRKDEELEGVTLLGNQGTSYSFDYDPEVLESFDNKHPKRDYFVKFNCPEFTTLCPKTGQPDFATIYISYIPGEKMVESKSLKLYLFSFRNHGDFHEDSMNIIMNDLIELMDPRYIEVWGKFTPRGGISIDPYCNYGKPNTKYEKMAEHRLMNHDMYPETIDNR

SEQ ID NO: 48523 - protein, 165 aa, Pontibacillus halophilus
  misc_feature (1)..(165): tr|A0A0A5GK48|A0A0A5GK48_9BACI NADPH-dependent 7-cyano- 7-deazaguanine reductase OS=Pontibacillus halophilus JS M 076056 = DSM 19796 OX=1385510 GN=queF PE=3 SV=1
MSGRKDEELTGVTLLGNQGTPYSFEYNPGILETFDNQHPYRDYFVKFNCPEFTTLCPKTGQPDFATIYISYIPGEKMVESKSLKLYLFSFRNHGDFHEDSVNTIMNDLIELMDPRYIEVWGKFTPRGGISIDPYCNYGQPGTKYERMAENRLMNHDLYPEKIDNR

SEQ ID NO: 48524 - protein, 165 aa, Pontibacillus marinus
  misc_feature (1)..(165): tr|A0A0A5G4H4|A0A0A5G4H4_9BACI NADPH-dependent 7-cyano- 7-deazaguanine reductase OS=Pontibacillus marinus BH030 004 = DSM 16465 OX=1385511 GN=queF PE=3 SV=1
MAGRKDEELTDVTLLGNQGTPYSFEYNPEILESFDNQHPYRDYFVKFNCPEFTTLCPKTGQPDFATIYISYIPDEKMVESKSLKLYLFSFRNHGDFHEDSVNIIMNDLIELMDPRYIEVWGKFTPRGGISIDPYCNYGKSDTKYEKMAEHRMMNHDMYPETIDNR

SEQ ID NO: 48525 - protein, 165 aa, Pontibacillus yanchengensis
  misc_feature (1)..(165): tr|A0A0A2T7E3|A0A0A2T7E3_9BACI NADPH-dependent 7-cyano- 7-deazaguanine reductase OS=Pontibacillus yanchengensis Y32 OX=1385514 GN=queF PE=3 SV=1
MAGRKDEDLTDVTLLGNQGTTYSFDYNPDVLETFENQHPNRDYFVKFNCPEFTTLCPKTGQPDFATLYISYIPDIKMVESKSLKLYLFSFRNHGGFHEDAVNVIMNDLIELMDPRYIEVWGKFTPRGGISIDPYCNYGKPNTKFERMAENRLMNHDMYPETIDNR

SEQ ID NO: 48526 - protein, 166 aa, Pontibacter sp.
  misc_feature (1)..(166): tr|A0A4P8RI78|A0A4P8RI78_9BACT NADPH-dependent 7-cyano- 7-deazaguanine reductase OS=Pontibacter sp. SGAir0037 O X=2571030 GN=queF PE=3 SV=1
MNSTEQIDIKEQLKDSYRQALEHTSSALDYMAEYGIKPDGKFGLFFAPSTRQQEIHIMPYKHTAKQVVVYETETGEFSALCPFSGLPDFGTLRVEYIPGSHILELKSLKYYILSWRNIGSAQEDITAYIYEDLKKALKDPAYLIVTTVYNVRGGINTTCSVDSRAQ

SEQ ID NO: 48527 - protein, 155 aa, Ponticaulis sp.
  misc_feature (1)..(155): tr|A0A2D7XYQ5|A0A2D7XYQ5_9RHOB NADPH-dependent 7-cyano- 7-deazaguanine reductase OS=Ponticaulis sp. OX=2020902 GN=queF PE=3 SV=1
MTDKSDLTGLGQLGEKVDAASSPEEAVLERVPNPHPDTLYCARFVAPEFTSLCPVTGQPDFAHIVIDYAPGEWLVESKSLKLFLQSFRNHGAFHEDCTIYIAKRLNELLAPKWFRIAGYWYPRGGIPIDVFWQSDEPPKGLWVPETGVAPYRGRG

SEQ ID NO: 48528 - protein, 156 aa, Ponticaulis sp.
  misc_feature (1)..(156): tr|A0A2D7IVP1|A0A2D7IVP1_9RHOB NADPH-dependent 7-cyano- 7-deazaguanine reductase OS=Ponticaulis sp. OX=2020902 GN=queF PE=3 SV=1
MTDSNEIYTGLEQLGAQTHAAASPEAAELERVPNPHPDMLYCARFIAPEFTSLCPVTGQPDFAHIVIDYAPGEWLVESKSLKLFLQSFRNHGAFHEDCTLYIAKRLSELLDPKWFRIAGYWYPRGGIPIDVFWQSATPPEGLWVPDTGVPAYRGRG

SEQ ID NO: 48529 - protein, 157 aa, Porphyrobacter dokdonensis
  misc_feature (1)..(157): tr|A0A1A7BFV2|A0A1A7BFV2_9SPHN NADPH-dependent 7-cyano- 7-deazaguanine reductase OS=Porphyrobacter dokdonensis DSW-74 OX=1300349 GN=queF PE=3 SV=1
MNSTPEKPDVRPQFLGKDTPLPSSPEEAVLDYVPNPRPGLTYLVRFVSPEFTSLCPVTNQPDFAHLVIDYVPGETIVESKSLKLFLGSFRNHNGFHEDVTVGIGARLFEEMRPQWLRIGGYWYPRGGIPIDVFWQSGTPPEGLWLPDQGVPPYRGRG

SEQ ID NO: 48530 - protein, 159 aa, Porphyrobacter mercurialis
  misc_feature (1)..(159): tr|A0A0B2C357|A0A0B2C357_9SPHN NADPH-dependent 7-cyano- 7-deazaguanine reductase OS=Porphyrobacter mercurialis OX=1572751 GN=queF PE=3 SV=1
MPGQRRQGRGMSEPLFLGQTTPLPTSPEEARLDYVPNPRKAELFCVRFAAPEFTSLCPVTGQPDFAHLVIDYAPGETIVESKSLKLFLGAFRNHCGFHEDVTVGIGRRLFDEMQPQWLRIGGYWYPRGGIPIDVFWQSGSPPAGLWLPDQGVAPYRGRG

SEQ ID NO: 48531 - protein, 156 aa, Porphyrobacter neustonensis
  misc_feature (1)..(156): tr|A0A192D4R2|A0A192D4R2_9SPHN NADPH-dependent 7-cyano- 7-deazaguanine reductase OS=Porphyrobacter neustonensis OX=1112 GN=queF PE=3 SV=1
MDTTPAAKPAPQFLGKDTPLPTSPEEAVLDYVPNPRVGLTYMVRFVSPEFTSLCPVTNQPDFAHLVIDYVPGETIVESKSLKLFLGSFRNHNGFHEDVTVGIGVRLFEEMRPQWLRIGGYWYPRGGIPIDVFWQSGQPPEGLWLPDQGVPGYRGRG

SEQ ID NO: 48532 - protein, 157 aa, Porphyrobacter sanguineus
  misc_feature (1)..(157): tr|A0A1M7RQI9|A0A1M7RQI9_9SPHN NADPH-dependent 7-cyano- 7-deazaguanine reductase OS=Porphyrobacter sanguineus O X=198312 GN=queF PE=3 SV=1
MNTTPDTPSVAPQFLGKDTPLPVSPEEARLDYVPNPRPGLTYLVRFVAPEFTSLCPVTSQPDFAHLVIDYVPGDTIVESKSLKLFLGSFRNHNGFHEDVTVGIGVRLFEEMRPHWLRIGGYWYPRGGIPIDVFWQSGAPPADLWLPDQGVAPYRGRG

SEQ ID NO: 48533 - protein, 156 aa, Porphyrobacter sp.
  misc_feature (1)..(156): tr|A0A4Y6VYW9|A0A4Y6VYW9_9SPHN NADPH-dependent 7-cyano- 7-deazaguanine reductase OS=Porphyrobacter sp. YT40 OX= 2547601 GN=queF PE=3 SV=1
METTPPSKPQPQFLGRDTPLPASPEEAVLDYVPNPRVGLTYLVRFVSPEFTSLCPVTNQPDFAHLVIDYVPGETIVESKSLKLFLGSFRNHNGFHEDVTVGIGVRLFQEMRPQWLRIGGYWYPRGGIPIDVFWQSGAPPADLWLPDQGVPSYRGRG

SEQ ID NO: 48534 - protein, 157 aa, Porphyrobacter sp.
  misc_feature (1)..(157): tr|A0A2N4WXU8|A0A2N4WXU8_9SPHN NADPH-dependent 7-cyano- 7-deazaguanine reductase OS=Porphyrobacter sp. TH134 OX =2067450 GN=queF PE=3 SV=1
MQSTPETPNRAPQFLGRDTPLPASPEEAVLDYVPNPRPGLTFLVRFVSPEFTSLCPVTSQPDFAHLVIDYVPGETIVESKSLKLFLGSFRNHNGFHEDVTVGIGVRLFEEMRPQWLRIGGYWYPRGGIPIDVFWQSGQPPEGLWLPDQGVPGYRGRG

SEQ ID NO: 48535 - protein, 155 aa, Porphyromonadaceae bacterium; identical to SEQ ID NO: 48310
  misc_feature (1)..(155): tr|A0A352J3C6|A0A352J3C6_9PORP NADPH-dependent 7-cyano- 7-deazaguanine reductase OS=Porphyromonadaceae bacteriu m OX=2049046 GN=queF PE=3 SV=1

SEQ ID NO: 48536 - protein, 156 aa, Porphyromonadaceae bacterium; identical to SEQ ID NO: 48309
  misc_feature (1)..(156): tr|A0A1I7GUI8|A0A1I7GUI8_9PORP NADPH-dependent 7-cyano- 7-deazaguanine reductase OS=Porphyromonadaceae bacteriu m KHP3R9 OX=1855398 GN=queF PE=3 SV=1

SEQ ID NO: 48537 - protein, 163 aa, Porphyromonas asaccharolytica
  misc_feature (1)..(163): tr|F4KMG8|F4KMG8_PORAD NADPH-dependent 7-cyano-7-deazag uanine reductase OS=Porphyromonas asaccharolytica (stra in ATCC 25260 / DSM 20707 / BCRC 10618 / JCM 6326 / LMG 13178 / VPI 4198) OX=879243 GN=queF PE=3 SV=1
MKETISSSGARDKAVEGLSLLGNKRTVYAQDYDPSVLEAFENRHQDRDYHVRFECPEFTALCPITGQPDFATIYIEYVPDVRMVESKSLKLYLFSFRSHGAFHEDCVNIIMDDLIRLMDPKYIEVTGDFSPRGGISIVPFCNYGRPGTPYESYARERMLAFHH

SEQ ID NO: 48538 - protein, 151 aa, Porphyromonas cangingivalis
  misc_feature (1)..(151): tr|A0A1T4NQI7|A0A1T4NQI7_PORCN NADPH-dependent 7-cyano- 7-deazaguanine reductase OS=Porphyromonas cangingivalis OX=36874 GN=queF PE=3 SV=1
MSELKDQLSLLGQTTEYKQDYAPEVLEAFDNKHPDNDYWVRFNCPEFTSLCPITGQPDFAEIRISYIPDIKMVESKSLKLYMFSFRNHGAFHEDCVNIIMKDLIALMDPKYIEVTGLFTPRGGISIYPYANYGRPGTKYERMAEQRLMSHE

SEQ ID NO: 48539 - protein, 151 aa, Porphyromonas cangingivalis
  misc_feature (1)..(151): tr|A0A099X228|A0A099X228_PORCN NADPH-dependent 7-cyano- 7-deazaguanine reductase OS=Porphyromonas cangingivalis OX=36874 GN=queF PE=3 SV=1
MTELKDQLSLLGQTTEYKQDYAPEVLEAFDNKHPDNDYWVRFNCPEFTSLCPITGQPDFAEIRISYIPDIKMVESKSLKLYMFSFRNHGAFHEDCVNIIMKDLIALMDPKYIEVTGLFTPRGGISIYPYANYGRPGTKYERMAEQRLMSHE

SEQ ID NO: 48540 - protein, 156 aa, Porphyromonas catoniae
  misc_feature (1)..(156): tr|L1NFA6|L1NFA6_9PORP NADPH-dependent 7-cyano-7-deazag uanine reductase OS=Porphyromonas catoniae F0037 OX=112 7696 GN=queF PE=3 SV=1
MASIRDGENELSILGRKTEYRQDYAPEVLEAFTNKHQGNDYWVRFHCPEFTSLCPITGQPDYATIHISYIPDVKMVESKSLKLYLFSFRNHGAFHEDCVNIIMKDLIELMNPRYIEVLGDFTPRGGISILPFCNYGRLGTKYEELASQRLASYPVR

SEQ ID NO: 48541 - protein, 156 aa, Porphyromonas catoniae
  misc_feature (1)..(156): tr|Z4WX62|Z4WX62_9PORP NADPH-dependent 7-cyano-7-deazag uanine reductase OS=Porphyromonas catoniae ATCC 51270 O X=887901 GN=queF PE=3 SV=1
MASIRDGENELSILGRKTEYRQDYAPEVLEAFTNKHQGNDYWVRFHCPEFTSLCPITGQPDYATIHISYIPDVKMVESKSLKLYLFSFRNHGAFHEDCVNIIMKDLIELMNPRYIEVLGDFTPRGGISILPFCNYGRPGTKYEELASQRLASYPVR

SEQ ID NO: 48542 - protein, 153 aa, Porphyromonas circumdentaria
  misc_feature (1)..(153): tr|A0A1T4MNJ1|A0A1T4MNJ1_9PORP NADPH-dependent 7-cyano- 7-deazaguanine reductase OS=Porphyromonas circumdentari a OX=29524 GN=queF PE=3 SV=1
MQDRGEELTLLGGKTTYKQDYAPEVLESFVNKHPERDYWVRFVCPEFTALCPITSQPDFATLYIDYIPDIQMVESKSLKLYLFSFRSHGAFHEDCVNIIMNDLIALMNPKYIEVTGDFLPRGGISIHPYCNYGRPGTRYEALAAERLAQHNRG

SEQ ID NO: 48543 - protein, 157 aa, Porphyromonas crevioricanis
  misc_feature (1)..(157): tr|T1CP57|T1CP57_9PORP NADPH-dependent 7-cyano-7-deazag uanine reductase OS=Porphyromonas crevioricanis JCM 159 06 OX=1305617 GN=queF PE=3 SV=1
MYSTKDRDQELSALGSKVDYKQDYAPEVLEAFTNRHPDNDYWVRFHCPEFTSLCPITSQPDFATIYIDYIPGERMVESKSLKLYLFSFRQHGAFHEDCVNIIMKDLIALMDPKYIEVLGDFTPRGGISILPYCNYGRPGTKYAELAEQRLFLHQSPR

SEQ ID NO: 48544 - protein, 157 aa, Porphyromonas crevioricanis; identical to SEQ ID NO: 48543
  misc_feature (1)..(157): tr|A0A0A2FJP5|A0A0A2FJP5_9PORP NADPH-dependent 7-cyano- 7-deazaguanine reductase OS=Porphyromonas crevioricanis OX=393921 GN=queF PE=3 SV=1

SEQ ID NO: 48545 - protein, 153 aa, Porphyromonas endodontalis
  misc_feature (1)..(153): tr|C3JBP3|C3JBP3_POREA NADPH-dependent 7-cyano-7-deazag uanine reductase OS=Porphyromonas endodontalis (strain ATCC 35406 / BCRC 14492 / JCM 8526 / NCTC 13058 / HG 37 0) OX=553175 GN=queF PE=3 SV=1
MDRSEEGLELLGKKTEYKGDYAPEVLEAFSNKHPQRDYWVRFVCPEFTALCPITGQPDFATIYIDYIPDERMVESKSLKLYLFSFRSHGAFHEDCVNIIMDDLIKLMNPKYIEVTGDFSPRGGISIVPFCNYGRPGTQYEAIARERLLRHDRH

SEQ ID NO: 48546 - protein, 154 aa, Porphyromonas gingivalis
  misc_feature (1)..(154): tr|A0A0K2J3X9|A0A0K2J3X9_PORGN NADPH-dependent 7-cyano- 7-deazaguanine reductase OS=Porphyromonas gingivalis AJ W4 OX=1403336 GN=queF PE=3 SV=1
MTGIREGEKELSLLGSKTEYRNDYAPEVLEAFTNKHQENDYWVRFNCPEFTSLCPITGQPDFATIYINYIPDVKMVESKSLKLYLFSFRNHGAFHEDCVNIIMKDLIALMQPRYIEVWGDFTPRGGISIVPFCNYGKPGSRYELLAEKRMETHH

SEQ ID NO: 48547 - protein, 154 aa, Porphyromonas gingivalis; identical to SEQ ID NO: 48546
  misc_feature (1)..(154): sp|B2RJW0|QUEF_PORG3 NADPH-dependent 7-cyano-7-deazagua nine reductase OS=Porphyromonas gingivalis (strain ATCC 33277 / DSM 20709 / CIP 103683 / JCM 12257 / NCTC 1183 4 / 2561) OX=431947 GN=queF PE=3 SV=1

SEQ ID NO: 48548 - protein, 153 aa, Porphyromonas gingivicanis
  misc_feature (1)..(153): tr|A0A0A2G760|A0A0A2G760_9PORP NADPH-dependent 7-cyano- 7-deazaguanine reductase OS=Porphyromonas gingivicanis OX=266762 GN=queF PE=3 SV=1
MQDRGEELTLLGGKTVYKQDYAPEVLESFVNKHPERDYWVRFVCPEFTALCPITSQPDFATLYIDYIPDVQMVESKSLKLYLFSFRSHGAFHEDCVNIIMNDLIALMNPKYIEVTGDFLPRGGISIHPYCNYGRPGTKYETLAEERLAQHNRR

SEQ ID NO: 48549 - protein, 154 aa, Porphyromonas gulae
  misc_feature (1)..(154): tr|A0A099WQP0|A0A099WQP0_9PORP NADPH-dependent 7-cyano- 7-deazaguanine reductase OS=Porphyromonas gulae OX=1111 05 GN=queF PE=3 SV=1
MTGIREGEKELSLLGSKTEYRNDYAPEVLEAFTNKHQENDYWVRFNCPEFTSLCPITGQPDFATIYINYIPDVKMVESKSLKLYLFSFRNHGAFHEDCVNIIMKDLIALMQPRYIEVWGDFTPRGGISIVPFCNYGEPGSRYELLAEKRMETHR

SEQ ID NO: 48550 - protein, 154 aa, Porphyromonas gulae
  misc_feature (1)..(154): tr|A0A0A2FCV7|A0A0A2FCV7_9PORP NADPH-dependent 7-cyano- 7-deazaguanine reductase OS=Porphyromonas gulae OX=1111 05 GN=queF PE=3 SV=1
MTGIREGEKELSLLGSKTEYRNDYAPEVLEAFTNKHQENDYWVRFNCPEFTSLCPITGQPDFATIYINYIPDIKMVESKSLKLYLFSFRNHGAFHEDCVNIIMKDLIALMQPRYIEVWGDFTPRGGISIVPFCNYGKPGSRYELLAEKRMETHR

SEQ ID NO: 48551 - protein, 159 aa, Porphyromonas levii
  misc_feature (1)..(159): tr|A0A4Y8WPW4|A0A4Y8WPW4_9PORP NADPH-dependent 7-cyano- 7-deazaguanine reductase OS=Porphyromonas levii OX=2811 4 GN=queF PE=3 SV=1
MDKHTDSKLRETLTLLGAGQATNYPTEYDPSVLETFNNSHEGRDYWVQFNCPEFTSLCPITSQPDFAEIIISYIPDIRMVESKSLKLYLFSFRNHGAFHESCVNLILDDLIKLMDPKYIEVTGLFTARGGISIHPYTNYGRPGTKYEQLAEQRLFNRKG

SEQ ID NO: 48552 - protein, 154 aa, Porphyromonas loveana
  misc_feature (1)..(154): tr|A0A2U1FPJ5|A0A2U1FPJ5_9PORP NADPH-dependent 7-cyano- 7-deazaguanine reductase OS=Porphyromonas loveana OX=18 84669 GN=queF PE=3 SV=1
MNSIREGENELSLLGTKTEYRQDYAPEVLEAFTNKHQENDYWVRFDCPEFTGLCPITGQPDFATIHINYIPDVKMVESKSLKLYLFSFRNHGAFHEDCVNIIMKDLIHLMQPRYIEVWGDFSPRGGISIVPFCNYGRPGTRYEQLAERRLESYR

SEQ ID NO: 48553 - protein, 156 aa, Porphyromonas macacae
  misc_feature (1)..(156): tr|A0A0A2GA02|A0A0A2GA02_9PORP NADPH-dependent 7-cyano- 7-deazaguanine reductase OS=Porphyromonas macacae OX=28 115 GN=queF PE=3 SV=1
MSSIREGENELSILGSQTRYSQDYAPEVLEAFTNKHQENDYWVRFHSPEFTSLCPITGQPDFATVYINYIPDVKMVESKSLKLYLFSFRSHGAFHEDCVNIIMKDLIKLMDPKYIEVQGDFTPRGGISILPYCNYGRPGTCYEELAKQRLFNQSTR

SEQ ID NO: 48554 - protein, 157 aa, Porphyromonas somerae
  misc_feature (1)..(157): tr|A0A134B7X7|A0A134B7X7_9PORP NADPH-dependent 7-cyano- 7-deazaguanine reductase OS=Porphyromonas somerae OX=32 2095 GN=queF PE=3 SV=1
MASIRDGENELSLLGSKTTQYSQDYAPEVLEAFTNKHQGNDYWVRFHCPEFTSLCPITAQPDYATIYINYIPDVRMVESKSLKLYLFSFRNHGAFHEDCVNIIMKDLIELMDPRYIEVVGDFTPRGGISILPFANYGRPGTKYEELAFQRLANHPVR

SEQ ID NO: 48555 - protein, 156 aa, Porphyromonas sp.
  misc_feature (1)..(156): tr|A0A0A2DTL5|A0A0A2DTL5_9PORP NADPH-dependent 7-cyano- 7-deazaguanine reductase OS=Porphyromonas sp. COT-239 O H1446 OX=1515613 GN=queF PE=3 SV=1
MSSIREAEQELTLLGGSTVYRQDYAPECLEVFTNKHQESDYWVRFHCPEFTSLCPITAQPDFATIYINYIPDVKMVESKSLKLYLFSFRSHGAFHEDCVNIIMKDLIRIMDPRYIEVLGDFTPRGGISILPYCVYGRPGTKYEALAEQRLANYPVR

SEQ ID NO: 48556 - protein, 154 aa, Porphyromonas sp.; identical to SEQ ID NO: 48107
  misc_feature (1)..(154): tr|A0A073I7D6|A0A073I7D6_9PORP NADPH-dependent 7-cyano- 7-deazaguanine reductase OS=Porphyromonas sp. 31_2 OX=6 58663 GN=queF PE=3 SV=1

SEQ ID NO: 48557 - protein, 163 aa, Porphyromonas uenonis
  misc_feature (1)..(163): tr|C2MC49|C2MC49_9PORP NADPH-dependent 7-cyano-7-deazag uanine reductase OS=Porphyromonas uenonis 60-3 OX=59632 7 GN=queF PE=3 SV=1
MKETTSPSTARDGAVEGLSLLGNKRTVYAQDYDPSVLEAFENRHQDRDYHVRFECPEFTALCPITGQPDFATIYIEYVPDVRMVESKSLKLYLFSFRSHGAFHEDCVNIIMDDLIRLMDPKYIEVTGDFSPRGGISIVPFCNYGRPGTPYEAYARERMLAFHH

SEQ ID NO: 48558 - protein, 274 aa, Porticoccaceae bacterium
  misc_feature (1)..(274): tr|A0A2E8UFP4|A0A2E8UFP4_9GAMM NADPH-dependent 7-cyano- 7-deazaguanine reductase OS=Porticoccaceae bacterium OX =2026782 GN=queF PE=3 SV=1
MGEYHNTQLGKETQYQNQYDPKLLFPIERASARSGEVPKAFEFFGNDAWTAYELSWLNLSGKPVVAVARFNFPCNSKYVIESKSFKLYLNSLIQSKFASKFDVIDRLASDLSRCCGEAITIDIYDLKEYKEAFKIREPAGTCIDSLDIEVTQYEPSKSLIEFDSTTQISELLYSHLLKTNCPVTNQPDWASVYIDYSGPKISMDSLLKYIISYRLHQDFHEVCVEKIFYDLYTVVNPSKLTVFAKYTRRGGLDISPCRSTEPELELRKMRQVRQ

SEQ ID NO: 48559 - protein, 271 aa, Porticoccaceae bacterium
  misc_feature (1)..(271): tr|A0A2D7R8K5|A0A2D7R8K5_9GAMM NADPH-dependent 7-cyano- 7-deazaguanine reductase OS=Porticoccaceae bacterium OX =2026782 GN=CMK30_00650 PE=3 SV=1
MYEVTQLGKQIDPDNDVGASILNPIARAEARRSLSMNDVPFSGTDFWTAYELAWLDRDGMPKLAIADISVACESKNIIESKSMKLYLNSFYNKKLENGHAVAGKIRSELSKATGGAVNVKLFTLDKFRREYPIKTQKGYCLDDHRVKPINHGPTPQILRIKGRRTISEILFSHLLRTKCPVTSQPDWASVYVMYRGRSIDRDTLFRYIISFREHSDFHEQCVERIFCDILNYCSPTELTVWARFLRRGGLDINPYRTNSGKYPPRIRETRQ

SEQ ID NO: 48560 - protein, 273 aa, Porticoccus sp.
  misc_feature (1)..(273): tr|A0A2E5C6F4|A0A2E5C6F4_9GAMM NADPH-dependent 7-cyano- 7-deazaguanine reductase OS=Porticoccus sp. OX=2024853 GN=queF PE=3 SV=1
MTEKKLLLGADTDYPASYSPQLLHSIPRKEGRQTLGILGAEPFFGVDLWTAYEVSWLDMRGKPVVAVAELSIPGSTVNLVESKSLKLYLNSLNQERYRSVEEVTRIIERDVSACVVGPILVGIHPGDSYRHMGLGSLPGICLDDLPVEVDAYAPDPSLLGLADGHTIVSESLYSHLLKTNCPVTGQPDWASILIRYSGPAIDREGLLRYLVSFRNHQDFHEQCVERIFTEIRELCQPDTLEVYARYTRRGGLEINPYRSSVQSDPPRLRLSRQ

SEQ ID NO: 48561 - protein, 273 aa, Porticoccus sp.
  misc_feature (1)..(273): tr|A0A2E2W2K8|A0A2E2W2K8_9GAMM NADPH-dependent 7-cyano- 7-deazaguanine reductase OS=Porticoccus sp. OX=2024853 GN=queF PE=3 SV=1
MTEKKLLLGADTDYPASYSPQLLHSIPRKEGRQTLGILGAEPFFGVDLWTAYEVSWLDMRGKPVVAVAELSIPGSTVNLVESKSLKLYLNSLNQERYRSVEEVTRIIERDVSACVVGPILVGIHPGDSYRHMGLGSLPGICLDDLPVEVDTYAPDPSLLGLADGHTIVSESLYSHLLKTNCPVTGQPDWASILIRYSGPAIDREGLLRYLVSFRNHQDFHEQCVERIFTEIRELCQPDTLEVYARYTRRGGLEINPYRSSVQSDPPRLRLSRQ

SEQ ID NO: 48562 - protein, 167 aa, Pradoshia eiseniae
  misc_feature (1)..(167): tr|A0A2S7N039|A0A2S7N039_9BACI NADPH-dependent 7-cyano- 7-deazaguanine reductase OS=Pradoshia eiseniae OX=20647 68 GN=queF PE=3 SV=1
MNNEGRKPSELEGVTLLGNQGTTYQYTYDPSILESFDNKHPDNDYWVKFNCPEFTSLCPITGQPDFAAIYISYIPGLKMVESKSLKLYLFSFRNQGDFHEDCMNIIMKDLIALMEPKYIEVWGKFTPRGGISIDPYCNYGKPGTKFEDMALHRLMNHDMYPEKVDNR

SEQ ID NO: 48563 - protein, 166 aa, Pradoshia sp.
  misc_feature (1)..(166): tr|A0A5J6XR74|A0A5J6XR74_9BACI NADPH-dependent 7-cyano- 7-deazaguanine reductase QueF OS=Pradoshia sp. D12 OX=2 651284 GN=queF PE=4 SV=1
MSGRQQTEGLEDLTLLGNQNVKYAFNYAPEVLESVDNLHSDRDYFVKFNCPEFTSLCPITQQPDFATMYISYIPNKKIVESKSLKLYLFSFRNHGDFHEDCVNIIMNDLIKLLDPRYIEVWGKFTPRGGISIDPWCNYGRAGTKYEEIANHRLMNHDLYPEKIDNR

SEQ ID NO: 48564 - protein, 285 aa, Pragia fontium
  misc_feature (1)..(285): tr|A0A379DTP6|A0A379DTP6_9GAMM NADPH-dependent 7-cyano- 7-deazaguanine reductase OS=Pragia fontium OX=82985 GN= queF PE=3 SV=1
MTSHYDNHQALSNLTLGKETAYVDRYDASLLQPVPRSLNRDPLGLKADNLPFHGADIWTLYELSWLNSRGLPQVAIGEVAIPASSSNLIESKSFKLYLNSFNQTCFADWQTVQQTLARDLSQCAQGDVSVKLFHLSQPEIGTITDFAGECIDDQPITIDSYHFDDKLLEQAITEQNTAPVEEVLVSHLLKSNCLITHQPDWGSVQIHYRGPKIDREALLRYIVSFRHHNEFHEQCVERIFSDIQRYCHPTALTVYARYTRRGGLDINPYRTNTTFVPTTQRLSRQ

SEQ ID NO: 48565 - protein, 285 aa, Pragia fontium
  misc_feature (1)..(285): tr|A0A0G3CQU0|A0A0G3CQU0_9GAMM NADPH-dependent 7-cyano- 7-deazaguanine reductase OS=Pragia fontium OX=82985 GN= queF PE=3 SV=1
MTSHYDNHQALSNLTLGKETAYVDRYDASLLQPVPRSLNRDPLGLKADNLPFHGADIWTLYELSWLNSRGLPQVAIGEVAIPASSSNLIESKSFKLYLNSFNQTCFADWQTVQQTLARDLSQCAQGDVSVKLFHLNQPEIGTITDFAGECIDDQPITIDSYHFDDKLLEQAITEQNTAPVEEILVSHLLKSNCLITHQPDWGSVQIHYRGPKIDREALLRYIVSFRHHNEFHEQCVERIFSDIQRYCHPTALTVYARYTRRGGLDINPYRTNTTFVPTTQRLSRQ

SEQ ID NO: 48566 - protein, 284 aa, Pragia sp.
  misc_feature (1)..(284): tr|A0A411WH53|A0A411WH53_9GAMM NADPH-dependent 7-cyano- 7-deazaguanine reductase OS=Pragia sp. CF-458 OX=249811 3 GN=queF PE=3 SV=1
MTSHYQDNQALSALTLGKETAYIDHYDASLLQPVPRSLNRDPLGLSATALPFHGADIWTLYELSWLNSRGLPQVAVGEVHIDANSINLVESKSFKLYLNSFNQTSLDSWEDVQQVLTRDLSLCAQGNVSVKLFRLEQLTGESIGAFDGECIDDQPIEITHYDFDDKLLERATEKDTPLVEETLVSHLLKSNCLITHQPDWGSVEIRYRGPQINREALLRYIVSFRHHNEFHEQCVERIFNDIQRYCHPESLSVYARYTRRGGLDINPYRTNTQFEPQTKRLARQ

SEQ ID NO: 48567 - protein, 151 aa, Prevotella aff.
  misc_feature (1)..(151): tr|A0A1I0PMR8|A0A1I0PMR8_9BACT NADPH-dependent 7-cyano- 7-deazaguanine reductase OS=Prevotella aff. ruminicola Tc2-24 OX=81582 GN=queF PE=3 SV=1
MREDKLQALGKNTAYRMDYAPEVLETFVNKHPDNDYWVQFNCPEFTSLCPITGQPDFAEIKIMYIPGERMVESKSLKLYLFSFRNHGDFHEDCVNIIMKDLVRLMDPKYIEVIGLFTPRGGISIYPYANYGRPGTKYEQMAEQRLLNYQAR

SEQ ID NO: 48568 - protein, 152 aa, Prevotella amnii
  misc_feature (1)..(152): tr|A0A096AZQ1|A0A096AZQ1_9BACT NADPH-dependent 7-cyano- 7-deazaguanine reductase OS=Prevotella amnii DNF00058 O X=1401066 GN=queF PE=3 SV=1
MDREEDKLQLLGKKTEYKSDYAPEVLESFENKHQGNDYWVQFNCPEFTSLCPITGQPDFAEIRISYVPDVRMVESKSLKLYLFSFRNHGDFHEDCVNIIMKDLIKLMSPKYIEVTGIFTPRGGISIYPYANYGKPGTKYEKLAEYRFMNHKM

SEQ ID NO: 48569 - protein, 152 aa, Prevotella amnii; identical to SEQ ID NO: 48568
  misc_feature (1)..(152): tr|A0A134B2Q6|A0A134B2Q6_9BACT NADPH-dependent 7-cyano- 7-deazaguanine reductase OS=Prevotella amnii OX=419005 GN=queF PE=3 SV=1

SEQ ID NO: 48570 - protein, 156 aa, Prevotella baroniae
  misc_feature (1)..(156): tr|U2QB64|U2QB64_9BACT NADPH-dependent 7-cyano-7-deazag uanine reductase OS=Prevotella baroniae F0067 OX=111580 9 GN=queF PE=3 SV=1
MSENRKADGLQALGAKTRYRMDYAPEVLETFENKHPENDYWVQFNCPEFTSLCPITGQPDFAEIRISYVPAEKMVESKSLKLYLFSFRNHGDFHEDCVNVIMKDLVKLMAPKYIEVTGYFTPRGGISIYPYANYGRPGTEFEQLARHRFMNHGMNR

SEQ ID NO: 48571 - protein, 155 aa, Prevotella bergensis
  misc_feature (1)..(155): tr|D1PXG8|D1PXG8_9BACT NADPH-dependent 7-cyano-7-deazag uanine reductase OS=Prevotella bergensis DSM 17361 OX=5 85502 GN=queF PE=3 SV=1
MASNREQEGLKSLGAKTRYSMDYAPEVLETFNNKHPENDYWVQFNCPEFTSLCPITGQPDFAEIRISYVPAERMVESKSLKLYLFSFRNHGDFHEDCVNIIMKDLIKLMAPKYIEVTGLFTPRGGISIYPYANYGQPGTPYEKMAEARFLNHGQR

SEQ ID NO: 48572 - protein, 152 aa, Prevotella bivia
  misc_feature (1)..(152): tr|A0A096CJL4|A0A096CJL4_9BACT NADPH-dependent 7-cyano- 7-deazaguanine reductase OS=Prevotella bivia DNF00320 O X=1401068 GN=queF PE=3 SV=1
MQREQEGLQLLGKNTEYKSDYAPEVLESFENKHQGNDYWVQFNCPEFTSLCPITGQPDFAEIKISYVPDVRMVESKSLKLYMFSFRNHGDFHEDCVNIIMKDLIKLMEPKYIEVTGIFTPRGGISIYPYANYGKPGTKYEQLAEHRFMNHGL

SEQ ID NO: 48573 - protein, 152 aa, Prevotella bivia
  misc_feature (1)..(152): tr|A0A137SUH3|A0A137SUH3_9BACT NADPH-dependent 7-cyano- 7-deazaguanine reductase OS=Prevotella bivia OX=28125 G N=queF PE=3 SV=1
MQREQEGLQLLGKNTEYKSDYAPEVLESFENKHQGNDYWVQFNCPEFTSLCPITGQPDFAEIKISYVPDVRMVESKSLKLYMFSFRNHGDFHEDCVNIIMKDLIKLMKPKYIEVTGIFTPRGGISIYPYANYGKPGTKYEQLAEHRFMNHGL

SEQ ID NO: 48574 - protein, 159 aa, Prevotella bryantii
  misc_feature (1)..(159): tr|D8DUR5|D8DUR5_PREBR NADPH-dependent 7-cyano-7-deazag uanine reductase OS=Prevotella bryantii B14 OX=752555 G N=queF PE=3 SV=1
MSNNPQNRKDEGLKSLGAKTQYSLDYAPEVLETFQNKHPMNDYWVQFNCPEFTSLCPITGQPDFAEIRISYIPAEKMVESKSLKLYLFSFRNHGDFHEDCVNIIMKDLIKLMEPKYIEVTGYFTPRGGISIYPFANYGLPGTKYEKMAEFRFMNHNMSK

SEQ ID NO: 48575 - protein, 159 aa, Prevotella bryantii; identical to SEQ ID NO: 48574
  misc_feature (1)..(159): tr|A0A255SUD8|A0A255SUD8_PREBR NADPH-dependent 7-cyano- 7-deazaguanine reductase OS=Prevotella bryantii OX=7709 5 GN=queF PE=3 SV=1

SEQ ID NO: 48576 - protein, 152 aa, Prevotella buccae
  misc_feature (1)..(152): tr|D3I139|D3I139_9BACT NADPH-dependent 7-cyano-7-deazag uanine reductase OS=Prevotella buccae D17 OX=575611 GN= queF PE=3 SV=1
MSRNEEGLQALGKKTEYRSDYAPEVLETFVNKHPDNDYWVRFNCPEFTSLCPITGQPDFAEIRISYIPDVKMVESKSLKLYLFSFRNHGDFHEDCVNKIMKDLIALMDPKYIEVTGLFTPRGGISIYPFANYGRPGTRYEQMAHERFLRHDM

SEQ ID NO: 48577 - protein, 152 aa, Prevotella buccae
  misc_feature (1)..(152): tr|E6K979|E6K979_9BACT NADPH-dependent 7-cyano-7-deazag uanine reductase OS=Prevotella buccae ATCC 33574 OX=873 513 GN=queF PE=3 SV=1
MSRNEEGLQALGKKTEYRSDYAPEVLETFVNKHPGNDYWVRFNCPEFTSLCPITGQPDFAEIRISYIPDVKMVESKSLKLYLFSFRNHGDFHEDCVNKIMKDLIALMDPKYIEVTGLFTPRGGISIYPFANYGRPGTRYEQMAHERFLRHDM

SEQ ID NO: 48578 - protein, 152 aa, Prevotella buccalis
  misc_feature (1)..(152): tr|A0A095ZEJ1|A0A095ZEJ1_9BACT NADPH-dependent 7-cyano- 7-deazaguanine reductase OS=Prevotella buccalis DNF0085 3 OX=1401074 GN=queF PE=3 SV=1
MESTRKEDGLKALGAKTKYQMDYAPEVLETFQNKHPMNDYWVQFNCPEFTSLCPITGQPDFAEIRIAYIPGERMVESKSLKLYLFSFRNHGDFHEDCVNIIMKDLIKLMQPKYIEVTGLFTPRGGISIYPYANYGQPGTKYEALAEQRFANH

SEQ ID NO: 48579 - protein, 152 aa, Prevotella buccalis
  misc_feature (1)..(152): tr|A0A2N6QQQ4|A0A2N6QQQ4_9BACT NADPH-dependent 7-cyano- 7-deazaguanine reductase OS=Prevotella buccalis OX=2812 7 GN=queF PE=3 SV=1
MESTRTEDGLKALGAKTKYQMDYAPEVLETFQNKHPMNDYWVQFNCPEFTSLCPITGQPDFAEIRIAYIPGERMVESKSLKLYLFSFRNHGDFHEDCVNIIMKDLIKLMQPKYIEVTGLFTPRGGISIYPYANYGQPGTKYEVLAEQRFANH

SEQ ID NO: 48580 - protein, 155 aa, Prevotella colorans
  misc_feature (1)..(155): tr|A0A2U0ULW1|A0A2U0ULW1_9BACT NADPH-dependent 7-cyano- 7-deazaguanine reductase OS=Prevotella colorans OX=1703 337 GN=queF PE=3 SV=1
MASNREQEGLKSLGAQTRYSMDYAPEVLETFNNKHPENDYWVQFNCPEFTSLCPITGQPDFAEIRISYVPAERMVESKSLKLYLFSFRNHGDFHEDCVNIIMKDLVKLMSPKYIEVVGLFTPRGGISIYPYANYGRPGTKYERMAEMRFANHGMR

SEQ ID NO: 48581 - protein, 151 aa, Prevotella copri
  misc_feature (1)..(151): tr|D1PBC6|D1PBC6_9BACT NADPH-dependent 7-cyano-7-deazag uanine reductase OS=Prevotella copri DSM 18205 OX=53701 1 GN=queF PE=3 SV=1
MDRKEDGLQALGAKTTYRMDYAPEVLETFVNKHPGNDYWVRFNCPEFTSLCPITGQPDFAEIRISYIPDVKMVESKSLKLYLFSFRNHGDFHEDCVNIIMKDLIKLMDPKYIEVTGIFTPRGGISIWPYANYGKPGTKYEKLAEQRFATHE

SEQ ID NO: 48582 - protein, 151 aa, Prevotella copri; identical to SEQ ID NO: 48581
  misc_feature (1)..(151): tr|A0A3E5DXA4|A0A3E5DXA4_9BACT NADPH-dependent 7-cyano- 7-deazaguanine reductase OS=Prevotella copri OX=165179 GN=queF PE=3 SV=1

SEQ ID NO: 48583 - protein, 198 aa, Prevotella corporis
  misc_feature (1)..(198): tr|A0A133Q6Z8|A0A133Q6Z8_9BACT NADPH-dependent 7-cyano- 7-deazaguanine reductase OS=Prevotella corporis OX=2812 8 GN=queF PE=3 SV=1
MKGTIRLCHANGADTTVKEWLTINRQQIIEGITRPERHSITLRLITYFMERKDEGLQQLGAKTHYSMDYAPEVLESFENKHQENDYWVQFNCPEFTSLCPITGQPDFAEIRISYVPNVRMVESKSLKLYLFSFRNHGDFHEDCVNIIMKDLIKLMDPKYIEVTGIFTPRGGISIYPFANYGQPGSKYEKMAETRFINH

SEQ ID NO: 48584 - protein, 154 aa, Prevotella dentalis
  misc_feature (1)..(154): tr|F9D4K5|F9D4K5_PREDD NADPH-dependent 7-cyano-7-deazag uanine reductase OS=Prevotella dentalis (strain ATCC 49 559 / DSM 3688 / JCM 13448 / NCTC 12043 / ES 2772) OX=9 08937 GN=queF PE=3 SV=1
MEDNRKADGLQALGAKTQYRMDYAPEVLETFVNKHPDNDYWVQFNCPEFTSLCPITGQPDFAEIRISYVPGERMVESKSLKLYLFSFRNHGDFHEDCVNIIMKDLVKLMNPKYIEVTGIFTPRGGISIYPYANYGRPGTRYEQLADTRFARHGL

SEQ ID NO: 48585 - protein, 151 aa, Prevotella denticola
  misc_feature (1)..(151): tr|F2KUY2|F2KUY2_PREDF NADPH-dependent 7-cyano-7-deazag uanine reductase OS=Prevotella denticola (strain F0289) OX=767031 GN=queF PE=3 SV=1
MERNEEGLKSLGAKTRYKTDYAPEVLETFVNKHPGNDYWVRFNCPEFTSLCPITGQPDFAEIRISYIPDIRMVESKSLKLYLFSFRNHGDFHEDCVNIIMKDLIRLMDPKYIEVTGIFTPRGGISIYPYANYGKKGTKYEQLAEHRFMNHE

SEQ ID NO: 48586 - protein, 151 aa, Prevotella denticola; identical to SEQ ID NO: 48585
  misc_feature (1)..(151): tr|F0H9E4|F0H9E4_9BACT NADPH-dependent 7-cyano-7-deazag uanine reductase OS=Prevotella denticola CRIS 18C-A OX= 944557 GN=queF PE=3 SV=1

SEQ ID NO: 48587 - protein, 151 aa, Prevotella disiens
  misc_feature (1)..(151): tr|A0A3E4QLG2|A0A3E4QLG2_9BACT NADPH-dependent 7-cyano- 7-deazaguanine reductase OS=Prevotella disiens OX=28130 GN=queF PE=3 SV=1
MKRSNEGLTQLGAKTQYSMDYAPEVLETFENKHQENDYWVRFNCPEFTSLCPITGQPDFAEIRISYVPDVRMVESKSLKLYLFSFRNHGDFHEDCVNIIMKDLIKLMEPKYIEVIGLFTPRGGISIYPFANYGKPGTKYEKMAETRFANHQ

SEQ ID NO: 48588 - protein, 151 aa, Prevotella disiens; identical to SEQ ID NO: 48587
  misc_feature (1)..(151): tr|A0A096AU30|A0A096AU30_9BACT NADPH-dependent 7-cyano- 7-deazaguanine reductase OS=Prevotella disiens DNF00882 OX=1401075 GN=queF PE=3 SV=1

SEQ ID NO: 48589 - protein, 151 aa, Prevotella fusca
  misc_feature (1)..(151): tr|A0A0K1NIQ7|A0A0K1NIQ7_9BACT NADPH-dependent 7-cyano- 7-deazaguanine reductase OS=Prevotella fusca JCM 17724 OX=1236517 GN=queF PE=3 SV=1
MERNEEGLQSLGSQTQYKMDYAPEVLESFVNKHPDNDYWVRFNCPEFTSLCPITGQPDFAEIRISYIPDVRMVESKSLKLYLFSFRNHGDFHEDCVNTIMKDLIKLMDPKYIEVTGLFTPRGGISIYPYANYGRKGTKYEQLAEQRFINHE

SEQ ID NO: 48590 - protein, 151 aa, Prevotella histicola
  misc_feature (1)..(151): tr|G6AFM2|G6AFM2_9BACT NADPH-dependent 7-cyano-7-deazag uanine reductase OS=Prevotella histicola F0411 OX=85729 1 GN=queF PE=3 SV=1
MERNEEGLQSLGSATKYRMDYAPEVLETFVNKHPGNDYWVRFNCPEFTSLCPITGQPDFAEIRISYIPDERMVESKSLKLYLFSFRNHGDFHEDCVNIIMKDLIKLMDPKYIEVTGIFTPRGGISIYPYANYGRKGTKYEKLADHRFMNHE

SEQ ID NO: 48591 - protein, 151 aa, Prevotella histicola; identical to SEQ ID NO: 48590
  misc_feature (1)..(151): tr|A0A096AAP1|A0A096AAP1_9BACT NADPH-dependent 7-cyano- 7-deazaguanine reductase OS=Prevotella histicola JCM 15 637 = DNF00424 OX=1236504 GN=queF PE=3 SV=1

SEQ ID NO: 48592 - protein, 151 aa, Prevotella intermedia
  misc_feature (1)..(151): tr|A0A1P8JFH0|A0A1P8JFH0_PREIN NADPH-dependent 7-cyano- 7-deazaguanine reductase OS=Prevotella intermedia ATCC 25611 = DSM 20706 OX=1122984 GN=queF PE=3 SV=1
MERNNEGLTQLGAKTTYSMDYAPEVLESFENKHQGNDYWVRFNCPEFTSLCPITGQPDFAEIRISYVPDVRMVESKSLKLYLFSFRNHGDFHEDCVNTIMKDLIKLMDPKYIEITGIFTPRGGISIYPYANYGRPGTKYEQMAETRFANHQ

SEQ ID NO: 48593 - protein, 151 aa, Prevotella intermedia
  misc_feature (1)..(151): tr|A0A0D9NFV8|A0A0D9NFV8_PREIN NADPH-dependent 7-cyano- 7-deazaguanine reductase OS=Prevotella intermedia ZT OX =1347790 GN=queF PE=3 SV=1
MERNNEGLTQLGAKTTYSMDYAPEVLESFENKHQGNDYWVRFNCPEFTSLCPITGQPDFAEIRISYVPDVRMVESKSLKLYLFSFRNHGDFHEDCVNTIMKDLIKLMDPKYIEVTGIFTPRGGISIYPYANYGRPGTKYEQMAETRFANHQ

SEQ ID NO: 48594 - protein, 151 aa, Prevotella jejuni
  misc_feature (1)..(151): tr|A0A2K9H8B9|A0A2K9H8B9_9BACT NADPH-dependent 7-cyano- 7-deazaguanine reductase OS=Prevotella jejuni OX=117757 4 GN=queF PE=3 SV=1
MERNEEGLQSLGSATQYRMDYAPEVLETFMNKHPENDYWVRFNCPEFTSLCPITGQPDFAEIRISYVPDERMVESKSLKLYLFSFRNHGDFHEDCVNTIMKDLIKLMDPKYIEVTGIFTPRGGISIYPYANYGRKGTKYEQLAEQRFITHE

SEQ ID NO: 48595 - protein, 154 aa, Prevotella loescheii
  misc_feature (1)..(154): tr|A0A069QGL2|A0A069QGL2_PRELO NADPH-dependent 7-cyano- 7-deazaguanine reductase OS=Prevotella loescheii DSM 19 665 = JCM 12249 = ATCC 15930 OX=1122985 GN=queF PE=3 SV =1
MDKKRETEGLKLLGNNTKYSMDYAPEVLETFENKHPENDYWVRFNCPEFTSLCPITGQPDFAEIRISYVPNVRMVESKSLKLYLFSFRNHGDFHEDCVNIIMKDLIKLMNPKYIEVVGLFTPRGGISIHPFANYGMPNTKYAEMAEKRFAEYGG

SEQ ID NO: 48596 - protein, 151 aa, Prevotella maculosa
  misc_feature (1)..(151): tr|H1HK28|H1HK28_9BACT NADPH-dependent 7-cyano-7-deazag uanine reductase OS=Prevotella maculosa OT 289 OX=99942 2 GN=queF PE=3 SV=1
MERKNEGLKALGTKTVYRSDYSPEILETFDNKHPENDYWVRFNCPEFTSLCPITGQPDFAEIRIGYIPAEKMVESKSLKLYLFSFRNHGDFHEDCVNIIMKDLVRLMQPKYIEVTGLFTPRGGISIHPYANYGKPGTKYAAMAERRLMERE

SEQ ID NO: 48597 - protein, 156 aa, Prevotella marshii
  misc_feature (1)..(156): tr|E0NS98|E0NS98_9BACT NADPH-dependent 7-cyano-7-deazag uanine reductase OS=Prevotella marshii DSM 16973 = JCM 13450 OX=862515 GN=queF PE=3 SV=1
MERKRKTEGLHALGTQTKYCTDYAPEVLETFENRHKDNDYWVEFNCPEFTSLCPITGQPDFAEIKIAYIPAERMVESKSLKLYLFSFRNHGDFHEDCVNTIMKDLIRLMAPKYIEVVGLFTPRGGISIYPYANYGKPGTRYEQMAEHRFMNHKINC

SEQ ID NO: 48598 - protein, 151 aa, Prevotella melaninogenica
  misc_feature (1)..(151): tr|A0A096DDR9|A0A096DDR9_9BACT NADPH-dependent 7-cyano- 7-deazaguanine reductase OS=Prevotella melaninogenica D NF00666 OX=1401073 GN=queF PE=3 SV=1
MEREKEGLKSLGSKTQYRMDYAPEVLESFVNKHPDNDYWVRFNCPEFTSLCPITGQPDFAEIRISYIPDVRMVESKSLKLYLFSFRNHGDFHEDCVNTIMKDLIKLMDPKYIEVTGIFTPRGGISIYPYANYGRKGTKYEQLAEQRFITHE

SEQ ID NO: 48599 - protein, 153 aa, Prevotella melaninogenica
  misc_feature (1)..(153): tr|D3I586|D3I586_9BACT NADPH-dependent 7-cyano-7-deazag uanine reductase OS=Prevotella melaninogenica D18 OX=57 5612 GN=queF PE=3 SV=1
MIMEREKEGLKSLGSKTQYKMDYAPEVLESFVNKHPDNDYWVRFNCPEFTSLCPITGQPDFAEIRISYIPDVRMVESKSLKLYLFSFRNHGDFHEDCVNTIMKDLIKLMDPKYIEVTGIFTPRGGISIYPYANYGRKGTKYEQLAEQRFITHE

SEQ ID NO: 48600 - protein, 151 aa, Prevotella micans
  misc_feature (1)..(151): tr|H1PZC6|H1PZC6_9BACT NADPH-dependent 7-cyano-7-deazag uanine reductase OS=Prevotella micans F0438 OX=883158 G N=queF PE=3 SV=1
MERENENLHSLGAPTNYKMNYAPEVLETFENKHKENDYWVRFNCPEFTSLCPITGQPDFAEIRISYIPGERMVESKSLKLYLFSFRNHGDFHEDCINIIMKDLVKLMAPKYIEVTGFFTPRGGISIYPFANYGQPGTKFERLAEERFARHE

SEQ ID NO: 48601 - protein, 151 aa, Prevotella multiformis
  misc_feature (1)..(151): tr|F0F9R0|F0F9R0_9BACT NADPH-dependent 7-cyano-7-deazag uanine reductase OS=Prevotella multiformis DSM 16608 OX =888743 GN=queF PE=3 SV=1
MERNEEGLKSLGTKTAYKTDYAPEVLETFANRHPGNDYWVRFNCPEFTSLCPITGQPDFAEIRISYVPDVRMVESKSLKLYLFSFRNHGDFHEDCVNIIMKDLIRLMDPKYIEVTGLFTPRGGISIYPYANYGRKGTKYEKLAEQRFVDHV

SEQ ID NO: 48602 - protein, 152 aa, Prevotella multisaccharivorax
  misc_feature (1)..(152): tr|F8N5Y7|F8N5Y7_9BACT NADPH-dependent 7-cyano-7-deazag uanine reductase OS=Prevotella multisaccharivorax DSM 1 7128 OX=688246 GN=queF PE=3 SV=1
MIERKEEGLKALGTKTRYKMDYAPEVLETFTNKHPDNDYWVRFNCPEFTSLCPITGQPDFAEIRISYIPDVRMVESKSLKLYLFSFRNHGDFHEDCVNIIMKDLIRLMDPKYIEVTGLFTPRGGISIYPYANYGRPGTKYAELAEKRFATHE

SEQ ID NO: 48603 - protein, 151 aa, Prevotella nigrescens
  misc_feature (1)..(151): tr|A0A246EPH2|A0A246EPH2_9BACT NADPH-dependent 7-cyano- 7-deazaguanine reductase OS=Prevotella nigrescens OX=28 133 GN=queF PE=3 SV=1
MERNNDGLTQLGKKTTYRMDYAPEVLETFENKHQENDYWVRFNCPEFTSLCPITGQPDFAEIRISYVPDVRMVESKSLKLYLFSFRNHGDFHEDCVNTIMKDLIKLMEPKYIEVTGIFTPRGGISIYPYANYGKPGTKYEQLAEHRFANHE

SEQ ID NO: 48604 - protein, 151 aa, Prevotella nigrescens
  misc_feature (1)..(151): tr|V8CMF7|V8CMF7_9BACT NADPH-dependent 7-cyano-7-deazag uanine reductase OS=Prevotella nigrescens CC14M OX=1073 366 GN=queF PE=3 SV=1
MERNNDGLTQLGKKTTYRMDYAPEVLETFENKHQENDYWVRFNCPEFTSLCPITGQPDFAEIRISYVPDVRMVESKSLKLYLFSFRNHGDFHEDCVNTIMKDLIKLMDPKYIEVTGIFTPRGGISIYPYANYGKPGTKYEQLAEHRFANHE

SEQ ID NO: 48605 - protein, 156 aa, Prevotella oralis
  misc_feature (1)..(156): tr|E7RRB4|E7RRB4_9BACT NADPH-dependent 7-cyano-7-deazag uanine reductase OS=Prevotella oralis ATCC 33269 OX=873 533 GN=queF PE=3 SV=1
MDEARKDEGLQALGAETTYRTDYAPEVLETFLNKHPDNDYWVQFNCPEFTSLCPITGQPDFAEIRISYIPGERMVESKSLKLYLFSFRNHGDFHEDCVNIIMKDLIRLMQPKYIEVTGYFTPRGGISIYPYANFGRTGTKYEELAKHRLMNHSIEK

SEQ ID NO: 48606 - protein, 156 aa, Prevotella oralis
  misc_feature (1)..(156): tr|V8BYX1|V8BYX1_9BACT NADPH-dependent 7-cyano-7-deazag uanine reductase OS=Prevotella oralis CC98A OX=1073367 GN=queF PE=3 SV=1
MDEIRKDEGLQALGAETTYRTDYAPEVLETFLNKHPDNDYWVQFNCPEFTSLCPITGQPDFAEIRISYIPGERMVESKSLKLYLFSFRNHGDFHEDCVNIIMKDLIRLMQPKYIEVTGYFTPRGGISIYPYANFGRTGTKYEELAKHRLTNHSIEK

SEQ ID NO: 48607 - protein, 155 aa, Prevotella oris
  misc_feature (1)..(155): tr|D7NC23|D7NC23_9BACT NADPH-dependent 7-cyano-7-deazag uanine reductase OS=Prevotella oris C735 OX=563008 GN=q ueF PE=3 SV=1
MERKDEGLQALGAKTKYRMDYAPEVLETFNNKHPENDYWVRFNCPEFTSLCPITGQPDFAEIRISYIPDEKMVESKSLKLYLFSFRNHGDFHEDCVNIIMKDLIKLMQPKYIEVIGLFTPRGGISIYPYANYGKPGTKYEKLAEEKLMQGLPQSL

SEQ ID NO: 48608 - protein, 155 aa, Prevotella oris
  misc_feature (1)..(155): tr|A0A3S4X0G8|A0A3S4X0G8_9BACT NADPH-dependent 7-cyano- 7-deazaguanine reductase OS=Prevotella oris OX=28135 GN =queF PE=3 SV=1
MERKDEGLQALGAKTKYRMDYAPEVLETFNNKHPENDYWVRFNCPEFTSLCPITGQPDFAEIRISYIPGEKMVESKSLKLYLFSFRNHGDFHEDCVNIIMKDLIKLMQPKYIEVIGLFTPRGGISIYPYANYGKPGTKYEKLAEEKLMQGLPQSL

SEQ ID NO: 48609 - protein, 155 aa, Prevotella oryzae
  misc_feature (1)..(155): tr|A0A010ZGN4|A0A010ZGN4_9BACT NADPH-dependent 7-cyano- 7-deazaguanine reductase OS=Prevotella oryzae DSM 17970 OX=915438 GN=queF PE=3 SV=1
MADTRKEEGLKSLGAKTKYCMDYAPEVLETFNNKHPDNDYWVQFNCPEFTSLCPITGQPDFAEIKIMYIPAEKMVESKSLKLYLFSFRNHGDFHEDCVNIIMKDLVRLMHPKYIEVVGLFTPRGGISIFPYANYGMPGTKYDHMAEARFSQHQIL

SEQ ID NO: 48610 - protein, 160 aa, Prevotella oulorum
  misc_feature (1)..(160): tr|G1WB73|G1WB73_9BACT NADPH-dependent 7-cyano-7-deazag uanine reductase OS=Prevotella oulorum F0390 OX=702438 GN=queF PE=3 SV=1
MDRKDEGLHALGRTTRYATDYAPEVLETFDNKHPGNDYWVQFNCPEFTSLCPITGQPDFAEICIRYIPGAKMVESKSLKLYLFSFRNHGDFHEDCINIIMKDLVRLMQPKYIEVVGYFTPRGGISIYPFANFGQPGTKYAQLAEHRLMNYQMDGAPLRAK

SEQ ID NO: 48611 - protein, 160 aa, Prevotella oulorum
  misc_feature (1)..(160): tr|A0A1T4M2E7|A0A1T4M2E7_9BACT NADPH-dependent 7-cyano- 7-deazaguanine reductase OS=Prevotella oulorum OX=28136 GN=queF PE=3 SV=1
MDRKDEGLQALGRTTRYAADYAPEVLETFDNKHPGNDYWVQFNCPEFTSLCPITGQPDFAEICIRYIPGAKMVESKSLKLYLFSFRNHGDFHEDCINIIMKDLVRLMQPKYIEVVGYFTPRGGISIYPFANFGQPGTKYAQLAEHRLMNYQMDGAPLRAK

SEQ ID NO: 48612 - protein, 151 aa, Prevotella pallens
  misc_feature (1)..(151): tr|A0A379EZH8|A0A379EZH8_9BACT NADPH-dependent 7-cyano- 7-deazaguanine reductase OS=Prevotella pallens OX=60133 GN=queF PE=3 SV=1
MERNEEGLQLLGSATKYRMDYAPEVLETFENKHQDNDYWVRFNCPEFTSLCPITGQPDFAEIRISYVPDVRMVESKSLKLYLFSFRNHGDFHEDCVNIIMKDLIKLMQPKYIEVTGIFTPRGGISIYPYANYGKPNTKYEELAAVRFANHQ

SEQ ID NO: 48613 - protein, 151 aa, Prevotella pallens; identical to SEQ ID NO: 48612
  misc_feature (1)..(151): tr|F9DJ81|F9DJ81_9BACT NADPH-dependent 7-cyano-7-deazag uanine reductase OS=Prevotella pallens ATCC 700821 OX=9 97353 GN=queF PE=3 SV=1

SEQ ID NO: 48614 - protein, 170 aa, Prevotella pleuritidis
  misc_feature (1)..(170): tr|U2MUD3|U2MUD3_9BACT NADPH-dependent 7-cyano-7-deazag uanine reductase OS=Prevotella pleuritidis F0068 OX=108 1904 GN=queF PE=3 SV=1
MKQMTIDDKEKSLSSGEDRSEISLQALGSPTRYRMDYAPDVLETFLNKHPDNDYWVQFNCPEFTSLCPITGQPDFAEIRISYIPAERMVESKSLKLYLFSFRNHGDFHEDCVNIIMKDLIDLMQPKYIEVTGFFTPRGGISIYPFANYGKPGTEYEQLAKHRFLNHQMDK

SEQ ID NO: 48615 - protein, 153 aa, Prevotella ruminicola
  misc_feature (1)..(153): tr|A0A1M7K0U4|A0A1M7K0U4_PRERU NADPH-dependent 7-cyano- 7-deazaguanine reductase OS=Prevotella ruminicola OX=83 9 GN=queF PE=3 SV=1
MMREQEGLQALGKKTEYKSDYAPEVLETFMNKHPENDYWVQFNCPEFTSLCPITGQPDFAEIKIMYIPGEKMVESKSLKLYLFSFRNHGDFHEDCVNVIMKDLVRLMDPKYIEVIGLFTPRGGISIYPYANYGRPGTKFEALAEQRLLNHTFK

SEQ ID NO: 48616 - protein, 153 aa, Prevotella ruminicola
  misc_feature (1)..(153): tr|A0A1H6MFI9|A0A1H6MFI9_PRERU NADPH-dependent 7-cyano- 7-deazaguanine reductase OS=Prevotella ruminicola OX=83 9 GN=queF PE=3 SV=1
MNREVEGLQALGKKTEYKSDYAPEVLETFMNKHPENDYWVQFNCPEFTSLCPITGQPDFAEIKIMYIPGEKMVESKSLKLYLFSFRNHGDFHEDCVNVIMKDLVRLMDPKYIEVIGLFTPRGGISIYPYANYGRPGTKFEALAEQRLMNHTFK

SEQ ID NO: 48617 - protein, 156 aa, Prevotella saccharolytica
  misc_feature (1)..(156): tr|L1N6D0|L1N6D0_9BACT NADPH-dependent 7-cyano-7-deazag uanine reductase OS=Prevotella saccharolytica F0055 OX= 1127699 GN=queF PE=3 SV=1
MTTEREEEGLKSLGSNTRYRMDYDPEVLETFVNKHPDNDYWVRFNCPEFTSLCPITGQPDFAEIRIAYVPNVTMVESKSLKLYLFSFRNHGDFHEDCINIIMKDLVRLMDPKYIEVVGLFTPRGGISIYPYANYGKPGTRYEKMAEQRFEAYDING

SEQ ID NO: 48618 - protein, 151 aa, Prevotella salivae
  misc_feature (1)..(151): tr|U2LBP5|U2LBP5_9BACT NADPH-dependent 7-cyano-7-deazag uanine reductase OS=Prevotella salivae F0493 OX=1395125 GN=queF PE=3 SV=1
MERTNEGLQALGAKTKYRMDYAPEVLETFNNKHTDNDYWVRFNCPEFTSLCPITGQPDFAEIRISYIPAEKMVESKSLKLYLFSFRNHGDFHEDCVNIIMKDLIRLMQPKFIEVTGLFTPRGGISIYPYANYGKPGTKYEKLAEKRLETHE

SEQ ID NO: 48619 - protein, 151 aa, Prevotella salivae; identical to SEQ ID NO: 48618
  misc_feature (1)..(151): tr|E6MRW6|E6MRW6_9BACT NADPH-dependent 7-cyano-7-deazag uanine reductase OS=Prevotella salivae DSM 15606 OX=888 832 GN=queF PE=3 SV=1

SEQ ID NO: 48620 - protein, 151 aa, Prevotella scopos; identical to SEQ ID NO: 48598
  misc_feature (1)..(151): tr|A0A1B1I7B4|A0A1B1I7B4_9BACT NADPH-dependent 7-cyano- 7-deazaguanine reductase OS=Prevotella scopos JCM 17725 OX=1236518 GN=queF PE=3 SV=1

SEQ ID NO: 48621 - protein, 154 aa, Prevotella shahii
  misc_feature (1)..(154): tr|A0A318HZW0|A0A318HZW0_9BACT NADPH-dependent 7-cyano- 7-deazaguanine reductase OS=Prevotella shahii DSM 15611 = JCM 12083 OX=1122991 GN=queF PE=3 SV=1
MEKNRETEGLKSLGSSTKYSMDYAPEVLETFENKHPENDYWVRFNCPEFTSLCPITGQPDFAEIRISYVPNVRMVESKSLKLYLFSFRNHGDFHEDCVNIIMKDLIKLMNPKYIEVVGLFTPRGGISIYPYANYGMPNTKYAEMAEKRFAEYGG

SEQ ID NO: 48622 - protein, 153 aa, Prevotella sp.
  misc_feature (1)..(153): tr|A0A1H3WVC2|A0A1H3WVC2_9BACT NADPH-dependent 7-cyano- 7-deazaguanine reductase OS=Prevotella sp. tc2-28 OX=17 61888 GN=queF PE=3 SV=1
MNREQDNLQSLGRKTEYKMDYAPEVLETFENRHKDNDYWVQFNCPEFTSLCPITGQPDFAEIKILYIPGERMVESKSLKLYLFSFRNHGDFHEDCVNTIMKDLVKLMQPKYIEVVGLFTPRGGISIYPYANYGQPGTKYAALAEQRMMNRQMV

SEQ ID NO: 48623 - protein, 151 aa, Prevotella sp.
  misc_feature (1)..(151): tr|R6AU95|R6AU95_9BACT NADPH-dependent 7-cyano-7-deazag uanine reductase OS=Prevotella sp. CAG:604 OX=1262932 G N=queF PE=3 SV=1
MDRKQDGLQALGAKTEYRMDYAPEVLETFVNKHPGNDYWVRFNCPEFTSLCPITGQPDFAEIRISYIPDVKMVESKSLKLYLFSFRNHGDFHEDCVNIIMKDLIRLMDPKYIEVTGIFTPRGGISIWPYANYGKPGTKYEKLAEQRFATHE

SEQ ID NO: 48624 - protein, 159 aa, Prevotella stercorea
  misc_feature (1)..(159): tr|A0A3C0CEH8|A0A3C0CEH8_9BACT NADPH-dependent 7-cyano- 7-deazaguanine reductase OS=Prevotella stercorea OX=363 265 GN=queF PE=3 SV=1
MATNSDNRRDEGLQALGAKTKYRDDYAPEVLETFVNKHQGNDYWVRFNCPEFTSLCPITGQPDFAEIRISYVPDVKMVESKSLKLYLFSFRNHGDFHEDCVNIIMKDLVKLMDPKYIEVTGLFTPRGGISIWPYANYGKPGTKYEKLAERRFEEHDLRG

SEQ ID NO: 48625 - protein, 159 aa, Prevotella stercorea; identical to SEQ ID NO: 48624
  misc_feature (1)..(159): tr|R7H8B0|R7H8B0_9BACT NADPH-dependent 7-cyano-7-deazag uanine reductase OS=Prevotella stercorea CAG:629 OX=126 3103 GN=queF PE=3 SV=1

SEQ ID NO: 48626 - protein, 156 aa, Prevotella timonensis
  misc_feature (1)..(156): tr|A0A2N6Q6I4|A0A2N6Q6I4_9BACT NADPH-dependent 7-cyano- 7-deazaguanine reductase OS=Prevotella timonensis OX=38 6414 GN=queF PE=3 SV=1
MEDTRKNEGLKALGSKTKYKMDYAPEVLETFENKHPTNDYWVQFNCPEFTSLCPITGQPDFAEIKIAYIPQKLMVESKSLKLYLFSFRNHGDFHEDCVNIIMKDLIQLMQPKYIEVIGLFTPRGGISIYPYANYGQPGTRYETLAEQRFFNHSIQP

SEQ ID NO: 48627 - protein, 156 aa, Prevotella timonensis
  misc_feature (1)..(156): tr|A0A098YND1|A0A098YND1_9BACT NADPH-dependent 7-cyano- 7-deazaguanine reductase OS=Prevotella timonensis S9-PR 14 OX=1401062 GN=queF PE=3 SV=1
MEDTRKNEGLKALGSKTKYKMDYAPEVLETFENKHPTNDYWVQFNCPEFTSLCPITGQPDFAEIKIAYIPQKLMVESKSLKLYLFSFRNHGDFHEDCVNIIMKDLIRLMQPKYIEVIGLFTPRGGISIYPYANYGQPGTRYETLAEQRFFNHSIQP

SEQ ID NO: 48628 - protein, 151 aa, Prevotella veroralis
  misc_feature (1)..(151): tr|C9MMM6|C9MMM6_9BACT NADPH-dependent 7-cyano-7-deazag uanine reductase OS=Prevotella veroralis F0319 OX=64976 1 GN=queF PE=3 SV=1
MERNEEGLQSLGSATQYRMDYAPEVLETFMNKHPENDYWVRFNCPEFTSLCPITGQPDFAEIRISYVPGERMVESKSLKLYLFSFRNHGDFHEDCVNIIMKDLIKLMDPKYIEVTGIFTPRGGISIYPYANYGRKGTKYEQLAEQRFITHE

SEQ ID NO: 48629 - protein, 153 aa, Prevotellaceae bacterium
  misc_feature (1)..(153): tr|A0A239QX32|A0A239QX32_9BACT NADPH-dependent 7-cyano- 7-deazaguanine reductase OS=Prevotellaceae bacterium MN 60 OX=1945887 GN=queF PE=3 SV=1
MNREQEGLQLLGKKTEYKMTYAPEVLETFENKHKDNDYWVQFNCPEFTSLCPITGQPDFAEIKIMYIPGERMVESKSLKLYLFSFRNHGDFHEDCVNIIMKDLVKLMQPKYIEVVGLFTPRGGISIYPYANYGQPGTKYAALAEQRMMNYGLR

SEQ ID NO: 48630 - protein, 153 aa, Prevotellaceae bacterium
  misc_feature (1)..(153): tr|A0A1K1M687|A0A1K1M687_9BACT NADPH-dependent 7-cyano- 7-deazaguanine reductase OS=Prevotellaceae bacterium HU N156 OX=1520830 GN=queF PE=3 SV=1
MNREQEGLQQLGKKTEYKMTYAPEVLETFENKHKDNDYWVQFNCPEFTSLCPITGQPDFAEIKIMYIPGERMVESKSLKLYLFSFRNHGDFHEDCVNIIMKDLVKLMQPKYIEVTGLFTPRGGISIYPYANYGQPGTKYAALAEQRMANYGLR

SEQ ID NO: 48631 - protein, 136 aa, Prochlorococcus marinus
  misc_feature (1)..(136): tr|A0A0A1ZBN3|A0A0A1ZBN3_PROMR NADPH-dependent 7-cyano- 7-deazaguanine reductase OS=Prochlorococcus marinus str . GP2 OX=59925 GN=queF PE=3 SV=1
MSTAKLDDSTQRPLYGERIIEESKIICFENPNKKRIYEISIQLPEFTCKCPFSGYPDFAKLNIIYQPNLKVYELKSLKLYINNFRDIKISHEEVVNRIMDDLVHAGSPHWIHLNAEFNPRGNVSMQLDIFSGQKKN

SEQ ID NO: 48632 - protein, 135 aa, Prochlorococcus marinus
  misc_feature (1)..(135): sp|Q7V5R6|QUEF_PROMM NADPH-dependent 7-cyano-7-deazagua nine reductase OS=Prochlorococcus marinus (strain MIT 9 313) OX=74547 GN=queF PE=3 SV=1
MSSTQAQASKTLYGERVIAEGELICFDNPRPERPYEISIELPEFTCQCPFSGYPDFAVLRLLYQPGSRVIELKAIKLYVNSYRNCTISHEEAANKILDDLVVACNPVWMQLEADFNPRGNVHTVVRVSHGSRQPC

SEQ ID NO: 48633 - protein, 52 aa, Prochlorococcus sp.
  misc_feature (1)..(52): tr|A0A1Y3K3H9|A0A1Y3K3H9_9PROC NADPH-dependent 7-cyano- 7-deazaguanine reductase QueF (Fragment) OS=Prochloroco ccus sp. HOT_208_60 OX=1945637 GN=B0W81_05350 PE=4 SV=1
RDIKISHEEVVNRIMDDLENEGSPYWIHLNAKFNPRGNVSMQLDIFSGQKRN

SEQ ID NO: 48634 - protein, 140 aa, Prochlorococcus sp.
  misc_feature (1)..(140): tr|A0A089PGN5|A0A089PGN5_9PROC NADPH-dependent 7-cyano- 7-deazaguanine reductase OS=Prochlorococcus sp. MIT 080 1 OX=1501269 GN=queF PE=3 SV=1
MIRQEKDINEKVMYGEREIENGRLNCFPNPNSNRDYEISIDFPEFTCKCPFSGYPDFATLRIKYQPNTMVIELKAIKLYLNGFREKKISHEEVTNKIIDDFVEVSDPKWMQLEADFNPRGNVHTIIRVCHGKRNNLELTL

SEQ ID NO: 48635 - protein, 138 aa, Prochlorothrix hollandica
  misc_feature (1)..(138): tr|A0A0M2PZ90|A0A0M2PZ90_PROHO NADPH-dependent 7-cyano- 7-deazaguanine reductase OS=Prochlorothrix hollandica P CC 9006 = CALU 1027 OX=317619 GN=queF PE=3 SV=1
MSSPSNSTHLSATPTVKYGERLIEDGQLITFPNPRPGRSYSVQITLPEFTCKCPFSGYPDFATLHITYRPHEKTLELKALKLYINQYRDRYISHEEAVNQVLDDLVAACDPLDMTVTGDFNPRGNVHMVVEASHRRPS

SEQ ID NO: 48636 - protein, 271 aa, Prolinoborus fasciculus; identical to SEQ ID NO: 43658
  misc_feature (1)..(271): tr|A0A2U3ME94|A0A2U3ME94_9NEIS NADPH-dependent 7-cyano- 7-deazaguanine reductase OS=Prolinoborus fasciculus OX= 1056810 GN=queF PE=3 SV=1

SEQ ID NO: 48637 - protein, 295 aa, Prolixibacter denitrificans
  misc_feature (1)..(295): tr|A0A2P8CG72|A0A2P8CG72_9BACT 7-cyano-7-deazaguanine r eductase OS=Prolixibacter denitrificans OX=1541063 GN=C LV93_103409 PE=4 SV=1
MKNTISTEDKLLGKKVDYPKQYAPEVLVAVPRKVNREQYGISEPPTEFIGLDTWHAYEVGFLTENGLPVTGLLKLVYPFDSPFLVESKSLKLYLNSFNMSSYGNDPKSGIEQVTDIIKKDLEALLKCEVKLAFFDKEPEVAAHDFQDFMVMEEELELGNIQFNDFTENPELLKSAKSNEKQLKLATHLLRSNCKVTHQPDWGSAFVHIKGETLPEPTGLLEYIVSFRNENHFHEEICEMLYKRLWDKFQPEKLMVTCIYTRRGGIDICPSRVSHPELLPSNLTSPEKLSSKLLRQ

SEQ ID NO: 48638 - protein, 156 aa, Prolixibacteraceae bacterium
  misc_feature (1)..(156): tr|A0A399T884|A0A399T884_9BACT NADPH-dependent 7-cyano- 7-deazaguanine reductase OS=Prolixibacteraceae bacteriu m XSD2 OX=2305463 GN=queF PE=3 SV=1
MSDLKHLGNETNYLFDYTPGVLETFDNKHPENDYWVKFNAPEFTSLCPITGQPDFATIYISYIPGEKMVESKSLKLYLFSFRNHGAFHEDCINIIMKDLIGLMEPKYIEVWGKFLPRGGLSIDPYSNYGKPGTRYEELAWHRMQNHDLNPEKIDNR

SEQ ID NO: 48639 - protein, 292 aa, Prolixibacteraceae bacterium
  misc_feature (1)..(292): tr|A0A4U2LAH9|A0A4U2LAH9_9BACT NADPH-dependent 7-cyano- 7-deazaguanine reductase QueF OS=Prolixibacteraceae bac terium JC036 OX=2528631 GN=EYV94_15765 PE=4 SV=1
MSKVPVEATVLGKKVPFPQQYDPSILVAVPRYENRKIYGIKEQPDIFVGFDAWHAWEVGFMTNNGLPVAGVMKIVYPSDNLFLVESKSLKLYLNSLNMARMGESVHEGIDLFCEVVRKDLTNLLKTEVQVAFFKGTQECEDALCNYEVLEELPEVEQHSFISFQENPELLSKFDDSKTIKVVSHLLRSNCKITHQPDWGSVFIYMSADNTPDKMALLEYLVSFRNENHFHEEVCEMIYKRLWDQYNPEELMVTCIYTRRGGIDICPARANKESLLSSYLGQVDFLTTKLLRQ

SEQ ID NO: 48640 - protein, 136 aa, Propionibacteriaceae bacterium
  misc_feature (1)..(136): tr|A0A2E0E9Q9|A0A2E0E9Q9_9ACTN NADPH-dependent 7-cyano- 7-deazaguanine reductase OS=Propionibacteriaceae bacter ium OX=2021380 GN=queF PE=3 SV=1
MSISGTESTKTPLYGERAVAEAELICFDNPRPGRPYEVSIELPEFTCLCPFSGYPDFAVLRLIYQPGPRVVELKAIKLYINHFRNCSISHEEVSNKILDDLITACDPVWIQMEADFNPRGNVHTVVRVSHGTRQPC

SEQ ID NO: 48641 - protein, 166 aa, Propionispira arboris
  misc_feature (1)..(166): tr|A0A1H6U6H1|A0A1H6U6H1_9FIRM NADPH-dependent 7-cyano- 7-deazaguanine reductase OS=Propionispira arboris OX=84 035 GN=queF PE=3 SV=1
MVERKKEEMSDITLLGQKNVQYGYDYVPGILETFDNKHPMNDYWVKFNCPEFTSLCPITGQPDFATIYISYIPERKMVESKSLKLYLVSFRNHGDFHEDVVNIIMKDLIKLMDPRYIEVWGKFLPRGGISIDPYANYGKMGTKYEALAWDRFKQHDLMGMDRVDNR

SEQ ID NO: 48642 - protein, 165 aa, Propionispora sp.
  misc_feature (1)..(165): tr|A0A0K8JJP0|A0A0K8JJP0_9FIRM NADPH-dependent 7-cyano- 7-deazaguanine reductase OS=Propionispora sp. 2/2-37 OX =1677858 GN=queF PE=3 SV=1
MNGRSKQELAGVTLLGKQKVSYSYSYNPDILESFANKHPENDYFVKFNCPEFTSLCPMTGQPDFATIYIAYVPDKLLVESKSLKLYLFSFRNHGDFHEDCVNIIMKDLIKLLSPKYIEVWGKFTPRGGISIDPYANYGKQGTHWEKAATERLLWHDMYPEKIDNR

SEQ ID NO: 48643 - protein, 139 aa, Propionivibrio dicarboxylicus
  misc_feature (1)..(139): tr|A0A1G8DCU4|A0A1G8DCU4_9RHOO NADPH-dependent 7-cyano- 7-deazaguanine reductase OS=Propionivibrio dicarboxylic us OX=83767 GN=queF PE=3 SV=1
MTTQPSKTLETFPNPAPHRDFHIHMEIPEFTCLCPKTGQPDFATLILDYIPEKTCVELKALKLYIWSFRNEGCFHEAVTNQILDDLVKALKPRYMRLTAKFFVRGGIFTNVVAEHRKKGWKPEPKVELTDFETSSNTRG

SEQ ID NO: 48644 - protein, 151 aa, Prosthecobacter debontii
  misc_feature (1)..(151): tr|A0A1T4Y4E9|A0A1T4Y4E9_9BACT NADPH-dependent 7-cyano- 7-deazaguanine reductase OS=Prosthecobacter debontii OX =48467 GN=queF PE=3 SV=1
MSDPLTADITLLGRSEHKLPASPDEAALETFPNRTPGRNYTIHLSAPDFSSLCPVTGQPDAAHLEILYIPNERCVETKSLKFYLASYRNHASFNEVIVNRVLDDLVQACAPRQVIVRGRFVSRGGIQLTCEARYPNPETTLEWPVASLSTH

SEQ ID NO: 48645 - protein, 167 aa, Prosthecobacter fusiformis
  misc_feature (1)..(167): tr|A0A4R7RL77|A0A4R7RL77_9BACT NADPH-dependent 7-cyano- 7-deazaguanine reductase OS=Prosthecobacter fusiformis OX=48464 GN=queF PE=3 SV=1
MGACDKAALRHIVEIMSDSLTADITLLGRSEHRLPASPDEAALETFPNRTPGRNYTIHLSAPDFGSLCPVTGQPDAAHVEILYIPDERCVETKSLKFYLASYRNHASFNEAIVNRILDDLVAACAPKQAIVRGRFVPRGGIQLTCEARHPSREIPLEWPAASLSTPH

SEQ ID NO: 48646 - protein, 118 aa, Prosthecochloris aestuarii
  misc_feature (1)..(118): sp|B4S5H3|QUEF_PROA2 NADPH-dependent 7-cyano-7-deazagua nine reductase OS=Prosthecochloris aestuarii (strain DS M 271 / SK 413) OX=290512 GN=queF PE=3 SV=1
MKKELLEVFDNQFPDRDYTIEIVNPEFTSVCPKTGLPDFGTITLRYVPDKVCIELKSLKYYYLEFRNAGIFYENITNTILDHMISALHPRTLTVTTEWKARGGITETVTASYSSADKA

SEQ ID NO: 48647 - protein, 117 aa, Prosthecochloris marina
  misc_feature (1)..(117): tr|A0A317T4H7|A0A317T4H7_9CHLB NADPH-dependent 7-cyano- 7-deazaguanine reductase OS=Prosthecochloris marina OX= 2017681 GN=queF PE=3 SV=1
MKKELLEVFDNQFPDRNYTIEIVNPEFTSVCPKTGLPDFGTITIRYIPDKSCVELKSLKYYYLEFRNAGIFYENITNTILDHMIEVLEPRELTVKTEWKARGGITETVTASYSSQQQ

SEQ ID NO: 48648 - protein, 115 aa, Prosthecochloris sp.
  misc_feature (1)..(115): tr|A0A1B1Q0I8|A0A1B1Q0I8_9CHLB NADPH-dependent 7-cyano- 7-deazaguanine reductase OS=Prosthecochloris sp. CIB 24 01 OX=1868325 GN=queF PE=3 SV=1
MKKELLEVFENRFPDRDYTIEICNPEFTSVCPKTGLPDFGTITIDYIPDKLCIELKSLKYYYLEFRNAGIFYENITNTILDHMVEVLKPRQITIKTEWKARGGITETVTVSYSAS

SEQ ID NO: 48649 - protein, 116 aa, Prosthecochloris sp.
  misc_feature (1)..(116): tr|A0A1W6HQB5|A0A1W6HQB5_9CHLB NADPH-dependent 7-cyano- 7-deazaguanine reductase OS=Prosthecochloris sp. HL-130 -GSB OX=1974213 GN=queF PE=3 SV=1
MKKELLEVFENCFPDRDYTIEIVNPEFTSVCPKTGLPDFGTITISYVPDKLCLELKSLKYYYLEFRNAGIFYENITNTILDHMVELLEPRSITVTTEWKARGGITETVSVSHTATS

SEQ ID NO: 48650 - protein, 115 aa, Prosthecochloris vibrioformis; identical to SEQ ID NO: 48648
  misc_feature (1)..(115): tr|A0A5C4S144|A0A5C4S144_PROVB NADPH-dependent 7-cyano- 7-deazaguanine reductase OS=Prosthecochloris vibrioform is OX=1098 GN=queF PE=3 SV=1

SEQ ID NO: 48651 - protein, 153 aa, Prosthecomicrobium hirschii
  misc_feature (1)..(153): tr|A0A0P6WFB9|A0A0P6WFB9_9RHIZ NADPH-dependent 7-cyano- 7-deazaguanine reductase OS=Prosthecomicrobium hirschii OX=665126 GN=queF PE=3 SV=1
MTAFDASSLQLGHETIYPKSPDEARLDRVPNPQADTLYLARFTVPEFTSLCPVTGQPDFAHLVIDYVPKDWLVESKSLKLYMTSFRNHGAFHEDCTVAIGRRLADLLDPHWLRIGGYWYPRGGIPIDVFWQSGEPPKAVWIPDQGVASYRGRG

SEQ ID NO: 48652 - protein, 153 aa, Proteiniphilum acetatigenes
  misc_feature (1)..(153): tr|A0A117M046|A0A117M046_9BACT NADPH-dependent 7-cyano- 7-deazaguanine reductase OS=Proteiniphilum acetatigenes OX=294710 GN=queF PE=3 SV=1
MEKDQLSLLGNQTDYRQDYAPEVLEAFTNKHPGNDYWVTFDCPEFTSLCPITGQPDFATIRIDYIPDMKMVESKSLKLYLFSFRNHGAFHEDCVNIIMKDLIQLMNPKYIEVTGIFTPRGGISIYPYANHGRPGTKYEKLAEERLFTHSFPLK

SEQ ID NO: 48653 - protein, 159 aa, Proteiniphilum saccharofermentans
  misc_feature (1)..(159): tr|A0A1R3T8V8|A0A1R3T8V8_9BACT NADPH-dependent 7-cyano- 7-deazaguanine reductase OS=Proteiniphilum saccharoferm entans OX=1642647 GN=queF PE=3 SV=1
MQHKGLSHLGGKTEYKQDYAPEMLEAFDNKHPGNDYWVTFDCPEFTSLCPITGQPDFATIRIDYIPDIKMVESKSLKLYLFSFRNHGAFHEDCVNIIMKDLIRLMDPKYIEVTGIFTPRGGISIYPYANYGRKGTKYEKLAEERLFNYSFPVRNSVPSR

SEQ ID NO: 48654 - protein, 153 aa, Proteiniphilum sp.; identical to SEQ ID NO: 48652
  misc_feature (1)..(153): tr|A0A124G6M6|A0A124G6M6_9BACT NADPH-dependent 7-cyano- 7-deazaguanine reductase OS=Proteiniphilum sp. 51_7 OX= 1641377 GN=queF PE=3 SV=1

SEQ ID NO: 48655 - protein, 159 aa, Proteiniphilum sp.
  misc_feature (1)..(159): tr|A0A3M8EIW2|A0A3M8EIW2_9BACT NADPH-dependent 7-cyano- 7-deazaguanine reductase OS=Proteiniphilum sp. X52 OX=2 382159 GN=queF PE=3 SV=1
MQHKGLSHLGGKTEYKQDYAPEMLEAFDNKHPENDYWVTFDCPEFTSLCPITGQPDFAIIRIDYIPDIKMVESKSLKLYLFSFRNHGAFHEDCVNIIMKDLIRLMDPKYIEVRGIFTPRGGISIYPYANYGRKGTKYEKLAEERLFNYSFPVRNSVPSR

SEQ ID NO: 48656 - protein, 139 aa, Proteobacteria bacterium
  misc_feature (1)..(139): tr|R6A4D7|R6A4D7_9PROT NADPH-dependent 7-cyano-7-deazag uanine reductase OS=Proteobacteria bacterium CAG:139 OX =1262986 GN=queF PE=3 SV=1
MSTAPSKNLETFPNPQPNRDYLIHIEIPEFTSLCPLTGQPDFATLLLDYIPDQKNVELKALKLYMWSYRQEGAFHEAITNKILDDLVAATSPRFMRLKAKWWVRGGIYTTVVAEYRKEGWTPVKPVELPEFESNDPTRG

SEQ ID NO: 48657 - protein, 149 aa, Proteobacteria bacterium
  misc_feature (1)..(149): tr|A0A1W9I8C8|A0A1W9I8C8_9PROT NADPH-dependent 7-cyano- 7-deazaguanine reductase OS=Proteobacteria bacterium HN _bin10 OX=1827386 GN=queF PE=3 SV=1
MTKLTQLGQATPIPENPDQATLERAPNPHPATLYLVRFTAPEFTSICPVTGQPDFGTLVIDYAPKDWIVESKSLKLFLQSFRNHGAFHEDCTLAVAKRVIDAIAPNWLRIGGYWNPRGGMPIDVFWQTGAPPEGLWLPDQGVATYRSRG

SEQ ID NO: 48658 - protein, 281 aa, Proteus hauseri
  misc_feature (1)..(281): tr|A0A410X744|A0A410X744_PROHU NADPH-dependent 7-cyano- 7-deazaguanine reductase OS=Proteus hauseri OX=183417 G N=queF PE=3 SV=1
MPLYQGDKTLASLSLGKETQYHEQYNAELLQGVPRSLNRDALSLNTENLPFHGGDIWTLYELSWLNNKGLPQVAIGYVELDATSENLIESKSFKLYLNSFNQTRFDNWEAVEKILRQDLTSCAKGSVNLSLYPLSHFTSQPIIDFAGECIDNQDIEINNYQFDTQWLNQSTTDIFVEETLVSHLLKSNCLITNQPDWGSVMIQYKGKKIDREKLLRYLVSFRQHNEFHEQCVERIFNDIMQLCSPETLTVYARYTRRGGLDINPWRSNCEFVPENGRLARQ

SEQ ID NO: 48659 - protein, 281 aa, Proteus hauseri
  misc_feature (1)..(281): tr|V6MH65|V6MH65_PROHU NADPH-dependent 7-cyano-7-deazag uanine reductase OS=Proteus hauseri ZMd44 OX=1312367 GN =queF PE=3 SV=1
MSLYQGDQSLEALSLGKETQYHDQYDAGLLQGVPRSLNRDSLSLTAENLPFHGGDIWTMYELSWLNSKGLPQVAIGHVELDATTENLIESKSFKLYLNSFNQTRFESWDIVEKTLLKDLTACAKGKVNLTIYPLSHFTSQPIVDFAGECIDEQDIEIDNYQFDMQWLNESTTDTLVEETLVSHLLKSNCLITHQPDWGSIAIQYKGKKIDREKLLRYLVSFRQHNEFHEQCVERIFHDIMQLCKPETLTVYARYTRRGGLDINPWRSNCEFVPEISRLARQ

SEQ ID NO: 48660 - protein, 281 aa, Proteus mirabilis
  misc_feature (1)..(281): sp|B4F2E4|QUEF_PROMH NADPH-dependent 7-cyano-7-deazagua nine reductase OS=Proteus mirabilis (strain HI4320) OX= 529507 GN=queF PE=3 SV=1
MSLYQGDKALEALSLGKETQYHTHYDASLLQGVPRRLNRDSLSLTADNLPFHGGDIWTMYELSWLNSQGLPQVAIGHVELDATTENLIESKSFKLYLNSFNQTRFENWHIVEETLLKDLTACAKGRVHLTLYPLSHFTSQPIVDFVGECIDNQPIEIDNYQFDSQWLNGSTTDTLVEETLVSHLLKSNCLITHQPDWGSVMIQYKGKKIDREKLLRYLVSFRQHNEFHEQCVERIFHDIMTFCSPDTLTVYARYTRRGGLDINPWRSNCEFVPETGRLARQ

SEQ ID NO: 48661 - protein, 281 aa, Proteus mirabilis; identical to SEQ ID NO: 48660
  misc_feature (1)..(281): tr|A0A1Z1SRY5|A0A1Z1SRY5_PROMI NADPH-dependent 7-cyano- 7-deazaguanine reductase OS=Proteus mirabilis OX=584 GN =queF PE=3 SV=1

SEQ ID NO: 48662 - protein, 281 aa, Proteus penneri
  misc_feature (1)..(281): tr|A0A379EPL9|A0A379EPL9_9GAMM NADPH-dependent 7-cyano- 7-deazaguanine reductase OS=Proteus penneri OX=102862 G N=queF PE=3 SV=1
MSLYQGDKSLEALSLGKETQYHDQYDAGLLQGVPRSLNRDSLSLTAENLPFHGGDIWTMYELSWLNSKGLPQVAIGHVELDATTENLIESKSFKLYLNSFNQTRFESWDIVEKTLLNDLTTCAKGKVNLTIYPLSHFTSQPIVDFAGECIDEQDIEIDNYQFDVQWLNESTTDTLVEETLVSHLLKSNCLITNQPDWGSVAIQYKGKKINREKLLRYLVSFRQHNEFHEQCVERIFHDIMQLCTPETLTVYARYTRRGGLDINPWRSNCEFVPKISRLARQ

SEQ ID NO: 48663 - protein, 281 aa, Proteus penneri; identical to SEQ ID NO: 48662
  misc_feature (1)..(281): tr|C0AT01|C0AT01_9GAMM NADPH-dependent 7-cyano-7-deazag uanine reductase OS=Proteus penneri ATCC 35198 OX=47188 1 GN=queF PE=3 SV=1

SEQ ID NO: 48664 - protein, 281 aa, Proteus sp.
  misc_feature (1)..(281): tr|A0A3D2BMW3|A0A3D2BMW3_9GAMM NADPH-dependent 7-cyano- 7-deazaguanine reductase OS=Proteus sp. OX=229037 GN=qu eF PE=3 SV=1
MPLYQGDKTLASLSLGKETQYHEQYNAELLQGVPRSLNRDALSLNAENVPFHGGDIWTLYELSWLNNKGLPQVAIGHVELDATSENLIESKSFKLYLNSFNQTRFDNWEAVEKILRQDLTSCAKGSVNLSLYPLSHFTSQPIIDFAGECIDNQDIEINNYQFDTQWLNQSTTDIFVEETLVSHLLKSNCLITNQPDWGSVMIQYKGKKIDREKLLRYLVSFRQHNEFHEQCVERIFNDIMQLCSPETLTVYARYTRRGGLDINPWRSNCEFVPENGRLARQ

SEQ ID NO: 48665 - protein, 281 aa, Proteus sp.
  misc_feature (1)..(281): tr|A0A5J6RRL9|A0A5J6RRL9_9GAMM NADPH-dependent 7-cyano- 7-deazaguanine reductase QueF OS=Proteus sp. CD3 OX=192 1565 GN=BTA34_13325 PE=4 SV=1
MSLYQGDKSLEALSLGKETQYHDQYDAGLLQGVPRSLNRDSLSLTAENLPFHGGDIWTMYELSWLNSKGLPQVAIGHVELDATTENLIESKSFKLYLNSFNQTRFESWDLVEKTLLKDLTTCAKGKVNLTIYPLSHFTSQPIVNFAGECIDEQDIEIDNYQFDMQWLNESTTDTLVEETLVSHLLKSNCLITNQPDWGSVAIQYKGKKIDREKLLRYLVSFRQHNEFHEQCVERIFHDIMQLCKPETLTVYARYTRRGGLDINPWRSNCEFVPEISRLARQ

SEQ ID NO: 48666 - protein, 281 aa, Proteus vulgaris
  misc_feature (1)..(281): tr|A0A292C7B1|A0A292C7B1_PROVU NADPH-dependent 7-cyano- 7-deazaguanine reductase OS=Proteus vulgaris OX=585 GN= queF PE=3 SV=1
MSLYQGDKSLEALSLGKETRYHDQYDAGLLQGVPRSLNRDSLSLTAENLPFHGGDIWTMYELSWLNSKGLPQVAIGHVELDATTENLIESKSFKLYLNSFNQTRFESWDIVEKTLLKDLTTCAKGKVNLTIYPLSHFTSQPIVDFAGECIDEQNIEINNYQFDAQWLNESTTDTLVEETLVSHLLKSNCLITNQPDWGSVAIQYKGKKIDREKLLRYLVSFRQHNEFHEQCVERIFHDIMQLCAPETLTVYARYTRRGGLDINPWRSNCEFVPEISRLARQ

SEQ ID NO: 48667 - protein, 281 aa, Proteus vulgaris; identical to SEQ ID NO: 48662
  misc_feature (1)..(281): tr|A0A0G4QBY2|A0A0G4QBY2_PROVU NADPH-dependent 7-cyano- 7-deazaguanine reductase OS=Proteus vulgaris OX=585 GN= queF PE=3 SV=1

SEQ ID NO: 48668 - protein, 281 aa, Providencia alcalifaciens
  misc_feature (1)..(281): tr|B6XDP5|B6XDP5_9GAMM NADPH-dependent 7-cyano-7-deazag uanine reductase OS=Providencia alcalifaciens DSM 30120 OX=520999 GN=queF PE=3 SV=1
MSHYQNNPALDNLTLGKKTAYHDQYDAALLQAVPRSLNRDPLDIHADSLPFHGADIWTLYELSWLNARGVPQVAIGSVSIDATSENLVESKSFKLYLNSFNQTRFETWENVRTVLQKDLSRCANGEVKVTLYKLDDFTQQAIHQFQGVCIDEQEIDIDNYEFNRQYLVDCTQSEVVEEILVSHLLKSNCLITNQPDWGSVQIHYRGPKINHEALLRYLVSFRHHNEFHEQCVERIFNDITILCKPEKLSVYARYTRRGGLDINPWRSNEQFEPETGRLARQ

SEQ ID NO: 48669 - protein, 281 aa, Providencia alcalifaciens; identical to SEQ ID NO: 48668
  misc_feature (1)..(281): tr|X6Q5S7|X6Q5S7_9GAMM NADPH-dependent 7-cyano-7-deazag uanine reductase OS=Providencia alcalifaciens F90-2004 OX=1256987 GN=queF PE=3 SV=1

SEQ ID NO: 48670 - protein, 281 aa, Providencia burhodogranariea
  misc_feature (1)..(281): tr|K8WCD6|K8WCD6_9GAMM NADPH-dependent 7-cyano-7-deazag uanine reductase OS=Providencia burhodogranariea DSM 19 968 OX=1141662 GN=queF PE=3 SV=1
MSHYQNNSALDNLTLGKETAYHYQYDPNLLQAVPRSLNREPLDIHADNLPFHGADIWTLYELSWLNKKGVPQVAIGLVSVDAQSENLIESKSFKLYLNSFNQTRFETWENVRSVLQNDLCHCANGKVSVTLHKLDEISQQAISQFQGICIDEQDIEINQYEFSRDYLVESTESEVVEEILVSHLLKSNCLITNQPDWGSVQIRYRGPKINQEALLRYLVSFRHHNEFHEQCVERIFNDITQLCKPEQLSVYARYTRRGGLDINPWRSNTQFMPEIGRLARQ

SEQ ID NO: 48671 - protein, 281 aa, Providencia heimbachae
  misc_feature (1)..(281): tr|A0A4D7J812|A0A4D7J812_9GAMM NADPH-dependent 7-cyano- 7-deazaguanine reductase OS=Providencia heimbachae OX=3 33962 GN=queF PE=3 SV=1
MSDYHNNPALDNLTLGKKTAYHDQYDPALLQPVPRSLNRDPLDIHADSLPFHGADIWTLYELSWLNHRGVPQVAIGSISVDANSQNLIESKSFKLYLNSFNQTQFETWENVRSVLQSDLSHCANGDVSVTLHKLDYFSQQTIHQFHGICIDEQEIDIDNYEFSRHYLADCTTREIVEETLISHLLKSNCLITNQPDWGSVQIHYRGAKIDHEALLRYLVSFRHHNEFHEQCVERIFNDIAQLCKPEKLTVYARYTRRGGLDINPWRSNEQFRPEMGRLARQ

SEQ ID NO: 48672 - protein, 281 aa, Providencia heimbachae; identical to SEQ ID NO: 48671
  misc_feature (1)..(281): tr|A0A1B7JYV7|A0A1B7JYV7_9GAMM NADPH-dependent 7-cyano- 7-deazaguanine reductase OS=Providencia heimbachae ATCC 35613 OX=1354272 GN=queF PE=3 SV=1

SEQ ID NO: 48673 - protein, 281 aa, Providencia rettgeri
  misc_feature (1)..(281): tr|A0A1J0EB63|A0A1J0EB63_PRORE NADPH-dependent 7-cyano- 7-deazaguanine reductase OS=Providencia rettgeri OX=587 GN=queF PE=3 SV=1
MSHYQNNPALDNLTLGKKTAYHDQYDATLLQAVPRSLNRSPLAIYADALPFHGADIWTMYELSWLNQRGVPQVAIGSISVDAHSENLIESKSFKLYLNSFNQTCFETWENVRSVLQNDLSRCANGKVSVTLYKLDDFSHQPIQPLQGICIDDQEIDINNYEFNRDYLANSTQEDIVEETLVSHLLKSNCLITNQPDWGSVQIHYCGAKINREALLRYLISFRHHNEFHEQCVERIFNDITQLCKPDKLSVYARYTRRGGLDINPWRSNEDFTPELGRLARQ

SEQ ID NO: 48674 - protein, 281 aa, Providencia rettgeri
  misc_feature (1)..(281): tr|A0A264VW11|A0A264VW11_PRORE NADPH-dependent 7-cyano- 7-deazaguanine reductase OS=Providencia rettgeri OX=587 GN=queF PE=3 SV=1
MSHYQNNPALNNLTLGKKTDYHDQYDATLLQAVPRSLNRDPLAIHAKALPFHGADIWTMYELSWLNQRGVPQVAIGSISVDANSENLIESKSFKLYLNSFNQTRFETWENVRSALQNDLSRCANGQVSVTLHKLEHFAHQPIQPLLGECIDEQEIDIDNYEFNRDYLANSTQQQVVDETLVSHLLKSNCLITNQPDWGSVQIHYCGPKIDREALLRYLVSFRHHNEFHEQCVERIFTDIMQLCKPEKLSVYARYTRRGGLDINPWRSNEEFTPELGRLSRQ

SEQ ID NO: 48675 - protein, 281 aa, Providencia rustigianii
  misc_feature (1)..(281): tr|D1P1D8|D1P1D8_9GAMM NADPH-dependent 7-cyano-7-deazag uanine reductase OS=Providencia rustigianii DSM 4541 OX =500637 GN=queF PE=3 SV=1
MPHYQNNPALDNLTLGKKTAYHDQYDASLLQAVPRSLNRDPLDIHANALPFHGADIWTLYELSWLNHRGVPQVAIGSVSIDATSENLVESKSFKLYLNSFNQTRFETWENVRSVLQNDLSYCANGGVKVTLYKLDDFTQQSIHQFHGECIDDQDIDIDNYEFNRQYLVDSTQPLLVEETLVSHLLKSNCLITNQPDWGSVQIHYRGSKINREALLRYLVSFRHHNEFHEQCVERIFNDITALCNPEKLSVYARYTRRGGLDINPWRSNEQFTPDMGRLARQ

SEQ ID NO: 48676 - protein, 281 aa, Providencia rustigianii; identical to SEQ ID NO: 48675
  misc_feature (1)..(281): tr|A0A379G6W6|A0A379G6W6_9GAMM NADPH-dependent 7-cyano- 7-deazaguanine reductase OS=Providencia rustigianii OX= 158850 GN=queF PE=3 SV=1

SEQ ID NO: 48677 - protein, 281 aa, Providencia sneebia
  misc_feature (1)..(281): tr|K8WJK1|K8WJK1_9GAMM NADPH-dependent 7-cyano-7-deazag uanine reductase OS=Providencia sneebia DSM 19967 OX=11 41660 GN=queF PE=3 SV=1
MSHYQNNPALDNLTLGKKTAYHDQYDPNLLQAVPRSLNRTPLNIDAQDLPFHGADIWTLYEISWLNKKGVPQVAIGSVSIDAQSENLVESKSFKLYLNSFNQTRYETWENVRSTLENDLARCANGKVSVKLHKLNEFSQQMIQPFDGICLDDQDIEIDNYEFSRDYLVNSTEADIVEETLVSHLLKSNCLITNQPDWGSVQIHYSGPKINREALLRYLVSFRHHNEFHEQCVERIFNDITQLCQPEKLTVYARYTRRGGLDINPWRSNTHFIPEIGRLARQ

SEQ ID NO: 48678 - protein, 281 aa, Providencia sp.
  misc_feature (1)..(281): tr|A0A345M1L4|A0A345M1L4_9GAMM NADPH-dependent 7-cyano- 7-deazaguanine reductase OS=Providencia sp. WCHPHu00036 9 OX=2027290 GN=queF PE=3 SV=1
MSHYQNNPALNNLTLGKKTAYHDQYDATLLQAVPRSLNRDPLAIHAKALPFHGADIWTMYELSWLNQRGVPQVAIGSVSVDANSENLIESKSFKLYLNSFNQTRFETWENVRSALQNDLSHCANGQVSVTLHKLAHFSHQPIQPLLGECIDEQEIDIDNYEFNRDYLANCTQQQVVDETLVSHLLKSNCLITNQPDWGSVQIHYRGPKIDREALLRYLVSFRHHNEFHEQCVERIFTDIMQLCKPEKLSVYARYTRRGGLDINPWRSNEEFKPELGRLSRQ

SEQ ID NO: 48679 - protein, 281 aa, Providencia sp.
  misc_feature (1)..(281): tr|A0A356D6L1|A0A356D6L1_PROSP NADPH-dependent 7-cyano- 7-deazaguanine reductase OS=Providencia sp. OX=589 GN=q ueF PE=3 SV=1
MSHYQNNPALDNLTLGKKTAYIDQYDPTLLQAVPRSLNREPLAIRNDALPFQGADIWTLYELSWLNPKGLPQVAIGSISVNANSDNLIESKSFKLYLNSFNQTKFETWENVRSVLQSDLSYCANGEVSVTLHKLDDFSQQTIHQFNGICIDEQDIDIDNYEFSRHYLADCTQSEIVEETLVSHLLKSNCLITNQPDWGSVQIHYRGPKINHEALLRYLISFRHHNEFHEQCVERIFNDITQLCKPEKLSVYARYTRRGGLDINPWRSNEQFKPQTGRLARQ

SEQ ID NO: 48680 - protein, 195 aa, Providencia stuartii
  misc_feature (1)..(195): tr|A0A140NMX7|A0A140NMX7_PROSM NADPH-dependent 7-cyano- 7-deazaguanine reductase OS=Providencia stuartii (strai n MRSN 2154) OX=1157951 GN=queF PE=3 SV=1
MIESKSFKLYLNSFNQTRYDSWENVRSVLQNDLSNCANGKVSVTLHKLDEFSQQAICQFEGICIDEQDIEINQYEFSRDYLANSTENENVEETLVSHLLKSNCLITNQPDWGSVQIRYRGPKINREALLRYLVSFRHHNEFHEQCVERIFNDITQLCKPEQLSVYARYTRRGGLDINPWRSNTQFTPEIGRLARQ

SEQ ID NO: 48681 - protein, 281 aa, Providencia stuartii
  misc_feature (1)..(281): tr|A0A379GQP8|A0A379GQP8_PROST NADPH-dependent 7-cyano- 7-deazaguanine reductase OS=Providencia stuartii OX=588 GN=queF PE=3 SV=1
MSHYQNNPALDNLTLGKKTAYYDQYDPSLLQAVPRSLNRDPLDIHADSLPFHGADIWTLYELSWLNKKGVPQVAIGSVHVDAQSENLIESKSFKLYLNSFNQTRYDSWENVRSVLQNDLSNCANGKVGVTLHKLDEFSQQAICQFEGICIDEQDIEINQYEFSRDYLANSTENENVEETLVSHLLKSNCLITNQPDWGSVQIRYRGPKINREALLRYLVSFRHHNEFHEQCVERIFNDITQLCKPEQLSVYARYTRRGGLDINPWRSNTQFTPEIGRLARQ

SEQ ID NO: 48682 - protein, 143 aa, Unknown
  misc_feature (1)..(143): tr|A0A368DXU8|A0A368DXU8_9PROT NADPH-dependent 7-cyano- 7-deazaguanine reductase OS=PS1 clade bacterium OX=2175 152 GN=queF PE=3 SV=1
MLGQQTPMPNSPDEAVLERVPNPHPDTIYVARFAVPEFTSICPKTGQPDFARLIIDYVPEKYLVESKSFKLFMGSFRNHGAFHEDCTIEIAKRLITCMEPRWLRIGGYWYPRGGIPIDVFYQTGDPPADLYIPAQDVAPYTGR

SEQ ID NO: 48683 - protein, 285 aa, Pseudacidovorax intermedius
  misc_feature (1)..(285): tr|A0A370FCH6|A0A370FCH6_9BURK NADPH-dependent 7-cyano- 7-deazaguanine reductase OS=Pseudacidovorax intermedius OX=433924 GN=queF PE=3 SV=1
MSLDNTPEQSQLGRASAYVDRYDPSLLFPLPRALQREEMGIDTQRLPFFGADLWTAFELSWLNPRGKPQLAIAHFTVPCETPNIIESKSFKLYLNSFNSSTFTDAEAVRERLRTDLGEAVWRGSERSGSVGVRLLPPAQFEAERVEELQGLDLDRLDVDCSDYAPNPALLRTVPGEPSVNETLTSRLLKSNCRVTGQPDWGSVQISYSGPPIDQEGLLRYIVSFRNHNEFHEPCAERIFTDIWRRCAPTRLAVYCRYTRRGGLDINPFRTSWPQALPPNIRTARQ

SEQ ID NO: 48684 - protein, 285 aa, Pseudacidovorax intermedius
  misc_feature (1)..(285): tr|A0A147GY27|A0A147GY27_9BURK NADPH-dependent 7-cyano- 7-deazaguanine reductase OS=Pseudacidovorax intermedius OX=433924 GN=queF PE=3 SV=1
MSLDTTPEQSQLGRASAYADRYDPALLFPLPRAPQRIEMGIDGPRLPFFGADLWTAFELSWLNPRGKPQLAIVHFTVPCETPNIIESKSFKLYLNSFNSSTFADAEAVRERLRADLAEALWRGSERAGSVGVKLLAPAQFAAERVAELEGLDLDRLDVDCTDYQPRPELLRTVPGEPAVNETLASRLLKSNCRVTGQPDWGSVQISYSGAPIDQEGLLRYIVSFRNHNEFHEPCAERIFTDIWQRCAPTRLAVYCRYTRRGGLDINPFRTSWPQALPPNLRTARQ

SEQ ID NO: 48685 - protein, 285 aa, Pseudacidovorax sp.
  misc_feature (1)..(285): tr|A0A1N7BCU6|A0A1N7BCU6_9BURK NADPH-dependent 7-cyano- 7-deazaguanine reductase OS=Pseudacidovorax sp. RU35E O X=1907403 GN=queF PE=3 SV=1
MSLDNTPEQSQLGRASAYVDRYDPSLLFPLPRALQREEMGIDTQRLPFFGADLWTAFELSWLNPRGKPQLAIAHFTVPCETPNIIESKSFKLYLNSFNSSTFADAEAVRERLRADLGEAVWRGSERSGSVGVKLLAPAQFEAERVEELAGLDLDRLDVDCTDYEPRPELLRTVPGEPAVNETLTSRLLKSNCRVTGQPDWGSVQISYSGPPIDQEGLLRYIVSFRNHNEFHEPCAERIFTDIWRRCGPTRLAVYCRYTRRGGLDINPFRTSWPQALPPNLRTARQ

SEQ ID NO: 48686 - protein, 153 aa, Pseudaminobacter manganicus
  misc_feature (1)..(153): tr|A0A1V8RUS1|A0A1V8RUS1_9RHIZ NADPH-dependent 7-cyano- 7-deazaguanine reductase OS=Pseudaminobacter manganicus OX=1873176 GN=queF PE=3 SV=1
MTETSELTQLGAKVETPDSPDRAVLETVPYTHGDGPPAIVRFTCPEFTSLCPVTGQPDFAHIVIDYAPDSLLVESKSLKLFLTTFRNHGAFHEDCTVMIARRIVSVTKPLWLRIAGYWYPRGGMPIDVFWQTGTPPKDAWLPDTGVAPYRGRG

SEQ ID NO: 48687 - protein, 153 aa, Pseudaminobacter sp.
  misc_feature (1)..(153): tr|A0A432V1S6|A0A432V1S6_9RHIZ NADPH-dependent 7-cyano- 7-deazaguanine reductase OS=Pseudaminobacter sp. CB3 OX =1851146 GN=queF PE=3 SV=1
MTITDSLTQLGTHVATPTSPETAVLETVPYSRPGGPPAIVRFTCPEFTSLCPVTGQPDFAHIVIDYAPKAALVESKSLKLFLTSFRNHGAFHEDCTIMIGKRVVEATKPLWLRIAGYWFPRGGIPIDVFWQTGTPPEGAWLPDTGVPPYRGRG

SEQ ID NO: 48688 - protein, 128 aa, Pseudanabaena biceps
  misc_feature (1)..(128): tr|L8N695|L8N695_9CYAN NADPH-dependent 7-cyano-7-deazag uanine reductase OS=Pseudanabaena biceps PCC 7429 OX=92 7668 GN=queF PE=3 SV=1
MTVKYGEQAIAEATLTTFPNPRIGRDYNIQLTLPEYTCKCPFSGYPDFATIHITYTPNLLLVELKAIKLYINSYRDRFISHEEAVNQILDDFVKASDPLRINVKGDFSPRGNVHTLVEVNYTKPQETI

SEQ ID NO: 48689 - protein, 127 aa, Pseudanabaena frigida
  misc_feature (1)..(127): tr|A0A2W4W0B1|A0A2W4W0B1_9CYAN NADPH-dependent 7-cyano- 7-deazaguanine reductase OS=Pseudanabaena frigida OX=94 5775 GN=queF PE=3 SV=1
MTVKYGEQAIAEATLTTFPNPRIGRDYSVQITLPEYTCKCPFSGYPDFATIYITYTPNQVLVELKAIKLYINSYRDRFISHEESVNQILDDFVKAGDPLRINVKGDFSPRGNVHTVVEVNYTKPVSN

SEQ ID NO: 48690 - protein, 128 aa, Pseudanabaena sp.
  misc_feature (1)..(128): tr|A0A256BM85|A0A256BM85_9CYAN NADPH-dependent 7-cyano- 7-deazaguanine reductase OS=Pseudanabaena sp. SR411 OX= 1980935 GN=queF PE=3 SV=1
MTVKYGEQAIAEANLTTFPNPRIGRDYTIQITLPEFTSKCPFSGYPDFATIYITYTPNLVLVELKAIKLYINSYRDRFISHEEAVNQILDDFVKAGDPLRINVKGDFTPRGNVHTVVEVNYSKPQETI

SEQ ID NO: 48691 - protein, 124 aa, Pseudanabaena sp.
  misc_feature (1)..(124): tr|A0A2W7AWB3|A0A2W7AWB3_9CYAN NADPH-dependent 7-cyano- 7-deazaguanine reductase OS=Pseudanabaena sp. OX=1153 G N=queF PE=3 SV=1
MTVKYGEQAIAEANLTTFPNPRIGRDYNIQITLPEFTSKCPFSGYPDFATIYISYTPNLLLVELKAIKLYINSYRDRFISHEESVNQILDDFVKAGDPLRINVKGDFTPRGNVHTVVEVNYTKP

SEQ ID NO: 48692 - protein, 282 aa, Pseudescherichia vulneris
  misc_feature (1)..(282): tr|A0A090UXK3|A0A090UXK3_PSEVU NADPH-dependent 7-cyano- 7-deazaguanine reductase OS=Pseudescherichia vulneris N BRC 102420 OX=1115515 GN=queF PE=3 SV=1
MSSSYDNHQALAGLTLGKTTRYRDTYDATLLQGVPRSLNRDPLGLHADSLPFHGGDIWTLYELSWLNANGLPQVAVGHVELDYASVNLVESKSFKLYLNSFNQTRFSSWEEVRTTLERDLSACAQGKVSVMLYALDELEGQPIAHFNGKCIDNQDIVIDDYQFNADYLQNAAGGSVVEETLVSHLLKSNCLITHQPDWGSVQIQYRGPQIDREKLLRYLVSFRHHNEFHEQCVERIFNDLLRFCQPETLSVYARYTRRGGLDINPWRSNTDFQPATGRLVRQ

SEQ ID NO: 48693 - protein, 276 aa, Pseudidiomarina sp.
  misc_feature (1)..(276): tr|A0A443Z6C7|A0A443Z6C7_9GAMM NADPH-dependent 7-cyano- 7-deazaguanine reductase OS=Pseudidiomarina sp. R04H25 OX=2487740 GN=queF PE=3 SV=1
MKQPLAHLNLGQPTQYPTQYDASLLQAVPRQLNRTPIGLAESISLPFHGDDIWHGYELSWLNTLGVPQVAVAEFRVPATSTNLVESKSFKLYLNSFNDSRWDSWHAVQQQLAEDLSACAGGQVSVRLDTVQQAQQAPFSDLPGLCIDAQDIRIDSYEYNPELLSLRDNQVIDETLHSHLLKSNCLITNQPDWGSVLIRYRGPAIDHAALLRYIVSFRHHNEFHEQCVERLYMDIKTRLKPEQLTVYARYTRRGGLDINPFRSDFEQTPQSVRLSRQ

SEQ ID NO: 48694 - protein, 281 aa, Pseudoalteromonadaceae bacterium
  misc_feature (1)..(281): tr|A0A2D7N2H3|A0A2D7N2H3_9GAMM NADPH-dependent 7-cyano- 7-deazaguanine reductase OS=Pseudoalteromonadaceae bact erium OX=2026783 GN=queF PE=3 SV=1
MTDYSNSPDLKGSVLGQSTEYVDVYSPSLLFPIARKLNRDALNIDEAELPFKGQDIWTGYELSWLNAKGKPQVAVALFTFACQSSHIIESKSFKLYLNSFNQTRFESIEVVKQHLIEDLSNAVNSDVAVTLYAPDDYNCLPCTPLPGQCIDDLDIEIDNYDIDAYSLKSKSDTLVTETLHSHLLKSNCLITSQPDWASIIIRYTGEQICHEALLRYLISFRTHNEFHEQCVERIYSDLTTQLNIKELEVYARYTRRGGLDINPYRSTHYNDTPFAVKINRQ

SEQ ID NO: 48695 - protein, 281 aa, Pseudoalteromonas agarivorans
  misc_feature (1)..(281): tr|A0A290RPN9|A0A290RPN9_9GAMM NADPH-dependent 7-cyano- 7-deazaguanine reductase OS=Pseudoalteromonas agarivora ns DSM 14585 OX=1312369 GN=queF PE=3 SV=1
MTDYSNSPDLKGSVLGQSTEYVDVYSPSLLFPIARKLNRDALNIDEAELPFKGQDIWTGYELSWLNAKGKPQVAVALFTFACQSSHIIESKSFKLYLNSFNQTRFESIEVVKQHLIKDLSNAVNSDVAVTLYAPDDYNCLPCTPLPGQCIDDLDIEIDNYDIDAYSLKSKSDTLVTETLHSHLLKSNCLITSQPDWASIIIRYTGEQICHEALLRYLISFRTHNEFHEQCVERIYSDLTTQLNIKELEVYARYTRRGGLDINPYRSTHYNDTPFAVKINRQ

SEQ ID NO: 48696 - protein, 281 aa, Pseudoalteromonas agarivorans
  misc_feature (1)..(281): tr|N6WBA7|N6WBA7_9GAMM NADPH-dependent 7-cyano-7-deazag uanine reductase OS=Pseudoalteromonas agarivorans S816 OX=1307437 GN=queF PE=3 SV=1
MTDYSNSPDLKGSVLGQSTEYVDVYSPSLLFPIARKLNRDALNIDEAELPFKGQDIWTGYELSWLNAKGKPQVAVALFTFACQSSHIIESKSFKLYLNSFNQTRFESTEVVRQHLIKDLSNAVNSDVAVTLYAPDDYNCLPCTPLPGQCIDDLDIEIDNYDIDAYSLKSKSDTLVTETLHSHLLKSNCLITSQPDWASIIIRYTGEQICHEALLRYLISFRTHNEFHEQCVERIYSDLTTQLNIKELEVYARYTRRGGLDINPYRSTHYNDTPFAVKINRQ

SEQ ID NO: 48697 - protein, 281 aa, Pseudoalteromonas aliena
  misc_feature (1)..(281): tr|A0A1Q2H0M0|A0A1Q2H0M0_9GAMM NADPH-dependent 7-cyano- 7-deazaguanine reductase OS=Pseudoalteromonas aliena OX =247523 GN=queF PE=3 SV=1
MTDYSNSPDLKGSVLGQSTEYVDVYTPSLLFPIARKLNRDALNIDEAALPFKGQDIWTGYELSWLNAKGKPQVAVALFIFECQSSHIIESKSFKLYLNSFNQTRFESIEVVKQHLIDDLSSAVNSPVKVTLYKADEFNCLPCTPLPGECIDDLDIEIDNYHIDAHSLKSQRDELVTETLHSHLLKSNCLITSQPDWASIIIRYTGEKVCRESLLRYLISFRTHNEFHEQCVERIYSDLTTQLNIKELEVYARYTRRGGLDINPYRSTHYNDTPFAVKINRQ

SEQ ID NO: 48698 - protein, 281 aa, Pseudoalteromonas amylolytica
  misc_feature (1)..(281): tr|A0A1S1MUW7|A0A1S1MUW7_9GAMM NADPH-dependent 7-cyano- 7-deazaguanine reductase OS=Pseudoalteromonas amylolyti ca OX=1859457 GN=queF PE=3 SV=1
MTDYTNAPELKASVLGKTTEYASQYDASLLHPIARKLNRDQIGVEESALPFKGEDTWTGYELSWLNLKGKPQVAVASFVFPCQSSHIIESKSFKLYLNSFNQSRFESAEAVQNILTKDLSKAANTQVKVTLYKASDYACLPFTQMPGECIDDLDIDVDIYSPQAGILKAASTNIVTQTLHSHLLKSNCLITSQPDWASIVISYTGTQVCRESLLRYLISFRSHNEFHEQCVERIYCELMNTFDFEKLDVYARYTRRGGLDINPYRSSDQDSTAYQIRTNRQ

SEQ ID NO: 48699 - protein, 281 aa, Pseudoalteromonas arctica
  misc_feature (1)..(281): tr|A0A290S224|A0A290S224_9GAMM NADPH-dependent 7-cyano- 7-deazaguanine reductase OS=Pseudoalteromonas arctica A 37-1-2 OX=1117313 GN=queF PE=3 SV=1
MTDYSNSPDLKGSVLGQSTEYVDVYTPSLLFPIARKLNRDALNIDEAELPFKGQDIWTGYELSWLNNKGKPQVAVALFTFECQSSHIIESKSFKLYLNSFNQTRFESIDIVKQHLIDDLSNAVNSTVKVTLYNPDDYNCLPCTALPGECIDDLDIEINNYDIDANSLKAKSDNVVTETLYSHLLKSNCLITSQPDWASVIIRYTGEQICRESLLRYLISFRTHNEFHEQCVERIYSDLTTQLNIKELEVYARYTRRGGLDINPYRSTHYNDTPFAVKINRQ

SEQ ID NO: 48700 - protein, 279 aa, Pseudoalteromonas atlantica
  misc_feature (1)..(279): tr|Q15QY9|Q15QY9_PSEA6 NADPH-dependent 7-cyano-7-deazag uanine reductase OS=Pseudoalteromonas atlantica (strain T6c / ATCC BAA-1087) OX=342610 GN=queF PE=3 SV=1
MQDKSLPSDILSSLTLGKATQYKEHYSPELLQGVPRSLNRDELNLGDTLPFKGVDRWNGYELSWLNLKGKPEVAILRCEIPCESVNLIESKSFKLYLNSFNQSKIESILHVQKMISKDLSACAGLPVNVQLFARETFPGLQLGTLEAQCIDDLDISVDNYDLAPSILQVEEEQVQETLCSHLLKSNCLITNQPDWGSVLIRYHGRKIDQESVLRYLISFRQHNEFHEQCVERIFSDIMRYCEPQKLTVYARYTRRGGLDINPFRSNFESIYPELRLARQ

SEQ ID NO: 48701 - protein, 281 aa, Pseudoalteromonas atlantica
  misc_feature (1)..(281): tr|A0A510ZK23|A0A510ZK23_PSEAF NADPH-dependent 7-cyano- 7-deazaguanine reductase OS=Pseudoalteromonas atlantica OX=288 GN=queF PE=3 SV=1
MTDYSNSPDLKGSVLGQSTEYVDVYSPSLLFPIARKLNRDALNIDEAELPFKGQDIWTGYELSWLNAKGKPQVAVALFTFACQSSHIIESKSFKLYLNSFNQTRFESIEVVRQHLIEDLSNAVNSDVAVTLYAPDDYNCLPCTPLPGQCIDDLDIEIDNYDIDAYSLKSKSDTLVTETLHSHLLKSNCLITSQPDWASIIIRYTGEQICHEALLRYLISFRTHNEFHEQCVERIYSDLTTQLNIKELEVYARYTRRGGLDINPYRSTHYNDTPFAVKINRQ

SEQ ID NO: 48702 - protein, 281 aa, Pseudoalteromonas byunsanensis
  misc_feature (1)..(281): tr|A0A1S1N6H6|A0A1S1N6H6_9GAMM NADPH-dependent 7-cyano- 7-deazaguanine reductase OS=Pseudoalteromonas byunsanen sis OX=327939 GN=queF PE=3 SV=1
MTDYTNAPELKASVLGKTTEYASHYDATLLHPIARKLNRDQIGVDESALPFKGEDSWTGYELSWLNLKGKPQVAVASFVFPCQSSHIIESKSFKLYLNSFNQSQFESAAKVQAILTQDLSNAANTQVEVTLYKADDYACLPFTKMPGECIDDLDIEVDIYSPQAGILKGTGENKVSETLHSHLLKSNCLITSQPDWASIVISYTGTQVCRESLLRYLISFRSHNEFHEQCVERIYCELMNTFTFEKLDVYARYTRRGGLDINPYRSSDQDKTPFQIRINRQ

SEQ ID NO: 48703 - protein, 281 aa, Pseudoalteromonas carrageenovora
  misc_feature (1)..(281): tr|A0A2K4XAK5|A0A2K4XAK5_PSEVC NADPH-dependent 7-cyano- 7-deazaguanine reductase OS=Pseudoalteromonas carrageen ovora IAM 12662 OX=1314868 GN=queF PE=3 SV=1
MTDYSNSPDLKGSVLGQSTEYVDDYTPSLLFPIARKLNRDALNIDEAELPFKGQDIWTGYELSWLNAKGKPQVAVALFTFECQSSHIIESKSFKLYLNSFNQTRFESNKVVKQHLIDDLSNAVNSPVKVTLYSPDDYNCLPCTALPGECIDDLDIEIDNYDIDAYSLKAQSDTVVTETLHSHLLKSNCLITSQPDWASIIIRYTGEKICRESLLRYLISFRTHNEFHEQCVERIYSDLTTQLNIKELEVYARYTRRGGLDINPYRSTHYNDTPFAVKINRQ

SEQ ID NO: 48704 - protein, 281 aa, Pseudoalteromonas citrea
  misc_feature (1)..(281): tr|U1JJ08|U1JJ08_9GAMM NADPH-dependent 7-cyano-7-deazag uanine reductase OS=Pseudoalteromonas citrea DSM 8771 O X=1117314 GN=queF PE=3 SV=1
MTDYTNAPELKASILGKTTDYAQQYDASLLYPIPRKLNRDQISVDEADLPFLGEDTWTGYELSWLNAKGKPQVAVATFIFPCQSSHIVESKSFKLYLNSFNQTRFTDQKTVLDTLTKDLSAVTHSEVEVVLYKANDHDCIAFTSMPGQCIDDLDIEVEHYSPIENMLKQKSSDIVSETLHSHLLKSNCLITSQPDWATIIIEYTGVAVCHESLLRYLISFRSHNEFHEQCVERIYCELQRTFAFEKLAVYARYTRRGGLDINPYRSNEHNKTPYAIRTNRQ

SEQ ID NO: 48705 - protein, 282 aa, Pseudoalteromonas denitrificans
  misc_feature (1)..(282): tr|A0A1I1MSQ9|A0A1I1MSQ9_9GAMM NADPH-dependent 7-cyano- 7-deazaguanine reductase OS=Pseudoalteromonas denitrifi cans DSM 6059 OX=1123010 GN=queF PE=3 SV=1
MTAYDNSEELKGTLLGQQTEYKDQYAPELLFPIARKLNRDELNVIDSDLPFKGQDLWTGYELSWLNTKGKPQVAVAEFIFPCQSSHLVESKSFKLYLNSFNQTRFNDLNTVQKHLIDDLSKTVNNQVEVKLYTASDFSAIKTTPLPGICIDDLDIEIDQYQLNSTLLKLEDDHSQVTETLHSHLLKSNCLITSQPDWASIVIRYTGMKICHESLLRYLISFRSHNEFHEQCVERIYCDIQNKLGIKELEVYARYTRRGGLDINPYRSSMQNKIPFVIKTNRQ

SEQ ID NO: 48706 - protein, 281 aa, Pseudoalteromonas distincta
  misc_feature (1)..(281): tr|F3BF33|F3BF33_9GAMM NADPH-dependent 7-cyano-7-deazag uanine reductase OS=Pseudoalteromonas distincta OX=7760 8 GN=queF PE=3 SV=1
MTDYSNSPDLKGSVLGQSTEYVDVYTPSLLFPIARKLNRDALNIDEAELPFKGQDIWTGYELSWLNTKGKPQVAVALFTFECQSSHIIESKSFKLYLNSFNQTRFESIDVVKQHLIDDLSNAVNSPVKVTLYNPDDYNCLPCTALPGECIDDLDIEINNYDIDANSLKAKSDEVVTETLYSHLLKSNCLITSQPDWASVIIRYTGEQICRESLLRYLISFRTHNEFHEQCVERIYSDLTTQLNIKELEVYARYTRRGGLDINPYRSTHYNDTPFAVKINRQ

SEQ ID NO: 48707 - protein, 281 aa, Pseudoalteromonas distincta
  misc_feature (1)..(281): tr|A0A5B0UL38|A0A5B0UL38_9GAMM NADPH-dependent 7-cyano- 7-deazaguanine reductase OS=Pseudoalteromonas distincta OX=77608 GN=queF PE=3 SV=1
MTDYSNSPDLKGSVLGQSTEYVDVYTPSLLFPIARKLNRDALNIDEAELPFKGQDIWTGYELSWLNNKGKPQVAVALFTFECQSSHIIESKSFKLYLNSFNQTRFESIDVVKQHLIDDLSNAVNSPVKVTLYNPDDYNCLPCTALPGECIDDLDIEINNYDIDANSLKAKSDNVVTETLYSHLLKSNCLITSQPDWASVIIRYTGEQICRESLLRYLISFRTHNEFHEQCVERIYSDLTTQLNIKELEVYARYTRRGGLDINPYRSTHYNDTPFAVKINRQ

SEQ ID NO: 48708 - protein, 281 aa, Pseudoalteromonas elyakovii
  misc_feature (1)..(281): tr|A0A558I2E2|A0A558I2E2_9GAMM NADPH-dependent 7-cyano- 7-deazaguanine reductase OS=Pseudoalteromonas elyakovii OX=81037 GN=queF PE=3 SV=1
MTDYSNSPDLKGSVLGQSTEYVDVYTPSLLFPIARKLNRDALNIDEAELPFKGQDIWTGYELSWLNTKGKPQVAVALFTFECQSSHIIESKSFKLYLNSFNQTRFESIDVVKQHLIDDLSNAVNSPVKVTLYNPDDYNCLPCTALPGECIDDLDIEINNYDIDANSLKAKNDNVVTETLYSHLLKSNCLITSQPDWASVIIRYTGEQICRESLLRYLISFRTHNEFHEQCVERIYSDLTTQLNIKELEVYARYTRRGGLDINPYRSTHYNDTPFAVKINRQ

SEQ ID NO: 48709 - protein, 281 aa, Pseudoalteromonas espejiana
  misc_feature (1)..(281): tr|A0A510Y1A8|A0A510Y1A8_9GAMM NADPH-dependent 7-cyano- 7-deazaguanine reductase OS=Pseudoalteromonas espejiana OX=28107 GN=queF PE=3 SV=1
MTDYSNSPDLKGSVLGQSTEYVDVYSPSLLFPIARKLNRDALNIDEAELPFKGQDIWTGYELSWLNAKGKPQVAVALFTFACQSSHIIESKSFKLYLNSFNQTRFESVEVVKQHLIEDLSKAVNGDVNVTLYAPDDYNCLPCTALPGECIDDLDIEIDNYDIDAYSLKSQSESVVSETLYSHLLKSNCLITSQPDWASIIIRYTGEKICRESLLRYLISFRTHNEFHEQCVERIYSDLTTQLNIKELEVYARYTRRGGLDINPYRSTHYNDTPFAVKINRQ

SEQ ID NO: 48710 - protein, 281 aa, Pseudoalteromonas fuliginea
  misc_feature (1)..(281): tr|A0A063L0M0|A0A063L0M0_9GAMM NADPH-dependent 7-cyano- 7-deazaguanine reductase OS=Pseudoalteromonas fuliginea OX=1872678 GN=queF PE=3 SV=1
MTDYSNSPDLKGSVLGQSTEYVDVYTPSLLFPIARKLNRDALNIDEAELPFKGQDIWTGYELSWLNNKGKPQVAVALFTFECQSSHIIESKSFKLYLNSFNQTRFESIDIVKQHLIDDLSNAVNSPVKVTLYNPDDYNCLPCTALPGECIDDLDIEINNYDIDANSLKAKNDNVVTETLYSHLLKSNCLITSQPDWASVIIRYTGEQICRESLLRYLISFRTHNEFHEQCVERIYSDLTTQLNIKELEVYARYTRRGGLDINPYRSTHYNDTPFAVKINRQ

SEQ ID NO: 48711 - protein, 281 aa, Pseudoalteromonas fuliginea; identical to SEQ ID NO: 48707
  misc_feature (1)..(281): tr|A0A5B0UYQ8|A0A5B0UYQ8_9GAMM NADPH-dependent 7-cyano- 7-deazaguanine reductase OS=Pseudoalteromonas fuliginea OX=1872678 GN=queF PE=3 SV=1

SEQ ID NO: 48712 - protein, 281 aa, Pseudoalteromonas haloplanktis
  misc_feature (1)..(281): sp|Q3IIT0|QUEF_PSEHT NADPH-dependent 7-cyano-7-deazagua nine reductase OS=Pseudoalteromonas haloplanktis (strai n TAC 125) OX=326442 GN=queF PE=3 SV=1
MTDYSNSPDLKGSVLGQSTEYIDQYTPSLLFPIARKLNRDALNIDEAALPFKGQDIWTGYELSWLNAKGKPQVAIAVFTFACQSSHLVESKSFKLYLNSFNQTRFNSRDEVKQHLVKDLTAVVNSLVQVTLYNADEYNCLPYTPLPGECIDDLDIEIDNYDIDAHSLKSQSNKTVTETLHSHLLKSNCLITSQPDWASVIIRYTGEQICRESLLRYLISFRTHNEFHEQCVERIYSDLSTQLSIKNLEVYARYTRRGGLDINPYRSTHNNDTPFAVKINRQ

SEQ ID NO: 48713 - protein, 281 aa, Pseudoalteromonas issachenkonii
  misc_feature (1)..(281): tr|A0A290SHT2|A0A290SHT2_9GAMM NADPH-dependent 7-cyano- 7-deazaguanine reductase OS=Pseudoalteromonas issachenk onii OX=152297 GN=queF PE=3 SV=1
MTDYSNSPDLKGSVLGQSTEYVDQYTPSLLFPIARKLNRDSLSIDETALPFKGQDIWTGYELSWLNTKGKPQVAVALFTFECQSSHIIESKSFKLYLNSFNQSRFGSIEIVKQHLIDDLSNAVNSPVKVTLYSADDYNCIPCTPLPGECIDELDIEIDNYHIDAHSLKSQSNKIVTETLHSHLLKSNCLITSQPDWASIIIRYTGEQVCRESLLRYLISFRTHNEFHEQCVERIYSDLTTQLHIKELEVYARYTRRGGLDINPYRSTHYNETPFSVKINRQ

SEQ ID NO: 48714 - protein, 281 aa, Pseudoalteromonas lipolytica
  misc_feature (1)..(281): tr|A0A0P7DUH3|A0A0P7DUH3_9GAMM NADPH-dependent 7-cyano- 7-deazaguanine reductase OS=Pseudoalteromonas lipolytic a OX=570156 GN=queF PE=3 SV=1
MTDYSNSPELKNSVLGKSTEYVDTYTPSLLFPIARKLNRDALGVSEDNLPFKGQDIWTGYELSWLNSKGKPMVAVATFVFPCQSSHIIESKSFKLYLNSFNQTRFETPDDVHQALSKDLSDAVNAPVIVTLYQADDFNCLPFSALPGECIDDLDIEITSYDIDASSLRHNGDEIVSETLHSHLLKSNCLITSQPDWASVIIRYKGQAICHEALLKYLISFRTHNEFHEQCVERIYCDLMQQLNLEELEVYARYTRRGGLDINPYRSTNQDETPFKVKINRQ

SEQ ID NO: 48715 - protein, 281 aa, Pseudoalteromonas lipolytica
  misc_feature (1)..(281): tr|Z5XRV9|Z5XRV9_9GAMM NADPH-dependent 7-cyano-7-deazag uanine reductase OS=Pseudoalteromonas lipolytica SCSIO 04301 OX=1452721 GN=queF PE=3 SV=1
MTDYSNSPELKNSVLGKSTDYVDTYTPSLLFPIARKLNRDALGVSEDNLPFKGQDIWTGYELSWLNSKGKPMVAVATFVFPCQSSHIIESKSFKLYLNSFNQTRFASTEEVHQALTRDLSAAVNANVNVTLYRADDHNCLPFSALPGECIDDLDIEISSYDIDATSLCHSHDEKVSETLHSHLLKSNCLITSQPDWASVIIRYTGQAISHEALLKYLISFRTHNEFHEQCVERIYCDLMQHLNIDELEVYARYTRRGGLDINPYRSTNQDATPFNVKINRQ

SEQ ID NO: 48716 - protein, 281 aa, Pseudoalteromonas luteoviolacea
  misc_feature (1)..(281): tr|A0A161YT11|A0A161YT11_9GAMM NADPH-dependent 7-cyano- 7-deazaguanine reductase OS=Pseudoalteromonas luteoviol acea CPMOR-1 OX=1365248 GN=queF PE=3 SV=1
MTDYNNAPELQASLLGKTTEYASAYDASLLHPIARKLNRDQIAVDEQALPFKGEDTWTGYELSWLNNKGKPQVAVATFVFPCQSSHIIESKSFKLYLNSFNQTRFESADDVHKHLTDDLSRAANCNVTVTLFGPDEYNCLPFTQLPGECIDDLDVNIDTYSPAEGMLMHANESEVSETLYSHLLKSNCLITSQPDWASIVIRYEGKQVCRASLLKYLISFRDHNEFHEQCVERIYCDLQRALQPSKLEVYARYTRRGGLDINPYRSSEQNTTGFNVRVNRQ

SEQ ID NO: 48717 - protein, 281 aa, Pseudoalteromonas luteoviolacea
  misc_feature (1)..(281): tr|A0A1C0TJJ8|A0A1C0TJJ8_9GAMM NADPH-dependent 7-cyano- 7-deazaguanine reductase OS=Pseudoalteromonas luteoviol acea OX=43657 GN=queF PE=3 SV=1
MTDYNNAPELKASVLGKTTEYASQYDATLLHPIARKLNRDQISVDEKKLPFFGEDTWTGYELSWLNSKGKPQVAVATFTFPCQSSHIIESKSFKLYLNSFNQTRFDSQQTVQQHLSEDLSAAAQCQVIVKLYGPDEYNCLPFTSLPGTCIDDLDIEVDTYSPSEGMLSTASDECVNETLYSHLLKSNCLITSQPDWASIVISYEGNKVCRESLLKYLISFRDHNEFHEQCVERIFCDIKRALNPSKLEVYARYTRRGGLDINPFRSTEQDTTSFNIRVNRQ

SEQ ID NO: 48718 - protein, 281 aa, Pseudoalteromonas marina; identical to SEQ ID NO: 43946
  misc_feature (1)..(281): tr|U1KWM9|U1KWM9_9GAMM NADPH-dependent 7-cyano-7-deazag uanine reductase OS=Pseudoalteromonas marina DSM 17587 OX=1117316 GN=queF PE=3 SV=1

SEQ ID NO: 48719 - protein, 281 aa, Pseudoalteromonas neustonica
  misc_feature (1)..(281): tr|A0A558IGS1|A0A558IGS1_9GAMM NADPH-dependent 7-cyano- 7-deazaguanine reductase OS=Pseudoalteromonas neustonic a OX=1840331 GN=queF PE=3 SV=1
MTDYSNSPELKGSVLGQSTEYVDTYTPSLLFPIARKLNRDDLNIDESALPFKGQDLWTGYELSWLNAKGKPVVAVATFEFPCQSSHIIESKSFKLYLNSFNQSRFDSIDDVQAILTADLSTAVAKPVNVTLYSPSDYNCLPCTPLPGECIDDLDIEINNYHLHANSLQAVATNTVTETLHSHLLKSNCLITSQPDWASIIIRYTGEQVCKESLLRYLISFRTHNEFHEQCVERIYCDLITQLKITKLEVYARYTRRGGLDINPYRSTDHDTIPFNVKINRQ

SEQ ID NO: 48720 - protein, 281 aa, Pseudoalteromonas nigrifaciens; identical to SEQ ID NO: 48712
  misc_feature (1)..(281): tr|A0A379H8Z4|A0A379H8Z4_9GAMM NADPH-dependent 7-cyano- 7-deazaguanine reductase OS=Pseudoalteromonas nigrifaci ens OX=28109 GN=queF PE=3 SV=1

SEQ ID NO: 48721 - protein, 281 aa, Pseudoalteromonas peptidolytica
  misc_feature (1)..(281): tr|A0A510U3W0|A0A510U3W0_9GAMM NADPH-dependent 7-cyano- 7-deazaguanine reductase OS=Pseudoalteromonas peptidoly tica OX=61150 GN=queF PE=3 SV=1
MTDYNNSPELQSSVLGKTTEYASIYTPSLLHPIARKLNRDQIHVDETELPFKGEDTWTGYELSWLNTKGKPQVAVATFVFPCQSSHIIESKSFKLYLNSFNQSRFDSMEVVRQTLAEDLSAASNSEVNVTLFGAGDFDCIPFSSLPGECIDSLDIEVDTYTPDHNLLKLASDKVVQETLHSHLLKSNCLITSQPDWASIVISYQGKQIDKAALLKYLISFRDHNEFHEQCVERIYCELWRTFNPEKLSVYARYTRRGGLDINPYRSNEQNKTPYAVRTNRQ

SEQ ID NO: 48722 - protein, 281 aa, Pseudoalteromonas phenolica
  misc_feature (1)..(281): tr|A0A0S2K359|A0A0S2K359_9GAMM NADPH-dependent 7-cyano- 7-deazaguanine reductase OS=Pseudoalteromonas phenolica OX=161398 GN=queF PE=3 SV=1
MTDYNNAPELKESVLGKTTEYASQYDASLLFPIARKLNRDQIAVDEQNLPFKGEDTWTGYELSWLNSKGKPQVAVAAFVFPCQSSHIIESKSFKLYLNSFNQTKFASFDEVQTILTNDLSKAAQTDVEVTLFKAEDYACIPFTAMPGECIDELDIEVDTYSPQEGLIVVKDGNEVTETLHSHLLKSNCLITSQPDWASIVISYTGKPVCKESLLKYLISFRDHNEFHEQCVERIYCDLMRELNPSKLEVYARYTRRGGLDINPYRSSESDKTAYHIRTNRQ

SEQ ID NO: 48723 - protein, 281 aa, Pseudoalteromonas phenolica
  misc_feature (1)..(281): tr|A0A4Q7IPI2|A0A4Q7IPI2_9GAMM NADPH-dependent 7-cyano- 7-deazaguanine reductase OS=Pseudoalteromonas phenolica OX=161398 GN=queF PE=3 SV=1
MTDYNNAPELKVSVLGKTTEYASQYDASLLFPIARKLNRDQISVDEQNLPFKGEDTWTGYELSWLNAKGKPQVAVATFVFPCQSSHIIESKSFKLYLNSFNQTKFASFDEVQTILTNDLSKAAQTDVAVTLFKAEDYACIPFTAMPGECIDELDIEVDTYSPQEGLIEVKDGNEVTEILHSHLLKSNCLITSQPDWASIVVSYTGKPVCKESLLKYLISFRDHNEFHEQCVERIYCDLMRELKPSKLEVYARYTRRGGLDINPYRSSENDKTAYHIRTNRQ

SEQ ID NO: 48724 - protein, 282 aa, Pseudoalteromonas piratica
  misc_feature (1)..(282): tr|A0A0A7EGG8|A0A0A7EGG8_9GAMM NADPH-dependent 7-cyano- 7-deazaguanine reductase OS=Pseudoalteromonas piratica OX=1348114 GN=queF PE=3 SV=1
MSHYQDAPELKGALLGQQTEYKDSYDASLLFPIARKLNRDDLNIDENALPFKGEDTWTGYELSWLNQKGKPVVAVAEFIFPATSSHIIESKSFKLYLNSFNQTKFDSMAEVEAVLTQDLSNAANCNVIVKLFNADHFDCLMPTPFNGICLDELDIEVSQYDLNTELLTADDNDEVVTETLYSHLLKSNCLITSQPDWASVVIRYTGKKINHESLLKYLISFRNHNEFHEQCVERLFCDLQCKFALSKLEVYARYTRRGGLDINPYRSTDYDTTQFTLKSNRQ

SEQ ID NO: 48725 - protein, 281 aa, Pseudoalteromonas piscicida
  misc_feature (1)..(281): tr|A0A290TSI8|A0A290TSI8_PSEO7 NADPH-dependent 7-cyano- 7-deazaguanine reductase OS=Pseudoalteromonas piscicida OX=43662 GN=queF PE=3 SV=1
MTDYSNSPELQSSVLGKTTEYASVYTPSLLHPIARKLNRDQINVDESALPFKGEDTWTGYELSWLNNKGKPQVAVATFVFPCQSSHIIESKSFKLYLNSFNQSRFDTMETVRQTLAADLSTASNSQVSVTLFGADEFDCIPFSRLPGECIDELDIEVDSYTPNSDLLQLASEDVVDETLHSHLLKSNCLITSQPDWASVVISYHGKQIDREALLKYLISFRDHNEFHEQCVERIYCELWRTFNPEKLSVYARYTRRGGLDINPYRSSEQDQTPYAVRTNRQ

SEQ ID NO: 48726 - protein, 281 aa, Pseudoalteromonas piscicida
  misc_feature (1)..(281): tr|A0A2A5JNM6|A0A2A5JNM6_PSEO7 NADPH-dependent 7-cyano- 7-deazaguanine reductase OS=Pseudoalteromonas piscicida OX=43662 GN=queF PE=3 SV=1
MTDYNNSPELQSSVLGKTTEYASVYTPSLLHPIARKLNRDQINVDGAALPFKGEDTWTGYELSWLNNKGKPQVAVATFVFPCQSAHIIESKSFKLYLNSFNQSRFESMETVRQTLAADLSAASNSEVKVTLFGADDFDCIPFSRLPGECIDELDIEVDTYTPNSDLLKLASDDIVEETLHSHLLKSNCLITSQPDWASVVISYRGKQIDRAALLRYLISFRDHNEFHEQCVERIYCELWRTFNPEKLSVYARYTRRGGLDINPYRSSEQDQTPYTVRTNRQ

SEQ ID NO: 48727 - protein, 281 aa, Pseudoalteromonas porphyrae
  misc_feature (1)..(281): tr|A0A0N1EKX1|A0A0N1EKX1_9GAMM NADPH-dependent 7-cyano- 7-deazaguanine reductase OS=Pseudoalteromonas porphyrae OX=187330 GN=queF PE=3 SV=1
MTDYSNSPELKDSVLGQSTEYVDTYTPSLLFPIARKLNRDALDINEAALPFKGQDIWTGYELSWLNTKGKPVVAVASFIFPCQSSHIIESKSFKLYLNSFNQTRFDSIEDVKAILIADLSAGVSMPIDVVLYSPNDYNCLPCTPLPGECIDELDIQIDSYHLDAYSLKPASTNTVSETLHSHLLKSNCLITSQPDWASIIIRYTGEQVCKESLLRYLISFRTHNEFHEQCVERIYCDLMAQLNITELEVYARYTRRGGLDINPYRSTSHDNVPFAVKINRQ

SEQ ID NO: 48728 - protein, 281 aa, Pseudoalteromonas profundi
  misc_feature (1)..(281): tr|A0A3A3EGE5|A0A3A3EGE5_9GAMM NADPH-dependent 7-cyano- 7-deazaguanine reductase OS=Pseudoalteromonas profundi OX=1774956 GN=queF PE=3 SV=1
MTDYSNSPELKNSVLGKSTEYVDTYTPSLLFPIARKLNRDALGVSEDNLPFKGQDIWTGYELSWLNSKGKPMVAVATFVFPCQSSHIIESKSFKLYLNSFNQTRFETQGDVHQALSKDLSAAVNAPVIVTLYQADDFNCLPFTALPGECIDDLDIEITSYDIDASSLRHNGDEVVSETLHSHLLKSNCLITSQPDWASVIIRYKGQAICHEALLKYLISFRTHNEFHEQCVERIYCDLMQQLNLEELEVYARYTRRGGLDINPYRSTNQDETPFKVKINRQ

SEQ ID NO: 48729 - protein, 281 aa, Pseudoalteromonas rubra
  misc_feature (1)..(281): tr|A0A0F4QFD6|A0A0F4QFD6_9GAMM NADPH-dependent 7-cyano- 7-deazaguanine reductase OS=Pseudoalteromonas rubra OX= 43658 GN=queF PE=3 SV=1
MTDYNNAPELKASVLGKTTEYASQYDPSLLHPIARKLNRDQIAVDEQALPFFGEDIWHGYELSWLNSKGKPQVAIARFVFPCQSSHIIESKSFKLYLNSFNQSKFDSFDAVRDALQQDLSAAAQCDVAVTLYGPDDHDCLPFSALPGDCIDELDITVDDYSPRDGLLALQSDEPVSETLHSHLLKSNCLITSQPDWASIVIRYEGAKICRESLLRYLISFRDHNEFHEQCVERIYCDLLRALNPSKLEVYARYTRRGGLDINPFRSSEQNQTAFNVRINRQ

SEQ ID NO: 48730 - protein, 281 aa, Pseudoalteromonas rubra
  misc_feature (1)..(281): tr|U1LP60|U1LP60_9GAMM NADPH-dependent 7-cyano-7-deazag uanine reductase OS=Pseudoalteromonas rubra DSM 6842 OX =1117318 GN=queF PE=3 SV=1
MTDYNNAPELKASVLGKTTEYASQYEPSLLHPIARKLNRDQIAVDEQALPFFGEDIWHGYELSWLNTKGKPQVVIARFVFPCQSSHIIESKSFKLYLNSFNQSQFASFDAVRDTLQQDLSKAAQCDVTVTLYGPDDHNCLPFSALPGECIDELDIAVDDYSPRDGLLTQESDQHVSETLHSHLLKSNCLITSQPDWASIVIRYEGAKICRESLLRYLISFRDHNEFHEQCVERIYCDLLRALNPTKLEVYARYTRRGGLDINPFRSSEQDKTTFNVRINRQ

SEQ ID NO: 48731 - protein, 282 aa, Pseudoalteromonas ruthenica
  misc_feature (1)..(282): tr|A0A0F4PM92|A0A0F4PM92_9GAMM NADPH-dependent 7-cyano- 7-deazaguanine reductase OS=Pseudoalteromonas ruthenica OX=151081 GN=queF PE=3 SV=1
MTDYSNAPELKASLLGKATEYKGSYDPSLLYPIARKLNRDDLQIDERALPFKGEDIWTGYELSWLNPKGKPQVAVATFTFPCQSPDIIESKSFKLYLNSFNQSRFESMQAVQQTMAKDLSAATQSDVQVTLYGPEDYQHFAATALPGQCIDELDITVDTYELTPSLLRLADDAQQVEQTLHSHLLKSNCLITSQPDWASVVIRYQGPALCHESLLRYLISFRSHNEFHEQCVERIFTDIMACAPMQSLEVYARYTRRGGLDINPYRATHSDKTLFDVRINRQ

SEQ ID NO: 48732 - protein, 281 aa, Pseudoalteromonas sp.
  misc_feature (1)..(281): tr|A0A2K9JZ54|A0A2K9JZ54_9GAMM NADPH-dependent 7-cyano- 7-deazaguanine reductase OS=Pseudoalteromonas sp. NC201 OX=1514074 GN=queF PE=3 SV=1
MTDYSNSPELQSSVLGKTTEYASVYTPSLLHPIARKLNRDQINVDESALPFKGEDTWTGYELSWLNNKGKPQVAVATFVFPCQSSHIIESKSFKLYLNSFNQSRFDTMETVRQTLAADLSTASNSQVSVTLFGADEFDCIPFSRLPGECIDELDIEVDSYTPNSNLLQLASEDVVDETLHSHLLKSNCLITSQPDWASVVISYRGKQIDREALLKYLISFRDHNEFHEQCVERIYCELWRTFNPEKLSVYARYTRRGGLDINPYRSSEQDQTPYTVRTNRQ

SEQ ID NO: 48733 - protein, 281 aa, Pseudoalteromonas sp.
  misc_feature (1)..(281): tr|A0A4Z0SLM9|A0A4Z0SLM9_9GAMM NADPH-dependent 7-cyano- 7-deazaguanine reductase OS=Pseudoalteromonas sp. KS88 OX=2109918 GN=queF PE=3 SV=1
MTDYSNSPELKGSVLGQSTEYVDTYTPSLLFPIARKLNRDDLNIDEAQLPFKGQDIWTGYEVSWLNNKGKPMVGVALFEFPCQTSHIIESKSFKLYLNSFNQTRFDSVDKVKSTLSNDLSVAVAMPVKVTLYSPDEYNCLPCTPLPGVCIDDLDIEIDSYDLDAQSLKSASDECVTETLHSHLLKSNCLITSQPDWASIIIRYSGEKICKESLLRYLISFRTHNEFHEQCVERIFCDLNTQLKLSNLEVYARYTRRGGLDINPYRSTSNNTVPFNVKINRQ

SEQ ID NO: 48734 - protein, 282 aa, Pseudoalteromonas spongiae
  misc_feature (1)..(282): tr|A0A290T4A0|A0A290T4A0_9GAMM NADPH-dependent 7-cyano- 7-deazaguanine reductase OS=Pseudoalteromonas spongiae UST010723-006 OX=1117319 GN=queF PE=3 SV=1
MSHYQDAPELKGALLGQQTEYKDSYDASLLFPIARKLNRDDLNIDESALPFKGEDTWTGYELSWLNQKGKPVVAVAEFIFPATSSHIIESKSFKLYLNSFNQTKFDSMAQVQQILTSDLSKSANCDVVVKLFNADDFDCLMPTPFTGTCLDDLDIEVSEYDLNTELLKADASNEIVTETLYSHLLKSNCLITSQPDWASVVIRYTGKKICHESLLKYLISFRNHNEFHEQCVERLFCDIQNKFSMTQLEVFARYTRRGGLDINPYRSTDFATTQFKLKSNRQ

SEQ ID NO: 48735 - protein, 281 aa, Pseudoalteromonas tetraodonis
  misc_feature (1)..(281): tr|A0A1E3WUY0|A0A1E3WUY0_9GAMM NADPH-dependent 7-cyano- 7-deazaguanine reductase OS=Pseudoalteromonas tetraodon is OX=43659 GN=queF PE=3 SV=1
MTDYSNSPDLKGSVLGQSTEYVDQYTPSLLFPIARKLNRDSLSIDETALPFKGQDIWTGYELSWLNTKGKPQVAVALFTFECQSSHIIESKSFKLYLNSFNQSRFGSIEIVKQHLIDDLSNAVNSPVKVTLYSADDYNCIPCTPLPGECIDELDIEIDNYHIDAHSLKSQSNKIVTETLHSHLLKSNCLITSQPDWASIIIRYTGEQVCRESLLRYLISFRTHNEFHEQCVERIYSDLTTQLNIKELEVYARYTRRGGLDINPYRSTHYNETPFSVKINRQ

SEQ ID NO: 48736 - protein, 281 aa, Pseudoalteromonas tetraodonis; identical to SEQ ID NO: 48713
  misc_feature (1)..(281): tr|A0A290TGK0|A0A290TGK0_9GAMM NADPH-dependent 7-cyano- 7-deazaguanine reductase OS=Pseudoalteromonas tetraodon is OX=43659 GN=queF PE=3 SV=1

SEQ ID NO: 48737 - protein, 281 aa, Pseudoalteromonas translucida
  misc_feature (1)..(281): tr|A0A0U2X0J2|A0A0U2X0J2_9GAMM NADPH-dependent 7-cyano- 7-deazaguanine reductase OS=Pseudoalteromonas transluci da KMM 520 OX=1315283 GN=queF PE=3 SV=1
MTDYSNSPDLKGSVLGQSTEYIDQYTPSLLFPIARKLNRDALNIDEAALPFKGQDIWTGYELSWLNAKGKPQVAIAVFTFACQSSHLVESKSFKLYLNSFNQTRFNSRDEVKKHLVKDLTAVVNSLVQVTLYNADEYNCLPYTPLPGECIDDLDIEINNYDIDAHSLKSQSNKTVTETLHSHLLKSNCLITSQPDWASVIIRYTGEQICRESLLRYLISFRTHNEFHEQCVERIYSDLSTQLSIKNLEVYARYTRRGGLDINPYRSTHNNDTPFAVKINRQ

SEQ ID NO: 48738 - protein, 285 aa, Pseudoalteromonas tunicata
  misc_feature (1)..(285): tr|A4C5J9|A4C5J9_9GAMM NADPH-dependent 7-cyano-7-deazag uanine reductase OS=Pseudoalteromonas tunicata D2 OX=87 626 GN=queF PE=3 SV=1
MINMTDYENSPELKGTLLGQQTEYKDQYDASLLFPIARKLNRDELAIDEAALPFVGEDTWTGYELSWLNAKGKPQVAVAEFIFPCQSSHIIESKSFKLYLNSFNQTRFDTLEQVKQHLVEDLSKGCNAAVEVRIFGPEAFNCINNTPLPGLCIDDLDVEIDCYSLDKQLLKLAANAVQVSETLHSHLLKSNCLITSQPDWASVVIRYSGPQICHESLLRYLISFRSHNEFHEQCVERIYCDIQELLGIKELEVYARYTRRGGLDINPYRSSHQQQTPFKLKINRQ

SEQ ID NO: 48739 - protein, 282 aa, Pseudoalteromonas ulvae
  misc_feature (1)..(282): tr|A0A244CS42|A0A244CS42_9GAMM NADPH-dependent 7-cyano- 7-deazaguanine reductase OS=Pseudoalteromonas ulvae OX= 107327 GN=queF PE=3 SV=1
MTDYENSPELKGTLLGQETQYKDQYDASLLFPIARKLNRDELNIDEAALPFYGEDTWTGYELSWLNNKGKPQVAVAEFVFPCQSSHIIESKSFKLYLNSFNQTRFASQEIVQDLLVKDLSAGCNAPVEVRIYGPEVFNCIANTPMPGVCIDDLDIEVDCYDLNKQLLQLAPNQDTVTETLHSHLLKSNCLITSQPDWASIVIRYTGKQICHESLLRYLISFRSHNEFHEQCVERIYCDIQQQLGISELEVYARYTRRGGLDINPFRSNRQNKTSFSLKINRQ

SEQ ID NO: 48740 - protein, 125 aa, Pseudoarcobacter caeni
  misc_feature (1)..(125): tr|A0A363D3R7|A0A363D3R7_9PROT NADPH-dependent 7-cyano- 7-deazaguanine reductase OS=Pseudoarcobacter caeni OX=1 912877 GN=queF PE=3 SV=1
MKYGEKEIREFDINKDENFWPNEHDKNYIIDIELPEFMAKCPRSGYPDFATIKLQYTPNKRVIELKALKIYINTFMFREVSHENSINEIFDTLFSKLEPKWMKVIGDFKPRGNVHTVIEIDSSKF

SEQ ID NO: 48741 - protein, 146 aa, Pseudobacter ginsenosidimutans
  misc_feature (1)..(146): tr|A0A4Q7MKZ8|A0A4Q7MKZ8_9BACT NADPH-dependent 7-cyano- 7-deazaguanine reductase OS=Pseudobacter ginsenosidimut ans OX=661488 GN=EV199_4788 PE=3 SV=1
MSQEIIKTYKDIDRTILKGIPNPTDQAYEIKIKIPEFTFLGVKEQPDFAVIYLTFYPGKKVIELKSLKQYIFQLRNIVASYERLINIIYDDLQAAYEPARMRLVMICNPRGGISSKLTIDSDWKIRGGKEAFNDWKLIEDEWEVTM

SEQ ID NO: 48742 - protein, 164 aa, Pseudobutyrivibrio ruminis
  misc_feature (1)..(164): tr|A0A285RIU5|A0A285RIU5_9FIRM NADPH-dependent 7-cyano- 7-deazaguanine reductase OS=Pseudobutyrivibrio ruminis DSM 9787 OX=1123011 GN=queF PE=3 SV=1
MTDSRKEEGTLTLLGNKNNVYPDNYAPEMLQTFLNKHPENDYFVKFNCPEFTSLCPITGQPDFANIIISYVPGEKMVESKSLKLYLFSFRNHGDFHEDCVNIIMKDLIKLMDPKYIEVWGKFTPRGGISIDPYCNYGKPGTKWEKVAEDRLFNHDMYPEKVDNR

SEQ ID NO: 48743 - protein, 163 aa, Pseudobutyrivibrio ruminis
  misc_feature (1)..(163): tr|A0A2G3DYF6|A0A2G3DYF6_9FIRM NADPH-dependent 7-cyano- 7-deazaguanine reductase OS=Pseudobutyrivibrio ruminis OX=46206 GN=queF PE=3 SV=1
MADRAAEGTLTLLGNKNNVYPDNYAPEMLQTFLNKHPENDYFVKFNCPEFTSLCPITGQPDFANIIISYVPGEKMVESKSLKLYLFSFRNHGDFHEDCVNIIMKDLIKLMDPKYIEVWGKFTPRGGISIDPYCNYGKPGTKWEEVAFNRMANHDMYPEKVDNR

SEQ ID NO: 48744 - protein, 164 aa, Pseudobutyrivibrio sp.; identical to SEQ ID NO: 48742
  misc_feature (1)..(164): tr|A0A1I5D5J3|A0A1I5D5J3_9FIRM NADPH-dependent 7-cyano- 7-deazaguanine reductase OS=Pseudobutyrivibrio sp. JW11 OX=1855302 GN=queF PE=3 SV=1

SEQ ID NO: 48745 - protein, 163 aa, Pseudobutyrivibrio sp.
  misc_feature (1)..(163): tr|A0A1H3ZX54|A0A1H3ZX54_9FIRM NADPH-dependent 7-cyano- 7-deazaguanine reductase OS=Pseudobutyrivibrio sp. ACV- 2 OX=1520801 GN=queF PE=3 SV=1
MSDRKDEGTLTLLGNKNNKYPDNYAPEMLQTFINKHPENDYFVKFNCPEFTSLCPITGQPDFANIIISYVPGEKMVESKSLKLYLFSFRNHGDFHEDCVNIIMKDLIKLMDPKYIEVWGKFTPRGGISIDPYCNYGKPGTKWEEVAFNRLANHDMYPEKVDNR

SEQ ID NO: 48746 - protein, 163 aa, Pseudobutyrivibrio xylanivorans
  misc_feature (1)..(163): tr|A0A1G5S2Y9|A0A1G5S2Y9_PSEXY NADPH-dependent 7-cyano- 7-deazaguanine reductase OS=Pseudobutyrivibrio xylanivo rans OX=185007 GN=queF PE=3 SV=1
MADRAAEGTLTLLGNKNNTYPDNYAPEMLQTFLNKHPENDYFVKFNCPEFTSLCPITGQPDFANIIISYVPGEKMVESKSLKLYLFSFRNHGDFHEDCVNIIMKDLIKLMDPKYIEVWGKFTPRGGISIDPYCNYGKPGTKWEEVAFNRMANHDMYPEKVDNR

SEQ ID NO: 48747 - protein, 163 aa, Pseudobutyrivibrio xylanivorans; identical to SEQ ID NO: 48746
  misc_feature (1)..(163): tr|A0A1M6FMT8|A0A1M6FMT8_PSEXY NADPH-dependent 7-cyano- 7-deazaguanine reductase OS=Pseudobutyrivibrio xylanivo rans DSM 14809 OX=1123012 GN=queF PE=3 SV=1

SEQ ID NO: 48748 - protein, 281 aa, Pseudocitrobacter faecalis
  misc_feature (1)..(281): tr|A0A366FD75|A0A366FD75_9ENTR NADPH-dependent 7-cyano- 7-deazaguanine reductase OS=Pseudocitrobacter faecalis OX=1398493 GN=queF PE=3 SV=1
MSSYDNHQALTGLTLGKSTDYRDTYDAGLLQGVPRSLNRDPLGLRADALPFHGADIWTLYELSWLNAKGLPQVAVGHVELRHTTVNLVESKSFKLYLNSFNQTRFGSWDDVRQTLERDLSACAQGDVTVSLYRLDEIEGQPIAHFHGTCIDNQDIEIDNYQFNADYLLNSTGSKNVEETLVSHLLKSNCLITHQPDWGSVQIQYRGPQIDREKLLRYLVSFRHHNEFHEQCVERIFSDILRFCQPESLSVYARYTRRGGLDINPWRSNTDFVPAIGRLVRQ

SEQ ID NO: 48749 - protein, 281 aa, Pseudocitrobacter sp.
  misc_feature (1)..(281): tr|A0A5B0K9H2|A0A5B0K9H2_9ENTR NADPH-dependent 7-cyano- 7-deazaguanine reductase OS=Pseudocitrobacter sp. 73 OX =2605731 GN=queF PE=3 SV=1
MSSYENHQALTGLTLGKSTDYRDTYDAGLLQGVPRSLNRDPLGLHANALPFHGADIWTLYELSWLNAKGLPQVAVGHVELSHTTVNLVESKSFKLYLNSFNQTRFGSWEDVRHTLERDLSACAQGDVTVSLYRLDEIEGQPIAHFHGTCIDNQDIEIDNYQFSADYLLNSTGSKKVEETLVSHLLKSNCLITHQPDWGSVQIQYRGPQIDREKLLRYLVSFRHHNEFHEQCVERIFSDILRFCKPESLSVYARYTRRGGLDINPWRSNTEFVPAIGRLVRQ

SEQ ID NO: 48750 - protein, 278 aa, Pseudofulvimonas gallinarii
  misc_feature (1)..(278): tr|A0A4R3LM41|A0A4R3LM41_9GAMM NADPH-dependent 7-cyano- 7-deazaguanine reductase OS=Pseudofulvimonas gallinarii OX=634155 GN=queF PE=3 SV=1
MTTPDHSPLGRETTYPRQYDARLLFPIPRSAQREILGFSDGLPFHGEDIWTAYELSWLDARGRPQVAIATFRLPADSPCIIESKSLKLYLNGFAFEKFPTVDDLRAIIARDLSHASGATVEVVIDAAAAMSRMTAFAELEGECIDGLEVSLAPVADIDPSSLAAATTEAAHEELLVSRLFRSNCPVTGQPDWADVQVRARGVAIDRAGLLRYLVSFRQHQGFHEHCVERIFSDVLRYCAPAALTVYARFTRRGGLDINPWRSNDAHFPAPANIRTPRQ

SEQ ID NO: 48751 - protein, 277 aa, Pseudogulbenkiania ferrooxidans
  misc_feature (1)..(277): tr|U1AAH0|U1AAH0_9NEIS NADPH-dependent 7-cyano-7-deazag uanine reductase OS=Pseudogulbenkiania ferrooxidans EGD -HP2 OX=1388764 GN=queF PE=3 SV=1
MSHLTPEHSPLGKTVSYQDHYDPSLLFPIARQAKRDEIGVDEAALPFAGVDIWTGFELSWLNPRGKPQVGIATFRIPAASPRLIESKSFKLYLNSYNQTRMDGVDALSAQLARDLSAAAGAEVSVSIALPQAFATEQVRELAGEYIDELDIEVDNYAPCPEVLKADTADIVSETLCSNLLKSNCLVTGQPDWGSVSIRYTGPKINREALLRYLIGFRQHNEFHEQCVERIFVDVLRACAPQKLTVYARYTRRGGLDINPWRSNADVPPTDNVRAARQ

SEQ ID NO: 48752 - protein, 279 aa, Pseudogulbenkiania ferrooxidans
  misc_feature (1)..(279): tr|B9Z1V6|B9Z1V6_9NEIS NADPH-dependent 7-cyano-7-deazag uanine reductase OS=Pseudogulbenkiania ferrooxidans 200 2 OX=279714 GN=queF PE=3 SV=1
MASNTKTPEQSPLGKTVQYQDQYAPELLFPIPRQQKRDEIGVDGSALPFAGVDIWTGYELSWLNARGKPQVAIATFRIPANTPNLIESKSFKLYLNSYNQTRLDSMARLQAQLALDLSRAAGGPVAVSLTSPQDFARERIDELAGEYIDDLDIEVSDYHPDPARLSADLSHIVSETLCSNLLKSNCLVTGQPDWGSVQIHYIGPRIERESLLRYLIGFRQHNEFHEQCVERIFTDVLRACQPQQLTVYARYTRRGGLDINPFRSNGGEPAPANVRTARQ

SEQ ID NO: 48753 - protein, 279 aa, Pseudogulbenkiania sp.
  misc_feature (1)..(279): tr|G2IXZ2|G2IXZ2_PSEUL NADPH-dependent 7-cyano-7-deazag uanine reductase OS=Pseudogulbenkiania sp. (strain NH8B ) OX=748280 GN=queF PE=3 SV=1
MASNTKTPEQSPLGKTVQYQDQYAPELLFPIPRQQKRDEIGVDGSALPFAGVDIWTGYELSWLNARGKPQVAIATFRIPADTPNLIESKSFKLYLNSYNQTRLDSMAQLQAQLALDLSRAAGGPVVVSLTSPQDFARERIDELAGEYIDDLDIEVSDYHPDPARLSADRSHIVSETLCSNLLKSNCLVTGQPDWGSVQIHYIGPRIERESLLRYLIGFRQHNEFHEQCVERIFTDVLRACQPQQLTVYARYTRRGGLDINPFRSNGGEPAPANVRTARQ

SEQ ID NO: 48754 - protein, 279 aa, Pseudogulbenkiania subflava
  misc_feature (1)..(279): tr|A0A1Y6BC99|A0A1Y6BC99_9NEIS NADPH-dependent 7-cyano- 7-deazaguanine reductase OS=Pseudogulbenkiania subflava DSM 22618 OX=1123014 GN=queF PE=3 SV=1
MANNTKTPEQSPLGKTVQYQDQYAPELLFPIPRQQKRDEIGVDGSALPFAGVDIWTGYELSWLNARGKPQVAIATFRIPADTPNLIESKSFKLYLNSFNQTRLDSMEQLQAQLALDLSRAAGGAVAVSLASPQDFARERIDELAGEYIDDIDIDVCDYHPDPARLSADLSHIVSETLCSNLLKSNCLVTGQPDWGSVQIHYIGPRIERESLLRYLIGFRQHNEFHEQCVERIFTDVLRACQPQQLTVYARYTRRGGLDINPFRSNSGEPAPANVRTARQ

SEQ ID NO: 48755 - protein, 271 aa, Pseudohaliea rubra
  misc_feature (1)..(271): tr|A0A095XUT5|A0A095XUT5_9GAMM NADPH-dependent 7-cyano- 7-deazaguanine reductase OS=Pseudohaliea rubra DSM 1975 1 OX=1265313 GN=HRUBRA_01835 PE=3 SV=1
MDRELPLGRQVSGSASYDPSLLFPLARSEGRARLGLGEGAPPFHGVDVWHGYELSWLEPDGRPRVALGRIEVPADSPWMVESKSLKLYLNAINGSTFASAGAVRDTIARDLTEATGGAVAVSLAHLDDPAFHGVAAPGECIDDAPFAGPVDAPARDLLRVESDERVEETLHSHLLRSLCPVTAQPDWATVIVSYRGSRLDRGALLAYLVAFREHQDFHEQCVERIFLDLAAVLSPETLAVQALYTRRGGLDISPWRSSGPGKAPQYRLHRQ

SEQ ID NO: 48756 - protein, 274 aa, Pseudohongiella acticola
  misc_feature (1)..(274): tr|A0A1E8CHE3|A0A1E8CHE3_9GAMM NADPH-dependent 7-cyano- 7-deazaguanine reductase OS=Pseudohongiella acticola OX =1524254 GN=queF PE=3 SV=1
MADNPLGKQTAYPTAYDPGLLFPVARANNRSQLGVKEGSELPFGGFDHWRAYELSWLLPTGQPVVALADILVPCDSPCLIESKSMKLYFNSLNQAVFSEPEVARVQIEQDLSQAAGAPVQVALHNHESAVMHSVDVSNGLLLDNLLVTTTSYQPAPDFLVSHTGAQVTETLYSHLFRSNCPITAQPDWGSVVIQYQGEQIDHEGLLSYLISYRSHEGFHEHCVEQIFHDLSVKCKPQKLQVSINFLRRGGLEINPLRSSDLTIAAYPLPRLLRQ

SEQ ID NO: 48757 - protein, 287 aa, Pseudohongiella sp.
  misc_feature (1)..(287): tr|A0A2D9DR95|A0A2D9DR95_9GAMM NADPH-dependent 7-cyano- 7-deazaguanine reductase OS=Pseudohongiella sp. OX=1979 412 GN=queF PE=3 SV=1
MEHSGIPLGKQTSYPQQYDPAQLYRVARSDNRALLPFADAGTGSADLSDKDLPFFGFDHWRAYELSWLQPSGKPVVATADIIVPCDSPNLIESKSMKLYFNSLNQHKLADMQEASELIARDLSLAAGKPVQVRLHPLTAGEHHTSIDTSAVLLDELQIATEAFSPDAALLAIREDSSGPVSERLRSELFRSNCPITSQPDWGSITIEYTGQPINHESLLRYIISYRQHEGFHEHCVEMIFCDLMKICRPQSLTVSINFLRRGGLEINPLRTTRAGLAPQSLPRELRQ

SEQ ID NO: 48758 - protein, 285 aa, Pseudohongiella spirulinae
  misc_feature (1)..(285): tr|A0A0S2KCU0|A0A0S2KCU0_9GAMM NADPH-dependent 7-cyano- 7-deazaguanine reductase OS=Pseudohongiella spirulinae OX=1249552 GN=PS2015_1468 PE=3 SV=1
MTTIKTNPLGQATTYPETYDPALLYSVPRSMNRTSLGIIESALPFRGFDHWRAYELSWLRPNGMPVVATGDVLVSCDSTNIVESKSMKLYFNSLNQHTFASAEEARKCIQKDLATAAGGDVIVTIQLPGEGQTSTQRLQAIPENAVLLDRLNVSARIFKPDRRLLQLAGPVSEGAVSVTEVLASNLFRSNCPVTAQPDWGTVIISYTGDAIDHEGLLRYVISYRQHEGFHEHCAEQIYRDIMAVCAPEYLTVQINFLRRGGLEINPVRTSLPVMRMQPLPRLLRQ

SEQ ID NO: 48759 - protein, 155 aa, Pseudolabrys sp.
  misc_feature (1)..(155): tr|A0A371B101|A0A371B101_9RHIZ NADPH-dependent 7-cyano- 7-deazaguanine reductase OS=Pseudolabrys sp. GY_H OX=22 92256 GN=queF PE=3 SV=1
MAKAKRSTKSLQLGHPVALPASPEAARLDRVPNPHADTNYLARFTMPEFTSICPVTGQPDFAILVIDYVPNKWLVESKSLKLYLNSFRNVGSFHEDCTVSIGKRLKTLLAPRWLRIGGYFYPRGGMPIDVFWQTGKLPSGVWVPDQGVAPYRGRG

SEQ ID NO: 48760 - protein, 155 aa, Pseudolabrys sp.
  misc_feature (1)..(155): tr|A0A0Q7TYN7|A0A0Q7TYN7_9RHIZ NADPH-dependent 7-cyano- 7-deazaguanine reductase OS=Pseudolabrys sp. Root1462 O X=1736466 GN=queF PE=3 SV=1
MAKRRTSSASLQLGHSVAQPASPEAARLDRVPNPHADANYVARFTMPEFTSICPVTGQPDFAILVIDYVPNKWLVESKSLKLYLNSFRNVGSFHEDCTVGIGKRLKTLLAPRWLRIGGYFYPRGGMPIDVFWQTGKLPTGVWIPDQGVAPYRGRG

SEQ ID NO: 48761 - protein, 152 aa, Pseudolabrys taiwanensis
  misc_feature (1)..(152): tr|A0A345ZSH3|A0A345ZSH3_9RHIZ NADPH-dependent 7-cyano- 7-deazaguanine reductase OS=Pseudolabrys taiwanensis OX =331696 GN=queF PE=3 SV=1
MAKKTTPLQLGRPAVIPASPDEAVLDRVPNPHRDTNYLARFTAPEFTTLCPVTGQPDFAHLVIDYVPNKYLVESKSLKLYLVSFRNHGDFHEGCTVAIGKRLFKLLEPKWLRIGGYWYPRGGIPIDVFWQAGKLPKDMWVPDQGVAPYRGRG

SEQ ID NO: 48762 - protein, 276 aa, Pseudomonadaceae bacterium
  misc_feature (1)..(276): tr|A0A2D5CHM3|A0A2D5CHM3_9GAMM NADPH-dependent 7-cyano- 7-deazaguanine reductase OS=Pseudomonadaceae bacterium OX=1914538 GN=queF PE=3 SV=1
MHHSAENSPLGKSSEYIATYSPQLLFPIPRAPKWAELGLTAETLPYQGVDFWNCFELSWLLPSGKPVVAMAEFAIPADSPNIIESKSFKLYLNSLNQSVFADAEAVAAVMVKDLSAAAGKPVAVRVRSLNEVAAEGVAQLPGTCIDELDVAISNYAQPRPELLACDAQRVVSETVYSNLLKSNCPVTSQPDWGTVVIEYRGPAIDQASLLAYLVSFRQHADFHEQCVERIFLDLQRLLKPESLTVYARYVRRGGLDINPYRSTSPIAPDNRRLVRQ

SEQ ID NO: 48763 - protein, 276 aa, Pseudomonadaceae bacterium
  misc_feature (1)..(276): tr|A0A4Q9R6P5|A0A4Q9R6P5_9GAMM NADPH-dependent 7-cyano- 7-deazaguanine reductase OS=Pseudomonadaceae bacterium P17C OX=2211397 GN=queF PE=3 SV=1
MQHPAELSPLGKSSAYVSSYAPQLLFPISRETKWHELGLTAATLPYRGVDIWNCYELSWLLPSGKPVVAIGEFVIPADSPNIIESKSFKLYLNSLNQTVFASHEALGETLVRDLSAVAGAPVRVRVSSIQEATAQGLAELPGLCIDDLDIAISDYAAPRAELLRCEPARQVSASLHSHLLKSNCPVTGQPDWGSVLVEYQGPFLRPESLLAYLVSFRQHADFHEQCVERIYLDLLRVLRPQRLAVSARYVRRGGLDINPYRSSEPFIQVNPRLARQ

SEQ ID NO: 48764 - protein, 276 aa, Pseudomonadales bacterium
  misc_feature (1)..(276): tr|A0A1G3DNP9|A0A1G3DNP9_9GAMM NADPH-dependent 7-cyano- 7-deazaguanine reductase OS=Pseudomonadales bacterium R IFCSPHIGHO2_01_FULL_64_12 OX=1802004 GN=queF PE=3 SV=1
MQHPAEHSPLGKSSDYVATYSPGLLFPIPRAPKWAELGLTAETLPYQGVDLWNCYELSWLLPSGKPVVAIGEFEIPADSPNIIESKSFKLYLNSLNQSVFESRDALLEVMTGDLSAAAGKPVRVRLRTLDEVTADGVATLPGRCIDELDVAIQDYDHPRPELLTCDAGRVVEESLHSHLLKSNCPVTGQPDWGSVVVEYRGAALLPESLLAYLVSFRQHADFHEQCVERIFLDLQRLLRPEKLTVYARYVRRGGLDINPYRSTEALVVDNRRLVRQ

SEQ ID NO: 48765 - protein, 278 aa, Pseudomonadales bacterium
  misc_feature (1)..(278): tr|A0A2D5MWJ9|A0A2D5MWJ9_9GAMM NADPH-dependent 7-cyano- 7-deazaguanine reductase OS=Pseudomonadales bacterium O X=1891229 GN=queF PE=3 SV=1
MSDHPATESPLGKSSTYISVYTPSLLYPISRLPKWQELGLDPQQLPFHGADIWNCFELSWLTPSGKPVVAAAEFVFPIKAARIVESKSFKLYLNSLNQTVFRDRHDLLKTLETDLSVAAQGPVMVRLLSMQQLHQAGLLVLPGTCVDDLEVEVSEYSYDPSLLTLAPNAGPVTEVLHSHLLKSNCPVTGQPDWGSVQISYSGPQLDHTSLLRYLVSFRQHSDFHEQCVERIFLDILKQLGEGASLTVYARYVRRGGLDINPWRSTQPGMPENLRLARQ

SEQ ID NO: 48766 - protein, 276 aa, Pseudomonas abietaniphila
  misc_feature (1)..(276): tr|A0A1G7R6P5|A0A1G7R6P5_9PSED NADPH-dependent 7-cyano- 7-deazaguanine reductase OS=Pseudomonas abietaniphila O X=89065 GN=queF PE=3 SV=1
MHPAAEHSPLGKSSEYIATYTPSLLFPIPRAAKWAELGLTAETLPYQGFDFWNCYELSWLLPSGKPVVAIGEFCIPADSPNIIESKSFKLYLNSLNQTPFASQDDLVATLEKDLSSAAGKPVGVRIRSLKDIEAEGIVPVPGVCVDELDVTIHSYDRPQPELLRCDEARVVEESLHSHLLKSNCPVTSQPDWGSVAVQYRGAALDHASFLAYIVSFRQHSDFHEQCVERIFMDLQRLLKPEKLTVSARYVRRGGLDINPYRSTETLTLENGRLARQ

SEQ ID NO: 48767 - protein, 278 aa, Pseudomonas abyssi
  misc_feature (1)..(278): tr|A0A2A3MCD1|A0A2A3MCD1_9PSED NADPH-dependent 7-cyano- 7-deazaguanine reductase OS=Pseudomonas abyssi OX=17054 0 GN=queF PE=3 SV=1
MSDHPATDSPLGKSSAYVSVYTPSLLYPIARQAKWQELGLDPQNLPFHGADIWNCFELSWLTPSGKPEVAAAEFAFPIKAARIVESKSFKLYLNSLNQTVFRDRRELLETLESDLSVAAQGPVAVRLFSMQQLHQLGMFTLPGRCIDDEEVAVSRYHYDASLLALDSGRVQVSEVLHSHLLKSNCPVTGQPDWGSVLISYSGPRIDSAALVRYLVSFREHSDFHEQCVERIFLDLLALLGEGAQLTVYARYVRRGGLDINPWRSTEAGMPENLRLARQ

SEQ ID NO: 48768 - protein, 276 aa, Pseudomonas acidophila
  misc_feature (1)..(276): tr|A0A2A4F7K9|A0A2A4F7K9_9PSED NADPH-dependent 7-cyano- 7-deazaguanine reductase OS=Pseudomonas acidophila OX=1 912599 GN=queF PE=3 SV=1
MNTTPEHSPLGKATAYTEQYDASLLFPIARNLAREQIGIGAQLPFFGTDIWNAYELSWLNARGKPQIAIATVYVPADSANIVESKSFKLYLGSFAQTVFDSADAVRDTIRRDVSAACGATVSVHFASPFEFGKLQLEEFDGLSLDRLDLDTDVYHPDPSLLKAALAESPVEETLVSDLLKSNCPVTGQPDWGSVQIHYVGPQIDHAGLLRYLISYRNHTGFHEQCVERIFIDIMRECQPLKLAVYARYTRRGGLDINPFRTNFNQPMPDNLRTARQ

SEQ ID NO: 48769 - protein, 276 aa, Pseudomonas aeruginosa
  misc_feature (1)..(276): sp|Q9I037|QUEF_PSEAE NADPH-dependent 7-cyano-7-deazagua nine reductase OS=Pseudomonas aeruginosa (strain ATCC 1 5692 / DSM 22644 / CIP 104116 / JCM 14847 / LMG 12228 / 1C / PRS 101 / PAO1) OX=208964 GN=queF PE=3 SV=
MQHPAEHSPLGKTSEYVSSYTPSLLFPISRTAKWAELGLSAETLPYRGVDIWNCYELSWLTPAGKPVVAIGEFSIPADSPNIIESKSFKLYLNSLNQSAFDSREALRAVLQKDLSAAVGAPVGVRLRSLDEVAEEGIGRLPGRCIDELDIAVDGYEQPRPELLRCDAGRIVEEQLYSHLLKSNCPVTGQPDWGTLVVDYRGPALDPASLLAYLVSFRQHQDFHEQCVERIFLDLQRLLQPQALSVYARYVRRGGLDINPYRSLAEVAPDNRRLVRQ

SEQ ID NO: 48770 - protein, 276 aa, Pseudomonas aeruginosa
  misc_feature (1)..(276): tr|A0A3E1MXD0|A0A3E1MXD0_PSEAI NADPH-dependent 7-cyano- 7-deazaguanine reductase OS=Pseudomonas aeruginosa OX=2 87 GN=queF PE=3 SV=1
MQHPAEHSPLGKTSEYVSSYTPSLLFPISRTAKWAELGLSAETLPYRGVDIWNCYELSWLTPAGKPVVAIGEFSIPADSPNIIESKSFKLYLNSLNQSAFDSREALRAVLQKDLSAAAGAPVGVRLRSLDEVAEEGIGRLPGRCIDELDIAVDGYEQPRPELLRCDAGRIVEEQLYSHLLKSNCPVTGQPDWGTLVVDYQGPALDPASLLAYLVSFRQHQDFHEQCVERIFLDLQRLLQPQALSVYARYVRRGGLDINPYRSLAEVAPDNRRLVRQ

SEQ ID NO: 48771 - protein, 278 aa, Pseudomonas aestusnigri
  misc_feature (1)..(278): tr|A0A218VLG9|A0A218VLG9_9PSED NADPH-dependent 7-cyano- 7-deazaguanine reductase OS=Pseudomonas aestusnigri OX= 857252 GN=queF PE=3 SV=1
MSDHPATESPLGKSSTYISVYTPSLLYPISRLPKWQELGLDPQQLPFHGADIWNCFELSWLTPSGKPVVAAAEFVFPIKAARIVESKSFKLYLNSLNQTVFRDRHDLLKTLETDLSVAAQGPVMVRLLSMQQLHQAGLLALPGTCIDDLEVEVSEYSYDPSLLTLAPNAGPVTEVLHSHLLKSNCPVTGQPDWGSVQISYSGPQLDHASLLRYLVSFRQHSDFHEQCVERIFLDILKLLGEGATLTVYARYVRRGGLDINPWRSTQPGMPENLRLARQ

SEQ ID NO: 48772 - protein, 276 aa, Pseudomonas agarici
  misc_feature (1)..(276): tr|A0A0X1T6W4|A0A0X1T6W4_PSEAA NADPH-dependent 7-cyano- 7-deazaguanine reductase OS=Pseudomonas agarici OX=4667 7 GN=queF PE=3 SV=1
MHPAAEHSPLGKSSEYIATYTPSLLFSIPRAAKWAELGLSAATLPYRGVDFWNCFELSWLLPSGKPVVAIGEFSIPADSPNIIESKSFKLYLNSLNQTPFADTASLEAVLRADLSAAAGKAVGVRVRSLNEVQAEGVVALPGVCIDDLEVTVNDYAHPRPELLRCDKSRVIEESVYSHLLKSNCPVTSQPDWGSVVVEYRGAALDHASLLAYLVSFRQHSDFHEQCVERIFLDLQRLLKPEKLTVYARYVRRGGLDINPYRSTEAAEFQNLRLVRQ

SEQ ID NO: 48773 - protein, 275 aa, Pseudomonas alcaligenes
  misc_feature (1)..(275): tr|A0A142IST7|A0A142IST7_PSEAC NADPH-dependent 7-cyano- 7-deazaguanine reductase OS=Pseudomonas alcaligenes OX= 43263 GN=queF PE=3 SV=1
MQHPAEHSPLGKSSEYVSQYAPELLFPISRTTKWAELGLEAGKLPYQGVDYWNCYELSWLTPSGKPVVAIGEFAIPADSPNIIESKSFKLYLNSLNQSAYADATEVERLLARDLSACAGAPVAVRVRGLDEVAAEGVAALPGRCIDDLEIAVSDYAHPRPELLRCADQVVEEVLYSHLLKSNCPVTGQPDWGTLVVDYRGPRLEAASLLAYVVSFRQHQDFHEQCVERVFLDLQRLLQPERLTVYARYVRRGGLDINPYRSTEAITPDNRRLVRQ

SEQ ID NO: 48774 - protein, 275 aa, Pseudomonas alcaligenes
  misc_feature (1)..(275): tr|U3B9J3|U3B9J3_PSEA4 NADPH-dependent 7-cyano-7-deazag uanine reductase OS=Pseudomonas alcaligenes (strain ATC C 14909 / DSM 50342 / JCM 20561 / NBRC 14159 / NCIMB 99 45 / NCTC 10367 / 1577) OX=1215092 GN=queF PE=3
MQHPAEHSPLGKSSEYVSQYAPELLFPISRTTKWAELGLEAGKLPYQGVDYWNCYELSWLTPSGKPVVAIGEFAIPADSPNIIESKSFKLYLNSLNQSAYADAAEVERLLARDLSACAGAPVRVRVRSLDEVAAEGVANLPGRCIDDLEIAVSDYAHPRPELLRCADQVVEEVLYSHLLKSNCPVTGQPDWGTLVVDYRGPRLEAASLLAYVVSFRQHQDFHEQCVERVFLDLQRLLQPERLTVYARYVRRGGLDINPYRSTEAITPDNRRLVRQ

SEQ ID NO: 48775 - protein, 276 aa, Pseudomonas alcaliphila
  misc_feature (1)..(276): tr|A0A1G7J328|A0A1G7J328_9PSED NADPH-dependent 7-cyano- 7-deazaguanine reductase OS=Pseudomonas alcaliphila OX= 101564 GN=queF PE=3 SV=1
MQHPAEHSPLGKSSQYIAEYSPELLFPISRATKWVELGLDGASLPYQGVDYWNCYELSWLLPSGKPVVAIGEFAIPADSPNIIESKSFKLYLNSLNQTAFASWDEVQATLVRDLSAVAGKPVAVRLRSLAEVSAEGVATLPGQCIDELDVNVSQYDHPQPELLRCDADRVVEESLHSHLLKSNCPVTGQPDWGSLVVQYRGAALDHASLLAYLVSFRQHADFHEQCVERIFLDLQRLLQPQSLTVYARYVRRGGLDINPYRSSEAVTPENGRLARQ

SEQ ID NO: 48776 - protein, 276 aa, Pseudomonas alcaliphila
  misc_feature (1)..(276): tr|A0A1L7G170|A0A1L7G170_9PSED NADPH-dependent 7-cyano- 7-deazaguanine reductase OS=Pseudomonas alcaliphila JAB 1 OX=741155 GN=queF PE=3 SV=1
MQHPAEHSPLGKSSQYIAEYSPELLFPISRATKWAELGLDGGNLPYQGVDYWNCYELSWLLPSGKPVVAIGEFAIPADSPNIIESKSFKLYLNSLNQSAFASWDEVQATLVRDLSAVAGKSVAVRLRSLAEVSAEGMATLPGQCIDELDINVSQYDHPQPELLRCDASRVVEESLHSHLLKSNCPVTGQPDWGSLVVQYRGAALDHASLLAYLVSFRQHADFHEQCVERIFLDLQRLLQPQSLTVYARYVRRGGLDINPYRNSEAVTPENGRLARQ

SEQ ID NO: 48777 - protein, 276 aa, Pseudomonas alkylphenolica
  misc_feature (1)..(276): tr|A0A077FC33|A0A077FC33_9PSED NADPH-dependent 7-cyano- 7-deazaguanine reductase OS=Pseudomonas alkylphenolica OX=237609 GN=queF PE=3 SV=1
MHPAAEHSPLGKSSEYIATYTPSLLFPIPRAAKWAELGVSAETLPWQGVDFWNCFELSWLLPSGKPVVAIGEFAIPADSPNIIESKSFKLYLNSLNQTVFETPAALQACLAKDLSAAAGKPVVVQIRSLAEVEGQGVVALPGVCIDDLDVSISNYEQPQPELLSCDATRVVEETLHSHLLKSNCPVTGQPDWGSVTVHYRGAALDHASLLTYLISFRQHADFHEQCVERIYLDLKRLLNPEFLTVYARYVRRGGLDINPYRSTETVTLPNLRLVRQ

SEQ ID NO: 48778 - protein, 276 aa, Pseudomonas alkylphenolica
  misc_feature (1)..(276): tr|A0A443ZGU3|A0A443ZGU3_9PSED NADPH-dependent 7-cyano- 7-deazaguanine reductase OS=Pseudomonas alkylphenolica OX=237609 GN=queF PE=3 SV=1
MHPAAEHSPLGKSSEYIATYTPSLLFPIPRAAKWAELGVSAQTLPWQGVDFWNCFELSWLLPTGKPVVAIGEFAIPADSPNIIESKSFKLYLNSLNQTAFESPAALQACLEKDLSAAAGKPVAVQIRSLADVEGQGVVALPGVCIDDLDVSISNYEQPQPELLRCDSSRLVEETLHSHLLKSNCPVTGQPDWGSVTVHYRGAALDHASLLTYLISFRQHADFHEQCVERIYLDLKRLLNPEFLTVYARYVRRGGLDINPYRSTETVTLPNLRLVRQ

SEQ ID NO: 48779 - protein, 276 aa, Pseudomonas amygdali
  misc_feature (1)..(276): tr|A0A0N1JJ76|A0A0N1JJ76_PSEAV NADPH-dependent 7-cyano- 7-deazaguanine reductase OS=Pseudomonas amygdali pv. la chrymans OX=53707 GN=queF PE=3 SV=1
MHPAAEHSPLGKSSEYIATYTPSLLFPIPRAAKWAELGLTAQTLPYQGVDFWNCYELSWLLPSGKPVVAIAEFSIPADSPNIIESKSFKLYLNSLNQTAFATVEQVQTTLEQDLSTAAGKPVGVRIRSLSDIEGEGVATMPGVCIDDLDITVSSYDRPQPELLRCDESQIIEESVHSHLLKSNCPVTSQPDWGSVVVEYRGAALDHSSLLAYIVSFRQHSDFHEQCVERIFLDLQRLLKPEKLTVYARYVRRGGLDINPYRSTETLDVNNRRLARQ

SEQ ID NO: 48780 - protein, 276 aa, Pseudomonas amygdali
  misc_feature (1)..(276): tr|A0A2S4I9V4|A0A2S4I9V4_PSEA0 NADPH-dependent 7-cyano- 7-deazaguanine reductase OS=Pseudomonas amygdali pv. mo rsprunorum OX=129138 GN=queF PE=3 SV=1
MHPAAEHSPLGKSSEYIATYTPSLLFPIPRAAKWAELGLTAQTLPYKGVDFWNCYELSWLLPSGKPVVAIAEFSIPADSPNIIESKSFKLYLNSLNQTAFDDAVQVQATLEKDLSAAAGKPVGVRIRSLAEIEGEGVAALPGVCIDELDITVSSYDRPQPELLRCNDSRVIEESVHSHLLKSNCPVTSQPDWGSVVIEYCGAALDHASLLAYIVSFRQHSDFHEQCVERIFLDLQRLLKPEKLTVYARYVRRGGLDINPYRSTEVLNVDNRRLARQ

SEQ ID NO: 48781 - protein, 276 aa, Pseudomonas anguilliseptica
  misc_feature (1)..(276): tr|A0A1H5EXU1|A0A1H5EXU1_PSEAG NADPH-dependent 7-cyano- 7-deazaguanine reductase OS=Pseudomonas anguilliseptica OX=53406 GN=queF PE=3 SV=1
MHPAAEDSPLGKSSEYIASYTPSLLFPIPRAAKWAELGLSAETLPYQGVDFWNCFELSWLLPSGKPVVAMGEFAIPADSPNIIESKSFKLYLNSLNQSVFNSADELVAVLVQDLSAAAGKPVGVRVRSLAEVMAEGVQAAPGVCIDELDVAISNYEQPQPELLHCDAARVVEESLHSHLLKSNCPVTGQPDWGTLVVQYRGLALDHASLLAYLVSFRQHADFHEQCVERIFLDLQRLLKPEHLTVYARYVRRGGLDINPYRSSGPISPDNQRLARQ

SEQ ID NO: 48782 - protein, 276 aa, Pseudomonas antarctica
  misc_feature (1)..(276): tr|A0A1H0CWH5|A0A1H0CWH5_9PSED NADPH-dependent 7-cyano- 7-deazaguanine reductase OS=Pseudomonas antarctica OX=2 19572 GN=queF PE=3 SV=1
MHPAAEHSPLGKSSEYISTYTPSLLFPIPRAAKWAELGLSAETLPYKGVDFWNCFELSWLLPSGKPVVAIGEFSIPADSPNIIESKSFKLYLNSLNQTAFADTASLEATLRTDLSAAAGKPVNVRIRRLAEVEAEGVQALPGVCIDALDISVSNYEHPRPELLRCDDSRIVEESVHSHLLKSNCPVTSQPDWGSVAVEYRGSALDHASLLEYLVSFRQHSDFHEQCVERIFLDLQRLLKPEKLTVYARYVRRGGLDINPYRSTEDVQFQNLRLARQ

SEQ ID NO: 48783 - protein, 276 aa, Pseudomonas antarctica
  misc_feature (1)..(276): tr|A0A172YYU0|A0A172YYU0_9PSED NADPH-dependent 7-cyano- 7-deazaguanine reductase OS=Pseudomonas antarctica OX=2 19572 GN=queF PE=3 SV=1
MHPAAEHSPLGKSSEYISTYTPSLLFPIPRAAKWAELGLSAETLPYKGVDFWNCFELSWLLPSGKPVVAIGEFSIPADSPNIIESKSFKLYLNSLNQTAFADTASLEATLRTDLSAAAGKPVSVRIRRLAEVEAEGVQALPGVCIDDLDISVSNYEHPRPELLRCDDSRIVEESVHSHLLKSNCPVTSQPDWGSVAVQYRGSALDHASLLEYIVSFRQHSDFHEQCVERIFLDLQRLLKPEKLTVYARYVRRGGLDINPYRSTEDMPFQNVRLARQ

SEQ ID NO: 48784 - protein, 275 aa, Pseudomonas argentinensis
  misc_feature (1)..(275): tr|A0A1I3N4M3|A0A1I3N4M3_9PSED NADPH-dependent 7-cyano- 7-deazaguanine reductase OS=Pseudomonas argentinensis O X=289370 GN=queF PE=3 SV=1
MQSVEHSPLGKSSEYIATYSPELLFPIPRATKWAELGLSAETLPYRGMDYWNCFELSWLLPSGKPVVAIGEFAIPADSPNIIESKSFKLYLNSLNQSVFASEAELLSVLEKDLSATAGKPVGVRVRRLDEVAREGLAVLPGTCIDDLDVSISNYSAPQPDLLVCDAARVVEQSLHSHLLKSNCPVTGQPDWGSVLVEYRGPALEPASLLAYLVSFRQHADFHEQCVERIFLDLQKHLQPEYLTVYARYVRRGGLDINPYRTTLAEVPRNRRLVRQ

SEQ ID NO: 48785 - protein, 276 aa, Pseudomonas arsenicoxydans
  misc_feature (1)..(276): tr|A0A4P6G1A5|A0A4P6G1A5_9PSED NADPH-dependent 7-cyano- 7-deazaguanine reductase OS=Pseudomonas arsenicoxydans OX=702115 GN=queF PE=3 SV=1
MHPAAEHSPLGKSSEYIATYTPSLLFPIPRTSKWAELGLTAETLPYKGVDFWNCFELSWLLPSGKPVVAIGEFSIPADSANIIESKSFKLYLNSLNQTPFADTATLEATLVKDLSAAAGKPVGVRIRSLKEVEAEGVVALPGVCIDDLEISVSNYEHPRPELLRCDQSRIVEESVHSHLLKSNCPVTSQPDWGSVAVEYRGAALDHASLLEYIVSFRQHSDFHEQCVERIFLDLQRLLKPEKLTVYARYVRRGGLDINPYRSTEEVQLPNHRLVRQ

SEQ ID NO: 48786 - protein, 276 aa, Pseudomonas arsenicoxydans
  misc_feature (1)..(276): tr|A0A1H0K761|A0A1H0K761_9PSED NADPH-dependent 7-cyano- 7-deazaguanine reductase OS=Pseudomonas arsenicoxydans OX=702115 GN=queF PE=3 SV=1
MHPAAEHSPLGKSSEYIATYTPSLLFPIPRTAKWAELGLTAETLPYKGVDFWNCFELSWLLPSGKPVVAIGEFSIPADSPNIIESKSFKLYLNSLNQTPFADTATLETTLVKDLSAAAGKPVGVRIRSLKEVEAEGVVALPGVCIDDLEISVSNYEHPRPELLRCDQSRIVEESVHSHLLKSNCPVTSQPDWGSVAVEYRGAALDHASLLEYIVSFRQHSDFHEQCVERIFLDLQRLLKPEKLTVYARYVRRGGLDINPYRSTEDVQLPNHRLVRQ

SEQ ID NO: 48787 - protein, 276 aa, Pseudomonas asplenii
  misc_feature (1)..(276): tr|A0A438KVD5|A0A438KVD5_9PSED NADPH-dependent 7-cyano- 7-deazaguanine reductase OS=Pseudomonas asplenii OX=534 07 GN=queF PE=3 SV=1
MHPAAEHSPLGKSSEYIATYTPSLLFPIPRAAKWAELGLSAETLPYVGVDFWNCFELSWLLPSGKPVVAIGEFSIPADSPNIIESKSFKLYLNSLNQTPFVDTASLEAVLRADLSAAAGKPVGVRVRRLGDVQAEGVVALPGVCIDDLEISVSDYAHPRPELLRCDASRVVEEAVHSHLLKSNCPVTSQPDWGSVVVEYRGAALDHASLLAYLVSFRQHSDFHEQCVERVFLDLQRLLKPEKLTVYARYVRRGGLDINPYRSTEKVEFQNLRLVRQ

SEQ ID NO: 48788 - protein, 276 aa, Pseudomonas asplenii
  misc_feature (1)..(276): tr|A0A1H1WK97|A0A1H1WK97_9PSED NADPH-dependent 7-cyano- 7-deazaguanine reductase OS=Pseudomonas asplenii OX=534 07 GN=queF PE=3 SV=1
MHPAAEHSPLGKSSEYIATYTPSLLFPIPRAAKWAELGLSADTLPYQGVDFWNCFELSWLLPSGKPVVAIGEFSIPADSPNIIESKSFKLYLNSLNQTPFADIPSLEAVLRADLSAAAGKPVGVRIRPLSEVQAEGVVALPGVCIDELDISVSDYAHPRPELLRCDSSRVVEESVHSHLLKSNCPVTSQPDWGSVVVEYRGAALDHASLLAYLVSFRQHSDFHEQCVERIFLDLQRLLKPEKLTVYARYVRRGGLDINPYRSTESVAFQNQRLVRQ

SEQ ID NO: 48789 - protein, 276 aa, Pseudomonas asturiensis
  misc_feature (1)..(276): tr|A0A1M7Q5D5|A0A1M7Q5D5_9PSED NADPH-dependent 7-cyano- 7-deazaguanine reductase OS=Pseudomonas asturiensis OX= 1190415 GN=queF PE=3 SV=1
MHPAAEHSPLGKSSEYIATYTPSLLFPIPRTAKWAELGLTAETLPYQGVDFWNCYELSWLLPSGKPVVAIAEFSIPADSPNIIESKSFKLYLNSLNQTAFDTREQVQVTLEKDLSAAAGKPVGVRIRSLDEVEREGVAALPGVCIDDLDISVSSYDRPQPELLCCDPSRVVEESVYSHLLKSNCPVTSQPDWGSVVVEYRGAALDPASLLAYIVSFRQHSDFHEQCVERIFLDLQRLLKPEKLTVYARYVRRGGLDINPYRSTVALVVENGRLARQ

SEQ ID NO: 48790 - protein, 276 aa, Pseudomonas avellanae
  misc_feature (1)..(276): tr|A0A261WJF0|A0A261WJF0_9PSED NADPH-dependent 7-cyano- 7-deazaguanine reductase OS=Pseudomonas avellanae OX=46 257 GN=queF PE=3 SV=1
MHPAAEHSPLGKSSEYIATYTPSLLFPIPRAAKWAELGLTAQTLPYKGVDFWNCYELSWLLPSGKPVVAIAEFSIPADSPNIIESKSFKLYLNSLNQTAFDDAVQVQATLEKDLSAAAGKPVGVRIRSLAEIEGEGVAALPGVCIDELDITVSSYDRPQPELLRCNDSRVIEESVHSHLLKSNCPVTSQPDWGSVVFEYRGAALDHASLLAYIVSFRQHSDFHEQCVERIFLDLQRLLKPEKLTVYARYVRRGGLDINPYRSTEVLNVDNRRLARQ

SEQ ID NO: 48791 - protein, 276 aa, Pseudomonas avellanae; identical to SEQ ID NO: 48780
  misc_feature (1)..(276): tr|A0A2S3T5S0|A0A2S3T5S0_9PSED NADPH-dependent 7-cyano- 7-deazaguanine reductase OS=Pseudomonas avellanae OX=46 257 GN=queF PE=3 SV=1

SEQ ID NO: 48792 - protein, 276 aa, Pseudomonas azotoformans
  misc_feature (1)..(276): tr|A0A1U9PUM6|A0A1U9PUM6_PSEAZ NADPH-dependent 7-cyano- 7-deazaguanine reductase OS=Pseudomonas azotoformans OX =47878 GN=queF PE=3 SV=1
MHPAAEHSPLGKSSEYISTYTPSLLFPIPRAAKWAELGLSAETLPYKGVDFWNCFELSWLLPSGKPVVAIGEFSIPADSPNIIESKSFKLYLNSLNQTAFADTASLEATLRTDLSAAAGAPVSVRIRSLAEIEAEGVMALPGVCIDDLDISVSNYEHPRPELLRCDASRVVEESVHSHLLKSNCPVTSQPDWGSVVVEYRGSALDHASLLEYIVSFRQHSDFHEQCVERIFLDLQRLLKPEKLTVYARYVRRGGLDINPYRSTEDVAFQNVRLARQ

SEQ ID NO: 48793 - protein, 276 aa, Pseudomonas azotoformans
  misc_feature (1)..(276): tr|A0A1V2JCQ7|A0A1V2JCQ7_PSEAZ NADPH-dependent 7-cyano- 7-deazaguanine reductase OS=Pseudomonas azotoformans OX =47878 GN=queF PE=3 SV=1
MHPAAEHSPLGKSSEYISTYTPSLLFPIPRAAKWAELGLSAETLPYKGVDFWNCFELSWLLPSGKPVVAIGEFSIPAESPNIIESKSFKLYLNSLNQTAFADTASLEATLRTDLSAAAGKPVSVRIRSLAEIEAEGVMALPGVCIDDLDIRVSNYEHPRPELLRCDDSRIVEESVHSHLLKSNCPVTSQPDWGSVVVEYRGHALEHASLLEYIVSFRQHSDFHEQCVERIFLDLQRLLKPEKLTVYARYVRRGGLDINPYRSTEDVAFQNVRLARQ

SEQ ID NO: 48794 - protein, 276 aa, Pseudomonas baetica
  misc_feature (1)..(276): tr|A0A2N0DWY4|A0A2N0DWY4_9PSED NADPH-dependent 7-cyano- 7-deazaguanine reductase OS=Pseudomonas baetica OX=6740 54 GN=queF PE=3 SV=1
MHPAAEHSPLGKSSEYIATYTPSLLFPIPRTAKWAELGLTADTLPYKGVDFWNCFELSWLLPSGKPVVAIGEFSIPADSPNIIESKSFKLYLNSLNQTAFADISTLEATLVKDLSAAAGKPVGVRVRSLKDVEAEGVVALPGVCIDDLDISVSNYEHPRPELLRCDDSRVVEESVHSHLLKSNCPVTSQPDWGSVVVEYRGAALDHASLLEYIVSFRQHSDFHEQCVERIFLDLQRLLKPEKLTVFARYVRRGGLDINPYRSTESVVLPNHRLVRQ

SEQ ID NO: 48795 - protein, 276 aa, Pseudomonas balearica
  misc_feature (1)..(276): tr|A0A1G9TE76|A0A1G9TE76_9PSED NADPH-dependent 7-cyano- 7-deazaguanine reductase OS=Pseudomonas balearica DSM 6 083 OX=1123016 GN=queF PE=3 SV=1
MQHPAELSPLGKSSAYIAHYSPELLFPIARAPKWAELGLTAESLPYSGVDIWNCYELSWLLPSGKPVVAIGEFRIPADSPNIIESKSFKLYLNSLNQSVFDSADAVAETLTRDLSAAVGKSVEVALRSLDEVTAEGVAGLPGRCIDELNVAIEHYDEPRPALLSCDASRQVDEALHSHLLKSNCPVTGQPDWGSVVVEYRGPALSAEGLLAYLVSFRQHADFHEQCVERIFLDLQRLLQPERLTVYARYVRRGGLDINPYRSTGPLAIDNRRLVRQ

SEQ ID NO: 48796 - protein, 276 aa, Pseudomonas batumici
  misc_feature (1)..(276): tr|A0A0C2I993|A0A0C2I993_9PSED NADPH-dependent 7-cyano- 7-deazaguanine reductase OS=Pseudomonas batumici OX=226 910 GN=queF PE=3 SV=1
MHPAAEHSPLGKSSEYIATYTPSLLFPIPRATKWAELGLSAETLPYVGVDFWNCFELSWLLPSGKPVVAIGEFSIPADSPNIIESKSFKLYLNSLNQTPFVDTASLEAVLRADLSAAAGKPVGVRVRRLSEVQAEGVVALPGVCIDDLEINVSDYAHPRPELLRCDESRVVEESVHSHLLKSNCPVTSQPDWGSVVVEYRGAALDHVSLLAYLVSFRQHSDFHEQCVERIFLDLQRLLKPEKLTVYARYVRRGGLDINPYRSTEKVEFQNLRLVRQ

SEQ ID NO: 48797 - protein, 277 aa, Pseudomonas bauzanensis
  misc_feature (1)..(277): tr|A0A4V5NK35|A0A4V5NK35_9PSED NADPH-dependent 7-cyano- 7-deazaguanine reductase QueF OS=Pseudomonas bauzanensi s OX=653930 GN=queF PE=4 SV=1
MHPAEQSPLGKSSGYNGIYTPSLLYPISRQPIWQDLGVDPQQLPFHGVDVWNSYEVSWLTPSGKPEVAAVEFTFPVTANARIVESKSFKLYLNSFNQTVFSDRADVLRTLESDLSVTAQAPVMVRVLNVGQLQQEGIGRLPGECLDDLDVTIDTYEYTPELLQCVSGGGWARETLYSHLLKSNCPVTGQPDWGSVMINYAGPALDKAGLLRYLISFRQHGDFHEQCVERIFLDVQRVLGDDCELTVYARYLRRGGLDINPWRSTRAGMPDNMRLARQ

SEQ ID NO: 48798 - protein, 277 aa, Pseudomonas bauzanensis
  misc_feature (1)..(277): tr|A0A1H9UWT7|A0A1H9UWT7_9PSED NADPH-dependent 7-cyano- 7-deazaguanine reductase OS=Pseudomonas bauzanensis OX= 653930 GN=queF PE=3 SV=1
MHPAEQSPLGKSSGYNGIYTPSLLYPISRQPIWQDLGVDPQQLPFHGVDVWNSYEVSWLTPSGKPEVAAVEFTFPVTANARIVESKSFKLYLNSFNQTVFSDRADVLRTLESDLSVTAQAPVMVRVLNVGQLQQEGIGRLPGECLDDLDVTIDTYEYMPELLQCVSGGGWARETLYSHLLKSNCPVTGQPDWGSVMINYAGPALDKAGLLRYLISFRQHGDFHEQCVERIFLDVQRVLGDDCELTVYARYLRRGGLDINPWRSTRAGMPDNMRLARQ

SEQ ID NO: 48799 - protein, 276 aa, Pseudomonas benzenivorans
  misc_feature (1)..(276): tr|A0A1G8DJC4|A0A1G8DJC4_9PSED NADPH-dependent 7-cyano- 7-deazaguanine reductase OS=Pseudomonas benzenivorans O X=556533 GN=queF PE=3 SV=1
MHPAAEDSPLGKSSEYIAIYTPSLLFPIPRAPKWAELGLTAETLPYQGVDFWNCFELSWLLPSGKPVVAIGEFAIPADSPNIIESKSFKLYLNSLNQTVFADGAELLAVLQRDLSAAAGKPVGVRLRSLAEVAAEGVAMLPGVCIDELDVAIHSYARPQPELLRCEPGRIVEESLHSHLLKSNCPVTGQPDWGSVVVQYRGAALDHAGLLAYLVSFRQHADFHEQCVERIFLDLLRLLEPEHLTVYARYVRRGGLDINPYRSTSAIRPDNRRLVRQ

SEQ ID NO: 48800 - protein, 276 aa, Pseudomonas borbori
  misc_feature (1)..(276): tr|A0A1I5WLA0|A0A1I5WLA0_9PSED NADPH-dependent 7-cyano- 7-deazaguanine reductase OS=Pseudomonas borbori OX=2890 03 GN=queF PE=3 SV=1
MHSAAEDSPLGKSSEYIATYTPSLLFPIARAAKWAELGLTAETLPYRGVDFWNCFELSWLLPSGKPVVAIGEFAIPADSPNIIESKSFKLYLNSLNQTAFADVAELQEVLRRDLSAATGKPVGVRVRSLAEVTAEGVATLPGQCIDDLDVVIGNYARPQPELLRCEPQRLVEESLHSHLLKSNCPVTGQPDWGSVVVRYRGAALDHASLLAYLVSFRQHADFHEQCVERIFLDLQHLLQPEYLTVYARYVRRGGLDINPYRSTAPIAPDNRRLVRQ

SEQ ID NO: 48801 - protein, 276 aa, Pseudomonas brassicacearum
  misc_feature (1)..(276): tr|A0A423H5H4|A0A423H5H4_9PSED NADPH-dependent 7-cyano- 7-deazaguanine reductase OS=Pseudomonas brassicacearum OX=930166 GN=queF PE=3 SV=1
MHPAAEHSPLGKSSEYIATYTPSLLFPIPRTAKWAELGLTAETLPYKGVDFWNCFELSWLLPSGKPVVAIGEFSIPADSPNIIESKSFKLYLNSLNQTPFADTQSLEATLVTDLSAAAGKPVGVRIRSLNEVQAEGVVALPGVCIDDLDISVSNYEHPRPELLRCDDSRIVEESVHSHLLKSNCPVTSQPDWGSVAVEYRGAALDHASLLAYLVSFRQHSDFHEQCVERIFLDLQRLLKPEKLTVYARYVRRGGLDINPYRSTEAVQLPNHRLVRQ

SEQ ID NO: 48802 - protein, 276 aa, Pseudomonas brassicacearum
  misc_feature (1)..(276): tr|A0A423FWJ6|A0A423FWJ6_9PSED NADPH-dependent 7-cyano- 7-deazaguanine reductase OS=Pseudomonas brassicacearum OX=930166 GN=queF PE=3 SV=1
MHPAAEHSPLGKSSEYIATYTPSLLFPIPRTAKWAELGLTAETLPYKGVDFWNCFELSWLLPSGKPVVAIGEFAIPADSPNIIESKSFKLYLNSLNQTPFDTTQSLEATLRQDLSAAAGKPVGVRIRSLKDVEDEGVVALPGVCIDDLDIRVDSYEHPRPELLRCDDSRMVEESLHSHLLKSNCPVTSQPDWGSVAVEYRGAALDHASLLAYLVSFRQHSDFHEQCVERIFLDLQRLLKPQKLTVYARYVRRGGLDINPYRSTEAVQLPNQRLVRQ

SEQ ID NO: 48803 - protein, 276 aa, Pseudomonas brenneri
  misc_feature (1)..(276): tr|A0A4R6YMT6|A0A4R6YMT6_9PSED NADPH-dependent 7-cyano- 7-deazaguanine reductase OS=Pseudomonas brenneri OX=129 817 GN=queF PE=3 SV=1
MHPAAEHSPLGKSSEYISTYTPSLLFPIPRAAKWAELGLTAETLPYNGVDFWNCFELSWLLPSGKPVVAIGEFSIPADSPNIIESKSFKLYLNSLNQTPFAQVSNLEATLRADLSAAAGKPVGVRIRSLAEVEDEGLVRLPGVCIDDLDISVSNYEHPRPELLRCDDSRVVEESVHSHLLKSNCPVTSQPDWGSVAVEYRGAALDHASLLEYLVSFRQHSDFHEQCVERIFLDLQRLLKPEKLTVYARYVRRGGLDINPYRSTEDVPFQNLRLARQ

SEQ ID NO: 48804 - protein, 276 aa, Pseudomonas brenneri
  misc_feature (1)..(276): tr|A0A5B2UVK0|A0A5B2UVK0_9PSED NADPH-dependent 7-cyano- 7-deazaguanine reductase OS=Pseudomonas brenneri OX=129 817 GN=queF PE=3 SV=1
MHPAAEHSPLGKSSEYISTYTPSLLFPIPRAAKWAELGLSAETLPYKGVDFWNCFELSWLLPSGKPVVAIGEFSIPADSPNIIESKSFKLYLNSLNQTPFADMPSLEATLRTDLSAAAGKPVGVRIRSLAEVEGEGVGSLPGVCIDELDISVSNYEHPRPELLRCDDSRVVEESVHSHLLKSNCPVTSQPDWGSVAVEYRGAALDHASLLAYLVSFRQHSDFHEQCVERIFLDLQRLLKPEKLTVYARYVRRGGLDINPYRSTEDVSFQNLRLARQ

SEQ ID NO: 48805 - protein, 276 aa, Pseudomonas canadensis
  misc_feature (1)..(276): tr|A0A423F5Y3|A0A423F5Y3_9PSED NADPH-dependent 7-cyano- 7-deazaguanine reductase OS=Pseudomonas canadensis OX=9 15099 GN=queF PE=3 SV=1
MHPAAEHSPLGKSSEYISTYTPSLLFPIPRAAKWAELGLSAETLPYKGVDFWNCFELSWLLPSGKPVVAIGEFSIPADSPNIIESKSFKLYLNSLNQTAFADAASLEATLRADLSAAAGAPVSVRIRSLAEIEAEGVMALPGVCIDDLDISVSNYEHPRPELLRCDNSRVVEESVHSHLLKSNCPVTSQPDWGSVVVQYRGHALDHASLLEYIVSFRQHSDFHEQCVERIFLDLQRLLKPETLTVYARYVRRGGLDINPYRSTEDMAFQNVRLARQ

SEQ ID NO: 48806 - protein, 304 aa, Pseudomonas cannabina
  misc_feature (1)..(304): tr|A0A0P9L2N3|A0A0P9L2N3_PSECA NADPH-dependent 7-cyano- 7-deazaguanine reductase OS=Pseudomonas cannabina OX=86 840 GN=queF PE=3 SV=1
MRAEVDFSLKARSKPYRLAALILDPGIAMHPAAEHSPLGKSSEYIATYTPSLLFPIPRAAKWAELGLTAQTLPYKGVDFWNCYELSWLLPSGKPVVAIAEFSIPADSPNIIESKSFKLYLNSLNQTAFDGVALVQATLEKDLSAAAGKPVGVRIRSLADIEGEGVAALPGVCIDDLEITVSSYDRPQPELLRCDGSRVVEESVHTHLLKSNCPVTSQPDWGSVVVDYRGAALDHASLLAYIVSFRQHSDFHEQCVERIFLDLQRLLKPEKLTVYARYVRRGGLDINPYRSTEVLSVDNRRLARQ

SEQ ID NO: 48807 - protein, 304 aa, Pseudomonas cannabina
  misc_feature (1)..(304): tr|A0A3M3PV26|A0A3M3PV26_PSECA NADPH-dependent 7-cyano- 7-deazaguanine reductase OS=Pseudomonas cannabina OX=86 840 GN=queF PE=3 SV=1
MRAEADFSLKARGKPYRLAALILDPGIAMHPAAEHSPLGKSSEYIATYTPSLLFPIPRAAKWAELGLTAQTLPYKGVDFWNCYELSWLLPSGKPMVAIAEFSIPADSPNIIESKSFKLYLNSLNQTAFDGVALVQATLEKDLSAAAGKPVGVRIRSLADIEGEGVAALPGVCIDDLDITVSSYDRPQPELLRCDGSRVVEESVHTHLLKSNCPVTSQPDWGSVVVDYRGAALDHASLLAYIVSFRQHSDFHEQCVERIFLDLQRLLKPEKLTVYARYVRRGGLDINPYRSTEVLSVDNRRLARQ

SEQ ID NO: 48808 - protein, 276 aa, Pseudomonas capeferrum
  misc_feature (1)..(276): tr|A0A084C9X1|A0A084C9X1_9PSED NADPH-dependent 7-cyano- 7-deazaguanine reductase OS=Pseudomonas capeferrum OX=1 495066 GN=queF PE=3 SV=1
MHPAAEHSPLGKSSEYIATYSPELLFPIPRTAKWAELGVTAQTLPWQGVDYWNCFELSWLLPSGKPVVAIGEFAIPADSPNIIESKSFKLYLNSLNQTVFAAIGELQACLEKDLSAAAGKPVSVKVRTLAEVEAQGVVALPGQCIDALDVAISNYEQPQPELLRCNPERVVEETVHSHLLKSNCPVTGQPDWGSVVVEYKGRALDHASLLTYLISFRQHADFHEQCVERIYLDLKNLLQPEHLTVYARYVRRGGLDINPYRSTGAISPNNVRLVRQ

SEQ ID NO: 48809 - protein, 276 aa, Pseudomonas caricapapayae
  misc_feature (1)..(276): tr|A0A3M6F1C0|A0A3M6F1C0_9PSED NADPH-dependent 7-cyano- 7-deazaguanine reductase OS=Pseudomonas caricapapayae O X=46678 GN=queF PE=3 SV=1
MHPAAEHSPLGKSSEYIATYTPSLLFPIPRAAKWAELGLTAQTLPYQGVDFWNCYELSWLLPSGKPVVAIGEFSIPAESPNIIESKSFKLYLNSLNQTAFASVEQLKTTLEQDLSAAAGKPVGVRIRSLAAIEEEGVAALPGMCIDDLDISVSSYDRPQPELLRCDESRVVEESVHSHLLKSNCPVTSQPDWGSVVVEYRGAALDHSSLLAYIVSFRQHSDFHEQCVERIFLDLQRLLKPEKLTVYARYVRRGGLDINPYRSTETLAVNNRRLARQ

SEQ ID NO: 48810 - protein, 276 aa, Pseudomonas caricapapayae
  misc_feature (1)..(276): tr|A0A0N8QS00|A0A0N8QS00_9PSED NADPH-dependent 7-cyano- 7-deazaguanine reductase OS=Pseudomonas caricapapayae O X=46678 GN=queF PE=3 SV=1
MHPAAEHSPLGKSSEYIATYTPSLLFPIPRAAKWAELGLTAQTLPYQGVDFWNCYELSWLLPSGKPVVAIGEFSIPAESPNIIESKSFKLYLNSLNQTAFASVEQLKTTLEQDLSAAAGKPVGVRIRSLAAIEEEGVAALPGMCIDDLDISVSSYDRPQPELLRCDESRVVEESVHSHLLKSNCPVTSQPDWGSVVVEYRGAALDHSSLLAYIVSFRQHSDFHEQCVERIFLDLQRLLKPEKLTVYARYVRRGGLDINPYRSTETLAVDNRRLARQ

SEQ ID NO: 48811 - protein, 276 aa, Pseudomonas caspiana
  misc_feature (1)..(276): tr|A0A502JFD8|A0A502JFD8_9PSED NADPH-dependent 7-cyano- 7-deazaguanine reductase OS=Pseudomonas caspiana OX=145 1454 GN=queF PE=3 SV=1
MHPAAEHSPLGKSSEYIATYTPSLLFPIPRTAKWAELGLTAETLPYKGVDFWNCFELSWLLPSGKPVVAIGEFTIPADSPNIIESKSFKLYLNSLNQTPFADTAILEATLAKDLSAAAGKPVGVRVRNLKDVEAEGVVALPGVCIDDLDISVSNYEHPRPELLRCDQSRIVEESVHSHLLKSNCPVTSQPDWGSVAVEYRGAALDHASLLEYIVSFRQHSDFHEQCVERIFLDLQRLLKPEKLTVYARYVRRGGLDINPYRSTEDVQLPNHRLVRQ

SEQ ID NO: 48812 - protein, 276 aa, Pseudomonas caspiana
  misc_feature (1)..(276): tr|A0A1Y3P4S4|A0A1Y3P4S4_9PSED NADPH-dependent 7-cyano- 7-deazaguanine reductase OS=Pseudomonas caspiana OX=145 1454 GN=queF PE=3 SV=1
MHPAAEHSPLGKSSEYIATYTPSLLFPIPRAAKWAELGLTAETLPYQGVDFWNCYELSWLLPSGKPVVAIAEFSVAADSPNIIESKSFKLYLNSLNQTVFADRAELTATLVKDLSAAAGKPVGVRIRTLADIEGEGVASMPGLCIDDLDVSIDSYDRPQPELLRCDDSRIVEQSLHSHLLKSNCPVTSQPDWGSVAVEYRGAELDAASLLAYIVSFRQHSDFHEQCVERIFLDLQRLLKPEKLTVYARYVRRGGLDINPYRSTESLSPDNRRLARQ

SEQ ID NO: 48813 - protein, 276 aa, Pseudomonas cedrina
  misc_feature (1)..(276): tr|A0A2S9D6K3|A0A2S9D6K3_PSECE NADPH-dependent 7-cyano- 7-deazaguanine reductase OS=Pseudomonas cedrina OX=6517 40 GN=queF PE=3 SV=1
MHPAAEHSPLGKSSEYISTYTPSLLFPIPRAAKWAELGLSAETLPYKGVDFWNCFELSWLLPSGKPVVAIGEFSIPADSPNIIESKSFKLYLNSLNQSAFADTQSLEATLRTDLSSAAGKPVSVRIRSLADIEAEGVMALPGVCIDGLDINVSSYEHPRPELLRCDDSRVVEESVHSHLLKSNCPVTSQPDWGSVVVEYRGAALDHASLLEYIVSFRQHSDFHEQCVERIFLDLQRLLKPEKLTVYARYVRRGGLDINPYRSTENTQFLNVRLARQ

SEQ ID NO: 48814 - protein, 276 aa, Pseudomonas cedrina
  misc_feature (1)..(276): tr|A0A1V2KGX8|A0A1V2KGX8_PSECE NADPH-dependent 7-cyano- 7-deazaguanine reductase OS=Pseudomonas cedrina subsp. cedrina OX=76762 GN=queF PE=3 SV=1
MHPAAEHSPLGKSSEYISTYTPSLLFPIPRAAKWAELGLSAETLPYKGVDFWNCFELSWLLPSGKPVVAIGEFCIPADSPNIIESKSFKLYLNSLNQTAFAATASLEATLRTDLSAAAGKPVSVRIRSLAEIEAEGVLALPGVCIDDLDISVSNYEHPRPELLRCDDSRIVEESVHSHLLKSNCPVTSQPDWGSVVVEYRGSALDHASLLEYIVSFRQHSDFHEQCVERIFLDLQRLLKPEKLTVYARYVRRGGLDINPYRSTEEVAFQNVRLARQ

SEQ ID NO: 48815 - protein, 276 aa, Pseudomonas cerasi
  misc_feature (1)..(276): tr|A0A193SRH8|A0A193SRH8_9PSED NADPH-dependent 7-cyano- 7-deazaguanine reductase OS=Pseudomonas cerasi OX=15833 41 GN=queF PE=3 SV=1
MHPAAEHSPLGKSSEYIATYTPSLLFPIPRAAKWAELGLTAQTLPYQGVDFWNCYELSWLLPSGKPVVAIGEFSIPAESPNIIESKSFKLYLNSLNQTAFASVEQLQTTLEQDLSAAAGKPVGVRIRSLAAIEEEGVAALPGVCIDDLDISVSSYDRPQPELLHCDDSRVVEESVHSHLLKSNCPVTSQPDWGSVVVEYRGAALDHASLLAYIVSFRQHSDFHEQCVERIFLDLQRLLKPEKLTVYARYVRRGGLDINPYRSTETLDVSNRRLARQ

SEQ ID NO: 48816 - protein, 276 aa, Pseudomonas chengduensis
  misc_feature (1)..(276): tr|A0A1G6V2E2|A0A1G6V2E2_9PSED NADPH-dependent 7-cyano- 7-deazaguanine reductase OS=Pseudomonas chengduensis OX =489632 GN=queF PE=3 SV=1
MQHPAEHSPLGKSSQYIAEYSPELLFPISRTTKWAELGLDGASLPYQGVDYWNCYELSWLLPSGKPVVAIGEFAIPADSPNIIESKSFKLYLNSLNQSAFAGWDELQATLVRDLSAVAGKPVAVRLRSLAEVSEEGVATLPGQCIDELDISVSQYDHPQPELLRCDAGRVLEESLHSHLLKSNCPVTGQPDWGSLVVEYRGAALDHASLLAYLVSFRQHADFHEQCVERIFLDLQRLLQPQSLTVYARYVRRGGLDINPYRSTEALKPENGRLARQ

SEQ ID NO: 48817 - protein, 276 aa, Pseudomonas chloritidismutans
  misc_feature (1)..(276): tr|V4QAL9|V4QAL9_PSECO NADPH-dependent 7-cyano-7-deazag uanine reductase OS=Pseudomonas chloritidismutans AW-1 OX=1263865 GN=queF PE=3 SV=1
MQHPAEHSPLGKSSDYVATYSPHLLFPIPRAPKWAELGLTAETLPYQGVDLWNCYELSWLLPSGKPVVAIGEFEIPADSPSIIESKSFKLYLNSLNQSVFESREALAEVMSSDLSAAAGKPVKVRLRTLDEVAAEGVATLPGRCVDDLDVTIEHYDHPQPGLLACDAGHMVEESLHSHLLKSNCPVTGQPDWGSVVVEYRGAALQAESLLAYLVSFRQHADFHEQCVERIFLDLQRLLQPEKLTVYARYVRRGGLDINPYRSTEAMVVDNRRLVRQ

SEQ ID NO: 48818 - protein, 276 aa, Pseudomonas chlororaphis
  misc_feature (1)..(276): tr|A0A3G7JDU4|A0A3G7JDU4_9PSED NADPH-dependent 7-cyano- 7-deazaguanine reductase OS=Pseudomonas chlororaphis su bsp. aurantiaca OX=86192 GN=queF PE=3 SV=1
MHPAAEHSPLGKSSEYVSTYTPSLLFPIPRAAKWAELGLSADTLPYKGVDFWNCFELSWLLPSGKPVVAIAEFSIPADSPNIIESKSFKLYLNSLNQTPFADRQSLEETLRADLSAAAGKPVGVRIRSLGEVEAEGVVALPGTCIDELDISVSSYEHPRPELLQCDRSRTVKESVHSHLLKSNCPVTSQPDWGSVVVEYRGPALDHASLLAYLVSFRQHSDFHEQCVERIFLDLQRLLQPEKLTVYARYVRRGGLDINPYRSTETASFANFRLVRQ

SEQ ID NO: 48819 - protein, 276 aa, Pseudomonas chlororaphis
  misc_feature (1)..(276): tr|A0A3G7BGA4|A0A3G7BGA4_9PSED NADPH-dependent 7-cyano- 7-deazaguanine reductase OS=Pseudomonas chlororaphis su bsp. piscium OX=1513890 GN=queF PE=3 SV=1
MHPAAEHSPLGKSSEYVSTYTPSLLFPIPRAAKWAELGLSADTLPYKGVDFWNCFELSWLLPSGKPVVAIAEFSIPADSPNIIESKSFKLYLNSLNQTPFADRQSLEETLRADLSAAAGKPVGVRIRSLGEVEAEGVVALPGTCIDELDISVSSYEHPRPELLQCDRSWTVEESVHSHLLKSNCPVTSQPDWGSVVVEYRGPALDHASLLAYLVSFRQHSDFHEQCVERIFLDLQRLLQPEKLTVYARYVRRGGLDINPYRSTETANFANFRLVRQ

SEQ ID NO: 48820 - protein, 339 aa, Pseudomonas cichorii
  misc_feature (1)..(339): tr|A0A3M4M8T5|A0A3M4M8T5_PSECI NADPH-dependent 7-cyano- 7-deazaguanine reductase OS=Pseudomonas cichorii OX=367 46 GN=queF PE=3 SV=1
MSNFMELSYALQSGLYSSPASASVEADSLVIQGQLSLRPILSLKARCKPYKLAGLIHEIPGIAMHPAAEHSPLGKSSEYIATYTPSLLFPIPRAAKWAELGLTAQTLPYQGVDFWNCYELSWLLPSGKPVVAIAEFAIPADSPNIIESKSFKLYLNSLNQTSFESSDQLQATLEKDLSAAAGKPVGVRISSLAEIESEGVAGLPGQCIDELDVSIASYDHPQPELLRCDDSRIVEESLHSHLLKSNCPVTSQPDWGSVVVEYRGAALDPASLLAYIVSFRQHSDFHEQCVERIFLDLQRLLKPERLTVYARYVRRGGLDINPYRSTEALQVDNRRLARQ

SEQ ID NO: 48821 - protein, 317 aa, Pseudomonas cichorii
  misc_feature (1)..(317): tr|A0A3M3T8M8|A0A3M3T8M8_PSECI NADPH-dependent 7-cyano- 7-deazaguanine reductase OS=Pseudomonas cichorii OX=367 46 GN=queF PE=3 SV=1
MPCSNEFVAARASQYEQALKLKARCKPYKLAGLIHEIPGIAMHPAAEHSPLGKSSEYIATYTPSLLFPIPRAAKWAELGLTAQTLPYRGVDFWNCYELSWLLPSGKPVVAIAEFSIPADSPNIIESKSFKLYLNSLNQTSFESTEQLQATLEKDLSAAAGKPVGVRISRLADIESEGVASLPGTCIDDLDVSIDSYDHPQPELLHCDDSRVIEESLHSHLLKSNCPVTSQPDWGSVVVEYRGAALDHASLLAYIVSFRQHSDFHEQCVERIFLDLQRLLKPEKLTVYARYVRRGGLDINPYRSTEALQVDNRRLARQ

SEQ ID NO: 48822 - protein, 276 aa, Pseudomonas citronellolis
  misc_feature (1)..(276): tr|A0A1A9KEY0|A0A1A9KEY0_9PSED NADPH-dependent 7-cyano- 7-deazaguanine reductase OS=Pseudomonas citronellolis O X=53408 GN=queF PE=3 SV=1
MQHPAEHSPLGKSSEYVSTYAPELLFPIGRATKWAELGLDGANLPYRGVDIWNCYELSWLTPGGKPVVAIGEFAIPAQSPNIIESKSFKLYLNSLNQSPFDSREALRAVLERDLSAAAGAPVSVRLRSLDEVAEEGVAKLPGRCIDDLDIAVDSYDHPRPELLRCDDARRVDEVLYSHLLKSNCPVTGQPDWGTLVVDYAGPALDPASLLAYVVSFRQHQDFHEQCVERIFLDLQRLLQPSRLTVYARYVRRGGLDINPYRSSGEIAPDNRRLVRQ

SEQ ID NO: 48823 - protein, 276 aa, Pseudomonas citronellolis
  misc_feature (1)..(276): tr|A0A4Z0ISA2|A0A4Z0ISA2_9PSED NADPH-dependent 7-cyano- 7-deazaguanine reductase OS=Pseudomonas citronellolis O X=53408 GN=queF PE=3 SV=1
MQHPAEHSPLGKSSEYVSTYAPELLFPISRATKWAELGLDGANLPYRGVDIWNCYELSWLTPGGKPVVAIGEFAIPAQSPNIIESKSFKLYLNSLNQSPFDSREALRAVLERDLSAAAGAPVGVRLRSLDEVAEEGVAKLPGRCIDDLDIAVDSYDHPRPELLRCDDARRVDEVLYSHLLKSNCPVTGQPDWGTLVVDYAGPALDPASLLAYVVSFRQHQDFHEQCVERIYLDLQRLLQPSRLTVYARYVRRGGLDINPYRSSMDIAPDNRRLVRQ

SEQ ID NO: 48824 - protein, 276 aa, Pseudomonas coleopterorum
  misc_feature (1)..(276): tr|A0A1H5IK00|A0A1H5IK00_9PSED NADPH-dependent 7-cyano- 7-deazaguanine reductase OS=Pseudomonas coleopterorum O X=1605838 GN=queF PE=3 SV=1
MHPAAEHSPLGKSSEYVSTYTPSLLFPIPRAAKWAELGLSADTLPYTGVDVWNCFELSWLLPSGKPVVAIGEFSIPADSPNIIESKSFKLYLNSLNQTPFASVDALEKVLVQDLSGAAGKPVGVKVRRLEEVEAEGVVSLPGVCIDDLDITVSSYDHPQPELLRCDPARIVEESLHSHLLRSNCPVTSQPDWGSVCITYTGAALDPASVLAYLVSFRQHSDFHEQCVERIFTDLQRLLQPQKLTVFARYVRRGGLDINPYRSTEALDFTNGRLVRQ

SEQ ID NO: 48825 - protein, 276 aa, Pseudomonas composti
  misc_feature (1)..(276): tr|A0A1I5R4F4|A0A1I5R4F4_9PSED NADPH-dependent 7-cyano- 7-deazaguanine reductase OS=Pseudomonas composti OX=658 457 GN=queF PE=3 SV=1
MQHPAEHSPLGKSSRYIAEYSPELLFPISRTTKWAELGLDGANLPYQGVDYWNCYELSWLLPSGKPVVAIGEFAIPADSPNIIESKSFKLYLNSLNQSAFANWDEVQATLVHDLSKVAGKPVAVRLRSLGEVSEEGVATLPGQCIDELDISVSQYDHPQPELLRCDAGRVVEESLHSHLLKSNCPVTGQPDWGSLVVQYRGAALDHASLLAYLVSFRQHADFHEQCVERIFLDLQRLLQPQSLTVYARYVRRGGLDINPYRSSEAITPENGRLARQ

SEQ ID NO: 48826 - protein, 309 aa, Pseudomonas congelans
  misc_feature (1)..(309): tr|A0A0N8R1K4|A0A0N8R1K4_9PSED NADPH-dependent 7-cyano- 7-deazaguanine reductase OS=Pseudomonas congelans OX=20 0452 GN=queF PE=3 SV=1
MWSARVAGQSGFSLKAPRKRYKLAALIHDPGIAMHPAAEHSPLGKSSEYIATYTPSLLFPIPRAAKWAELGLTAETLPYQGVDFWNCYELSWLLPSGKPVVAIGEFSIPAESPNIIESKSFKLYLNSLNQTAFASVEQLQATLEQDLSAAAGKPVGVRIRSLAEIEEEGVAALPGMCIDDLDISVSSYDRPQPELLRCDDSRVVEESVHSHLLKSNCPVTSQPDWGSVVVEYRGAALDHASLLAYIVSFRQHSDFHEQCVERIFLDLQRLLKPEKLTVYARYVRRGGLDINPYRSTETLDVDNRRLARQ

SEQ ID NO: 48827 - protein, 276 aa, Pseudomonas coronafaciens
  misc_feature (1)..(276): tr|A0A0M0V1M1|A0A0M0V1M1_9PSED NADPH-dependent 7-cyano- 7-deazaguanine reductase OS=Pseudomonas coronafaciens p v. porri OX=83964 GN=queF PE=3 SV=1
MHPAAEHSPLGKSSEYIATYTPSLLFPIPRAAKWAELGLTAQTLPYQGVDFWNCYELSWLLPSGKPVVAIAEFSIPADSPNIIESKSFKLYLNSLNQTAFDSVANVQTTLEQDLSAAAGKPVGVRIRSLSEIESEGVAALPGVCIDDLDIVVSSYDRPQPELLRCDDSRIVEESVYSHLLKSNCPVTSQPDWGSVVVEYRGAALDHSSLLAYIVSFRQHSDFHEQCVERIFLDLQRLLKPEKLTVYARYVRRGGLDINPYRSTEVLDVDNRRLARQ

SEQ ID NO: 48828 - protein, 276 aa, Pseudomonas coronafaciens
  misc_feature (1)..(276): tr|A0A3M3LLN5|A0A3M3LLN5_9PSED NADPH-dependent 7-cyano- 7-deazaguanine reductase OS=Pseudomonas coronafaciens p v. zizaniae OX=251700 GN=queF PE=3 SV=1
MHPAAEHSPLGKSSEYIATYTPSLLFPIPRAAKWAELGLTAQTLPYQGVDFWNCYELSWLLPSGKPVVAIAEFSIPADSPNIIESKSFKLYLNSLNQTAFDSVANVQTTLEQDLSAAAGKPVGVRIRSLSEIKSEGVAALPGVCIDDLDIVVSSYDRPQPELLRCDDSRIVEESVYSHLLKSNCPVTSQPDWGSVVVEYRGAALDHSSLLAYIVSFRQHSDFHEQCVERIFLDLQRLLKPEKLTVYARYVRRGGLDINPYRSTEVLDVDNRRLARQ

SEQ ID NO: 48829 - protein, 276 aa, Pseudomonas corrugata
  misc_feature (1)..(276): tr|A0A3M3EPH2|A0A3M3EPH2_9PSED NADPH-dependent 7-cyano- 7-deazaguanine reductase OS=Pseudomonas corrugata OX=47 879 GN=queF PE=3 SV=1
MHPAAEHSPLGKSSEYIATYTPSLLFPIPRTAKWAELGLTADTLPYKGVDFWNCFELSWLLPSGKPVVAIGEFAIPADSPNIIESKSFKLYLNSLNQTPFADTASLEATLRQDLSAAAGKPVQVRVRSLKDVEREGVVALPGVCIDDLDISVDSYAHPRPELLQCDESRIVEESLHSHLLKSNCPVTSQPDWGSVVVEYRGAALDPASLLAYIVSFRQHSDFHEQCVERIFLDLQRLLKPEKLTVYARYVRRGGLDINPYRSTESVQLPNLRLVRQ

SEQ ID NO: 48830 - protein, 276 aa, Pseudomonas costantinii
  misc_feature (1)..(276): tr|A0A1S2V6I0|A0A1S2V6I0_9PSED NADPH-dependent 7-cyano- 7-deazaguanine reductase OS=Pseudomonas costantinii OX= 168469 GN=queF PE=3 SV=1
MHPAAEHSPLGKSSEYISTYTPSLLFPIPRAAKWAELGLSAETLPYKGVDFWNCFELSWLLPSGKPVVAIGEFSIPADSPNIIESKSFKLYLNSLNQTAFADTQSLEATLRTDLSAAAGKPVTVRIRSLAEIEAEGVMALPGACIDDLDISVSNYEHPRPELLRCDDSRIVEESVHSHLLKSNCPVTSQPDWGSVVVQYRGHALDHASLLEYIVSFRQHSDFHEQCVERIFLDLQRLLKPEKLTVYARYVRRGGLDINPYRSTEDVAFQNVRLARQ

SEQ ID NO: 48831 - protein, 276 aa, Pseudomonas cremoricolorata
  misc_feature (1)..(276): tr|A0A089WUQ4|A0A089WUQ4_9PSED NADPH-dependent 7-cyano- 7-deazaguanine reductase OS=Pseudomonas cremoricolorata OX=157783 GN=queF PE=3 SV=1
MHPAAEHSPLGKSSEYISTYTPSLLFAIPRQAKWAELGVAAGNLPWQGVDFWNCFELSWLLPSGKPVVAMGEFAIPADSPNIIESKSFKLYLNSLNQTPFASISELRECLARDLSAVAGKPVGVRVRTLAEVEAEGLAALPGQCIDALDVTISGYDQPQPELLRCNPERVVEETVHSHLLKSNCPVTGQPDWGSVVVDYHGAALDHASLLAYLVSFRQHADFHEQCVERIYLDLLTLLKPERLTVYARYVRRGGLDINPYRSSALISPRNLRLARQ

SEQ ID NO: 48832 - protein, 276 aa, Pseudomonas cuatrocienegasensis
  misc_feature (1)..(276): tr|A0A1H9L175|A0A1H9L175_9PSED NADPH-dependent 7-cyano- 7-deazaguanine reductase OS=Pseudomonas cuatrocienegase nsis OX=543360 GN=queF PE=3 SV=1
MHPAAEDSPLGKASEYIATYSPSLLFPIPRAAKWAELGLTAETLPYTGVDLWNCFELSWLLPSGKPVVAIGEFAIPADSPAIIESKSFKLYLNSLNQTPFASTESLVQVLVTDLSAAAGKPVGVRVRTLAEVAAEGVATLPGRCIDELDVSISNYDQPQPQVLRCTAGTRVEEQLHSHLLKSNCPVTGQPDWGSVVVDYCGPALDPASLLAYLVSFRQHADFHEQCVERIFLDLQRLLQPERLTVYARYVRRGGLDINPYRSTHALQPDNRRLVRQ

SEQ ID NO: 48833 - protein, 275 aa, Pseudomonas daroniae
  misc_feature (1)..(275): tr|A0A4Q9QHM6|A0A4Q9QHM6_9PSED NADPH-dependent 7-cyano- 7-deazaguanine reductase OS=Pseudomonas daroniae OX=248 7519 GN=queF PE=3 SV=1
MHSVEHSPLGKSSEYIATYSPELLFPIPRVAKWAELGLSAETLPYRGVDFWNCFELSWLLPSGKPVVAIGEFTIAADSPNIIESKSFKLYLNSLNQSVFATEAELVAVLEKDLSATAGKPVGVRVRRLDEVEQEGLATLPGTCIDDLDVSISNYTAPRPELLHCDTSRVVEESLHSHLLKSNCPVTGQPDWGSVVVEYRGAALESASLLAYLVSFRQHADFHEQCVERIFLDLQRLLRPEYLTVYARYVRRGGLDINPYRTTLTQLPENRRLVRQ

SEQ ID NO: 48834 - protein, 276 aa, Pseudomonas deceptionensis
  misc_feature (1)..(276): tr|A0A0J6GG26|A0A0J6GG26_PSEDM NADPH-dependent 7-cyano- 7-deazaguanine reductase OS=Pseudomonas deceptionensis OX=882211 GN=queF PE=3 SV=1
MHPAAEHSPLGKSSEYISTYTPSLLFPIPRAAKWAELGLSAETLPYVGVDYWNCFELSWLLPSGKPVVAIGEFCFAADSPNIVESKSFKLYLNSLNQTVFVDTQSLEATLQADLSAASGKPVSVRVRSLDDVQADGVGVLPGVCIDDLDISVSDYEQPRPELLKCDESQLIEESVYSHLLKSNCPVTSQPDWGTVVVEYRGAALDHASLLAYLVSFRQHSDFHEQCVERIFLDLQRLLKPEKLTVYARYVRRGGLDINPYRSTETVEFQNVRLVRQ

SEQ ID NO: 48835 - protein, 276 aa, Pseudomonas delhiensis
  misc_feature (1)..(276): tr|A0A239JUW0|A0A239JUW0_9PSED NADPH-dependent 7-cyano- 7-deazaguanine reductase OS=Pseudomonas delhiensis OX=3 66289 GN=queF PE=3 SV=1
MQHPAEHSPLGKSSEYVSTYAPELLFPISRATKWAELGLDGARLPYRGVDIWNCYELSWLTPAGKPVVAIGEFAIPAQSPNIIESKSFKLYLNSLNQSAFDSREALRAVLERDLSAAAGAPVGVRLRSLDEVAEEGVAILPGQCIDDLDIAVDGYDHPRPELLRCDDARRVDEVLYSHLLKSNCPVTGQPDWGTLVVDYAGPALDPASLLAYVVSFRQHQDFHEQCVERIYLDLQRLLQPSRLTVYARYVRRGGLDINPYRSSGAIAPDNRRLVRQ

SEQ ID NO: 48836 - protein, 276 aa, Pseudomonas denitrificans
  misc_feature (1)..(276): tr|A0A5J6R1U4|A0A5J6R1U4_PSEDE NADPH-dependent 7-cyano- 7-deazaguanine reductase QueF OS=Pseudomonas denitrific ans OX=43306 GN=queF PE=4 SV=1
MQHPAEHSPLGKSSEYVSTYAPELLFPISRTTKWAELGLTAQTLPYQGVDLWNCYELSWLTASGKPVVAIGEFAIPAQSPNIIESKSFKLYLNSLNQTAFDNAEAVRAVMERDLSAAAGAPVGVRVRGLDEVAGEGVAVIDGTCVDDLDVAVASYDHPRPELLRCDDTRRVDEVLYSHLLKSNCPVTGQPDWGTLVVEYSGPVLDAASLLAYVVSFRQHQDFHEQCVERIYLDLQRLLQPTRLTVYARYVRRGGLDINPYRSSEAVQPDNRRLVRQ

SEQ ID NO: 48837 - protein, 276 aa, Pseudomonas donghuensis
  misc_feature (1)..(276): tr|A0A2M9VM89|A0A2M9VM89_9PSED NADPH-dependent 7-cyano- 7-deazaguanine reductase OS=Pseudomonas donghuensis OX= 1163398 GN=queF PE=3 SV=1
MHPAAEHSPLGKSSEYVATYTPSLLFPIPRAAKWAELGVSAETLPWLGVDFWNCFELSWLLPSGKPVVAIGEFAIPADSPNIIESKSFKLYLNSLNQTVFESPAALQACLVKDLSAAAGKPVGVQIRSLAEVEGQGVVGLPGVCIDELDVSISNYEQPQPELLRCDSSHVVEETLHSHLLKSNCPVTGQPDWGSVTVHYRGAALDHASLLTYLISFRQHADFHEQCVERIYLDLKRLLNPEHLTVYARYVRRGGLDINPYRSTSQVTLENLRLVRQ

SEQ ID NO: 48838 - protein, 276 aa, Pseudomonas dryadis
  misc_feature (1)..(276): tr|A0A4Q9QUQ7|A0A4Q9QUQ7_9PSED NADPH-dependent 7-cyano- 7-deazaguanine reductase OS=Pseudomonas dryadis OX=2487 520 GN=queF PE=3 SV=1
MHPVVENSPLGKASEYIDTYTPELLFPISRAAKWAELGLTAETLPYQGVDFWNCFELSWLLPSGKPVVAIGEFAIAADSPNIIESKSFKLYLNSLNQSVFASEAELLGVLRKDLSAAAGKPVGVRLRSLGEVAAEGLASLPGICIDELDVHISQYDAPQAGLLRCNPERIVEQSLHSHLLKSNCPVTGQPDWGSVVVQYRGAELEPASLLAYLVSFRQHADFHEQCVERIFLDLKRVLQPESLTVYARYVRRGGLDINPYRSTAAIEPDNRRLVRQ

SEQ ID NO: 48839 - protein, 275 aa, Pseudomonas duriflava
  misc_feature (1)..(275): tr|A0A562Q8R2|A0A562Q8R2_9PSED NADPH-dependent 7-cyano- 7-deazaguanine reductase OS=Pseudomonas duriflava OX=45 9528 GN=queF PE=3 SV=1
MHSVEHSPLGKSSQYTDTYAPALLYPIPRATKWAELGLTRENLPYVGVDIWNCYELSWLTQKGKPVVAVAQFSIPADSPHIIESKSFKLYLNSLNQTRFDHADAVRDVLIKDLSSAAGAAVGVSIESLQNVAIAGFGAAPGFCIDELDVEIDQYNHPDAARLLCSPGRVVKETLHSHLLRSNCPVTGQPDWGSVVIDYEGAQLDREALLAYVVSFRQHADFHEQCVERIFIDLKTLLQPAYLTVYARYVRRGGLDINPYRSTAAIAPEVARLARQ

SEQ ID NO: 48840 - protein, 276 aa, Pseudomonas endophytica
  misc_feature (1)..(276): tr|A0A0Q0WYX5|A0A0Q0WYX5_9PSED NADPH-dependent 7-cyano- 7-deazaguanine reductase OS=Pseudomonas endophytica OX= 1563157 GN=queF PE=3 SV=1
MHPAAEHSPLGKSSEYISTYTPSLLFPIPRAAKWAELGLSAETLPYVGVDFWNCFELSWLLPSGKPVVAIGEFCFSADSPNIVESKSFKLYLNSLNQTVFDDVNSLEATLQADLSAASGKPVSVRVRSLNEVQADGVGVLPGVCIDDLNITVSDYEHPRPELLKCDESQVVEESLYSHLLKSNCPVTSQPDWGTVVVEYRGAALNHASLLAYLVSFRQHSDFHEQCVERIFLDLQRLLKPEKLTVYARYVRRGGLDINPYRSTEAVEFSNLRLVRQ

SEQ ID NO: 48841 - protein, 276 aa, Pseudomonas entomophila
  misc_feature (1)..(276): sp|Q1I7F9|QUEF_PSEE4 NADPH-dependent 7-cyano-7-deazagua nine reductase OS=Pseudomonas entomophila (strain L48) OX=384676 GN=queF PE=3 SV=1
MHPAAEHSPLGKSSEYIATYTPSLLFPIPRLAKWAELGVSGDALPWQGVDYWNCFELSWLLPSGKPVVAIGEFAIPCDSPNIIESKSFKLYLNSLNQTKFESVAQLQACLAKDLSAAAGKVVAVKVSTLADVEAQGVTTLPGQCIDALDVTIDNYEQPQPELLRCSTERVVEETVHSHLLKSNCPVTGQPDWGSVVVEYKGRALDHASLLTYLISFRQHADFHEQCVERIYLDLKKLLQPEYLTVYARYVRRGGLDINPYRSTRAISPENLRLVRQ

SEQ ID NO: 48842 - protein, 276 aa, Pseudomonas entomophila
  misc_feature (1)..(276): tr|A0A3Q8U0K9|A0A3Q8U0K9_9PSED NADPH-dependent 7-cyano- 7-deazaguanine reductase OS=Pseudomonas entomophila OX= 312306 GN=queF PE=3 SV=1
MHPAAEHSPLGKSSEYIATYTPALLFPIPRLAKWAELGVSGDALPWQGVDFWNCFELSWLLPSGKPVVAIAEFAIPCDSPNIIESKSFKLYLNSLNQTVFASLTELQACLEKDLSGAAGKPVLVKVRTLAEVEAQGVTALPGQCIDALDITISNYEQPQPELLRCSAERVVEETVHSHLLKSNCPVTGQPDWGSVVVEYKGRALDHASLLTYLISFRQHADFHEQCVERIYLDLKNLLQPEYLTVYARYVRRGGLDINPYRSTGPISPANLRLVRQ

SEQ ID NO: 48843 - protein, 276 aa, Pseudomonas extremaustralis
  misc_feature (1)..(276): tr|A0A5C5Q7Y5|A0A5C5Q7Y5_9PSED NADPH-dependent 7-cyano- 7-deazaguanine reductase OS=Pseudomonas extremaustralis OX=359110 GN=queF PE=3 SV=1
MHPAAEHSPLGKSSEYICTYTPSLLFPIPRAAKWAELGLSAETLPYKGVDFWNCFELSWLLPSGKPVVAIGEFSIPADSPNIIESKSFKLYLNSLNQTVFADVPSLEAILRTDLSAAAGKPVNVRIRSLADVEAEGVQALPGICIDDLDISVSNYEHPRPELLRCDDSRIVEERVHSHLLKSNCPVTSQPDWGSVAVDYRGSALDHASLLEYLVSFRQHSDFHEQCVERIFLDLQRLLKPEKLTVYARYVRRGGLDINPYRSTEDVAFQNVRLVRQ

SEQ ID NO: 48844 - protein, 276 aa, Pseudomonas extremorientalis
  misc_feature (1)..(276): tr|A0A1H0VXV5|A0A1H0VXV5_9PSED NADPH-dependent 7-cyano- 7-deazaguanine reductase OS=Pseudomonas extremorientali s OX=169669 GN=queF PE=3 SV=1
MHPAAEHSPLGKSSEYISTYTPSLLFPIPRAAKWAELGLSAETLPYKGVDFWNCFELSWLLPSGKPVVAIGEFSIPADSPNIIESKSFKLYLNSLNQTAFADTASLEATLRTDLSTAAGKPVSVRIRSLAEIEAEGVMALPGVCIDDLDISVSNYGHPRPELLRCDNSRVVEESVHSHLLKSNCPVTSQPDWGSVVVQYRGHALDHASLLEYIVSFRQHSDFHEQCVERIFLDLQRLLKPERLTVYARYVRRGGLDINPYRSTEDVAFQNVRLARQ

SEQ ID NO: 48845 - protein, 276 aa, Pseudomonas ficuserectae
  misc_feature (1)..(276): tr|A0A0P9RRF3|A0A0P9RRF3_9PSED NADPH-dependent 7-cyano- 7-deazaguanine reductase OS=Pseudomonas ficuserectae OX =53410 GN=queF PE=3 SV=1
MHPAAEHSPLGKSSEYIATYTPSLLFPIPRAAKWAELGLTAQTLPYQGVDFWNCYELSWLLPSGKPVVAIAEFSIPADSPNIIESKSFKLYLNSLNQTAFATVEEVQTTLERDLSAAAGKPIGVRIRSLSDIEGEGVATLPGVCIDDLDITVSSYDRPQPELLRCDESQIIEESVHSHLLKSNCPVTSQPDWGSVVVEYRGAALDHSSLLAYIVSFRQHSDFHEQCVERIFLDLQRLLKPEKLTVYARYVRRGGLDINPYRSTETLDVNNRRLARQ

SEQ ID NO: 48846 - protein, 275 aa, Pseudomonas flavescens
  misc_feature (1)..(275): tr|A0A1G8L2N5|A0A1G8L2N5_9PSED NADPH-dependent 7-cyano- 7-deazaguanine reductase OS=Pseudomonas flavescens OX=2 9435 GN=queF PE=3 SV=1
MHSVEHSPLGKRSEYIASYSPELLFAIPRAAKWAELGLSAQTLPYRGVDFWNCFELSWLLPSGKPVVAIGEFSIAADSPNIIESKSFKLYLNSLNQSVFASKAELVTVLERDLSATAGKAVGVRVRSLSEVAKEGLATLPGVCIDDLDISVSTYEAPRPELLSCDASRIVEEALHSHLLKSNCPVTGQPDWGSVVVEYRGAALQPASLLAYLVSFRQHADFHEQCVERIFLDLQRLLRPEHLTVYARYVRRGGLDINPYRTTLTQLPENRRLVRQ

SEQ ID NO: 48847 - protein, 275 aa, Pseudomonas flexibilis
  misc_feature (1)..(275): tr|A0A0B3BN76|A0A0B3BN76_9PSED NADPH-dependent 7-cyano- 7-deazaguanine reductase OS=Pseudomonas flexibilis OX=7 06570 GN=queF PE=3 SV=1
MHPAEHSPLGKSSEYVDHYSPELLYPIPRAPKWAELGLQAGQLPYQGVDYWNCYELSWLLPSGKPVVAIGEFAIPADSPNIIESKSFKLYLNSLNQTPFADTQAVCEALRRDLSAVAGAPVGVRVRSLDEVGEEGVARLPGRCIDALDVEITGYDHPRPELLRCDPQRQVEECLHSHLLKSNCPVTGQPDWGSVVVDYQGPALDPASLLAYLISFRQHRDFHEQCVERIFLDLQRLLQPRRLTVYARYVRRGGLDINPYRSSEASQVDNRRLVRQ

SEQ ID NO: 48848 - protein, 275 aa, Pseudomonas flexibilis
  misc_feature (1)..(275): tr|A0A1N6P5C6|A0A1N6P5C6_9PSED NADPH-dependent 7-cyano- 7-deazaguanine reductase OS=Pseudomonas flexibilis OX=7 06570 GN=queF PE=3 SV=1
MHPAEHSPLGKSSEYVDHYSPELLYPIPRAPKWAELGLQAGQLPYQGVDYWNCYELSWLLPSGKPVVAIGEFAIPADSPNIIESKSFKLYLNSLNQTVFADAQAVREALRRDLSAVAGAPVGVRVRSLDEVGEEGVARLPGRCIDDLDVEVTGYDHPRPELLRCDPQRQVEECLHSHLLKSNCPVTGQPDWGSVVVDYQGPALDPASLLAYLISFRQHRDFHEQCVERIFLDLQRLLQPRRLTVYARYVRRGGLDINPYRSSEAPQVDNRRLVRQ

SEQ ID NO: 48849 - protein, 276 aa, Pseudomonas floridensis
  misc_feature (1)..(276): tr|A0A1X0N060|A0A1X0N060_9PSED NADPH-dependent 7-cyano- 7-deazaguanine reductase OS=Pseudomonas floridensis OX= 1958950 GN=queF PE=3 SV=1
MHPAAEHSPLGKSSEYISTYTPSLLFPIPRAAKWTELGLTAETLPYKGVDYWNCYELSWLLPSGKPVVAIAEFSIPADSPNIIESKSFKLYLNSLNQTAFESREQVQVTLEKDLSAAAGTPVGVRIRNLDEVEREGVATLPGVCIDDLDIHVSSYDRPQPELLRCDASRVVEESVYSHLLKSNCPVTSQPDWGSVVVEYRGAALDPASLLAYIVSFRQHSDFHEQCVERIFLDLQRLLKPEKLTVYARYVRRGGLDINPYRSTETLDVDNGRLARQ

SEQ ID NO: 48850 - protein, 276 aa, Pseudomonas fluorescens
  misc_feature (1)..(276): tr|A0A5E7CZY2|A0A5E7CZY2_PSEFL NADPH-dependent 7-cyano- 7-deazaguanine reductase OS=Pseudomonas fluorescens OX= 294 GN=queF_1 PE=3 SV=1
MHPAAEHSPLGKSSEYISTYTPSLLFPIPRAAKWAELGLSAETLPYKGVDFWNCFELSWLLPSGKPVVAIGEFSIPADSPNIIESKSFKLYLNSLNQTPFADRQSLEATLQADLSAAAGKPVGVRIRSLSEVQAEGVAGLPGVCIDELEVSVSDYAQPRPELLRCDESRVIEESVHSHLLKSNCPVTGQPDWGSVAVEYRGAALDHASLLAYLVSFRQHADFHEQCVERIFLDLQRLLKPEKLTVYARYVRRGGLDINPYRSTEALELPNLRLVRQ

SEQ ID NO: 48851 - protein, 276 aa, Pseudomonas fluorescens
  misc_feature (1)..(276): tr|A0A125QI75|A0A125QI75_PSEFL NADPH-dependent 7-cyano- 7-deazaguanine reductase OS=Pseudomonas fluorescens OX= 294 GN=queF PE=3 SV=1
MHPAAEHSPLGKSSEYISTYTPSLLFPIPRAAKWAELGLSAETLPYKGVDFWNCFELSWLLPSGKPVVAIGEFSIPADSPNIIESKSFKLYLNSLNQTAFADTSSLEATLRTDLSAAAGKPVNVRIRSLADIEAEGVMALPGVCIDGLDINVSSYEHPRPELLRCDDSRVVEESVHSHLLKSNCPVTSQPDWGSVVVEYRGAALDHASLLEYIVSFRQHSDFHEQCVERIFLDLQRLLKPEKLTVYARYVRRGGLDINPYRSTENTQFLNVRLARQ

SEQ ID NO: 48852 - protein, 277 aa, Pseudomonas formosensis
  misc_feature (1)..(277): tr|A0A1I6AQ23|A0A1I6AQ23_9PSED NADPH-dependent 7-cyano- 7-deazaguanine reductase OS=Pseudomonas formosensis OX= 1002526 GN=queF PE=3 SV=1
MHPAEQSPLGKTSEYSGIYTPSLLYPIPRQPIWEGLGLDPQRLPFHGADVWNSYEVSWLTPSGKPEVAVVEFVFPLTPSSRIVESKSFKLYLNSFNQTVFSDRAEVLRTLESDLSVTAQAPVLVRVQDTHRIQQLGIARLPGECLDDMDVRISSYEYDPGLLRLLPGARQVRETLNSNLLKSNCPVTGQPDWASVMISYSGPAIDRASLLRYLVSFRQHRDFHEQCVERIFLDLQRLLGEGCELSVHARYLRRGGLDINPWRSTQPGMPDNLRLARQ

SEQ ID NO: 48853 - protein, 276 aa, Pseudomonas fragi
  misc_feature (1)..(276): tr|A0A1Z3J176|A0A1Z3J176_PSEFR NADPH-dependent 7-cyano- 7-deazaguanine reductase OS=Pseudomonas fragi OX=296 GN =queF PE=3 SV=1
MHPAAEHSPLGKSSEYISTYTPSLLFPIPRAAKWAELGLSAETLPYVGVDFWTCFELSWLLPSGKPVVAIAEFCFAADSPNIVESKSFKLYLNSLNQTVFADTPSLEATLRADLSAASGKPVSVRVRSLDEVQADGVGVLPGVCIDGLDITVSDYAQPRPELLKCDDSQVVEESVYSHLLKSNCPVTSQPDWGTVVVEYRGAALDHASLLAYLVSFRQHSDFHEQCVERIFLDLQRLLKPEKLTVYARYVRRGGLDINPYRSTEAVEFQNVRLVRQ

SEQ ID NO: 48854 - protein, 276 aa, Pseudomonas fragi
  misc_feature (1)..(276): tr|A0A267BZB1|A0A267BZB1_PSEFR NADPH-dependent 7-cyano- 7-deazaguanine reductase OS=Pseudomonas fragi OX=296 GN =queF PE=3 SV=1
MHPAAEHSPLGKSSEYISTYTPSLLFPIPRAAKWAELGLSAETLPYVGVDFWTCFELSWLLPSGKPVVAIGEFCFAADSPNIVESKSFKLYLNSLNQTVFADTPSLEATLRADLSAASGKPVSVRVRSLDEVQADGVAVLPGVCIDDLDITVSDYAQPRPELLKCDDSQVVEESVYSHLLKSNCPVTSQPDWGTVVVEYRGAALDHASLLAYLVSFRQHSDFHEQCVERIFLDLQRLLKPEKLTVYARYVRRGGLDINPYRSTEAVEFQNVRLVRQ

SEQ ID NO: 48855 - protein, 276 aa, Pseudomonas frederiksbergensis
  misc_feature (1)..(276): tr|A0A423J3W1|A0A423J3W1_9PSED NADPH-dependent 7-cyano- 7-deazaguanine reductase OS=Pseudomonas frederiksbergen sis OX=104087 GN=queF PE=3 SV=1
MHPAAEHSPLGKSSEYIATYTPSLLFPIPRTAKWAELGLTAETLPYKGVDFWNCFELSWLLPSGKPVVAIGEFSIPADSPNIIESKSFKLYLNSLNQTAFADTASLEATLAKDLSAAAGKPVGVRIRSLKDVEAEGVVALPGVCIDDLDISVSNYEHPRPELLRCNESLIIEECVHSHLLKSNCPVTSQPDWGSVAVEYRGAALDHASLLEYIVSFRQHSDFHEQCVERIFLDLQRLLKPEKLTVYARYVRRGGLDINPYRSTEEVQLPNHRLVRQ

SEQ ID NO: 48856 - protein, 276 aa, Pseudomonas frederiksbergensis
  misc_feature (1)..(276): tr|A0A1H4YYX2|A0A1H4YYX2_9PSED NADPH-dependent 7-cyano- 7-deazaguanine reductase OS=Pseudomonas frederiksbergen sis OX=104087 GN=queF PE=3 SV=1
MHPAAEHSPLGKSSEYIATYTPSLLFPIPRTAKWAELGLTAETLPYKGVDFWNCFELSWLLPSGKPVVAIGEFSIPADSPNIIESKSFKLYLNSLNQTPFADTASIEATLVKDLSAAAGKPVGVRIRSLKDVEAEGVVALPGVCIDDLDISVSNYEHPRPELLRCDASRVVEESVHSHLLKSNCPVTSQPDWGSVAVEYRGAALDHASLLEYIVSFRQHSDFHEQCVERIFLDLQRLLKPEKLTVYARYVRRGGLDINPYRSTETVQLPNHRLVRQ

SEQ ID NO: 48857 - protein, 275 aa, Pseudomonas fulva
  misc_feature (1)..(275): tr|A0A0D0KT93|A0A0D0KT93_9PSED NADPH-dependent 7-cyano- 7-deazaguanine reductase OS=Pseudomonas fulva OX=47880 GN=queF PE=3 SV=1
MHSVEHSPLGKSSEYIATYSPELLFPIPRAAKWAELGLSAQTLPYRGVDYWNCFELSWLLPSGKPVVAIGEFSIAADSPNIIESKSFKLYLNSLNQSVFASEAELVGVLERDLSATAGKPVGVRVRSLGEVAREGLAVLPGTCIDELDISISDYQAPRPELLVCDASRIVEESLHSHLLKSNCPVTGQPDWGSVVVEYRGAALEPASLLAYLVSFRQHADFHEQCVERIFLDLQRLLQPEHLTVYARYVRRGGLDINPYRTTLGRLPDNRRLVRQ

SEQ ID NO: 48858 - protein, 275 aa, Pseudomonas fulva
  misc_feature (1)..(275): tr|F6AA05|F6AA05_PSEF1 NADPH-dependent 7-cyano-7-deazag uanine reductase OS=Pseudomonas fulva (strain 12-X) OX= 743720 GN=queF PE=3 SV=1
MNSVEHSPLGKSSEYIATYSPELLFPIPRATKWAELGLSAETLPYRGVDYWNCFELSWLLPSGKPMVAIGEFAIPADSPNIIESKSFKLYLNSLNQSVFVSVAQLVAVLEKDLSATAGKPVAVRVRSLEEAAREGLSVLPGICIDELDVSISNYAAPQPELLRCDPARVVEQSLHSHLLKSNCPVTGQPDWGSVVVEYRGAELDPASLLAYLVSFRQHADFHEQCVERIFLDLQKLLQPEYLTVYARYVRRGGLDINPYRTTLAALPDNRRLVRQ

SEQ ID NO: 48859 - protein, 276 aa, Pseudomonas furukawaii
  misc_feature (1)..(276): tr|L8MM50|L8MM50_PSEFK NADPH-dependent 7-cyano-7-deazag uanine reductase OS=Pseudomonas furukawaii OX=1149133 G N=queF PE=3 SV=1
MQHPAEHSPLGKSSEYVSSYSPELLFPISRETKWNELGLTAETLPYKGVDYWNCYELSWLTASGKPVVAIGEFAIPADSPNIIESKSFKLYLNSLNQSVFEGAEALARVLERDLSAAAGAPVAVRVRSLAEVEAEGVAPLAGVCIDELDLVIDNYSHPHPELLKVEPVAADEALYSHLLKSNCPVTGQPDWGTVAVEYKGPNRLDHASFLAYLVSFRQHADFHEQCVERIFLDLQRLLMPERLTVYARYVRRGGLDINPCRSTHECRVDNRRLVRQ

SEQ ID NO: 48860 - protein, 276 aa, Pseudomonas fuscovaginae
  misc_feature (1)..(276): tr|A0A0M9GE74|A0A0M9GE74_9PSED NADPH-dependent 7-cyano- 7-deazaguanine reductase OS=Pseudomonas fuscovaginae OX =50340 GN=queF PE=3 SV=1
MHPAAEHSPLGKSSEYIATYTPSLLFPIPRAAKWAELGLSAETLPYHGVDFWNCFELSWLLPSGKPVVAIGEFSIPADSPNIIESKSFKLYLNSLNQTPFADIPSLEAVLRADLSAAAGKPVGVRIRRLGDVQAEGVVALPGTCIDDLDISVSDYAHPRPELLRCDPSRVVEESVHSHLLKSNCPVTSQPDWGSVVVEYRGAALDHASLLAYLVSFRQHSDFHEQCVERIFLDLQRLLKPEKLTVYARYVRRGGLDINPYRSTEVVAFQNRRLVRQ

SEQ ID NO: 48861 - protein, 276 aa, Pseudomonas fuscovaginae
  misc_feature (1)..(276): tr|A0A1H6PDF2|A0A1H6PDF2_9PSED NADPH-dependent 7-cyano- 7-deazaguanine reductase OS=Pseudomonas fuscovaginae OX =50340 GN=queF PE=3 SV=1
MHPAAEHSPLGKSSEYIATYTPSLLFPIPRAAKWAELGLSADTLPYQGVDFWNCFELSWLLPSGKPVVAIGEFSIPADSPNIIESKSFKLYLNSLNQTPFADIPSLEAVLRADLSAAAGKPVGVRVRPLSEVQAEGVVALPGVCIDELDISVSDYAHPRPELLRCDPSRVVEESVHSHLLKSNCPVTSQPDWGSVVVEYRGAALDHASLLAYLVSFRQHSDFHEQCVERIFLDLQRLLKPEKLTVYARYVRRGGLDINPYRSTESVAFQNQRLVRQ

SEQ ID NO: 48862 - protein, 278 aa, Pseudomonas gallaeciensis
  misc_feature (1)..(278): tr|A0A395R9T1|A0A395R9T1_9PSED NADPH-dependent 7-cyano- 7-deazaguanine reductase OS=Pseudomonas gallaeciensis O X=857227 GN=queF PE=3 SV=1
MSDHPATDSPLGKSSAYVSVYTPSLLYPIARQAKWQELGLDPQNLPFHGADIWNCFELSWLTPSGKPEVAAAEFVFPIKAARIVESKSFKLYLNSLNQTVFRDRRELLETLESDLSVAAQGPVAVRLFSMQQLHQLGMFTLPGRCIDDEEVAVSRYHYDASLLALDSGRVQVSEVLHSHLLKSNCPVTGQPDWGSVLISYSGPRLDPAALVRYLVSFREHSDFHEQCVERIFLDLLALLGEGAQLTVYARYVRRGGLDINPWRSTEAGMPENLRLARQ

SEQ ID NO: 48863 - protein, 272 aa, [Pseudomonas] geniculata
  misc_feature (1)..(272): tr|A0A0L8A528|A0A0L8A528_9GAMM NADPH-dependent 7-cyano- 7-deazaguanine reductase OS=[Pseudomonas] geniculata N1 OX=1167641 GN=queF PE=3 SV=1
MNTPQDSSLGREVSYPSQYDPGLLFPIPRSGARAEIGLDDAALPFVGHDRWHAFELSWLDPRGKPQVAVATVQVPCTSPRLIESKSFKLYLNSLNSTRIDSAEALRERLVADLSACAGAPVQVEFGLPGLRETPLGESIDGLDVEIDCYGPPQADFLAADAGEVVEETLVSSLLKSNCPVTGQPDWATVSLRYRGPKIDRAGLLRYLVSYREHAEFHEQCVERIFSEVTSRCQPQWLEVEARYTRRGGLDINPWRASPGIAAPAATYRELRQ

SEQ ID NO: 48864 - protein, 276 aa, Pseudomonas gessardii
  misc_feature (1)..(276): tr|A0A1V2JUG7|A0A1V2JUG7_9PSED NADPH-dependent 7-cyano- 7-deazaguanine reductase OS=Pseudomonas gessardii OX=78 544 GN=queF PE=3 SV=1
MHPAAEHSPLGKSSEYISTYTPSLLFPIPRAAKWAELGLSAETLPYKGVDFWNCFELSWLLPSGKPVVAIGEFSIPADSPNIIESKSFKLYLNSLNQTPFADGPSLEATLRADLSAAAGKPVGVRIRSLAEVEGEGVVSLPGVCIDDLQISVSNYEHPRPELLRCDDSRVVEESVHSHLLKSNCPVTSQPDWGSVAVEYRGAALDHASLLAYLVSFRQHSDFHEQCVERIFLDLQRLLKPEKLTVYARYVRRGGLDINPYRSTEAVQFQNLRLARQ

SEQ ID NO: 48865 - protein, 276 aa, Pseudomonas gingeri
  misc_feature (1)..(276): tr|A0A2K1FKB4|A0A2K1FKB4_9PSED NADPH-dependent 7-cyano- 7-deazaguanine reductase OS=Pseudomonas gingeri NCPPB 3 146 = LMG 5327 OX=707248 GN=queF PE=3 SV=1
MHPAAEHSPLGKSSEYIATYTPSLLFPIPRAAKWAELGLSADTLPYRGVDFWNCFELSWLLPSGKPVVAIGEFSIPADSPNIIESKSFKLYLNSLNQTPFTDTASLEAVLRADLSAAAGKPVGVRVRSLGDVQAEGVVALPGVCIDDLDISVSDYAHPRPELLRCDESRVIEESVHSHLLKSNCPVTSQPDWGSVVVEYRGAALDHASLLAYLVSFRQHSDFHEQCVERIFLDLQRLLKPEKLTVYARYVRRGGLDINPYRSTEAVEFQNLRLVRQ

SEQ ID NO: 48866 - protein, 276 aa, Pseudomonas graminis
  misc_feature (1)..(276): tr|A0A4R7V3K6|A0A4R7V3K6_9PSED NADPH-dependent 7-cyano- 7-deazaguanine reductase OS=Pseudomonas graminis OX=158 627 GN=queF PE=3 SV=1
MHPAAEHSPLGKSSEYIATYTPSLLFPIPRAAKWAELGLTAETLPYQGVDFWNCYELSWLLPSGKPVVAIGEFSIAADSANIIESKSFKLYLNSLNQTAFASEAELIATLEKDLSAAAGKPVGVRIRSLKDIEAEGIVAVPGVCVDELDVSISSYDRPQPELLRCDESRVVDDVLHSHLLKSNCPVTSQPDWGSVAVEYRGAALDHASFLAYIVSFRQHSDFHEQCVERIFMDLQRLLKPEKLTVYARYVRRGGLDINPYRSTEKLTFENGRLARQ

SEQ ID NO: 48867 - protein, 276 aa, Pseudomonas graminis
  misc_feature (1)..(276): tr|A0A1X0VMF7|A0A1X0VMF7_9PSED NADPH-dependent 7-cyano- 7-deazaguanine reductase OS=Pseudomonas graminis OX=158 627 GN=queF PE=3 SV=1
MHPAAEHSPLGKSSEYIATYTPSLLFPIPRAAKWAELGLTAQTLPYQGVDFWNCYELSWLLPAGKPVVAIAEFSIPADSPNIIESKSFKLYLNSLNQTAFDNAAEVQATLERDLSAAAGKPVGVRIRSLAEIEREGVATLPGVCIDDLDITVSSYDRPQPELLRCEASQVIEESVYSHLLKSNCPVTSQPDWGSVVVEYRGAALDHASLLAYIVSFRQHSDFHEQCVERIFLDLQRLLKPERLTVYARYVRRGGLDINPYRSTETLNVDNRRLARQ

SEQ ID NO: 48868 - protein, 276 aa, Pseudomonas grimontii
  misc_feature (1)..(276): tr|A0A1H1IIK1|A0A1H1IIK1_9PSED NADPH-dependent 7-cyano- 7-deazaguanine reductase OS=Pseudomonas grimontii OX=12 9847 GN=queF PE=3 SV=1
MHPAAEHSPLGKSSEYISTYTPSLLFPIPRAAKWAELGLSAETLPYKGVDFWNCFELSWLLPSGKPVVAIGEFSIPADSPNIIESKSFKLYLNSLNQTAFADTPSLEATLRTDLSAAAGKPVSVRIRRLAEIEAEGVMALPGVCIDDLDIRVSNYEHPRPELLRCDDSRIVEESVHSHLLKSNCPVTSQPDWGSVVVEYRGAALDHASLLEYLVSFRQHSDFHEQCVERIFLDLQRLLKPEKLTVYARYVRRGGLDINPYRSTEDVAFQNVRLARQ

SEQ ID NO: 48869 - protein, 276 aa, Pseudomonas guangdongensis
  misc_feature (1)..(276): tr|A0A1H2HGG2|A0A1H2HGG2_9PSED NADPH-dependent 7-cyano- 7-deazaguanine reductase OS=Pseudomonas guangdongensis OX=1245526 GN=queF PE=3 SV=1
MAQDVHHSPLGKTTEYVAEYAPELLFPIPRLAKWLELGIDPQALPFEGVDLWNCYELSWLNEKGKPVVAIGEFAIPARSPNIIESKSFKLYLNSLNQTRFAGREALVEVLARDLSAAAGAAVAVRVRTLDEVAAEGIAGPRGECLDDLDVAIDSYGPPDAGLLACDRERLVSETLYSHLLKSNCPVTGQPDWGTVSIDYCGPALERAALLAYVVSLRMHGDFHEQCVERIYLDLRALLQPQRLTVQARYVRRGGLDINPCRSTHPVEADNRRLVRQ

SEQ ID NO: 48870 - protein, 276 aa, Pseudomonas guariconensis
  misc_feature (1)..(276): tr|A0A1G6N5I3|A0A1G6N5I3_9PSED NADPH-dependent 7-cyano- 7-deazaguanine reductase OS=Pseudomonas guariconensis O X=1288410 GN=queF PE=3 SV=1
MHPAAEHSPLGKSSEYIATYTPSLLFPIPRAAKWAELGVTAQTLPWQGVDYWNCFELSWLLPSGKPVVAIGEFAIPADSPNIIESKSFKLYLNSLNQTVFASTRELQACLEKDLSAAAGKSVTVRVRTLADVEAQGVVALPGHCIDDLDVSISNYEQPRPELLQCDPQRVVEEAVHSHLLKSNCPVTGQPDWGSVVVAYKGLALDHASLLSYLVSFRQHSDFHEQCVERIYLDLLRLLKPEHLTVYARYVRRGGLDINPYRSTGAISPDNQRLVRQ

SEQ ID NO: 48871 - protein, 276 aa, Pseudomonas guariconensis
  misc_feature (1)..(276): tr|A0A2N5Q9W0|A0A2N5Q9W0_9PSED NADPH-dependent 7-cyano- 7-deazaguanine reductase OS=Pseudomonas guariconensis O X=1288410 GN=queF PE=3 SV=1
MHPAAEHSPLGKSSEYIATYTPSLLFPIPRAAKWAELGVTAQTLPWQGVDYWNCFELSWLLPSGKPVVAIGEFAIPADSPNIIESKSFKLYLNSLNQTVFASTRELQACLERDLSAAAGKSVTVRVRTLADVEAQGVVALPGHCIDDLDVSISNYEQPRPELLQCDPQRVVEEAVHSHLLKSNCPVTGQPDWGSVVVAYKGLALDHASLLSYLVSFRQHSDFHEQCVERIYLDLLRLLKPEHLTVYARYVRRGGLDINPYRSTGAISPDNQRLVRQ

SEQ ID NO: 48872 - protein, 276 aa, Pseudomonas guguanensis
  misc_feature (1)..(276): tr|A0A1H0VZ70|A0A1H0VZ70_9PSED NADPH-dependent 7-cyano- 7-deazaguanine reductase OS=Pseudomonas guguanensis OX= 1198456 GN=queF PE=3 SV=1
MQHPAEHSPLGKSSQYIAEYSPELLFPISRTTKWAELSLDGANLPYRGVDYWNCYELSWLLPSGKPVVAIGEFAIPADSPNIIESKSFKLYLNSLNQTAFASWDEVQATLARDLSAVAGKPVAVRLRALAEVAAEGVATLPGQCIDELDVSVSQYAHPQPELLRCDASRVVEESLHSHLLKSNCPVTGQPDWGSLVVEYRGAALDHASLLAYLVSFRQHADFHEQCVERIFLDLQRLLQPQTLTVYARYVRRGGLDINPYRSTEATTADNTRLARQ

SEQ ID NO: 48873 - protein, 276 aa, Pseudomonas guineae
  misc_feature (1)..(276): tr|A0A1I3JQK9|A0A1I3JQK9_9PSED NADPH-dependent 7-cyano- 7-deazaguanine reductase OS=Pseudomonas guineae OX=4255 04 GN=queF PE=3 SV=1
MHPAAEDSPLGKSSEYIATYTPALLFPIPRAAKWAELGLSAETLPYQGVDFWNCFELSWLLPSGKPVVAMGEFAIPADSPNIIESKSFKLYLNSLNQSVFNTADELVVVLVKDLSAAAGKPVGVRVRSLAEVTADGVTAAPGTCIDELDVSISNYAQPQPELLRCDSARVVEESLHSHLLKSNCPVTGQPDWGTLVVQYRGLALDHASLLAYLVSFRQHADFHEQCVERIFLDLQRLLKPEHLTVYARYVRRGGLDINPYRSTGPISPDNQRLARQ

SEQ ID NO: 48874 - protein, 276 aa, Pseudomonas helleri
  misc_feature (1)..(276): tr|A0A0J6ICD8|A0A0J6ICD8_9PSED NADPH-dependent 7-cyano- 7-deazaguanine reductase OS=Pseudomonas helleri OX=1608 996 GN=queF PE=3 SV=1
MHPAAEHSPLGKSSEYISTYTPSLLFPIPRAAKWAELGLSADTLPYVGVDFWNCFELSWLLPSGKPVVAIGEFAFAADSPNIVESKSFKLYLNSLNQTVFADTPTLEATLQADLSAASGKPVRVRVRSLNDVQADGVGVLPGVCIDDLNITVSDYAHPRPELLKCDPSQVVEESMYSHLLKSNCPVTSQPDWGTVVVEYRGAALDHASLLAYLVSFRQHSDFHEQCVERIFLDLQRLLKPEKLTVYARYVRRGGLDINPYRSTEKVEFNNLRLVRQ

SEQ ID NO: 48875 - protein, 276 aa, Pseudomonas helmanticensis
  misc_feature (1)..(276): tr|A0A4R7V349|A0A4R7V349_9PSED NADPH-dependent 7-cyano- 7-deazaguanine reductase OS=Pseudomonas helmanticensis OX=1471381 GN=queF PE=3 SV=1
MHPAAEHSPLGKSSEYIATYTPSLLFPIPRTAKWAELGLTAETLPYKGVDFWNCFELSWLLPSGKPVVAIGEFSIPADSPNIIESKSFKLYLNSLNQTAFADVTSLEATLVKDLSAAAGKPVGVRVRSLKDVEAEGVVALPGMCIDDLDISVSNYEHPRPELLRCDDSRIVEETVYSHLLKSNCPVTSQPDWGTVVVEYRGSALDHASLLEYIVSFRQHSDFHEQCVERIFLDLQRLLKPEKLTVFARYVRRGGLDINPYRSTESVQLPNHRLVRQ

SEQ ID NO: 48876 - protein, 276 aa, Pseudomonas hunanensis
  misc_feature (1)..(276): tr|A0A2I0CA71|A0A2I0CA71_9PSED NADPH-dependent 7-cyano- 7-deazaguanine reductase OS=Pseudomonas hunanensis OX=1 247546 GN=queF PE=3 SV=1
MHPAAEHSPLGKSSEYIATYSPEQLFPIPRTAKWAELGVTAQTLPWLGVDFWNCFELSWLLPSGKPVVAIGEFAIPADSPNIIESKSFKLYLNSLNQTVFASLDALQACLEKDLSAAAGKPVGVKVRTLAEVEAQGVVALPGQCIDALDVAISNYEQPQPELLRCDPARVVEETLHSHLLKSNCPVTGQPDWGSVVVEYKGRALDHASLLTYLISFRQHADFHEQCVERIYLDLKNLLQPEHLTVYARYVRRGGLDINPYRSTGAISPDNKRLVRQ

SEQ ID NO: 48877 - protein, 275 aa, Pseudomonas hussainii
  misc_feature (1)..(275): tr|A0A1H7PLN8|A0A1H7PLN8_9PSED NADPH-dependent 7-cyano- 7-deazaguanine reductase OS=Pseudomonas hussainii OX=14 29083 GN=queF PE=3 SV=1
MTNDVLHSPLGKSSEYRDTYSPELLYPIPRAPKWAELGLSADALPFAGVDVWTCYELSWLAPGGKPVVAIAEFSIPAASPNIIESKSFKLYLNSLNQTRYASPNEVQDVLQRDLSAAAGAQVSVVVYRLDQAPAIQSLKGVCLDELDVAIDSYQLDARLLKLAAPSQSVVERLYSHLLKSNCPVTGQPDWGTVVIDYRGPQLDHASVLAYLVSFRQHADFHEQCVERIFCDLRALLGDGAELTVYARYVRRGGLDINPYRSTSQAAPQWGRLPRQ

SEQ ID NO: 48878 - protein, 276 aa, Pseudomonas indica
  misc_feature (1)..(276): tr|A0A1G9EN22|A0A1G9EN22_9PSED NADPH-dependent 7-cyano- 7-deazaguanine reductase OS=Pseudomonas indica OX=13765 8 GN=queF PE=3 SV=1
MHPSAEHSPLGKSSEYIAVYTPELLFPIPRAPKWAELGLSAQALPYQGVDIWTCYELSWLAPSGKPCVAIGEFAIPADSPNIIESKSFKLYLNSLNQTVFADRVELQATLERDLSSAAGKSVAVRVRNLDEVAAEGVALLPGRCIDDLDVTISRYDHPQPDLLRCDPERQVEECLYSHLLKSNCPVTGQPDWGSVVVDYRGPALDPASLLAYLVSFRQHADFHEQCVERVYLDLLRLLRPERLTVYARYVRRGGLDINPYRSTDAVQPDNRRLVRQ

SEQ ID NO: 48879 - protein, 276 aa, Pseudomonas indoloxydans
  misc_feature (1)..(276): tr|A0A2T5PGM2|A0A2T5PGM2_9PSED NADPH-dependent 7-cyano- 7-deazaguanine reductase OS=Pseudomonas indoloxydans OX =404407 GN=queF PE=3 SV=1
MQHPAEHSPLGKSSQYIAEYSPELLFPISRTTKWAELGLEGANLPYQGVDYWNCYELSWLLPSGKPVVAIGEFAIPADSPNIIESKSFKLYLNSLNQSAFTSWDELQATLVHDLSTVAGKPVAVRLRSLTEVAEEGVATLPGQCIDELDISVSQYDHPQPELLRCDADRVVEESLHSHLLKSNCPVTGQPDWGSLVVEYRGAALDHASLLAYLVSFRQHADFHEQCVERIFLDLQRLLQPQALTVYARYVRRGGLDINPYRSTEALTPENGRLARQ

SEQ ID NO: 48880 - protein, 276 aa, Pseudomonas japonica
  misc_feature (1)..(276): tr|A0A239I7B1|A0A239I7B1_9PSED NADPH-dependent 7-cyano- 7-deazaguanine reductase OS=Pseudomonas japonica OX=256 466 GN=queF PE=3 SV=1
MHPAAEHSPLGKSSEYVSTYTPSLLFPIPRLAKWAELGVSGDSLPWHGVDFWNCFELSWLLSSGKPVVAIGEFAIPADSPNIIESKSFKLYLNSLNQTVFESPAALQACLEKDLSAAAGKPVGVRIRGLDEVTGEGVISLPGQCIDDLDVSISNYEQPQPELLRCNKEKQVDQVLHSHLLKSNCPVTGQPDWGSVVVEYRGPELDAASLLTYLISFRQHADFHEQCVERIWLDLKRLLDPEHLTVYARYVRRGGLDINPYRSTGPVDVDNRRLVRQ

SEQ ID NO: 48881 - protein, 276 aa, Pseudomonas jessenii
  misc_feature (1)..(276): tr|A0A2W0EYC2|A0A2W0EYC2_9PSED NADPH-dependent 7-cyano- 7-deazaguanine reductase OS=Pseudomonas jessenii OX=772 98 GN=queF PE=3 SV=1
MHPAAEHSPLGKSSEYIATYTPSLLFPIPRTAKWAELGLTAQTLPYKGVDFWNCFELSWLLPSGKPVVAIGEFSIPADSPNIIESKSFKLYLNSLNQTPFTDTASLEATLAKDLSTAAGKPVGVRIRSLKDVESEGVVALPGVCIDELDISVSNYEHPRPELLRCDDSRIVEESVHSHLLKSNCPVTSQPDWGSVAVEYRGAALDHASLLEYIVSFRQHSDFHEQCVERIFLDLQRLLKPEKLTVYARYVRRGGLDINPYRSTEEVQLPNHRLVRQ

SEQ ID NO: 48882 - protein, 276 aa, Pseudomonas jessenii
  misc_feature (1)..(276): tr|A0A5C4KSW9|A0A5C4KSW9_9PSED NADPH-dependent 7-cyano- 7-deazaguanine reductase OS=Pseudomonas jessenii OX=772 98 GN=queF PE=3 SV=1
MHPAAEHSPLGKSSEYIATYTPSLLFPIPRTAKWAELGLTAETLPYKGVDFWNCFELSWLLPSGKPVVAIGEFSIPADSPNIIESKSFKLYLNSLNQTPFADIASLEATLVKDLSAAAGKPVGVRVRSLKDVEAEGVVALPGVCIDDLDISVSNYEHPRPELLRCDDSKIVEESVHSHLLKSNCPVTSQPDWGSVVVEYRGAALDHASLLEYIVSFRQHSDFHEQCVERIFLDLQRLLKPEKLTVFARYVRRGGLDINPYRSTEAVQLPNHRLVRQ

SEQ ID NO: 48883 - protein, 276 aa, Pseudomonas jinjuensis
  misc_feature (1)..(276): tr|A0A1H0E4U8|A0A1H0E4U8_9PSED NADPH-dependent 7-cyano- 7-deazaguanine reductase OS=Pseudomonas jinjuensis OX=1 98616 GN=queF PE=3 SV=1
MHHPAEHSPLGKSSEYVSTYSPELLFPISRATKWAELGLSAETLPYRGVDIWNCYELSWLTPSGKPVVAIGEFAIPADSPNIIESKSFKLYLNSLNQSAFESPEALRVVLERDLSAAAGKSVGVRVRGLDEVADEGVAKLAGTCIDDLDVTVESYDHPRPELLRCDDTQRVDEVLYSHLLKSNCPVTGQPDWGTLVVEYHGPALDPASLLAYVISFRQHQDFHEQCVERIFLDLQRLLQPSRLTVHARYVRRGGLDINPYRSTEDVRPDNRRLVRQ

SEQ ID NO: 48884 - protein, 276 aa, Pseudomonas kairouanensis
  misc_feature (1)..(276): tr|A0A4Z0AXF5|A0A4Z0AXF5_9PSED NADPH-dependent 7-cyano- 7-deazaguanine reductase OS=Pseudomonas kairouanensis O X=2293832 GN=queF PE=3 SV=1
MHPAAEHSPLGKSSEYISTYTPSLLFPIPRAAKWAELGLSAQTLPYKGVDFWNCFELSWLLPSGKPVVAIGEFSIPADSPNIIESKSFKLYLNSLNQTAFADSASLEATLRTDLSAAAGKPVSVRIRSLAEIEAEGVMALPGVCIDGLDISVSNYEHPRPELLRCDDSRVVEESVHSHLLKSNCPVTSQPDWGSVVVEYRGSALDHASLLEYIVSFRQHSDFHEQCVERIFLDLQRLLKPEKLTVYARYVRRGGLDINPYRSTEDVGFQNVRLARQ

SEQ ID NO: 48885 - protein, 276 aa, Pseudomonas kilonensis
  misc_feature (1)..(276): tr|A0A2U1BU20|A0A2U1BU20_9PSED NADPH-dependent 7-cyano- 7-deazaguanine reductase OS=Pseudomonas kilonensis OX=1 32476 GN=queF PE=3 SV=1
MHPAAEHSPLGKSSEYIATYTPSLLFPIPRAAKWAELGLTAETLPYKGVDFWNCFELSWLLPSGKPVVAIGEFAIPADSPNIIESKSFKLYLNSLNQTPFADTASLETTLRQDLSAAAGKAVGVRIRSLKDVEREGIVALPGTCIDDLDISVDSYAHPRPELLRCDASRIVEQSLHSHLLKSNCPVTSQPDWGSVAVEYRGAALDPASLLAYIVSFRQHSDFHEQCVERIFLDLQRLLKPEKLTVYARYVRRGGLDINPYRSTEDVQLPNHRLVRQ

SEQ ID NO: 48886 - protein, 276 aa, Pseudomonas kilonensis
  misc_feature (1)..(276): tr|A0A0F4XG53|A0A0F4XG53_9PSED NADPH-dependent 7-cyano- 7-deazaguanine reductase OS=Pseudomonas kilonensis OX=1 32476 GN=queF PE=3 SV=1
MHPAAEHSPLGKSSEYIATYTPSLLFPIPRTAKWAELGLTAETLPYKGVDFWNCFELSWLLPSGKPVVAIGEFAIPADSPNIIESKSFKLYLNSLNQTPFADTASLEATLRQDLSAAAGKAVGVRIRSLKDVEHEGIVALPGSCIDDLDISVDSYAHPRPELLRCDASRIVEQSLHSHLLKSNCPVTSQPDWGSVAVEYRGAALDPASLLAYIVSFRQHSDFHEQCVERIFLDLQRLLKPEKLTVYARYVRRGGLDINPYRSTEDVQLPNHRLVRQ

SEQ ID NO: 48887 - protein, 276 aa, Pseudomonas knackmussii
  misc_feature (1)..(276): tr|A0A024HK18|A0A024HK18_PSEKB NADPH-dependent 7-cyano- 7-deazaguanine reductase OS=Pseudomonas knackmussii (st rain DSM 6978 / LMG 23759 / B13) OX=1301098 GN=queF PE= 3 SV=1
MQHPAEHSPLGKSSEYVSTYSPELLFPISRATKWAELGLDGSNLPYQGVDIWNCYELSWLTPGGKPVVAIGEFAIPAASPNIIESKSFKLYLNSLNQSPFDSREAVKAVLVRDLSAAAGAPVAVRLRSLDEVAEEGVARLPGRCVDELDVTVESYDHPRPELLRCNDAQRVDEVLYSHLLKSNCPVTGQPDWGTLVVDYSGPALDPASLLAYVVSFRQHQDFHEQCVERIYLDLQRLLQPSRLTVYARYVRRGGLDINPYRSSEAVVADNRRLVRQ

SEQ ID NO: 48888 - protein, 276 aa, Pseudomonas koreensis
  misc_feature (1)..(276): tr|A0A142NCB6|A0A142NCB6_9PSED NADPH-dependent 7-cyano- 7-deazaguanine reductase OS=Pseudomonas koreensis OX=19 8620 GN=queF PE=3 SV=1
MHPAAEHSPLGKSSEYIATYTPSLLFPIPRTAKWAELGLTAETLPYKGVDFWNCFELSWLLPSGKPVVAIAEFSIPADSPNIIESKSFKLYLNSLNQTPFADVATLQATLVKDLSAAAGKPVGVRVRSLKDVEAEGVVGLPGVCIDDLDISVSNYEHPRPELLRCDDSRIVEESVHSHLLKSNCPVTSQPDWGSVVVEYRGAALDHASLLEYIVSFRQHSDFHEQCVERIFLDLQRLLKPEKLTVFARYVRRGGLDINPYRSTESVQLPNHRLVRQ

SEQ ID NO: 48889 - protein, 276 aa, Pseudomonas koreensis
  misc_feature (1)..(276): tr|A0A4U3EKS3|A0A4U3EKS3_9PSED NADPH-dependent 7-cyano- 7-deazaguanine reductase OS=Pseudomonas koreensis OX=19 8620 GN=queF PE=3 SV=1
MHPAAEHSPLGKSSEYIATYTPSLLFPIPRTAKWAELGLTAETLPYKGVDFWNCFELSWLLPSGKPVVAIGEFSIPADSPNIIESKSFKLYLNSLNQTAFADVTSLEATLVKDLSAAAGKPVGVRVRSLKDVEAEGVVALPGVCIDDLDISVSNYEHPRPELLRCDESRVVEETVYSHLLKSNCPVTSQPDWGTVVVEYRGSALDHASLLEYIVSFRQHSDFHEQCVERIFLDLQRLLKPEKLTVFARYVRRGGLDINPYRSTESVQLPNHRLVRQ

SEQ ID NO: 48890 - protein, 276 aa, Pseudomonas kribbensis
  misc_feature (1)..(276): tr|A0A4Y8VGE5|A0A4Y8VGE5_9PSED NADPH-dependent 7-cyano- 7-deazaguanine reductase OS=Pseudomonas kribbensis OX=1 628086 GN=queF PE=3 SV=1
MHPAAEHSPLGKSSEYIATYTPSLLFPIPRTAKWAELGLTAETLPYKGVDFWNCFELSWLLPSGKPVVAIGEFSIPADSPNIIESKSFKLYLNSLNQTPFADTASLEATLVKDLSAAAGKPVGVRVRSLKEVEAEGVVALPGVCIDDLDISVSNYEHPRPELLRCDDSRVVEESVHSHLLKSNCPVTSQPDWGSVVVEYRGAALDHASLLEYIVSFRQHSDFHEQCVERIFLDLQRLLKPEKLTVFARYVRRGGLDINPYRSTESAQLPNHRLVRQ

SEQ ID NO: 48891 - protein, 276 aa, Pseudomonas kribbensis
  misc_feature (1)..(276): tr|A0A345RTA7|A0A345RTA7_9PSED NADPH-dependent 7-cyano- 7-deazaguanine reductase OS=Pseudomonas kribbensis OX=1 628086 GN=queF PE=3 SV=1
MHPAAEHSPLGKSSEYIATYTPSLLFPIPRTAKWAELGLTAETLPYKGVDFWNCFELSWLLPSGKPVVAIGEFSIPADSPNIIESKSFKLYLNSLNQTPFADTASLEATLVKDLSAAAGKPVGVRVRSLKEVEAEGVVALPGVCIDDLDISVSNYEHPRPELLRCDDSRVVEESVHSHLLKSNCPVTSQPDWGSVVVEYRGAALDHASLLEYIVSFRQHSDFHEQCVERIFLDLQRLLKPEKLTVFARYVRRGGLDINPYRSTESVQLPNHRLVRQ

SEQ ID NO: 48892 - protein, 276 aa, Pseudomonas kunmingensis
  misc_feature (1)..(276): tr|A0A1I3K5C1|A0A1I3K5C1_9PSED NADPH-dependent 7-cyano- 7-deazaguanine reductase OS=Pseudomonas kunmingensis OX =1211807 GN=queF PE=3 SV=1
MQHPAEHSPLGKSSDYVATYSPHLLFPIPRAPKWAELGLTAETLPYQGVDLWNCYELSWLLPSGKPVVAIGEFEIPADSPSIIESKSFKLYLNSLNQSVFESREALAEVMSSDLSAAAGKPVKVRLRTLDEVAAEGVATLPGRCVDDLDVTIEHYDHPQAGLLACDAGHMVEESLHSHLLKSNCPVTGQPDWGSVVVEYRGAALQAESLLAYLVSFRQHADFHEQCVERIFLDLQRLLQPEKLTVYARYVRRGGLDINPYRSTEAMVVDNRRLVRQ

SEQ ID NO: 48893 - protein, 276 aa, Pseudomonas kunmingensis
  misc_feature (1)..(276): tr|A0A2N8SBT9|A0A2N8SBT9_9PSED NADPH-dependent 7-cyano- 7-deazaguanine reductase OS=Pseudomonas kunmingensis OX =1211807 GN=queF PE=3 SV=1
MQHPAEHSPLGKSSDYVATYSPHLLFPIPRAPKWAELGLTAETLPYQGVDLWNCYELSWLLPSGKPVVAIGEFEIPADSPSIIESKSFKLYLNSLNQSVFESREALAVVMSSDLSAAAGKPVKVRLRTLDEVAAEGVATLPGRCVDDLDVTIEHYDHPQPGLLACDAGHMVEESLHSHLLKSNCPVTGQPDWGSVVVEYRGAALQAESLLAYLVSFRQHADFHEQCVERIFLDLQRLLQPEKLTVYARYVRRGGLDINPYRSTEAMVVDNRRLVRQ

SEQ ID NO: 48894 - protein, 276 aa, Pseudomonas kuykendallii
  misc_feature (1)..(276): tr|A0A2W5F0Y8|A0A2W5F0Y8_9PSED NADPH-dependent 7-cyano- 7-deazaguanine reductase OS=Pseudomonas kuykendallii OX =1007099 GN=queF PE=3 SV=1
MQHPAEHSPLGKSSEYVSTYTPSLLFPIPRAPKWAELGLTAQSLPYSGVDYWNCYELSWLTVSGKPVVAVGEFAIPADSPNIIESKSFKLYLNSLNQTRFASRDEVQALLVRDLSAAAGATVAVTLKTLGRVAQEGIVEPAGVCIDELDVEIDDFSRPRAELLRCNADEVIEESFHSHLLKSNCPVTGQPDWGTLVVQYRGPKLDHACFLAYLVSFRQHSDFHEQCVERIYLDLLDLLQPECLSVHARYVRRGGLDINPYRSNHATTFDNRRLARQ

SEQ ID NO: 48895 - protein, 276 aa, Pseudomonas kuykendallii
  misc_feature (1)..(276): tr|A0A1H3B8G2|A0A1H3B8G2_9PSED NADPH-dependent 7-cyano- 7-deazaguanine reductase OS=Pseudomonas kuykendallii OX =1007099 GN=queF PE=3 SV=1
MQHPAEHSPLGKSSEYVSTYTPSLLFPIPRAPKWAELGLTAQSLPYSGVDYWNCYELSWLTVSGKPVVAVGEFAIPADSPNIIESKSFKLYLNSLNQTRFASGDELQALLARDLSAAAGATVAVTLKTLGRVAEEGIAEPAGVCIDELDVEIDDFSRPRAELLRCNADEVIEESFHSHLLKSNCPVTGQPDWGTLVVEYCGPKLDHARFLAYLVSFRQHSDFHEQCVERIYLDLLDLLQPERLSVHARYVRRGGLDINPYRSNHATTFDNRRLARQ

SEQ ID NO: 48896 - protein, 276 aa, Pseudomonas lactis
  misc_feature (1)..(276): tr|A0A0R3CK60|A0A0R3CK60_9PSED NADPH-dependent 7-cyano- 7-deazaguanine reductase OS=Pseudomonas lactis OX=16156 74 GN=queF PE=3 SV=1
MHPAAEHSPLGKSSEYISTYTPSLLFPIPRAAKWAELGLSAETLPYKGVDFWNCFELSWLLPSGKPVVAIGEFSIPADSPNIIESKSFKLYLNSLNQTAFAETQSLEATLRTDLSFSAGKPVSVRIRSLADIEAEGVMALPGVCIDGLDINVSSYEHPRPELLRCDDSRVVEESVHSHLLKSNCPVTSQPDWGSVVVEYRGAALDHASLLEYIVSFRQHSDFHEQCVERIFLDLQRLLKPEKLTVYARYVRRGGLDINPYRSTENTQFLNVRLARQ

SEQ ID NO: 48897 - protein, 276 aa, Pseudomonas lactis
  misc_feature (1)..(276): tr|I4K2U4|I4K2U4_9PSED NADPH-dependent 7-cyano-7-deazag uanine reductase OS=Pseudomonas lactis OX=1615674 GN=qu eF PE=3 SV=1
MHPAAEHSPLGKSSEYISTYTPSLLFPIPRAAKWAELGLSAETLPYKGVDFWNCFELSWLLPSGKPVVAIGEFSIPADSPNIIESKSFKLYLNSLNQTAFADTQSLEATLRTDLSAAAGKPVSVRIRSLADIEAEGVMALPGVCIDDLDINVSSYEHPRPELLRCDDSRVVEESVHSHLLKSNCPVTSQPDWGSVVVEYRGAALDHASLLEYIVSFRQHSDFHEQCVERIFLDLQRLLKPEKLTVYARYVRRGGLDINPYRSTENTQFLNVRLARQ

SEQ ID NO: 48898 - protein, 276 aa, Pseudomonas laurylsulfatiphila
  misc_feature (1)..(276): tr|A0A2S6FK05|A0A2S6FK05_9PSED NADPH-dependent 7-cyano- 7-deazaguanine reductase OS=Pseudomonas laurylsulfatiph ila OX=2011015 GN=queF PE=3 SV=1
MHPAAEHSPLGKSSEYIATYTPSLLFPIPRTAKWAELGLTAETLPYKGVDFWNCFELSWLLPSGKPVVAIGEFSIPADSPNIIESKSFKLYLNSLNQTPFTDTASLEATLVKDLSAAAGKPVGVRIRSLKDVEREGVVALPGLCIDELDISVSNYEHPRPELLRCDDSRMVEESVHSHLLKSNCPVTSQPDWGSVAVEYRGAALDHASLLEYIVSFRQHSDFHEQCVERIFLDLQRLLKPEKLTVYARYVRRGGLDINPYRSTEAVQLPNHRLVRQ

SEQ ID NO: 48899 - protein, 276 aa, Pseudomonas laurylsulfativorans
  misc_feature (1)..(276): tr|A0A2S3VQL4|A0A2S3VQL4_9PSED NADPH-dependent 7-cyano- 7-deazaguanine reductase OS=Pseudomonas laurylsulfativo rans OX=1943631 GN=queF PE=3 SV=1
MHPAAEHSPLGKSSEYIATYTPSLLFPIPRTAKWAELGLTAQTLPYKGVDFWNCFELSWLLPSGKPVVAIGEFSIPADSPNIIESKSFKLYLNSLNQTPFADTASLEATLAKDLSAAAGKPVGVRIRSLKEVESEGVVALPGVCIDELDISVSNYEHPRPELLRCDDSRIVEESVHSHLLKSNCPVTSQPDWGSVAVEYRGAALDHASLLEYIVSFRQHSDFHEQCVERIFLDLQRLLKPEKLTVYARYVRRGGLDINPYRSTEEVQLPNHRLVRQ

SEQ ID NO: 48900 - protein, 276 aa, Pseudomonas libanensis
  misc_feature (1)..(276): tr|A0A0R2Y6M3|A0A0R2Y6M3_9PSED NADPH-dependent 7-cyano- 7-deazaguanine reductase OS=Pseudomonas libanensis OX=7 5588 GN=queF PE=3 SV=1
MHPAAEHSPLGKSSEYISTYTPSLLFPIPRAAKWAELGLSADTLPYKGVDFWNCFELSWLLPSGKPVVAIGEFSIPADSPNIIESKSFKLYLNSLNQTAFIDTPSLEATLRTDLSFAAGKPVNVRIRSLADIEAEGVMALPGACIDGLDISVSNYEHPRPELLRCDDSRVVEESVHSHLLKSNCPVTSQPDWGSVVVDYRGAALDHASLLEYIVSFRQHSDFHEQCVERIFLDLQRLLKPEKLTVYARYVRRGGLDINPYRSTENTQFLNVRLARQ

SEQ ID NO: 48901 - protein, 276 aa, Pseudomonas lini
  misc_feature (1)..(276): tr|A0A423IM54|A0A423IM54_9PSED NADPH-dependent 7-cyano- 7-deazaguanine reductase OS=Pseudomonas lini OX=163011 GN=queF PE=3 SV=1
MHPAAEHSPLGKSSEYIATYTPSLLFPIPRTAKWAELGLTAETLPYKGVDFWNCFELSWLLPSGKPVVAIGEFSIPADSPNIIESKSFKLYLNSLNQTAFADTASLEATLAKDLSAAAGKPVGVRIRSLKDVEAEGVVALPGVCIDDLDISVSNYEQPRPELLRCDESLIIEESVHSHLLKSNCPVTSQPDWGSVAVEYRGAALDHASLLEYIVSFRQHSDFHEQCVERIFLDLQRLLKPEKLTVYARYVRRGGLDINPYRSTEDVQLPNHRLVRQ

SEQ ID NO: 48902 - protein, 276 aa, Pseudomonas lini
  misc_feature (1)..(276): tr|A0A0J6H902|A0A0J6H902_9PSED NADPH-dependent 7-cyano- 7-deazaguanine reductase OS=Pseudomonas lini OX=163011 GN=queF PE=3 SV=1
MHPAAEHSPLGKSSEYIATYTPSLLFPIPRTAKWAELGLTAETLPYKGVDFWNCFELSWLLPSGKPVVAIGEFSIPADSPNIIESKSFKLYLNSLNQTAFADTASLEATLAKDLSAAAGKPVGVRIRSLKDVEAEGVVALPGVCIDDLDISVSNYEHPRPELLRCDESLIIEECVHSHLLKSNCPVTSQPDWGSVAVEYRGAALDHASLLEYIVSFRQHSDFHEQCVERIFLDLQRLLKPEKLTVYARYVRRGGLDINPYRSTEEVQLPNHRLVRQ

SEQ ID NO: 48903 - protein, 276 aa, Pseudomonas linyingensis
  misc_feature (1)..(276): tr|A0A1H7CRC0|A0A1H7CRC0_9PSED NADPH-dependent 7-cyano- 7-deazaguanine reductase OS=Pseudomonas linyingensis OX =915471 GN=queF PE=3 SV=1
MAQDVHHSPLGKTTEYVAEYAPELLFPIPRAPKWIELGIDPAALPFQGVDLWNCYELSWLTEKGKPVVAIGEFAIPAHSPCIIESKSFKLYLNSLNQTRFAGREALVEVLARDLSAAAGAPVAVRVRSLDEVAAEGVTRPAGECIDEQDIAIDHYGPPDAGLLVCDRSRLVSETLHSQLLKSNCPVTGQPDWGTVVIDYAGPALDRAALLAYVVSLRMHGDFHEQCVERIYLDLKALLQPERLTVHARYVRRGGLDINPYRSTHAVSPDNRRLVRQ

SEQ ID NO: 48904 - protein, 277 aa, Pseudomonas litoralis
  misc_feature (1)..(277): tr|A0A1H1NS64|A0A1H1NS64_9PSED NADPH-dependent 7-cyano- 7-deazaguanine reductase OS=Pseudomonas litoralis OX=79 7277 GN=queF PE=3 SV=1
MHPAEQSPLGKTTSYNGIYTPSLLYPIPRQPIWHGLGLDPENLPFHGVDVWNSYEVSWLTPSGKPEVAAVEFIFPVTASGRIVESKSFKLYLNSLNQTVFSDRSDVLRTLESDLSVTAQAPVMVRLLNMGRLQQEGIARLPGECLDDLDIAVDVYEYTPSLLQRVSGGGWARETLHSHLLKSNCPVTGQPDWGSVMISYAGPAIDKAGLLRYLVSFRQHADFHEQCVERIFLDLQRLLGDGCELTVYARYLRRGGLDINPWRSTKAGVPDNMRLARQ

SEQ ID NO: 48905 - protein, 276 aa, Pseudomonas lundensis
  misc_feature (1)..(276): tr|A0A266N7L8|A0A266N7L8_9PSED NADPH-dependent 7-cyano- 7-deazaguanine reductase OS=Pseudomonas lundensis OX=86 185 GN=queF PE=3 SV=1
MHPAAEHSPLGKSSEYISTYTPSLLFPIPRAAKWAELGLSAETLPYVGVDYWTCFELSWLLPSGKPVVAIGEFCFAADSPNIVESKSFKLYLNSLNQTVFTDTSSLLETLTSDLSEASGKPVIVRVRTLDEVQADGVGVLPGVCIDGLDITVSDYAQPRPELLECDDSQVIEESVYSHLLKSNCPVTSQPDWGTVVVQYRGAALDHASLLAYLVSFRQHSDFHEQCVERIFLDLQRLLKPEKLTVYARYVRRGGLDINPYRSTETVEFNNVRLVRQ

SEQ ID NO: 48906 - protein, 276 aa, Pseudomonas lundensis
  misc_feature (1)..(276): tr|A0A1D9IHY8|A0A1D9IHY8_9PSED NADPH-dependent 7-cyano- 7-deazaguanine reductase OS=Pseudomonas lundensis OX=86 185 GN=queF PE=3 SV=1
MHPAAEHSPLGKSSEYISTYTPSLLFPIPRAAKWAELGLSAETLPYVGVDFWTCFELSWLLPSGKPVVAIGEFCFAADSPNIVESKSFKLYLNSLNQTVFPDTSSLLETLTSDLSEASGKPVIVRVRTLDEVQADGVGVLPGVCIDGLDITVSDYAQPRPELLKCDASHVVEESVYSHLLKSNCPVTSQPDWGTVVVQYRGAALDHASLLAYLVSFRQHSDFHEQCVERIFLDLQRLLKPEALTVYARYVRRGGLDINPYRSTETAEFKNLRLVRQ

SEQ ID NO: 48907 - protein, 276 aa, Pseudomonas lurida
  misc_feature (1)..(276): tr|A0A2A9D827|A0A2A9D827_9PSED NADPH-dependent 7-cyano- 7-deazaguanine reductase OS=Pseudomonas lurida OX=24456 6 GN=queF PE=3 SV=1
MHPAAEHSPLGKSSEYISTYTPSLLFPIPRAAKWAELGLSAETLPYKGVDFWNCFELSWLLPSGKPVVAIGEFSIPADSPNIIESKSFKLYLNSLNQTAFADTASLEATLRTDLSAAAGKPVSVRIRRLAEIEAEGVMALPGVCIDDLDIRVSNYEHPRPELLRCDDSRVVEESVHSHLLKSNCPVTSQPDWGSVVVEYRGHALDHASLLEYIVSFRQHSDFHEQCVERIFLDLQRLLKPQTLTVYARYVRRGGLDINPYRSTEDVAFQNVRLARQ

SEQ ID NO: 48908 - protein, 276 aa, Pseudomonas lutea
  misc_feature (1)..(276): tr|A0A098T177|A0A098T177_9PSED NADPH-dependent 7-cyano- 7-deazaguanine reductase OS=Pseudomonas lutea OX=243924 GN=queF PE=3 SV=1
MHPAAEHSPLGKSSEYIATYTPSLLFPIPRAAKWAELGLTAETLPYQGVDFWNCYELSWLLPSGKPVVAIGEFSIPADSPNIIESKSFKLYLNSLNQTAFASRDELVVTLERDLSAAAGKPVGVRIRSLNDIEAEGIVAVPGVCIDDLDVKITSYDRPQPELLHCDESRVVDDALHSHLLKSNCPVTSQPDWGSVAVEYRGAALDHASFLAYIVSFRQHSDFHEQCVERIFMDLQRLLKPEKLTVYARYVRRGGLDINPYRSTEGLTLENGRLARQ

SEQ ID NO: 48909 - protein, 277 aa, Pseudomonas luteola
  misc_feature (1)..(277): tr|A0A427I567|A0A427I567_PSELU NADPH-dependent 7-cyano- 7-deazaguanine reductase OS=Pseudomonas luteola OX=4788 6 GN=queF PE=3 SV=1
MQTVDHSPLGKTSEYVDIYTPSLLYPIPRSPKWTELGLTRETLPYCGMDIWTCYELSWLNSKGKPVAAIAEFSIPANSPNIIESKSFKLYLNSLNQTTFEGPEALTEVLTRDLSQAAGDHVGVLVKPIDLVAREGFVTPSGSCIDELDIEVQHYDVPRPDLLKALPGQLVKESLYSHLLRSNCPVTGQPDWGSVVIEYKGRAVLDRASLLAYIISFRRHADFHEQCVERMFLDLRSVLEPESLTVYARYVRRGGLDINPYRSTHAAHLPVAGRLARQ

SEQ ID NO: 48910 - protein, 277 aa, Pseudomonas luteola
  misc_feature (1)..(277): tr|A0A2X2CLV7|A0A2X2CLV7_PSELU NADPH-dependent 7-cyano- 7-deazaguanine reductase OS=Pseudomonas luteola OX=4788 6 GN=queF PE=3 SV=1
MQTVDHSPLGKTSEYVDIYTPSLLYPIPRSPKWTELGLTRETLPYCGMDIWTCYELSWLNSKGKPVAAIAEFSIPANSPNIIESKSFKLYLNSLNQTTFEGPEALTEVLTRDLSQAAGDHVGVLVKPVDLVAREGFVTPPGSCIDELDIEVQHYDVPRPDLLKALPGQLVKESLYSHLLRSNCPVTGQPDWGSVVIEYEGRAVLDRASLLAYIISFRRHADFHEQCVERMFLDLRSVLEPESLTVYARYVRRGGLDINPYRSTHAAHLPVAGRLARQ

SEQ ID NO: 48911 - protein, 276 aa, Pseudomonas mandelii
  misc_feature (1)..(276): tr|A0A5C5QTV6|A0A5C5QTV6_9PSED NADPH-dependent 7-cyano- 7-deazaguanine reductase OS=Pseudomonas mandelii OX=756 12 GN=queF PE=3 SV=1
MHPAAEHSPLGKSSEYIATYTPSLLFPIPRTAKWAELGLTAQTLPYKGVDFWNCFELSWLLPSGKPVVAIGEFSIPADSPNIIESKSFKLYLNSLNQTPFADSATLEATLVKDLSAAAGKPVGVRIRSLKDVEAEGVVALPGVCIDDLEISVSNYEHPRPELLRCDDSRIVEESVHSHLLKSNCPVTSQPDWGSVAVEYRGAALDHASLLEYIVSFRQHSDFHEQCVERIFLDLQRLLKPERLTVYARYVRRGGLDINPYRSTEDVQLPNHRLVRQ

SEQ ID NO: 48912 - protein, 276 aa, Pseudomonas mandelii
  misc_feature (1)..(276): tr|A0A059KTX4|A0A059KTX4_9PSED NADPH-dependent 7-cyano- 7-deazaguanine reductase OS=Pseudomonas mandelii PD30 O X=1419583 GN=queF PE=3 SV=1
MHPAAEHSPLGKSSEYIATYTPSLLFPIPRTAKWAELGLTAETLPYKGVDFWNCFELSWLLPSGKPVVAIGEFTIPADSPNIIESKSFKLYLNSLNQTPFADTASLEATLAKDLSAAAGKPVGVRIRSLKDVEAEGVVALPGVCIDDLDISVSNYEHPRPELLRCDESRIVEESVHSHLLKSNCPVTSQPDWGSVAVEYRGAALDHASLLEYIVSFRQHSDFHEQCVERIFLDLQRLLKPEKLTVYARYVRRGGLDINPYRSTEDVQLPNHRLVRQ

SEQ ID NO: 48913 - protein, 276 aa, Pseudomonas marginalis
  misc_feature (1)..(276): tr|A0A3M5PN18|A0A3M5PN18_PSEMA NADPH-dependent 7-cyano- 7-deazaguanine reductase OS=Pseudomonas marginalis pv. marginalis OX=97473 GN=queF PE=3 SV=1
MHPAAEHSPLGKSSEYISTYTPSLLFPIPRAAKWAELGLSAETLPYKGVDFWNCFELSWLLPSGKPVVAIGEFSIPADSPNIIESKSFKLYLNSLNQTAFADTHSLEATLRADLSAAAGKPVTVRIRRLAEIEAEGVMALPGVCIDDLDINVSSYEHPRPELLRCDDSRIVEESVHSHLLKSNCPVTSQPDWGSVVVEYRGHALDRASLLEYIVSFRQHSDFHEQCVERIFLDLQRLLKPEKLTVYARYVRRGGLDINPYRSTEDVAFQNVRLARQ

SEQ ID NO: 48914 - protein, 276 aa, Pseudomonas marginalis
  misc_feature (1)..(276): tr|A0A0W0M1Q9|A0A0W0M1Q9_PSEMA NADPH-dependent 7-cyano- 7-deazaguanine reductase OS=Pseudomonas marginalis ICMP 11289 OX=1198318 GN=queF PE=3 SV=1
MHPAAEHSPLGKSSEYIATYTPSLLFPIPRAAKWAELGLTAETLPYRGVDFWNCYELSWLLPSGKPVVAIAEFSIPADSPNIIESKSFKLYLNSLNQTAFETREQLQVTLEKDLSAAAGKPVGVRIRSLDEIEREGVAALPGVCIDDLDISVSSYDRPQPELLRCDESRIVEESVYSHLLKSNCPVTSQPDWGSVVVEYRGAALDHASLLAYIVSFRQHSDFHEQCVERIFLDLQRLLKPEKLTVYARYVRRGGLDINPYRSTEVLDVENGRLARQ

SEQ ID NO: 48915 - protein, 276 aa, Pseudomonas marincola
  misc_feature (1)..(276): tr|A0A1I6XC10|A0A1I6XC10_9PSED NADPH-dependent 7-cyano- 7-deazaguanine reductase OS=Pseudomonas marincola OX=43 7900 GN=queF PE=3 SV=1
MHHSAENSPLGKSSEYIATYSPQLLFPIPRAPKWAELGLTAETLPYQGVDFWNCFELSWLLPSGKPVVAMAEFAIPADSPNIIESKSFKLYLNSLNQSVFADADAVAAVMVKDLSAAAGKPVAVRVRSLNEVAAEGVAQLPGTCIDELDVAISNYAQPRPELLACDAQRVVSETVYSNLLKSNCPVTGQPDWGTVVIEYRGPAIDQASLLAYLVSFRQHADFHEQCVERIFLDLQRLLKPESLTVYARYVRRGGLDINPYRSTSPIAPDNRRLVRQ

SEQ ID NO: 48916 - protein, 276 aa, Pseudomonas mediterranea
  misc_feature (1)..(276): tr|A0A0A4GG50|A0A0A4GG50_9PSED NADPH-dependent 7-cyano- 7-deazaguanine reductase OS=Pseudomonas mediterranea CF BP 5447 OX=1348058 GN=queF PE=3 SV=1
MHPAAEHSPLGKSSEYIATYTPSLLFPIPRTAKWAELGLTADTLPYKGVDFWNCFELSWLLPSGKPVVAIGEFAIPADSPNIIESKSFKLYLNSLNQTPFADTASLEATLRQDLSAAAGKPVQVRVRSLKDVEQEGVVALPGVCIDDLDISVDSYAHPRPELLQCDESRIVEESLHSHLLKSNCPVTSQPDWGSVVVEYRGAALDPASLLAYIVSFRQHSDFHEQCVERIFLDLKRLLKPEKLTVYARYVRRGGLDINPYRSTESVQLPNHRLVRQ

SEQ ID NO: 48917 - protein, 276 aa, Pseudomonas meliae
  misc_feature (1)..(276): tr|A0A0P9V5S7|A0A0P9V5S7_9PSED NADPH-dependent 7-cyano- 7-deazaguanine reductase OS=Pseudomonas meliae OX=86176 GN=queF PE=3 SV=1
MHPAAEHSPLGKSSEYIATYTPSLLFPIPRAAKWAELGLTAQTLPYQGVDFWNCYELSWLLPSGKPVVAIAEFSIPADSPNIIESKSFKLYLNSLNQTAFATVEHVQTTLEQDLSTAAGKPIGVRIRSLSDIEGEGVATLPGVCIDDLDITVSSYDRPQPELLRCDESQIIEESVHSHLLKSNCPVTSQPDWGSVVVEYRGAALDHSSLLAYIVSFRQHSDFHEQCVERIFLDLQRLLKPEKLTVYARYVRRGGLDINPYRSTETLDVNNRRLARQ

SEQ ID NO: 48918 - protein, 276 aa, Pseudomonas mendocina
  misc_feature (1)..(276): sp|A4XTL9|QUEF_PSEMY NADPH-dependent 7-cyano-7-deazagua nine reductase OS=Pseudomonas mendocina (strain ymp) OX =399739 GN=queF PE=3 SV=1
MQHPAEHSPLGKSSQYIAEYSPELLFPISRTSKWAELGLDGANLPYQGVDYWNCYELSWLLPSGKPVVAIGEFAIPADSPNIIESKSFKLYLNSLNQTVFASWGELQATLARDLSAVAGKPVAVRLRSLTEVAGEGVATLPGQCIDELEISVTQYAHPQPELLRCDASRVVEESLHSHLLKSNCPVTGQPDWGSLVVQYRGAALDHASLLAYLVSFRQHADFHEQCVERIFLDLQRLLQPQSLTVYARYVRRGGLDINPYRSTEALRVDNARLVRQ

SEQ ID NO: 48919 - protein, 276 aa, Pseudomonas mendocina
  misc_feature (1)..(276): tr|A0A291K6S2|A0A291K6S2_PSEME NADPH-dependent 7-cyano- 7-deazaguanine reductase OS=Pseudomonas mendocina OX=30 0 GN=queF PE=3 SV=1
MQHPAEHSPLGKSSQYIAEYSPELLFPISRTSKWAELGLDGANLPYQGVDYWNCYELSWLLPSGKPVVAIGEFAIPADSPNIIESKSFKLYLNSLNQTVFASWGELQATLARDLSAVAGKPVAVRLRSLAEVAGEGVATLPGQCIDELEISVTQYAHPQPELLRCDASRVVEESLHSHLLKSNCPVTGQPDWGSLVVQYRGAALDHASLLAYLVSFRQHADFHEQCVERIFLDLQRLLQPQSLTVYARYVRRGGLDINPYRSTEALRVDNARLVRQ

SEQ ID NO: 48920 - protein, 274 aa, [Pseudomonas] mesoacidophila
  misc_feature (1)..(274): tr|A0A2A4FGI5|A0A2A4FGI5_9BURK NADPH-dependent 7-cyano- 7-deazaguanine reductase OS=[Pseudomonas] mesoacidophil a OX=265293 GN=queF PE=3 SV=1
MNPEHSPLGKATVYANQYDASLLFPIPRAGARAQIGITSALPFFGTDIWNAYELSWLNARGKPQVAVATFYVPAESPNIVESKSFKLYLGAFAQTKFESIDAVRDALKRDVSAACGASVSVQLVSPHDFGKLEMDELDGLSLDRLDLDTDIYEPDPSLLTAAHDEAPVEETLVSDLLRSNCPVTGQPDWGSVQIHYVGPQIDHAGLLRYIISFRNHTGFHEQCVERIFLDILHACKPVKLAVYARYTRRGGLDINPFRTNYNQPMPDNARTARQ

SEQ ID NO: 48921 - protein, 276 aa, [Pseudomonas] mesoacidophila
  misc_feature (1)..(276): tr|A0A2A4F7U8|A0A2A4F7U8_9BURK NADPH-dependent 7-cyano- 7-deazaguanine reductase OS=[Pseudomonas] mesoacidophil a OX=265293 GN=queF PE=3 SV=1
MNSLSNQGTLELGKQSKYESIYNPEKLYAIPRTIKREEIGITDTLPFFGVDVWNHYEVSWLTPRGVPRVAIATIVVPCTSPNVIESKSMKLYFNTFNNTSFESREEVERIAANDLSRCAGAPVSVTLESLEYAAALQIGAPVGASIDEQDIDIAQFSVDRQLLATHDEHVSETLYSNLLKSNCLVTGQPDWGTVSIEYEGRRIDRDALLRYVVSFRNHEEFHEQCVERIFKDIQDQCAPARLTVSARYTRRGGLDINPVRSSAPVQDVPNTRLIRQ

SEQ ID NO: 48922 - protein, 276 aa, Pseudomonas migulae
  misc_feature (1)..(276): tr|A0A1H5IAU9|A0A1H5IAU9_9PSED NADPH-dependent 7-cyano- 7-deazaguanine reductase OS=Pseudomonas migulae OX=7854 3 GN=queF PE=3 SV=1
MHPAAEHSPLGKSSEYIATYTPSLLFPIPRTAKWAELGLTAETLPYKGVDFWNCFELSWLLPSGKPVVAIGEFSIPADSPNIIESKSFKLYLNSLNQTPFTDTASLEATLVKDLSAAAGKPVGVRIRSLKDVEAEGVVALPGVCIDDLEISVSNYEHPRPELLRCDESRIVEESVHSHLLKSNCPVTSQPDWGSVAVEYRGAALDHASLLEYIVSFRQHSDFHEQCVERIFLDLQRLLKPEKLTVYARYVRRGGLDINPYRSTETVQLPNHRLVRQ

SEQ ID NO: 48923 - protein, 276 aa, Pseudomonas mohnii
  misc_feature (1)..(276): tr|A0A1H4PEW9|A0A1H4PEW9_9PSED NADPH-dependent 7-cyano- 7-deazaguanine reductase OS=Pseudomonas mohnii OX=39560 0 GN=queF PE=3 SV=1
MHPAAEHSPLGKSSEYIATYTPSLLFPIPRTAKWAELGLTAETLPYKGVDFWNCFELSWLLPSGKPVVAIGEFSIPADSPNIIESKSFKLYLNSLNQTPFADTASLEATLVKDLSAAAGKPVGVRIRSLKDVEAEGVVALPGVCIDELDISVSNYEHPRPELLRCDESRIVEESVHSHLLKSNCPVTRQPDWGSVAVEYRGAALDHASLLEYIVSFRQHSDFHEQCVERIFLDLQRLLKPEKLTVYARYVRRGGLDINPYRSTEEVQLPNHRLVRQ

SEQ ID NO: 48924 - protein, 276 aa, Pseudomonas monteilii
  misc_feature (1)..(276): tr|V9UWP2|V9UWP2_9PSED NADPH-dependent 7-cyano-7-deazag uanine reductase OS=Pseudomonas monteilii SB3101 OX=143 5058 GN=queF PE=3 SV=1
MHPAAEHSPLGKSSEYIATYSPELLFPIPRTAKWAELGVTAQTLPWQGVDYWNCFELSWLLPSGKPVVAIGEFAIPADSPNIIESKSFKLYLNSLNQTVFASLGELQACLEKDLSAAAGKPVGVKVRTLAEVEAQGVVALPGQCIDELDVAISNYEQPQPELLRCNPEQQVEETLHSHLLKSNCPVTGQPDWGSVVVEYKGRALDHASLLTYLISFRQHADFHEQCVERIYLDLKNLLQPEHLTVYARYVRRGGLDINPYRSTGAISPDNMRLVRQ

SEQ ID NO: 48925 - protein, 276 aa, Pseudomonas monteilii
  misc_feature (1)..(276): tr|A0A2L2L5D8|A0A2L2L5D8_9PSED NADPH-dependent 7-cyano- 7-deazaguanine reductase OS=Pseudomonas monteilii OX=76 759 GN=queF PE=3 SV=1
MHPAAEHSPLGKSSEYIATYSPEQLFPIPRTAKWAELGVTAQTLPWQGVDYWNCFELSWLLPSGKPVVAIGEFAIPADSPNIIESKSFKLYLNSLNQTVFASLGELQACLEKDLSAAAGKPVGVKVRTLAEVEAQGVVALPGLCIDALDVAISNYEQPQPELLRCDPERVVEEILHSHLLKSNCPVTGQPDWGSVVVEYKGRALDHASLLTYLISFRQHADFHEQCVERIYLDLKNLLQPEHLTVYARYVRRGGLDINPYRSTGAISPQNTRLVRQ

SEQ ID NO: 48926 - protein, 276 aa, Pseudomonas moorei
  misc_feature (1)..(276): tr|A0A1H1CGN3|A0A1H1CGN3_9PSED NADPH-dependent 7-cyano- 7-deazaguanine reductase OS=Pseudomonas moorei OX=39559 9 GN=queF PE=3 SV=1
MHPAAEHSPLGKSSEYIATYTPSLLFPIPRTAKWAELGLTAETLPYKGVDFWNCFELSWLLPSGKPVVAIAEFSIPADSPNIIESKSFKLYLNSLNQTPFANTASLEATLVKDLSAAAGKPVGVRIRSLKDVEAEGVVALPGVCIDELDISVSNYEHPRPELLRCDETRIVEESVHSHLLKSNCPVTSQPDWGSVAVEYRGAALDHASLLEYIVSFRQHSDFHEQCVERIFLDLQRLLKPEKLTVYARYVRRGGLDINPYRSTEEVQLPNHRLVRQ

SEQ ID NO: 48927 - protein, 276 aa, Pseudomonas moorei
  misc_feature (1)..(276): tr|A0A4Q7H6I5|A0A4Q7H6I5_9PSED NADPH-dependent 7-cyano- 7-deazaguanine reductase OS=Pseudomonas moorei OX=39559 9 GN=queF PE=3 SV=1
MHPAAEHSPLGKSSEYIATYTPSLLFPIPRTAKWAELGLTAETLPYKGVDFWNCFELSWLLPSGKPVVAIGEFSIPADSPNIIESKSFKLYLNSLNQTPFADTASLEATLVKDLSAAAGKPVGVRIRSLKEVEAEGVVALPGVCIDELDISVSNYEHPRPELLRCDETRIVEESVHSHLLKSNCPVTRQPDWGSVAVEYRGAALDHASLLEYIVSFRQHSDFHEQCVERIFLDLQRLLKPEKLTVYARYVRRGGLDINPYRSTEEVQLSNHRLVRQ

SEQ ID NO: 48928 - protein, 276 aa, Pseudomonas moraviensis
  misc_feature (1)..(276): tr|V8R4Y6|V8R4Y6_9PSED NADPH-dependent 7-cyano-7-deazag uanine reductase OS=Pseudomonas moraviensis R28-S OX=13 95516 GN=queF PE=3 SV=1
MHPAAEHSPLGKSSEYIATYTPSLLFPIPRTAKWAELGLTAETLPYKGVDFWNCFELSWLLPSGKPVVAIAEFSIPADSPNIIESKSFKLYLNSLNQTPFADVATLQATLVKDLSAAAGKPVGVRVRSLKDVEAEGVVALPGVCIDDLDISVSNYEHPRPELLRCDDSRIVEESVHSHLLKSNCPVTSQPDWGSVVVEYRGAALDHASLLEYIVSFRQHSDFHEQCVERIFLDLQRLLKPEKLTVFARYVRRGGLDINPYRSTEEVQLPNHRLVRQ

SEQ ID NO: 48929 - protein, 276 aa, Pseudomonas moraviensis
  misc_feature (1)..(276): tr|A0A1Q3ICC2|A0A1Q3ICC2_9PSED NADPH-dependent 7-cyano- 7-deazaguanine reductase OS=Pseudomonas moraviensis OX= 321662 GN=queF PE=3 SV=1
MHPAAEHSPLGKSSEYIATYTPSLLFPIPRTAKWAELGLTAETLPYKGVDFWNCFELSWLLPSGKPVVAIAEFSIPADSPNIIESKSFKLYLNSLNQTPFADVATLQATLVKDLSAAAGKPVGVRVRSLKDVEAEGVVGLPGVCIDDLDISVSNYEHPRPELLRCDDSRIVEESVHSHLLKSNCPVTSQPDWGSVVVEYRGAALDHASLLEYIVSFRQHSDFHEQCVERIFLDLQRLLKPQKLTVFARYVRRGGLDINPYRSTEEVQLPNHRLVRQ

SEQ ID NO: 48930 - protein, 276 aa, Pseudomonas mosselii
  misc_feature (1)..(276): tr|A0A290HP21|A0A290HP21_9PSED NADPH-dependent 7-cyano- 7-deazaguanine reductase OS=Pseudomonas mosselii OX=783 27 GN=queF PE=3 SV=1
MHPAAEHSPLGKSSEYIATYTPSLLFPIPRLAKWAELGVSGDALPWQGVDFWNCFELSWLLPSGKPVVAIGEFAIPCDSPNIIESKSFKLYLNSLNQTVFESVAALQACLVQDLSAAAGKPVAVKVSTLAEVEGQGVTTLPGQCIDALDVNISNYEQPQPELLRCAPERVVEETVHSHLLKSNCPVTGQPDWGSVVVEYKGRALDHASLLTYLISFRQHADFHEQCVERIYLDLKNLLKPEHLTVYARYVRRGGLDINPYRSTGAINPQNLRLVRQ

SEQ ID NO: 48931 - protein, 276 aa, Pseudomonas mosselii
  misc_feature (1)..(276): tr|A0A1X1P252|A0A1X1P252_9PSED NADPH-dependent 7-cyano- 7-deazaguanine reductase OS=Pseudomonas mosselii OX=783 27 GN=queF PE=3 SV=1
MHPAAEHSPLGKSSEYIATYTPSLLFPIPRLAKWAELGVSADALPWQGVDFWNCFELSWLLPSGKPVVAIGEFAIPCDSPNIIESKSFKLYLNSLNQTVFESVAALQACLVQDLSAAAGKPVAVKVSTLAEVEGQGVTTLPGQCIDALDVNISNYEQPQPELLRCAPERVVEETVHSHLLKSNCPVTGQPDWGSVVVEYKGRALDHASLLTYLISFRQHADFHEQCVERIYLDLKNLLKPEHLTVYARYVRRGGLDINPYRSTGAINPQNLRLVRQ

SEQ ID NO: 48932 - protein, 276 aa, Pseudomonas mucidolens
  misc_feature (1)..(276): tr|A0A1H2M3G2|A0A1H2M3G2_9PSED NADPH-dependent 7-cyano- 7-deazaguanine reductase OS=Pseudomonas mucidolens OX=4 6679 GN=queF PE=3 SV=1
MHPAAEHSPLGKSSEYISTYTPSLLFPIPRAAKWAELGLTAETLPYKGVDFWNCFELSWLLPSGKPVVAIGEFSIAADSPNIIESKSFKLYLNSLNQTPFADVQSLETTLRTDLSAAAGKPVGVRIRSLGDVEGEGVVALPGVCIDDLDISVSNYEQPRPELLRCDDSRVVEESVHSHLLKSNCPVTSQPDWGSVAVEYCGSALDHASLLEYLVSFRQHSDFHEQCVERIFLDLQRLLKPSKLTVYARYVRRGGLDINPYRSTEDMAFQNQRLVRQ

SEQ ID NO: 48933 - protein, 276 aa, Pseudomonas nabeulensis
  misc_feature (1)..(276): tr|A0A4Z0BC39|A0A4Z0BC39_9PSED NADPH-dependent 7-cyano- 7-deazaguanine reductase OS=Pseudomonas nabeulensis OX= 2293833 GN=queF PE=3 SV=1
MHPAAEHSPLGKSSEYISTYTPSLLFPIPRAAKWAELGLSAETLPYKGVDFWNCFELSWLLPSGKPVVAIGEFSIPADSPNIIESKSFKLYLNSLNQTAFADTASLEAVLRTDLSAAAGKPVDVRIRRLAEIEAEGVMALPGVCIDELDINVSSYEHPRPELLRCDDSRIVEESVHSHLLKSNCPVTSQPDWGSVVVEYRGSALDHASLLEYIVSFRQHSDFHEQCVERIFLDLQRLLKPEKLTVYARYVRRGGLDINPYRSTEDVAFQNVRLARQ

SEQ ID NO: 48934 - protein, 276 aa, Pseudomonas nitroreducens
  misc_feature (1)..(276): tr|A0A239AZM6|A0A239AZM6_9PSED NADPH-dependent 7-cyano- 7-deazaguanine reductase OS=Pseudomonas nitroreducens O X=46680 GN=queF PE=3 SV=1
MQHPAEHSPLGKSSEYVSTYAPELLFPISRSTKWAELGLTADTLPYQGVDLWNCYELSWLTASGKPVVAIGEFSIPAQSPNIIESKSFKLYLNSLNQTAFDSAEAVRAVMERDLSTAAGAPVGVRVRSLDEVAGEGVAVIEGTCVDDLDVAVESYDHPRPELLSCDDTRRVDEVLYSHLLKSNCPVTGQPDWGTLVVEYAGPALDAASLLAYVVSFRQHQDFHEQCVERIYLDLQRLLQPTRLTVYARYVRRGGLDINPYRSSEAVQPDNRRLVRQ

SEQ ID NO: 48935 - protein, 276 aa, Pseudomonas nitroreducens
  misc_feature (1)..(276): tr|A0A246F527|A0A246F527_9PSED NADPH-dependent 7-cyano- 7-deazaguanine reductase OS=Pseudomonas nitroreducens O X=46680 GN=queF PE=3 SV=1
MQHPAEHSPLGKSSEYVSTYAPELLFPISRTTKWAELGLTAETLPYQGVDLWNCYELSWLTASGKPVVAIGEFAIPAQSPNIIESKSFKLYLNSLNQTAFDNADAVRAVLERDLSAAAGAPVGVRVRGLDEVAGEGVAVIEGTCVDDLDVAVESYDHPRPELLRCDDTRRVEEVLYSHLLKSNCPVTGQPDWGTLVVDYTGPALDAASLLAYVVSFRQHQDFHEQCVERIYLDLQRLLQPARLTVYARYVRRGGLDINPYRSSEAVQPDNRRLVRQ

SEQ ID NO: 48936 - protein, 278 aa, Pseudomonas oceani
  misc_feature (1)..(278): tr|A0A2P4EU38|A0A2P4EU38_9PSED NADPH-dependent 7-cyano- 7-deazaguanine reductase OS=Pseudomonas oceani OX=17087 83 GN=queF PE=3 SV=1
MTDHPATESPLGKSSAYISVYTPSLLYPISRLPKWQELGLDPQQLPFHGADIWNCFELSWLTPSGKPVVAAAEFVFPIKAARIVESKSFKLYLNSLNQTVFRDRHDLLKTLETDLSVAAQGPVMVRLLSMQQLHQAGLFMLPGTCIDDLDVEVSSYSYDPSLLSLAASAGPVTEVLHSHLLKSNCPVTGQPDWGSVQISYSGPALDHASLVRYLVSFRQHSDFHEQCVERIFLDILKLLGEGATLTVYARYVRRGGLDINPWRSTQPGMPENLRLARQ

SEQ ID NO: 48937 - protein, 276 aa, Pseudomonas oleovorans
  misc_feature (1)..(276): tr|A0A379JWS5|A0A379JWS5_PSEOL NADPH-dependent 7-cyano- 7-deazaguanine reductase OS=Pseudomonas oleovorans OX=3 01 GN=queF PE=3 SV=1
MQHPAEHSPLGKSSQYIAEYSPELLFPISRTTKWAELGLEGANLPYQGVDYWNCYELSWLLPSGKPVVAIGEFAIPADSPNIIESKSFKLYLNSLNQSAFASWDELQATLVHDLSTVAGKPVAVRLRSLTEVAEEGVATLPGQCIDELDISVSQYDHPQPELLRCDADRVVEESLHSHLLKSNCPVTGQPDWGSLVVEYRGAALDHASLLAYLVSFRQHADFHEQCVERIFLDLQRLLQPQALTVYARYVRRGGLDINPYRSTEALTPENGRLARQ

SEQ ID NO: 48938 - protein, 276 aa, Pseudomonas oleovorans
  misc_feature (1)..(276): tr|A0A2S7FJ61|A0A2S7FJ61_PSEOL NADPH-dependent 7-cyano- 7-deazaguanine reductase OS=Pseudomonas oleovorans OX=3 01 GN=queF PE=3 SV=1
MQHPAEHSPLGKSSQYIAEYSPELLFPISRTTKWAELGLDGTSLPYQGVDYWNCYELSWLLPSGKPVVAIGEFAIPADSPNIIESKSFKLYLNSLNQSAFASWDELQATLVRDLSAVAGKPVAVRLRSLAEVSEEGVATLPGQCIDELDVSVSQYDHPQPELLRCDAGRVVDESLHSHLLKSNCPVTGQPDWGSLVVEYRGAALDHASLLAYLVSFRQHADFHEQCVERIFLDLQRLLQPQSLTVYARYVRRGGLDINPYRSTEAIKPENGRLARQ

SEQ ID NO: 48939 - protein, 276 aa, Pseudomonas orientalis
  misc_feature (1)..(276): tr|A0A0R3A1R9|A0A0R3A1R9_9PSED NADPH-dependent 7-cyano- 7-deazaguanine reductase OS=Pseudomonas orientalis OX=7 6758 GN=queF PE=3 SV=1
MHPAAEHSPLGKSSEYICTYTPSLLFPIPRAAKWAELGLNAETLPYKGVDFWNCFELSWLLPSGKPVVAIGEFSIPADSPNIIESKSFKLYLNSLNQTAFADTHQLEETLRNDLGAAAGKPVSVRIRSLADIEAEGVMALPGVCIDELDINVSSYEHPRPELLRCDDSRVVEESVHSHLLKSNCPVTSQPDWGSVVVEYRGAALDHASLLEYLVSFRQHSDFHEQCVERIFLDLQRLLKPEKLTVYARYVRRGGLDINPYRSTEDVDFQNVRLARQ

SEQ ID NO: 48940 - protein, 276 aa, Pseudomonas orientalis
  misc_feature (1)..(276): tr|A0A3G7XUM0|A0A3G7XUM0_9PSED NADPH-dependent 7-cyano- 7-deazaguanine reductase OS=Pseudomonas orientalis OX=7 6758 GN=queF PE=3 SV=1
MHPAAEHSPLGKSSEYISTYTPSLLFPIPRAAKWAELGLSAETLPYKGVDFWNCFELSWLLPSGKPVVAIGEFSIPADSPNIIESKSFKLYLNSLNQTAFADTRQLEETLRNDLGAAAGKPVGVRIRSLADIEAEGVMALPGVCIDELDINASSYEHPRPELLRCDDSRVVEESVHSHLLKSNCPVTSQPDWGSVVVEYRGAALDHASLLEYLVSFRQHSDFHEQCVERIFLDLQRLLKPEKLTVYARYVRRGGLDINPYRSTEDVAFQNVRLARQ

SEQ ID NO: 48941 - protein, 279 aa, Pseudomonas oryzae
  misc_feature (1)..(279): tr|A0A1H1NDA3|A0A1H1NDA3_9PSED NADPH-dependent 7-cyano- 7-deazaguanine reductase OS=Pseudomonas oryzae OX=13928 77 GN=queF PE=3 SV=1
MAQDVHHSPLGKTTEYVAEYAPELLFPIPREPKWRELGIDPQALPFQGVDLWNCYELSWLNAKGKPLVAIGEFAIPAHSPCIIESKSFKLYLNSLNQTRFASREALVEVLARDLSAAAGAPVAVRVRTLDEVAEEGVAHPAGECLDDQDIAIDCYGPPDAGLLLCDRSRPVSEVLYSHLLKSNCPVTGQPDWGTVVIDYVGPALDRAALLAYMVSLRMHGDFHEQCVERIYLDLKALLAPERLTVHARYVRRGGWTSIPTAAPTRSAWTTDAWFASKHA

SEQ ID NO: 48942 - protein, 275 aa, Pseudomonas oryzihabitans
  misc_feature (1)..(275): tr|A0A0U4WPW1|A0A0U4WPW1_9PSED NADPH-dependent 7-cyano- 7-deazaguanine reductase OS=Pseudomonas oryzihabitans O X=47885 GN=queF PE=3 SV=1
MHSVEQSPLGKSTEYVSQYAPTLLYPIPRAPKWAELGLHGQSLPFRGVDVWTCYELSWLLPSGKPVVAIAEFAIPADSPNIIESKSFKLYLNSLNQSVFASMAELEAVLVKDLSEAAGGAVGVSLVSLDAWTTRGVQRPDGQCVDDLDVSVDRYAHPQADLLSVGEARDSQRFYSHLLKSNCPVTGQPDWGTVVVEYAEGLALDPESLLRYLVAFRQHADFHEQCVERIYLDLWRLLKPVKLTVFARYVRRGGLDINPYRSSDAIQPAAERYVRQ

SEQ ID NO: 48943 - protein, 275 aa, Pseudomonas oryzihabitans
  misc_feature (1)..(275): tr|A0A2Z5A8X6|A0A2Z5A8X6_9PSED NADPH-dependent 7-cyano- 7-deazaguanine reductase OS=Pseudomonas oryzihabitans O X=47885 GN=queF PE=3 SV=1
MHSVEQSPLGKSTEYVSQYAPSLLYPIPRAPKWAELGLDGQNLPFRGVDVWTCYELSWLLPSGKPVVAIGEFAIPADSPNIIESKSFKLYLNSLNQSMFASLAELEAVLVKDLSAAAGGSVGVSLVSLDDWTARGVQRPAGQCVDELDISLARYAHPQAELLRVGEASDSRKFYSHLLKSNCPVTGQPDWGTVVIDYEEGLALEPASLLRYLVAFRQHADFHEQCVERIYLDLWRLLKPAKLTVFARYVRRGGLDINPYRSSDAIQPAAERYVRQ

SEQ ID NO: 48944 - protein, 276 aa, Pseudomonas otitidis
  misc_feature (1)..(276): tr|A0A1I0TW85|A0A1I0TW85_9PSED NADPH-dependent 7-cyano- 7-deazaguanine reductase OS=Pseudomonas otitidis OX=319 939 GN=queF PE=3 SV=1
MQHPAEHSPLGKSSEYISTYSPQLLFPISRVAKWSELGLTAETLPYKGVDFWNCYELSWLTPSGKPVVAIGEFAIPADSPNIIESKSFKLYLNSLNQSAFATVAELVAVLEKDLSAAAGAEVKVRVRSLAEVEAEGVARAAGICIDDLDVSIDHYDHPQPELLRADAAEVVEEALHSHLLKSNCPVTGQPDWGTLVVQYKGARLDHASFLAYLVSFRQHCDFHEQCVERVFLDLLRLLEPEHLTVQARYVRRGGLDINPYRSTHPISPDNGRLVRQ

SEQ ID NO: 48945 - protein, 278 aa, Pseudomonas pachastrellae
  misc_feature (1)..(278): tr|A0A1S8DKV1|A0A1S8DKV1_9PSED NADPH-dependent 7-cyano- 7-deazaguanine reductase OS=Pseudomonas pachastrellae O X=254161 GN=queF PE=3 SV=1
MFDHPATGSPLGKSSAYVSVYTPSLLFPIPRQPKWQELGLDAQQLPFHGADIWNCFELSWLTPSGKPEVAAAEFVFPIKAARIVESKSFKLYLNSLNQTVFRDRRELLETLESDLSVAAQGPVAVRLFNMQQLHQLGMLTLPGRCIDDLDVSVSQYHYDASLLALDASGVQVNETLHSHLLKSNCPVTGQPDWGSVLISYSGPRIDEAALVRYLVSFREHSDFHEQCVERVFLDLLTLLGEGAKLTVYARYVRRGGLDINPWRSTEPGMPENLRLARQ

SEQ ID NO: 48946 - protein, 276 aa, Pseudomonas palleroniana
  misc_feature (1)..(276): tr|A0A2L1JH50|A0A2L1JH50_9PSED NADPH-dependent 7-cyano- 7-deazaguanine reductase OS=Pseudomonas palleroniana OX =191390 GN=queF PE=3 SV=1
MHPAAEHSPLGKSSEYISTYTPSLLFPIPRAAKWAELGLIAETLPYKGVDFWNCFELSWLLPSGKPVVAIGEFSIPADSPNIIESKSFKLYLNSLNQTAFADIQGLEATLRDDLSAAAGKPVTVRIRSLAEIEAEGVMALPGVCIDGLDISVSNYEHPRPELLRCDDSRIVEESVHSHLLKSNCPVTSQPDWGSVVVEYRGAALDHASLLEYIVSFRQHSDFHEQCVERIFLDLQRLLKPEKLTVYARYVRRGGLDINPYRSTENVTFQNVRLARQ

SEQ ID NO: 48947 - protein, 276 aa, Pseudomonas palleroniana
  misc_feature (1)..(276): tr|A0A1H5GHS2|A0A1H5GHS2_9PSED NADPH-dependent 7-cyano- 7-deazaguanine reductase OS=Pseudomonas palleroniana OX =191390 GN=queF PE=3 SV=1
MHPAAEHSPLGKSSEYISTYTPSLLFPIPRAAKWAELGLSAETLPYKGVDFWNCFELSWLLPSGKPVVAIGEFSIPADSPNIIESKSFKLYLNSLNQTAFADIQGLEATLRDDLSAAAGKPVTVRIRSLAEIEGEGVMALPGVCIDGLDISVSNYEHPRPELLRCDDSRIVEESVHSHLLKSNCPVTSQPDWGSVVVEYRGSALDHASLLEYIVSFRQHSDFHEQCVERIFLDLQRLLKPEKLTVYARYVRRGGLDINPYRSTENVTFQNVRLARQ

SEQ ID NO: 48948 - protein, 276 aa, Pseudomonas panacis
  misc_feature (1)..(276): tr|A0A1H4PNY6|A0A1H4PNY6_PSEPA NADPH-dependent 7-cyano- 7-deazaguanine reductase OS=Pseudomonas panacis OX=3072 51 GN=queF PE=3 SV=1
MHPAAEHSPLGKSSEYISTYTPSLLFPIPRAAKWAELGLSAETLPYTGVDFWNCFELSWLLPSGKPVVAIGEFSIAADSPNIIESKSFKLYLNSLNQTVFADTQSLEATLRTDLSAAAGKPVGVRVRSLAEVEAEGVVALPGVCIDDLDISVSNYEHPRPELLRCDDSRIVEESVYSHLLKSNCPVTSQPDWGSVAVQYRGAQLDHASLLEYLVSFRQHSDFHEQCVERIFLDLQRLLKPEKLTVYARYVRRGGLDINPYRSTEAVPFQNLRLARQ

SEQ ID NO: 48949 - protein, 276 aa, Pseudomonas panipatensis
  misc_feature (1)..(276): tr|A0A1G8CT13|A0A1G8CT13_9PSED NADPH-dependent 7-cyano- 7-deazaguanine reductase OS=Pseudomonas panipatensis OX =428992 GN=queF PE=3 SV=1
MQHPAEHSPLGKSSEYVSTYAPELLFPIARATKWAELGLSAQTLPYRGVDIWNCYELSWLTRGGKPVVAIGEFTIPADSPNIIESKSFKLYLNSLNQSAFDSREALREVLARDLSAAAGAPVGVRLRSLDEVAADGIASLPGTCVDDLDVTVERYDQPRPELLRCDDTRRVDEVLYSHLLKSNCPVTGQPDWGTLVVEYSGPALDPVSLLAYLVSFRQHQDFHEQCVERIYLDLQRLLQPSRLTVYARYVRRGGLDINPYRSSDSIVPDNRRLVRQ

SEQ ID NO: 48950 - protein, 276 aa, Pseudomonas parafulva
  misc_feature (1)..(276): tr|A0A497UBR2|A0A497UBR2_9PSED NADPH-dependent 7-cyano- 7-deazaguanine reductase OS=Pseudomonas parafulva OX=15 7782 GN=queF PE=3 SV=1
MHPAAEHSPLGKSSEYIATYTPSLLFPIPRTAKWAELGLTAETLPYKGVDFWNCFELSWLLPSGKPVVAIGEFSIPADSPNIIESKSFKLYLNSLNQTPFADIASLEATLVKDLSAAAGKPVGVRVRSLKEVEAEGVVALPGVCIDDLDISVSNYEHPRPELLRCDDSRIVEESVHSHLLKSNCPVTSQPDWGSVVVEYRGAALDHASLLEYIVSFRQHSDFHEQCVERIFLDLQRLLKPEKLTVFARYVRRGGLDINPYRSTEAVQLPNHRLVRQ

SEQ ID NO: 48951 - protein, 276 aa, Pseudomonas parafulva
  misc_feature (1)..(276): tr|A0A0A7JPC8|A0A0A7JPC8_9PSED NADPH-dependent 7-cyano- 7-deazaguanine reductase OS=Pseudomonas parafulva OX=15 7782 GN=queF PE=3 SV=1
MHPAAEHSPLGKSSEYIAIYTPSLLFPIPRAAKWAELGVTAQTLPWQGVDYWNCFELSWLLPSGKPVVAIGEFAIPADSPNIIESKSFKLYLNSLNQTVFASAEELVACLEQDLSAAAGKPVRVRVRSLDDVQNEGVMALPGQCIDSRDVTISHYGEPQPELLRCDPDRVVEETLHSHLLKSNCPVTGQPDWGSVMVEYKGRALDPASLLTYLVSFRQHADFHEQCVERIYLDLLRLLQPEHLTVYARYVRRGGLDINPYRSTAPISPRNGRLVRQ

SEQ ID NO: 48952 - protein, 276 aa, Pseudomonas paralactis
  misc_feature (1)..(276): tr|A0A0R3AFN1|A0A0R3AFN1_9PSED NADPH-dependent 7-cyano- 7-deazaguanine reductase OS=Pseudomonas paralactis OX=1 615673 GN=queF PE=3 SV=1
MHPAAEHSPLGKSSEYISTYTPSLLFPIPRAAKWAELGLSADTLPYKGVDFWNCFELSWLLPSGKPVVAIGEFSIPADSPNIIESKSFKLYLNSLNQTAFVDTQSLEATLQTDLSAAAGKPVAVRIRSLADIEAEGVMALPGVCIDELDINVSSYEHPRPELLRCDDSRVVEESVHSHLLKSNCPVTSQPDWGSVVVEYRGAALDHASLLEYIVSFRQHSDFHEQCVERIFLDLQRLLKPEKLTVYARYVRRGGLDINPYRSTENTQFLNVRLARQ

SEQ ID NO: 48953 - protein, 278 aa, Pseudomonas pelagia
  misc_feature (1)..(278): tr|A0A2A4ARA7|A0A2A4ARA7_9PSED NADPH-dependent 7-cyano- 7-deazaguanine reductase OS=Pseudomonas pelagia OX=5531 51 GN=queF PE=3 SV=1
MDQHPAEQSPLGKSSVYVSVYTPSLLFPIAREPKWLQLELDPEHLPFHGADIWNCYELSWLSPSGKPEVAAAEFIFPIKAKRIVESKSFKLYLNSFNQTVFRDRAEVLHTLESDLSVAAQGPVMVRLFGMNQLYHVGMSQLPGECIDDLPVAVSQYTYDPTLLELAEAGGLARESLHSHLLKSNCPVTGQPDWGSIMLSYSGKRLDHASVLRYLVSFRQHSDFHEQCVERIFCDVLALLGRGAELTVYARYVRRGGLDINPYRSTSASFPDNLRLARQ

SEQ ID NO: 48954 - protein, 276 aa, Pseudomonas peli
  misc_feature (1)..(276): tr|A0A1G4PB04|A0A1G4PB04_9PSED NADPH-dependent 7-cyano- 7-deazaguanine reductase OS=Pseudomonas peli OX=592361 GN=queF PE=3 SV=1
MHPAAEDSPLGKSSEYIATYTPSLLFPIPRAAKWAELGLSAETLPYQGVDFWNCFELSWLLPSGKPVVAMGEFAIPADSPNIIESKSFKLYLNSLNQSVFSSADELVTVLVRDLSAAAGKPVGVRVRSLAEVTADGVQAAPGICIDELDVAISNYAQPQPELLRCDAARVVEESLHSHLLKSNCPVTGQPDWGTLVVEYRGLALDHASLLAYLVSFRQHADFHEQCVERIFLDLQRLLKPEHLTVYARYVRRGGLDINPYRSSGPISPDNQRLVRQ

SEQ ID NO: 48955 - protein, 276 aa, Pseudomonas plecoglossicida; identical to SEQ ID NO: 48924
  misc_feature (1)..(276): tr|A0A0B5K850|A0A0B5K850_9PSED NADPH-dependent 7-cyano- 7-deazaguanine reductase OS=Pseudomonas plecoglossicida OX=70775 GN=queF PE=3 SV=1

SEQ ID NO: 48956 - protein, 276 aa, Pseudomonas plecoglossicida
  misc_feature (1)..(276): tr|A0A2R7URC3|A0A2R7URC3_9PSED NADPH-dependent 7-cyano- 7-deazaguanine reductase OS=Pseudomonas plecoglossicida OX=70775 GN=queF PE=3 SV=1
MHPAAEHSPLGKSSEYIATYSPELLFPIPRTAKWAELGVTAQTLPWQGVDYWNCFELSWLLPSGKPVVAIGEFAIPADSPNIIESKSFKLYLNSLNQTVFASPGELQACLEKDLSAAAGKPVGVKVRTLAEVEAQGVVALPGQCIDALDVAISNYEQPQPGLLRCNPEQQVEETLHSHLLKSNCPVTGQPDWGSLVVEYKGRGLDHASLLTYLISFRQHADFHEQCVERIYLDLKNLLQPEHLTVYARYVRRGGLDINPYRSTGAISPDNKRLVRQ

SEQ ID NO: 48957 - protein, 276 aa, Pseudomonas poae
  misc_feature (1)..(276): tr|A0A3Q9DA08|A0A3Q9DA08_9PSED NADPH-dependent 7-cyano- 7-deazaguanine reductase OS=Pseudomonas poae OX=200451 GN=queF PE=3 SV=1
MHPAAEHSPLGKSSEYISTYTPSLLFPIPRAAKWAELGLSAETLPYKGVDFWNCFELSWLLPSGKPVVAIGEFSIPADSPNIIESKSFKLYLNSLNQTAFVDTASLEATLRTDLSAAAGKPVLVRIRQLAEIEAEGVMALPGVCIDDLDINVSSYEHPRPELLRCDDSRIVEESVHSHLLKSNCPVTSQPDWGSVVVEYRGSALDHASLLEYIVSFRQHSDFHEQCVERIFLDLQRLLKPEKLTVYARYVRRGGLDINPYRSTEDVAFQNVRLARQ

SEQ ID NO: 48958 - protein, 276 aa, Pseudomonas poae
  misc_feature (1)..(276): tr|A0A2S9ETR9|A0A2S9ETR9_9PSED NADPH-dependent 7-cyano- 7-deazaguanine reductase OS=Pseudomonas poae OX=200451 GN=queF PE=3 SV=1
MHPAAEHSPLGKSSEYISTYTPSLLFPIPRAAKWAELGLSAETLPYKGVDFWNCFELSWLLPSGKPVVAIGEFSIPADSPNIIESKSFKLYLNSLNQTAFADTASLEGVLRTDLSAAAGKPVDVRIRSLAEIEAEGVMALPGECIDELDINVSSYEHPRPELLRCDDSRIVEESVHSHLLKSNCPVTSQPDWGSVVVEYRGSALDHASLLEYIVSFRQHSDFHEQCVERIFLDLQRLLKPEKLTVYARYVRRGGLDINPYRSTEDVAFQNVRLARQ

SEQ ID NO: 48959 - protein, 276 aa, Pseudomonas pohangensis
  misc_feature (1)..(276): tr|A0A1H2FHM4|A0A1H2FHM4_9PSED NADPH-dependent 7-cyano- 7-deazaguanine reductase OS=Pseudomonas pohangensis OX= 364197 GN=queF PE=3 SV=1
MQHPAEHSPLGKSSEYTSQYAPGLLFPIARSTKWAELGLHAGNLPYQGVDIWNCYELSWLLPSGKPVVAIGEFSIPADSANIIESKSFKLYLNSLNQSVFATHDELQKTLCRDLSACADAPVAVRIRSLDEVSAEGVTVLPGVCIDDLEISVSNYAQPQPELLRCAGSVQVSESLHSHLLRSNCPVTGQPDWGSVAVDYLGPQLDHASFLAYLVSFRQHADFHEQCVERIFLDLQRLLKPERLTVYARYVRRGGLDINPYRSTHAVEPANQRLARQ

SEQ ID NO: 48960 - protein, 276 aa, Pseudomonas prosekii
  misc_feature (1)..(276): tr|A0A1H1P8H1|A0A1H1P8H1_9PSED NADPH-dependent 7-cyano- 7-deazaguanine reductase OS=Pseudomonas prosekii OX=114 8509 GN=queF PE=3 SV=1
MHPAAEHSPLGKSSEYIATYTPSLLFPIPRTAKWAELGLTAETLPYKGVDFWNCFELSWLLPSGKPVVAIGEFTIPADSPNIIESKSFKLYLNSLNQTPFAETAGLEATLVKDLSAAAGKPVGVRIRSLREVEAEGVVALPGVCIDDLDISVSNYEQPRPELLRCDASRIVEESVHSHLLKSNCPVTSQPDWGSVAVEYRGAALDHASLLEYIVSFRQHSDFHEQCVERIFLDLQRLLKPQKLTVYARYVRRGGLDINPYRSTEDVQLPNHRLARQ

SEQ ID NO: 48961 - protein, 276 aa, Pseudomonas prosekii
  misc_feature (1)..(276): tr|A0A3L8CU11|A0A3L8CU11_9PSED NADPH-dependent 7-cyano- 7-deazaguanine reductase OS=Pseudomonas prosekii OX=114 8509 GN=queF PE=3 SV=1
MHPAAEHSPLGKSSEYIATYTPSLLFPIPRTAKWAELGLTAETLPYKGVDFWNCFELSWLLPSGKPVVAIGEFTIPADSPNIIESKSFKLYLNSLNQTPFADTASLEATLVKDLSAAAGKPVGVRIRSLREVEAEGVVALPGVCIDDLDISVSNYEQPRPELLRCDASRIVEESVHSHLLKSNCPVTSQPDWGSVAVEYRGAALDHASLLEYIVSFRQHSDFHEQCVERIFLDLQRLLKPQKLTVYARYVRRGGLDINPYRSTEDVQLPNQRLARQ

SEQ ID NO: 48962 - protein, 276 aa, Pseudomonas protegens
  misc_feature (1)..(276): tr|A0A2J7UMG0|A0A2J7UMG0_9PSED NADPH-dependent 7-cyano- 7-deazaguanine reductase OS=Pseudomonas protegens OX=38 0021 GN=queF PE=3 SV=1
MHPAAEHSPLGKSSEYVSTYTPSLLFPIPRAAKWAELGLSADTLPYKGVDFWNCFELSWLLPSGKPVVAIGEFSIPADSPNIIESKSFKLYLNSLNQTPFADRATLEATLRQDLSAAAGKPVGVRIRSLGEVEAQGVVALPGICIDELDISVDSYEHPRPELLRCDDSQVVEESVHSHLLKSNCPVTSQPDWGSVVVEYRGAALDHASLLAYLVSFRQHSDFHEQCVERIFLDLQRLLKPEKLTVYARYVRRGGLDINPYRSTETMEFANQRLVRQ

SEQ ID NO: 48963 - protein, 276 aa, Pseudomonas protegens
  misc_feature (1)..(276): tr|A0A423E4I1|A0A423E4I1_9PSED NADPH-dependent 7-cyano- 7-deazaguanine reductase OS=Pseudomonas protegens OX=38 0021 GN=queF PE=3 SV=1
MHPAAEHSPLGKSSEYVSTYTPSLLFPIPRAAKWAELGLSADTLPYKGVDFWNCFELSWLLPSGKPVVAIGEFSIPADSPNIIESKSFKLYLNSLNQTPFADRTTLEATLRQDLSAAAGKPVGVRVRSLGEVEAQGVVALPGTCIDELDISVDSYEHPRPELLRCDDSQVVEESVHSHLLKSNCPVTSQPDWGSVVVEYRGAALDHASLLAYLVSFRQHSDFHEQCVERIFLDLQRLLKPEKLTVYARYVRRGGLDINPYRSTETAEFANQRLVRQ

SEQ ID NO: 48964 - protein, 276 aa, Pseudomonas pseudoalcaligenes
  misc_feature (1)..(276): tr|W6QX49|W6QX49_PSEP5 NADPH-dependent 7-cyano-7-deazag uanine reductase OS=Pseudomonas pseudoalcaligenes (stra in CECT 5344) OX=1182590 GN=queF PE=3 SV=1
MQHPAEHSPLGKSSQYIAEYSPELLFPISRTTKWAELGLEGANLPYQGVDYWNCYELSWLLPSGKPVVAIGEFAIPADSPNIIESKSFKLYLNSLNQSAFASWDELQATLVRDLSAVAGKPVAVRLRSLAEVAEEGVATLPGQCIDDLDISVSQYDHPQPELLRCDAGRVVEESLHSHLLKSNCPVTGQPDWGSLVVEYRGAALDHASLLAYLVSFRQHADFHEQCVERIFLDLQRLLQPQALTVYARYVRRGGLDINPYRSTEALTPENGRLARQ

SEQ ID NO: 48965 - protein, 276 aa, Pseudomonas psychrophila
  misc_feature (1)..(276): tr|A0A0J6I245|A0A0J6I245_9PSED NADPH-dependent 7-cyano- 7-deazaguanine reductase OS=Pseudomonas psychrophila OX =122355 GN=queF PE=3 SV=1
MHPAAEHSPLGKSSEYISTYTPSLLFPIPRAAKWAELGLSAETLPYVGVDFWTCFELSWLLPSGKPVVAIGEFCFAADSPNIVESKSFKLYLNSLNQSVFADTPSLEATLQADLSAASGKPVSVRVRSLNDVQADGVGVLPGVCIDDLDITVSDYEQPRPELLKCDDSQIVEESVYSHLLKSNCPVTSQPDWGTVVVEYRGAALDHASLLAYLVSFRQHSDFHEQCVERIFLDLQRLLKPETLTVYARYVRRGGLDINPYRSTEAVEFQNVRLVRQ

SEQ ID NO: 48966 - protein, 276 aa, Pseudomonas psychrophila
  misc_feature (1)..(276): tr|A0A3N2A3N7|A0A3N2A3N7_9PSED NADPH-dependent 7-cyano- 7-deazaguanine reductase OS=Pseudomonas psychrophila OX =122355 GN=queF PE=3 SV=1
MHPAAEHSPLGKSSEYISTYTPSLLFPIPRAAKWAELGLSADTLPYVGVDFWNCFELSWLLPSGKPVVAIGEFAFAADSPNIVESKSFKLYLNSLNQTVFADTQTLEATLQADLSAASGKPVSVSVRSLNDVQADGVGVLPGVCIDDLDITVSDYAHPRPELLKCDPAQVVEESVYSHLLKSNCPVTSQPDWGTVVVEYRGAALDHASLLAYLVSFRQHSDFHEQCVERIFLDVQRLLKPEKLTVYARYVRRGGLDINPYRSTETVEFNNLRLVRQ

SEQ ID NO: 48967 - protein, 275 aa, Pseudomonas psychrotolerans
  misc_feature (1)..(275): tr|A0A1G5M1B4|A0A1G5M1B4_9PSED NADPH-dependent 7-cyano- 7-deazaguanine reductase OS=Pseudomonas psychrotolerans OX=237610 GN=queF PE=3 SV=1
MHSVEQSPLGKSTEYVSQYAPELLYPIPRAPKWAELGLDGQGLPFRGVDIWTCYELSWLLPSGKPVVAIGEFAIPADSPNIIESKSFKLYLNSLNQSAFASLADVEAVLVRDLSAASGGTVGVSLVSLDDWAARGVQRPDGQCVDELDIGLDRYAHPQPELLSVGEARDSQRFYSHLLKSNCPVTGQPDWGTVVIDYEEGLALEAASLLRYLVAFRQHADFHEQCVERIYLDLWRLLKPAKLTVFARYVRRGGLDINPYRSSDAIQPAAERYVRQ

SEQ ID NO: 48968 - protein, 275 aa, Pseudomonas psychrotolerans
  misc_feature (1)..(275): tr|A0A147H3J2|A0A147H3J2_9PSED NADPH-dependent 7-cyano- 7-deazaguanine reductase OS=Pseudomonas psychrotolerans OX=237610 GN=queF PE=3 SV=1
MHSVEQSPLGKSTEYVSQYTPGLLYPIPRALKWTELGVDGANLPFHGVDVWTCYELSWLLPSGKPVVAIAEFAIPAASPNIVESKSFKLYLNSLNQSVFASVKELQAALEKDLSHVAGAPVTVLLWSLDEWAARGIQRPAGRCIDELGVPIKGYAHPQQELLSVGEARDSQRLYSHLLKSNCPVTGQPDWGTLVVDYQEGLALEPESLLRYVVAFRQHADFHEQCVERIYLDLWRLLKPEKLTVFARYVRRGGLDINPYRSSEAVQPVAERYVRQ

SEQ ID NO: 48969 - protein, 275 aa, Pseudomonas punonensis
  misc_feature (1)..(275): tr|A0A1M7MF15|A0A1M7MF15_9PSED NADPH-dependent 7-cyano- 7-deazaguanine reductase OS=Pseudomonas punonensis OX=1 220495 GN=queF PE=3 SV=1
MNSVEHSPLGKSSEYIATYSPELLFPIPRATKWAELGLSAETLPYRGVDYWNCFELSWLLPSGKPVVAIGEFSVPADSPHIIESKSFKLYLNSLNQSVFASAQELISVLEKDLSATAGKPVGVRVRSLDEVAVEGMAALPGLCVDELDVSISNYAAPQPELLRCDPAIIVEGSLHSHLLKSNCPVTGQPDWGSVAVQYKGAALEPASLLAYLVSFRQHADFHEQCVERIFLDLQKLLQPEYLTVYARYVRRGGLDINPYRTTLAEVPQNLRLVRQ

SEQ ID NO: 48970 - protein, 276 aa, Pseudomonas putida
  misc_feature (1)..(276): sp|Q88KX9|QUEF_PSEPK NADPH-dependent 7-cyano-7-deazagua nine reductase OS=Pseudomonas putida (strain ATCC 47054 / DSM 6125 / NCIMB 11950 / KT2440) OX=160488 GN=queF P E=3 SV=1
MHPAAEHSPLGKSSEYIATYSPEQLFPIPRTAKWAELGVTAQTLPWQGVDYWNCFELSWLLPSGKPVVAIGEFAIPADSPNIIESKSFKLYLNSLNQTVFTSLGALQVCLEKDLSAAAGKPVGVKVRTLAEVEAQGVVALPGQCIDALDVAISNYEQPQPELLRCNPERVVEETLHSHLLKSNCPVTGQPDWGSVVVQYKGRALDHASLLTYLISFRQHADFHEQCVERIYLDLKNLLQPEHLTVYARYVRRGGLDINPYRSTGPISPDNKRLVRQ

SEQ ID NO: 48971 - protein, 276 aa, Pseudomonas putida
  misc_feature (1)..(276): tr|A0A1X1ACP6|A0A1X1ACP6_PSEPU NADPH-dependent 7-cyano- 7-deazaguanine reductase OS=Pseudomonas putida OX=303 G N=queF PE=3 SV=1
MHPAAEHSPLGKSSEYIATYSPEQLFPIPRTAKWAELGVTAQTLPWQGVDYWNCFELSWLLPSGKPVVAIGEFAIPADSPNIIESKSFKLYLNSLNQTVFASLGELQACLQKDLSAAAGKPVGVKVRTLAEVEAQGVVALPGQCIDALDVAISNYEQPQPELLRCNPERVVEETLHSHLLKSNCPVTGQPDWGSVVVEYKGRALDHASLLTYLISFRQHADFHEQCVERIYLDLKNLLQPEHLTVYARYVRRGGLDINPYRSTGAISPDNKRLVRQ

SEQ ID NO: 48972 - protein, 276 aa, Pseudomonas reidholzensis
  misc_feature (1)..(276): tr|A0A383RR44|A0A383RR44_9PSED NADPH-dependent 7-cyano- 7-deazaguanine reductase OS=Pseudomonas reidholzensis O X=1785162 GN=queF PE=3 SV=1
MHPAAEHSPLGKSSEYISTYTPSLLFPIPRLAKWAELGVSGDALPWQGVDYWNCFELSWLLPSGKPVVAIGEFAIPAASPNIIESKSFKLYLNSLNQTVFASTEALQACLEQDLSAAAGKPVSVRVRTLAEVEGEGVVALPGQCIDGLDVAINNYEQPQPQLLQCDADRVVEEAVHSHLLKSNCPVTGQPDWGSVVVEYKGLALDHGSLLTYLVSFRQHADFHEQCVERIYLDLKRLLKPEHLTVYARYVRRGGLDINPYRSTGPISPRNLRLVRQ

SEQ ID NO: 48973 - protein, 276 aa, Pseudomonas reinekei
  misc_feature (1)..(276): tr|A0A1H0IGX9|A0A1H0IGX9_9PSED NADPH-dependent 7-cyano- 7-deazaguanine reductase OS=Pseudomonas reinekei OX=395 598 GN=queF PE=3 SV=1
MHPAAEHSPLGKSSEYIATYTPSLLFPIPRTAKWAELGLMAESLPYKGVDFWNCFELSWLLPSGKPVVAIGEFSIPADSPNIIESKSFKLYLNSLNQTPFADTASLEATLVNDLSAAAGKPVGVRVRSLKDVEAEGVVALPGVCIDDLDIRVSNYEHPRPELLRCDDSRIVEESVHSHLLKSNCPVTSQPDWGSVVVEYRGAALDHASLLEYIVSFRQHSDFHEQCVERIFLDLQRLLKPEKLTVYARYVRRGGLDINPYRSTEAVQLPNRRLVRQ

SEQ ID NO: 48974 - protein, 277 aa, Pseudomonas resinovorans
  misc_feature (1)..(277): tr|S6AKW0|S6AKW0_PSERE NADPH-dependent 7-cyano-7-deazag uanine reductase OS=Pseudomonas resinovorans NBRC 10655 3 OX=1245471 GN=queF PE=3 SV=1
MQHPAEHSPLGKSSEYVSSYSPELLFPISRVTKWNELGLTAATLPYQGVDFWNCYELSWLTPSGKPVVAIGEFAIPAESPNIIESKSFKLYLNSLNQSVFANAAELEQVLARDLGAAAGAQVQVRVRSLSDVADEGVASLPGACIDELDVVIDRYEHPQPELLRAEAGQPVEDALHSHLLKSNCPVTGQPDWGSVVVEYRGAKRLDHASFLAYLVSFRQHADFHEQCVERIFLDLKRLLEPESLTVFARYVRRGGLDINPYRSTHKVQTDNRRLVRQ

SEQ ID NO: 48975 - protein, 276 aa, Pseudomonas rhizosphaerae
  misc_feature (1)..(276): tr|A0A089ZQS2|A0A089ZQS2_9PSED NADPH-dependent 7-cyano- 7-deazaguanine reductase OS=Pseudomonas rhizosphaerae O X=216142 GN=queF PE=3 SV=1
MHPAAEHSPLGKSSEYVSTYTPSLLFPIPRAAKWAELGLSAETLPYTGVDVWNCFELSWLLPSGKPVVAIGEFTIPADSPNIIESKSFKLYLNSLNQTAFASVDDLQAVLVQDLSGAAGKPVGVRVRRLEEVEAEGVVRLPGVCIDDLDITVSSYDHPQPELLRCDPAKAVNETLHSHLLRSNCPVTSQPDWGSVCITYSGAALDHASVLAYLVSFRQHSDFHEQCVERIFTDLQRLVQPEKLTVFARYVRRGGLDINPYRSTEAMHIANDRLVRQ

SEQ ID NO: 48976 - protein, 276 aa, Pseudomonas rhodesiae
  misc_feature (1)..(276): tr|A0A5C5NHX5|A0A5C5NHX5_9PSED NADPH-dependent 7-cyano- 7-deazaguanine reductase OS=Pseudomonas rhodesiae OX=76 760 GN=queF PE=3 SV=1
MHPAAEHSPLGKSSEYISTYTPSLLFPIPRAAKWAELGLSAETLPYQGVDFWNCFELSWLLPSGKPVVAIGEFSIPADSPNIIESKSFKLYLNSLNQSAFADSQSLEATLRADLSAAAGKPVGVRIRSLADVEAEGVQALPGVCIDDLDIKVSSYEHPRPELLRCDASRIVEESVHSHLLKSNCPVTSQPDWGSVVVEYRGAALDHASLLEYLVSFRQHSDFHEQCVERIFLDVQRLLKPEKLTVYARYVRRGGLDINPYRSTENTQFLNMRLARQ

SEQ ID NO: 48977 - protein, 277 aa, Pseudomonas sabulinigri
  misc_feature (1)..(277): tr|A0A1H1NKF7|A0A1H1NKF7_9PSED NADPH-dependent 7-cyano- 7-deazaguanine reductase OS=Pseudomonas sabulinigri OX= 472181 GN=queF PE=3 SV=1
MSEHPAELSPLGKSSAYVSVYTPSLLFPIARQPKWQELGLDAARLPFHGVDIWNCYELSWLTPSGKPEVAAAEFVFPIKAARIVESKSFKLYLNSFNQTVFRDRQEVQQTLETDLSVAAQGPVMVRLLSMQQLHQGGMLPLAGDCIDDLDVTVDCYEYDRSLLALNLPQVEVSEQLHSHLLKSNCPVTGQPDWGSLQISYRGPQLNRAALLRYLISFRQHADFHEQCVERIFLDLRRVLGEGELTVYARYVRRGGLDINPYRSTRAGVPENLRLARQ

SEQ ID NO: 48978 - protein, 276 aa, Pseudomonas sagittaria
  misc_feature (1)..(276): tr|A0A1I5R5X9|A0A1I5R5X9_9PSED NADPH-dependent 7-cyano- 7-deazaguanine reductase OS=Pseudomonas sagittaria OX=1 135990 GN=queF PE=3 SV=1
MAQDVHHSPLGKTTEYVAEYAPELLFPIPRTAKWLELGIDPAALPFQGVDLWNCYELSWLTEKGKPVVAIGEFAIPAHSPCIIESKSFKLYLNSLNQTRFASRAALVEVLARDLSAAAGAPVAVRVRSLDEVAEEGVARPAGDCLDEQDIAIDHYGPPDAGLLLCDRSRVVSETLHSNLLKSNCPVTGQPDWGTVVIDYTGPALDRAALLAYVVSLRMHGDFHEQCVERIYLDLKTLLQPERLSVHARYVRRGGLDINPYRSTHAPSPDNRRLVRQ

SEQ ID NO: 48979 - protein, 278 aa, Pseudomonas salegens
  misc_feature (1)..(278): tr|A0A1H2FUB3|A0A1H2FUB3_9PSED NADPH-dependent 7-cyano- 7-deazaguanine reductase OS=Pseudomonas salegens OX=143 4072 GN=queF PE=3 SV=1
MDQHPAEQSPLGKSSDYVSVYTPSLLFPIARAPKWAELGLQPEQLPFNGADIWNCYELSWLTPSGKPAVAAVEFVFPLKAARIVESKSFKLYLNSFNQTVFSDRADVVRTLESDLSVAAQGPVMVHLSGMDVLLQEGVGKLQGRCLDDLDVSINEYHYNPELLRLADSGLNVAESLYSHLLKSNCPVTGQPDWASVQIDYRGPALDQEALLCYLISFRQHADFHEQCVERIFVDLLRVLGQGAELTVYARYLRRGGLDINPWRSTQPGMPKNLRLARQ

SEQ ID NO: 48980 - protein, 276 aa, Pseudomonas salomonii
  misc_feature (1)..(276): tr|A0A1H3IQ26|A0A1H3IQ26_9PSED NADPH-dependent 7-cyano- 7-deazaguanine reductase OS=Pseudomonas salomonii OX=19 1391 GN=queF PE=3 SV=1
MHPAAEHSPLGKSSEYISTYTPSLLFPIPRAAKWAELGLTAETLPYKGVDFWNCFELSWLLPSGKPVVAIGEFSIPAESPNIIESKSFKLYLNSLNQTAFADTQSLEATLRTDLSAAAGLPVSVRIRSLAEVEAEGVMALPGACIDDLDISVSNYEHPRPELLRCDDSRIVDESVHSHLLKSNCPVTSQPDWGSVVVEYRGHALDHASLLEYIVSFRQHSDFHEQCVERIFLDVQRLLKPEKLTVYARYVRRGGLDINPYRSTENVQFQNVRLARQ

SEQ ID NO: 48981 - protein, 276 aa, Pseudomonas salomonii
  misc_feature (1)..(276): tr|A0A3M4QA42|A0A3M4QA42_9PSED NADPH-dependent 7-cyano- 7-deazaguanine reductase OS=Pseudomonas salomonii OX=19 1391 GN=queF PE=3 SV=1
MHPAAEHSPLGKSSEYISTYTPSLLFPIPRAAKWAELGLTAETLPYKGVDFWNCFELSWLLPSGKPVVAIGEFSIPAESPNIIESKSFKLYLNSLNQTAFADTQSLEATLRTDLSAAAGLPVSVRIRSLAEIEAEGVMALPGACIDDLDISVSNYEHPRPELLRCDDSRIVEESVHSHLLKSNCPVTSQPDWGSVVVEYRGHALDHASLLEYIVSFRQHSDFHEQCVERIFLDLQRLLKPEKLTVYARYVRRGGLDINPYRSTENVQFQNVRLARQ

SEQ ID NO: 48982 - protein, 276 aa, Pseudomonas saponiphila
  misc_feature (1)..(276): tr|A0A1H4RBV3|A0A1H4RBV3_9PSED NADPH-dependent 7-cyano- 7-deazaguanine reductase OS=Pseudomonas saponiphila OX= 556534 GN=queF PE=3 SV=1
MHPAAEHSPLGKSSEYISTYTPSLLFPIPRAAKWAELGLSADTLPYKGVDFWNCFELSWLLPSGKPVVAIGEFSIPADSPNIIESKSFKLYLNSLNQTPFVDRAALEATLREDLSAAAGKPVAVRIRSLGEVEAEGVVALPGVCIDDLDISVDSYAHPRPELLRCDASRVVEESVHSHLLKSNCPVTSQPDWGSVVVEYRGAALDHASLLAYLVSFRQHSDFHEQCVERIFLDLQRLLKPEKLTVYARYVRRGGLDINPYRSTETADFANQRLVRQ

SEQ ID NO: 48983 - protein, 277 aa, Pseudomonas saudimassiliensis
  misc_feature (1)..(277): tr|A0A078M575|A0A078M575_9PSED NADPH-dependent 7-cyano- 7-deazaguanine reductase OS=Pseudomonas saudimassiliens is OX=1461581 GN=queF PE=3 SV=1
MHPAEQSPLGKSSSYNGIYTPSLLYPIPRQPIWQELGIDPQRLPFHGVDVWNSYEVSWLTPSGKPEVAAVEFVFPVTANARIVESKSFKLYLNSFNQTVFRDRADVLRTLESDLSVTAQAPVMVRLLTMPRLQQVGVGRLPGECLDDLDVTIDVYEYSPELLQRVPGDGWARETLHSHLLKSNCPVTGQPDWGSVAISYAGPALDKAALLRYLVSFRQHGDFHEQCVERIFLDLQRVLGEGCELTVYARYLRRGGLDINPWRSTHPGTPDNTRLARQ

SEQ ID NO: 48984 - protein, 276 aa, Pseudomonas saudiphocaensis
  misc_feature (1)..(276): tr|A0A078LRQ9|A0A078LRQ9_9PSED NADPH-dependent 7-cyano- 7-deazaguanine reductase OS=Pseudomonas saudiphocaensis OX=1499686 GN=queF PE=3 SV=1
MQHPAELSPLGKSSAYVATYSPEQLFPIPRAPKWAELGLTAETLPYQGVDIWNCYELSWLLPSGKPVVAIGEFRIPADSPNIIESKSFKLYLNSLNQSVFDSHEALQAVMVKDLSAAAGKEVEVRLRTLDEVAAEGVAPLPGRCIDDLEVTIKDYDAPQTDLLRCDAGRQVEDCVHSHLLRSNCPVTGQPDWGSLVVDYRGAALDSASLLAYLVSFRQHADFHEQCVERIFLDLQRLLKPERLTVYARYLRRGGLDINPYRSTEPLVADNRRLVRQ

SEQ ID NO: 48985 - protein, 276 aa, Pseudomonas saudiphocaensis
  misc_feature (1)..(276): tr|A0A427E6J6|A0A427E6J6_9PSED NADPH-dependent 7-cyano- 7-deazaguanine reductase OS=Pseudomonas saudiphocaensis OX=1499686 GN=queF PE=3 SV=1
MQHPAELSPLGKSSAYVATYSPEQLFPIPRAPKWAELGLTAETLPYQGVDIWNCYELSWLLPSGKPVVAIGEFRIPADSPNIIESKSFKLYLNSLNQSVFDSHEALQVVMVKDLSAAAGKGVEVRLRTLDEVAAEGVAPLPGRCIDDLEATIKDYDAPQTDLLRCDAGRQVEDCVHSHLLRSNCPVTGQPDWGSLVVDYRGAALDSASLLAYLVSFRQHADFHEQCVERIFLDLQRLLKPERLTVYARYLRRGGLDINPYRSTEPLVADNRRLVRQ

SEQ ID NO: 48986 - protein, 276 aa, Pseudomonas savastanoi
  misc_feature (1)..(276): sp|Q48KI2|QUEF_PSE14 NADPH-dependent 7-cyano-7-deazagua nine reductase OS=Pseudomonas savastanoi pv. phaseolico la (strain 1448A / Race 6) OX=264730 GN=queF PE=3 SV=1
MHPAAEHSPLGKSSEYIATYTPSLLFPISRAAKWAELGLTAQTLPYQGVDFWNCYELSWLLPSGKPVVAIAEFSIPADSPNIIESKSFKLYLNSLNQTAFATVEQVQTTLEQDLSTAAGKPVGVRIRSLSDIEGEGVATLPGVCIDDLDITVSSYDRPQPELLCCDESQIIEESVHSHLLKSNCPVTSQPDWGSVVVEYRGAALDHSSLLAYIVSFRQHSDFHEQCVERIFLDLQRLLKPEKLTVYARYVRRGGLDINPYRSTETLDVNNRRLARQ

SEQ ID NO: 48987 - protein, 276 aa, Pseudomonas savastanoi; identical to SEQ ID NO: 48986
  misc_feature (1)..(276): tr|A0A3M3G425|A0A3M3G425_PSESG NADPH-dependent 7-cyano- 7-deazaguanine reductase OS=Pseudomonas savastanoi pv. glycinea OX=318 GN=queF PE=3 SV=1

SEQ ID NO: 48988 - protein, 276 aa, Pseudomonas segetis
  misc_feature (1)..(276): tr|A0A239HMM7|A0A239HMM7_9PSED NADPH-dependent 7-cyano- 7-deazaguanine reductase OS=Pseudomonas segetis OX=2989 08 GN=queF PE=3 SV=1
MHPAAEDSPLGKSSEYIATYTPSLLFPIPRAPKWAELGLSADTLPYQGVDFWNCFELSWLLPTGKPVVAIGEFAIPADSPNIIESKSFKLYLNSLNQSVFASTAELVEVISKDLSAAAGKPVLVKVRSLDDVAADGVSSLPGLCIDDADISISNYEQPQPELLRCDAQRVVSETLYSHLLKSNCPVTGQPDWGTVVIEYRGPALDQGSLLAYLVSFRQHADFHEQCVERIFLDIQRLLKPDSLTVYARYVRRGGLDINPYRSTGPIKPDNRRLVRQ

SEQ ID NO: 48989 - protein, 275 aa, Pseudomonas seleniipraecipitans
  misc_feature (1)..(275): tr|A0A1G7QJA6|A0A1G7QJA6_9PSED NADPH-dependent 7-cyano- 7-deazaguanine reductase OS=Pseudomonas seleniipraecipi tans OX=640205 GN=queF PE=3 SV=1
MHSVEHSPLGKSSEYIATYSPELLFPIPRAGKWAELGLSAETLPYRGVDYWNCFELSWLLPSGKPVVAIGEFAIAADSPNIIESKSFKLYLNSLNQSVFATEAELVEVLEKDLSATAGKPVGVRVRHLSAVAHEGLAALPGTCIDDLDVSISNYAMPQPDLLACDASRIVEESLHSHLLKSNCPVTGQPDWGSVVVQYRGAALEPASLLAYLVSFRQHADFHEQCVERIFLDVQRLLQPEYLTVYARYVRRGGLDINPYRTTLDQLPENRRLVRQ

SEQ ID NO: 48990 - protein, 276 aa, Pseudomonas sihuiensis
  misc_feature (1)..(276): tr|A0A1H2LK46|A0A1H2LK46_9PSED NADPH-dependent 7-cyano- 7-deazaguanine reductase OS=Pseudomonas sihuiensis OX=1 274359 GN=queF PE=3 SV=1
MQHPAEHSPLGKSSQYIAEYSPELLFPISRTTKWAELGLDGASLPYQGVDYWNCYELSWLLPSGKPVVAIGEFAIPADSPNIIESKSFKLYLNSLNQSAFAGWDELQATLVRDLSAVAGKPVAVRLRSLAEVSEEGVAILPGQCIDELDISVSQYDHPQPELLRCDAGRVLEESLHSHLLKSNCPVTGQPDWGSLVVEYRGAALDHASLLAYLVSFRQHADFHEQCVERIFLDLQRLLQPQSLTVYARYVRRGGLDINPYRSTEAITPENGRLARQ

SEQ ID NO: 48991 - protein, 276 aa, Pseudomonas silesiensis
  misc_feature (1)..(276): tr|A0A191YQT6|A0A191YQT6_9PSED NADPH-dependent 7-cyano- 7-deazaguanine reductase OS=Pseudomonas silesiensis OX= 1853130 GN=queF PE=3 SV=1
MHPAAEHSPLGKSSEYIATYTPSLLFPIPRAAKWAELGLTAETLPYKGVDFWNCFELSWLLPSGKPVVAIGEFSIPADSPNIIESKSFKLYLNSLNQTPFADNAGLEATLVKDLSAAAGKPVGVRIRRLQEVEAEGVVALPGVCIDELDISVSNYEHPRPELLRCDESRIVEESVHSHLLKSNCPVTSQPDWGSVAVEYRGAALDHASLLEYIVSFRQHSDFHEQCVERIFLDLQRLLKPEKLTVYARYVRRGGLDINPYRSTEEVQLPNHRLVRQ

SEQ ID NO: 48992 - protein, 276 aa, Pseudomonas simiae
  misc_feature (1)..(276): tr|A0A1I1BVD8|A0A1I1BVD8_9PSED NADPH-dependent 7-cyano- 7-deazaguanine reductase OS=Pseudomonas simiae OX=32184 6 GN=queF PE=3 SV=1
MHPAAEHSPLGKSSEYISTYTPSLLFPIPRAAKWAELGLSAETLPYKGVDFWNCFELSWLLPSGKPVVAIGEFSIPADSPNIIESKSFKLYLNSLNQTAFADTTSLEAALRTDLSAAAGKPVSVRIRSLAEIEAEGVMALPGVCIDELDISVSNYEHPRPELLRCDDSRVVEESVHSHLLKSNCPVTSQPDWGSVVVEYRGSALDHASLLEYIVSFRQHSDFHEQCVERIFLDLQRLLKPEKLTVYARYVRRGGLDINPYRSTEDVAFQNVRLARQ

SEQ ID NO: 48993 - protein, 276 aa, Pseudomonas simiae
  misc_feature (1)..(276): tr|A0A1N7U8V6|A0A1N7U8V6_9PSED NADPH-dependent 7-cyano- 7-deazaguanine reductase OS=Pseudomonas simiae OX=32184 6 GN=queF PE=3 SV=1
MHPAAEHSPLGKSSEYISTYTPSLLFPIPRAAKWAELGLSAETLPYKGVDFWNCFELSWLLPSGKPVVAIGEFSIPADSPNIIESKSFKLYLNSLNQTAFADTTSLEAALRTDLSAAAGKPVSVRIRSLAEIEAEGVMALPGVCIDELDISVSNYEHPRPELLRCDDSHVVEESVHSHLLKSNCPVTSQPDWGSVVVEYRGSALDHASLLEYIVSFRQHSDFHEQCVERIFLDLQRLLKPEKLTVYARYVRRGGLDINPYRSTEDVAFQNVRLARQ

SEQ ID NO: 48994 - protein, 276 aa, Pseudomonas soli
  misc_feature (1)..(276): tr|A0A1H9EN64|A0A1H9EN64_9PSED NADPH-dependent 7-cyano- 7-deazaguanine reductase OS=Pseudomonas soli OX=1306993 GN=queF PE=3 SV=1
MHPAAEHSPLGKSSEYVATYTPSLLFPIPRLAKWAELGVSGDTLPWQGVDFWNCFELSWLLPSGKPVVAIGEFAIPCDSPNIIESKSFKLYLNSLNQTVFASVAELQACLVKDLSGAAGKPVAVKVSTLAEVEGQGVTALPGQCIDALDVSISNYEQPQPELLRCAADRLVEETVHSHLLKSNCPVTGQPDWGSVVVEYKGRALDHASLLTYLISFRQHADFHEQCVERIYLDLKNLLEPEHLTVYARYVRRGGLDINPYRSTGAINPQNLRLVRQ

SEQ ID NO: 48995 - protein, 276 aa, Pseudomonas soli
  misc_feature (1)..(276): tr|A0A2V4I3J2|A0A2V4I3J2_9PSED NADPH-dependent 7-cyano- 7-deazaguanine reductase OS=Pseudomonas soli OX=1306993 GN=queF PE=3 SV=1
MHPAAEHSPLGKSSEYVATYTPSLLFPIPRLAKWAELGVSGDALPWQGVDFWNCFELSWLLPSGKPVVAIGEFAIPCDSPNIIESKSFKLYLNSLNQTVFASVAELQACLVKDLSAAAGKPVAVKVSTLAEVEGQGVTALPGQCIDALDVSISNYEQPQPELLRCAADRVVEETVHSHLLKSNCPVTGQPDWGSVVVEYKGRALDHASLLTYLISFRQHADFHEQCVERIYLDLKNLLKPEHLTVYARYVRRGGLDINPYRSTGAINPQNLRLVRQ

SEQ ID NO: 48996 - protein, 276 aa, Pseudomonas songnenensis
  misc_feature (1)..(276): tr|A0A482U4G8|A0A482U4G8_9PSED NADPH-dependent 7-cyano- 7-deazaguanine reductase OS=Pseudomonas songnenensis OX =1176259 GN=queF PE=3 SV=1
MQHPAEHSPLGKSSDYVATYSPHLLFPIPRAPKWAELGLTAETLPYQGVDLWNCYELSWLLPSGKPVVAIGEFEIPADSPSIIESKSFKLYLNSLNQSVFESREALVEVMIADLSAAAGKAVKVRLRTLDEVAREGVATLPGRCIDDLDVAIEHYDHPQPELLVCDAGRVVEESLHSHLLKSNCPVTGQPDWGSVVVEYRGAALQAESLLAYLVSFRQHADFHEQCVERIFLDLQRLLQPEKLTVYARYVRRGGLDINPYRSTEAMAVDNRRLVRQ

SEQ ID NO: 48997 - protein, 276 aa, Pseudomonas sp.
  misc_feature (1)..(276): tr|A0A1B5EIT1|A0A1B5EIT1_9PSED NADPH-dependent 7-cyano- 7-deazaguanine reductase OS=Pseudomonas sp. 22 E 5 OX=1 844093 GN=queF_1 PE=3 SV=1
MHPAAEHSPLGKSSEYISTYTPSLLFPIPRAAKWAELGLSAETLPYKGVDFWNCFELSWLLPSGKPVVAIGEFSIPADSPNIIESKSFKLYLNSLNQTAFTDTSSLEATLRTDLSAAAGKPVSVRIRSLVEVEAEGVMALPGVCIDDLDINVSSYEHPRPELLRCDASRVVEESVHSHLLKSNCPVTSQPDWGSVVVEYRGRALDHASLLEYVVSFRQHSDFHEQCVERIFLDLQRLLKPEKLTVYARYVRRGGLDINPYRSTEDVVFQNVRLARQ

SEQ ID NO: 48998 - protein, 276 aa, Pseudomonas sp.
  misc_feature (1)..(276): tr|A0A0M9AUE9|A0A0M9AUE9_9PSED NADPH-dependent 7-cyano- 7-deazaguanine reductase OS=Pseudomonas sp. 655 OX=1705 718 GN=queF PE=3 SV=1
MHPAAEHSPLGKSSEYIATYTPSLLFPIPRTAKWAELGLTADTLPYKGVDFWNCFELSWLLPSGKPVVAIGEFSIPADSPNIIESKSFKLYLNSLNQTPFADTASLEATLVKDLSAAAGKPVGVRIRSLKDVEAEGVVALPGVCIDELDISVSNYEHPRPELLRCDDSRIVEEAVHSHLLKSNCPVTSQPDWGSVAVEYRGAALDHASLLEYIVSFRQHSDFHEQCVERIFLDLQRLLKPEKLTVYARYVRRGGLDINPYRSTETVQLPNHRLARQ

SEQ ID NO: 48999 - protein, 275 aa, Pseudomonas straminea
  misc_feature (1)..(275): tr|A0A1I1WFF7|A0A1I1WFF7_PSEOC NADPH-dependent 7-cyano- 7-deazaguanine reductase OS=Pseudomonas straminea OX=47 882 GN=queF PE=3 SV=1
MNSVEHSPLGKSSEYIATYSPELLFPIPRATKWAELGLSADTLPYSGVDYWNCFELSWLLPSGKPVVAIGEFAIPADSPNIIESKSFKLYLNSLNQSVFASVAELVAVLEKDLSATAGKPVSVRVRSLEEAAREGLSALPGLCIDELDVSISNYAAPQPELLRCDPARVVEQSLHSHLLKSNCPVTGQPDWGSVVVECRGAKLDPASLLAYLVSFRQHADFHEQCVERIFLDLHKLLQPEYLTVYARYVRRGGLDINPYRTTLKALSANRRLVRQ

SEQ ID NO: 49000 - protein, 276 aa, Pseudomonas stutzeri
  misc_feature (1)..(276): tr|F8H699|F8H699_PSEUT NADPH-dependent 7-cyano-7-deazag uanine reductase OS=Pseudomonas stutzeri (strain ATCC 1 7588 / DSM 5190 / CCUG 11256 / JCM 5965 / LMG 11199 / N CIMB 11358 / Stanier 221) OX=96563 GN=queF PE=3
MQHPAEHSPLGKSSDYVATYSPGLLFPIPRAPKWAELGLTAETLPYQGVDLWNCYELSWLLPSGKPVVAIGEFEIPADSPNIIESKSFKLYLNSLNQSVFESRDALLEVMTGDLSAAAGKPVRVRLRTLDEVTADGVATLPGRCIDALDVAIQDYDHPRPELLTCDAGRVVEESLHSHLLKSNCPVTGQPDWGSVVVEYRGAALLPESLLAYLVSFRQHADFHEQCVERIFLDLQRLLQPEKLTVYARYVRRGGLDINPYRSTEALVVDNRRLVRQ

SEQ ID NO: 49001 - protein, 276 aa, Pseudomonas stutzeri; identical to SEQ ID NO: 48817
  misc_feature (1)..(276): tr|A0A0M2RFH2|A0A0M2RFH2_PSEST NADPH-dependent 7-cyano- 7-deazaguanine reductase OS=Pseudomonas stutzeri OX=316 GN=queF PE=3 SV=1

SEQ ID NO: 49002 - protein, 276 aa, Pseudomonas synxantha
  misc_feature (1)..(276): tr|I4KYA5|I4KYA5_9PSED NADPH-dependent 7-cyano-7-deazag uanine reductase OS=Pseudomonas synxantha BG33R OX=9690 1 GN=queF PE=3 SV=1
MHPAAEHSPLGKSSEYISTYTPSLLFPIPRAAKWAELGLSADTLPYKGVDFWNCFELSWLLPSGKPVVAIGEFSIPADSPNIIESKSFKLYLNSLNQTAFADTPSLEATLRTDLSFAAGKPVTVRIRSLADIEAEGVMALPGACIDGLDINVSSYEHPRPELLRCDDSRVVEESVHSHLLKSNCPVTSQPDWGSVVVEYRGAALDHASLLEYIVSFRQHSDFHEQCVERIFLDLQRLLKPEKLTVYARYVRRGGLDINPYRSTENTQFLNVRLARQ

SEQ ID NO: 49003 - protein, 276 aa, Pseudomonas synxantha
  misc_feature (1)..(276): tr|A0A3G7U5S9|A0A3G7U5S9_9PSED NADPH-dependent 7-cyano- 7-deazaguanine reductase OS=Pseudomonas synxantha OX=47 883 GN=queF PE=3 SV=1
MHPAAEHSPLGKSSEYISTYTPSLLFPIPRAAKWAELGLSADTLPYKGVDFWNCFELSWLLPSGKPVVAIGEFSIPADSPNIIESKSFKLYLNSLNQTAFADTQSLEATLRTDLSAAAGKPVTVRIRSLADIEAEGVMALPGACIDGLDINVSSYEHPRPELLRCDDSRVVEESVHSHLLKSNCPVTSQPDWGSVVVEYRGAALDHASLLEYIVSFRQHSDFHEQCVERIFLDLQRLLKPEKLTVYARYVRRGGLDINPYRSTENTQFLNVRLARQ

SEQ ID NO: 49004 - protein, 276 aa, Pseudomonas syringae
  misc_feature (1)..(276): sp|Q4ZV71|QUEF_PSEU2 NADPH-dependent 7-cyano-7-deazagua nine reductase OS=Pseudomonas syringae pv. syringae (st rain B728a) OX=205918 GN=queF PE=3 SV=2
MHPAAEHSPLGKSSEYIATYTPSLLFPIPRAAKWAELGLTAQTLPYQGVDFWNCYELSWLLPSGKPVVAIGEFSIPAESPNIIESKSFKLYLNSLNQTAFATVEQLQTTLEQDLSAAAGKPVGVRIRSLAEIEEEGVAALPGVCIDDLDISVSSYDRPQPELLCCDDSRVVAESVHSHLLKSNCPVTSQPDWGSVVVEYRGAALDHASLLAYIVSFRQHSDFHEQCVERIFLDLQRLLKPEKLTVYARYVRRGGLDINPYRSTETLDVDNRRLARQ

SEQ ID NO: 49005 - protein, 276 aa, Pseudomonas syringae
  misc_feature (1)..(276): tr|A0A0N0WSQ3|A0A0N0WSQ3_PSEYM NADPH-dependent 7-cyano- 7-deazaguanine reductase OS=Pseudomonas syringae pv. ma culicola OX=59511 GN=queF PE=3 SV=1
MHPAAEHSPLGKSSEYIATYTPSLLFPIPRAAKWAELGLTAQTLPYKGVDFWNCYELSWLLPSGKPVVAIAEFSIPADSPNIIESKSFKLYLNSLNQTAFDGSARVQATLEKDLSAAAGKPVGVRIRNLAEIEEEGVAVLPGMCIDELDITVSSYDQPQPELLRCDDSQVIEEAVHSHLLKSNCPVTSQPDWGSVVVEYRGAALDHASLLAYIVSFRQHSDFHEQCVERIFLDLQRLLKPEKLTVYARYVRRGGLDINPCRSTEVLDVDNRRLARQ

SEQ ID NO: 49006 - protein, 276 aa, Pseudomonas taeanensis
  misc_feature (1)..(276): tr|A0A0A1YGG5|A0A0A1YGG5_9PSED NADPH-dependent 7-cyano- 7-deazaguanine reductase OS=Pseudomonas taeanensis MS-3 OX=1395571 GN=queF PE=3 SV=1
MHPAAEHSPLGKSSEYIATNTPSLLFPIPRAPKWAELGLSAETLPYQGVDFWNCFELSWLLPSGKPVVAIGEFAIPADSPNIIESKSFKLYLNSLNQTVFAESAELVEVLQKDLSAAAGKAVVVRVRSLDEVAAEGVAALPGTCIDDLDVSISNYDEPQPGLLRCESGRVIEESLHSHLLKSNCPVTGQPDWGSVVVQYRGAALDHAGLLAYLVSFRQHADFHEQCVERIFLDLQRLLKPEHLTVYARYVRRGGLDINPYRSTAVIQPDNRRLVRQ

SEQ ID NO: 49007 - protein, 276 aa, Pseudomonas taetrolens
  misc_feature (1)..(276): tr|A0A0J6JJ42|A0A0J6JJ42_PSETA NADPH-dependent 7-cyano- 7-deazaguanine reductase OS=Pseudomonas taetrolens OX=4 7884 GN=queF PE=3 SV=1
MHPAAEHSPLGKSSEYISTYTPSLLFPIPRAAKWAELGLSAETLPYVGVDFWNCFELSWLLPSGKPVVAIGEFCFAADSPNIVESKSFKLYLNSLNQTVFTDVQSLEATLQADLSAASGKPVSVRVRSLNDVQADGVGTLPGVCIDELDISVSDYAQPRPELLKCDESRVIEESLYSHLLKSNCPVTSQPDWGTVVVEYRGAALDHASLLAYLVSFRQHSDFHEQCVERIFLDLQRLLKPEKLTVYARYVRRGGLDINPYRSTEAVEFQNLRLVRQ

SEQ ID NO: 49008 - protein, 276 aa, Pseudomonas taiwanensis; identical to SEQ ID NO: 48924
  misc_feature (1)..(276): tr|V7DAX9|V7DAX9_9PSED NADPH-dependent 7-cyano-7-deazag uanine reductase OS=Pseudomonas taiwanensis SJ9 OX=1388 762 GN=queF PE=3 SV=1

SEQ ID NO: 49009 - protein, 276 aa, Pseudomonas thivervalensis
  misc_feature (1)..(276): tr|A0A176NG63|A0A176NG63_9PSED NADPH-dependent 7-cyano- 7-deazaguanine reductase OS=Pseudomonas thivervalensis OX=86265 GN=queF PE=3 SV=1
MHPAAEHSPLGKSSEYIATYTPSLLFPIPRTAKWAELGLTAETLPYKGVDFWNCFELSWLLPSGKPVVAIGEFAIPADSPNIIESKSFKLYLNSLNQTPFADTASLEATLRQDLSAAAGKSVGVRIRSLKDVEREGVVALPGTCIDDLAISVDSYAHPRPELLRCDASRIVEQSLHSHLLKSNCPVTSQPDWGSVAVEYRGAALDPASLLAYIVSFRQHSDFHEQCVERIFLDLQRLLKPEKLTVYARYVRRGGLDINPYRSTEDVQLPNHRLVRQ

SEQ ID NO: 49010 - protein, 276 aa, Pseudomonas thivervalensis
  misc_feature (1)..(276): tr|A0A2Z4Z9Y2|A0A2Z4Z9Y2_9PSED NADPH-dependent 7-cyano- 7-deazaguanine reductase OS=Pseudomonas thivervalensis OX=86265 GN=queF PE=3 SV=1
MHPAAEHSPLGKSSEYIATYTPSLLFPIPRTAKWAELGLTAETLPYKGVDFWNCFELSWLLPSGKPVVAIGEFAIPADSPNIIESKSFKLYLNSLNQTPFADTASLEATLRQDLSAAAGKSVGVRIRSLKDVEREGVVALPGTCIDDLDISVDSYAHPRPELLRCDASRIVEQSLHSHLLKSNCPVTSQPDWGSVAVEYRGAALDPASLLAYIVSFRQHSDFHEQCVERIFLDLQRLLKPEKLTVYARYVRRGGLDINPYRSTEDVQLPNHRLVRQ

SEQ ID NO: 49011 - protein, 276 aa, Pseudomonas tolaasii
  misc_feature (1)..(276): tr|A0A2N0E7Y3|A0A2N0E7Y3_PSETO NADPH-dependent 7-cyano- 7-deazaguanine reductase OS=Pseudomonas tolaasii NCPPB 2192 OX=564423 GN=queF PE=3 SV=1
MHPAAEHSPLGKSSEYISTYTPSLLFPIPRAAKWAELGLSAETLPYKGVDFWNCFELSWLLPSGKPVVAIGEFSIPADSPNIIESKSFKLYLNSLNQTAFTDTASLEATLRTDLSAAAGKPVTVRIRSLAEIEAEGVMALPGVCIDDLNINVSSYEHPRPELLRCDDARVVEESVHSHLLKSNCPVTSQPDWGSVVVEYRGHALDHASLLEYIVSFRQHSDFHEQCVERIFLDLQRLLKPEKLTVYARYVRRGGLDINPYRSTEDVAFQNVRLARQ

SEQ ID NO: 49012 - protein, 276 aa, Pseudomonas toyotomiensis
  misc_feature (1)..(276): tr|A0A1I5UCR7|A0A1I5UCR7_9PSED NADPH-dependent 7-cyano- 7-deazaguanine reductase OS=Pseudomonas toyotomiensis O X=554344 GN=queF PE=3 SV=1
MQHPAEHSPLGKSSQYIAEYSPELLFPISRTTKWAELGLDGASLPYQGVDYWNCYELSWLLPSGKPVVAIGEFAIPADSPNIIESKSFKLYLNSLNQSAFASWDELQATLVRDLSVVAGKPVAVRLRSLVEVSEEGVATLPGQCIDELDISVSQYDHPQPELLRCDAGRVVEESLHSHLLKSNCPVTGQPDWGSLVVEYRGAALDHASLLAYLVSFRQHADFHEQCVERIFLDLQRLLQPQSLTVYARYVRRGGLDINPYRSTEALKSENGRLARQ

SEQ ID NO: 49013 - protein, 276 aa, Pseudomonas tremae; identical to SEQ ID NO: 48828
  misc_feature (1)..(276): tr|A0A0Q0DD29|A0A0Q0DD29_9PSED NADPH-dependent 7-cyano- 7-deazaguanine reductase OS=Pseudomonas tremae OX=20045 4 GN=queF PE=3 SV=1

SEQ ID NO: 49014 - protein, 276 aa, Pseudomonas trivialis
  misc_feature (1)..(276): tr|A0A0R2ZBF2|A0A0R2ZBF2_9PSED NADPH-dependent 7-cyano- 7-deazaguanine reductase OS=Pseudomonas trivialis OX=20 0450 GN=queF PE=3 SV=1
MHPAAEHSPLGKSSEYISTYTPSLLFPIPRAAKWAELGLSAETLPYKGVDFWNCFELSWLLPSGKPVVAIGEFSIPADSPNIIESKSFKLYLNSLNQTAFADSQDLQATLHNDLSFAAGKPVSVRIRSLAEVEAEGVMALPGMCIDGLDISVSSYEHPRPELLRCDDSRVVQESVHSHLLKSNCPVTRQPDWGSVVVDYCGAALDHASLLEYIVSFRQHSDFHEQCVERIFLDLQRLLKPERLTVYARYVRRGGLDINPYRSTEEVAFQNVRLARQ

SEQ ID NO: 49015 - protein, 276 aa, Pseudomonas trivialis
  misc_feature (1)..(276): tr|A0A0H5A431|A0A0H5A431_9PSED NADPH-dependent 7-cyano- 7-deazaguanine reductase OS=Pseudomonas trivialis OX=20 0450 GN=queF PE=3 SV=1
MHPAAEHSPLGKSSEYISTYTPSLLFPIPRAAKWAELGLSAETLPYKGVDFWNCFELSWLLPSGKPVVAIGEFSIPADSPNIIESKSFKLYLNSLNQTAFADPASLEATLRTDLSAAAGKPVSVRIRSLAEIEAEGVMALPGVCIDELDINVSSYEHPRPELLRCDDSRTVEESVHSHLLKSNCPVTSQPDWGSVVVEYRGSALDHASLLEYIVSFRQHSDFHEQCVERIFLDLQRLLKPEKLTVYARYVRRGGLDINPYRSTEEVAFQNVRLARQ

SEQ ID NO: 49016 - protein, 276 aa, Pseudomonas umsongensis
  misc_feature (1)..(276): tr|A0A1H1TW44|A0A1H1TW44_9PSED NADPH-dependent 7-cyano- 7-deazaguanine reductase OS=Pseudomonas umsongensis OX= 198618 GN=queF PE=3 SV=1
MHPAAEHSPLGKSSEYIATYTPSLLFPIPRTAKWAELGLTAQTLPYKGVDFWNCFELSWLLPSGKPVVAIGEFSIPADSPNIIESKSFKLYLNSLNQTPFADTASLEATLAKDLSAAAGKPVGVRIRSLKEVEAEGVVALPGVCIDDLDISVSNYEHPRPELLRCDESRIVEESVHSHLLKSNCPVTSQPDWGSVAVEYRGAALDHASLLEYIVSFRQHSDFHEQCVERIFLDLQRLLKPEKLTVYARYVRRGGLDINPYRSTEEVQLPNHRLVRQ

SEQ ID NO: 49017 - protein, 276 aa, Pseudomonas vancouverensis
  misc_feature (1)..(276): tr|A0A1H2MRD1|A0A1H2MRD1_9PSED NADPH-dependent 7-cyano- 7-deazaguanine reductase OS=Pseudomonas vancouverensis OX=95300 GN=queF PE=3 SV=1
MHPAAEHSPLGKSSEYIATYTPSLLFPIPRTAKWAELGLTAETLPYKGVDFWNCFELSWLLPSGKPVVAIGEFSIPADSPNIIESKSFKLYLNSLNQTPFADTASLEATLVKDLSAAAGKPVGVRVRSLKDVEAEGVVALPGVCIDDLDISVSNYEHPRPELLRCDPSRIVEESVHSHLLKSNCPVTSQPDWGSVTVEYRGAALDHASLLEYIVSFRQHSDFHEQCVERIFLDLQRLLKPEKLTVYARYVRRGGLDINPYRSTEEAQLPNHRLVRQ

SEQ ID NO: 49018 - protein, 276 aa, Pseudomonas veronii
  misc_feature (1)..(276): tr|A0A1D3JTY8|A0A1D3JTY8_9PSED NADPH-dependent 7-cyano- 7-deazaguanine reductase OS=Pseudomonas veronii 1YdBTEX 2 OX=1295141 GN=queF PE=3 SV=1
MHPAAEHSPLGKSSEYISTYTPSLLFPIPRAAKWAELGLSAETLPYTGVDFWNCFELSWLLPSGKPVVAIGEFSIAADSPNIIESKSFKLYLNSLNQTVFADTQSLEATLRTDLSAAAGKPVGVRVRSLAEVEAEGVVALPGVCIDDLDISVSNYEHPRPELLRCDDSRIVEESVYSHLLKSNCPVTSQPDWGSVAVQYRGAQLDHASLLEYLVSFRQHSDFHEQCVERIFLDLQRLLKPEKLTVYARYVRRGGLDINPYRSTEDVQFQNLRLARQ

SEQ ID NO: 49019 - protein, 276 aa, Pseudomonas veronii; identical to SEQ ID NO: 48948
  misc_feature (1)..(276): tr|A0A0R3B063|A0A0R3B063_9PSED NADPH-dependent 7-cyano- 7-deazaguanine reductase OS=Pseudomonas veronii OX=7676 1 GN=queF PE=3 SV=1

SEQ ID NO: 49020 - protein, 276 aa, Pseudomonas versuta
  misc_feature (1)..(276): tr|A0A0M4Q7X7|A0A0M4Q7X7_9PSED NADPH-dependent 7-cyano- 7-deazaguanine reductase OS=Pseudomonas versuta OX=1788 301 GN=queF PE=3 SV=1
MHPAAEHSPLGKSSEYISTYTPSLLFPIPRAAKWAELGLSAETLPYVGVDFWNCFELSWLLPSGKPVVAIGEFCFAADSPNIVESKSFKLYLNSLNQTVFADTQSLEQTLQADLSAASGKPVSVRVRSLDEVQADGTGVLPGVCIDDLDITVSDYQQPRPELLKCDESRVIEESVYSHLLKSNCPVTSQPDWGTVVVEYRGAALDHASLLAYLVSFRQHSDFHEQCVERIFLDLQRLLKPEKLTVYARYVRRGGLDINPYRSTETVEFQNVRLVRQ

SEQ ID NO: 49021 - protein, 276 aa, Pseudomonas viridiflava
  misc_feature (1)..(276): tr|A0A3M4NVF5|A0A3M4NVF5_PSEVI NADPH-dependent 7-cyano- 7-deazaguanine reductase OS=Pseudomonas viridiflava OX= 33069 GN=queF PE=3 SV=1
MHPAAEHSPLGKSSEYIATYTPSLLFPIPRAAKWAELGLTAQTLPYQGVDFWNCYELSWLLPSGKPVVAIAEFSIPADSPNIIESKSFKLYLNSLNQTAFATVEQVQATLEQDLSAAAGKPVGVRIRSLSDIEGEGVATLPGVCIDDLDITVSSYDRPQPELLRCDESRIFEESVHSHLLKSNCPVTSQPDWGSVVVEYRGAALDHSSLLAYIVSFRQHSDFHEQCVERIFLDLQRLLKPEKLTVYARYVRRGGLDINPYRSTETLNVDNRRLARQ

SEQ ID NO: 49022 - protein, 276 aa, Pseudomonas viridiflava
  misc_feature (1)..(276): tr|A0A2G0YKS2|A0A2G0YKS2_PSEVI NADPH-dependent 7-cyano- 7-deazaguanine reductase OS=Pseudomonas viridiflava OX= 33069 GN=queF PE=3 SV=1
MHPAAEHSPLGKSSEYIAIYTPSLLFPIPRTAKWAELGLTAETLPYQGVDFWNCYELSWLLPSGKPVVAIAEFSIPADSPNIIESKSFKLYLNSLNQSAFETREELQATLEKDLSAAAGKPVGVRIRSLEEIEREGVAALPGVCIDDLDISVSSYDRPQPELLRCDESRVVEESVYSHLLKSNCPVTSQPDWGSVVVEYRGPALDHASLLAYIVSFRQHSDFHEQCVERIFLDLQRLLKPEKLTVYARYVRRGGLDINPYRSTEALDVDNGRLARQ

SEQ ID NO: 49023 - protein, 276 aa, Pseudomonas vranovensis
  misc_feature (1)..(276): tr|A0A423DTH1|A0A423DTH1_9PSED NADPH-dependent 7-cyano- 7-deazaguanine reductase OS=Pseudomonas vranovensis OX= 321661 GN=queF PE=3 SV=1
MHPAAEHSPLGKSSEYVSTYTPSLLFPIPRAAKWAELGVSAQTLPWLGVDFWNCFELSWLLPSGKPVVAIGEFAIPADSPNIIESKSFKLYLNSLNQTVFESPAALQACLVKDLSAAAGKPVGVQVRSLAEVEGQGVVGLPGVCIDELDVSISNYEQPQPELLRCDSGNIVEETLHSHLLKSNCPVTGQPDWGSVTVHYRGAALDHASLLTYLISFRQHADFHEQCVERIYLDLKRLLNPEHLTVYARYVRRGGLDINPYRSTSQVTLENLRLVRQ

SEQ ID NO: 49024 - protein, 276 aa, Pseudomonas wadenswilerensis
  misc_feature (1)..(276): tr|A0A380SWT6|A0A380SWT6_9PSED NADPH-dependent 7-cyano- 7-deazaguanine reductase OS=Pseudomonas wadenswilerensi s OX=1785161 GN=queF PE=3 SV=1
MHPAAEHSPLGKSSEYVATYTPSLLFPIPRAAKWAELGVSAETLPWLGVDFWNCFELSWLLPSGKPVVAIGEFAIPADSPNIIESKSFKLYLNSLNQTVFESPAALQACLVKDLSAAAGKPVGVQIRSLAEVEGQGVVGLPGVCIDELDVSISNYEQPQPELLRCDSSNIVEETLHSHLLKSNCPVTGQPDWGSVTVHYRGAALDHASLLTYLISFRQHADFHEQCVERIYLDLKRLLNPEHLTVYARYVRRGGLDINPYRSTGQVTLANLRLVRQ

SEQ ID NO: 49025 - protein, 276 aa, Pseudomonas weihenstephanensis
  misc_feature (1)..(276): tr|A0A0J6LEM0|A0A0J6LEM0_9PSED NADPH-dependent 7-cyano- 7-deazaguanine reductase OS=Pseudomonas weihenstephanen sis OX=1608994 GN=queF PE=3 SV=1
MHPAAEHSPLGKSSEYISTYTPSLLFPIPRAAKWAELGLSAETLPYVGVDYWTCFELSWLLPSGKPVVAIGEFCFAADSPNIVESKSFKLYLNSLNQSVFADTPSLVATLQADLSVASGKPVSVRVRSLDDVQADGVGVLPGVCIDDLDITVSDYAQPRPELLACDASRIVEESVYSHLLKSNCPVTSQPDWGTVVVEYRGAALDPASLLAYLVSFRQHSDFHEQCVERIFLDLQRLLKPEKLTVYARYVRRGGLDINPYRSTETVAFKNVRLVRQ

SEQ ID NO: 49026 - protein, 276 aa, Pseudomonas xanthomarina
  misc_feature (1)..(276): tr|A0A1C2DZC7|A0A1C2DZC7_9PSED NADPH-dependent 7-cyano- 7-deazaguanine reductase OS=Pseudomonas xanthomarina OX =271420 GN=queF PE=3 SV=1
MQHPAELSPLGKSSAYVATYSPQVLFPIPRAPKWAELGVTAETLPYQGVDIWNCYELSWLLPSGKPVVAIGEFVIPADSPNIIESKSFKLYLNSLNQSVFESREHLLDVMRGDLSAAAGKPVGIRLRSLEEVEREGIAPLPGRCIDELDLSIDHYDSPRADLLRCDPERRIEETLHSHLLKSNCPVTGQPDWGSVLVEYHGAALEPASLLAYLVSFRQHADFHEQCVERIFLDLQRLLQPERLTVYARYVRRGGLDINPYRSTEALTAANGRLVRQ

SEQ ID NO: 49027 - protein, 276 aa, Pseudomonas xanthomarina; identical to SEQ ID NO: 48817
  misc_feature (1)..(276): tr|A0A098FQH0|A0A098FQH0_9PSED NADPH-dependent 7-cyano- 7-deazaguanine reductase OS=Pseudomonas xanthomarina OX =271420 GN=queF PE=3 SV=1

SEQ ID NO: 49028 - protein, 279 aa, Pseudomonas xinjiangensis
  misc_feature (1)..(279): tr|A0A1H1SG20|A0A1H1SG20_9PSED NADPH-dependent 7-cyano- 7-deazaguanine reductase OS=Pseudomonas xinjiangensis O X=487184 GN=queF PE=3 SV=1
MSQQHPAEQSPLGKSSAYVSVYTPSLLFPIAREPKWQELGLDAENLPFHGADIWNCYELSWLNPSGKPEIAAAEFVFPLRGARIVESKSFKLYLNSFNQTVFSDRREVLRTLESDLSVAAQGPVMVRLLNMGQLYQGGMSQMPGFCLDDLDVRVDCYEYDAGLLQLDSNSEATRESLYSHLLKSNCPVTGQPDWASVSIRYAGPRIDRASLLRYLVSFRQHSDFHEQCVERIFCDMRALLGDSAELTVYARYVRRGGLDINPYRSTEPGMPENFRLARQ

SEQ ID NO: 49029 - protein, 276 aa, Pseudomonas yamanorum
  misc_feature (1)..(276): tr|A0A143GLB2|A0A143GLB2_9PSED NADPH-dependent 7-cyano- 7-deazaguanine reductase OS=Pseudomonas yamanorum OX=51 5393 GN=queF PE=3 SV=1
MHPAAEHSPLGKSSEYISTYTPSLLFPIPRAAKWAELGLSAETLPYKGVDFWNCFELSWLLPSGKPVVAIGEFSIPADSPNIIESKSFKLYLNSLNQTVFVDVQSLEATLRTDLSAAAGKPVGVRIRSLGEVEAEGVVALPGVCIDGLDITVSNYEHPRPELLRCDDSRVVEESVHSHLLKSNCPVTSQPDWGSVAVEYRGAALDHASLLEYLVSFRQHSDFHEQCVERIFLDLQRLLKPEKLTVYARYVRRGGLDINPYRSTEELQFQNLRLARQ

SEQ ID NO: 49030 - protein, 276 aa, Pseudomonas yamanorum
  misc_feature (1)..(276): tr|A0A1H2F642|A0A1H2F642_9PSED NADPH-dependent 7-cyano- 7-deazaguanine reductase OS=Pseudomonas yamanorum OX=51 5393 GN=queF PE=3 SV=1
MHPAAEHSPLGKSSEYISTYTPSLLFPIPRAAKWAELGLSAETLPYKGVDFWNCFELSWLLPSGKPVVAIGEFSIPADSPNIIESKSFKLYLNSLNQTAFVDVQSLEATLRTDLSAAAGKPVGVRIRSLGEVEAEGVVALPGVCIDDLDITVSNYEHPRPELLRCDDSRVVEESVHSHLLKSNCPVTSQPDWGSVAVEYRGAALDHASLLEYLVSFRQHSDFHEQCVERIFLDLQRLLKPEKLTVYARYVRRGGLDINPYRSTEEQQFQNLRLARQ

SEQ ID NO: 49031 - protein, 278 aa, Pseudomonas yangmingensis
  misc_feature (1)..(278): tr|A0A1I4S8V2|A0A1I4S8V2_9PSED NADPH-dependent 7-cyano- 7-deazaguanine reductase OS=Pseudomonas yangmingensis O X=1720063 GN=queF PE=3 SV=1
MNSHPAEQSPLGKSTAYVSHYSPQLLFPIARDAKWQELGLRGDSLPFVGEDIWNCCELSWLESGGKPRVMAAEFRFAASSPAIIESKSFKLYLNSFNQSRFDSVEAVQQVLQQDLSAACGAPVQVLLQDLHGLREAGLAELQGKSLDDLDVQVDQYHYNPALLALVEPAVRVEQTWVTDLFKSNCPVTGQPDWASLQISYAGPQLDEKALLRYLLSFREHADFHEQCVERIFCDLRGILGDDCRLLVSARYLRRGGLDINPWRSCGMPAPGNLRLARQ

SEQ ID NO: 49032 - protein, 277 aa, Pseudomonas zeshuii; identical to SEQ ID NO: 48910
  misc_feature (1)..(277): tr|A0A1M6A0M0|A0A1M6A0M0_9PSED NADPH-dependent 7-cyano- 7-deazaguanine reductase OS=Pseudomonas zeshuii OX=1076 620 GN=queF PE=3 SV=1

SEQ ID NO: 49033 - protein, 276 aa, Pseudomonas zhaodongensis
  misc_feature (1)..(276): tr|A0A365PU08|A0A365PU08_9PSED NADPH-dependent 7-cyano- 7-deazaguanine reductase OS=Pseudomonas zhaodongensis O X=1176257 GN=queF PE=3 SV=1
MQHPAELSPLGKSSAYVATYSPEQLFPIPRAPKWAELGLTAESLPYGGVDIWNCYELSWLLPSGKPVVAIGEFSIPADSPNIIESKSFKLYLNSLNQSVFESRQALVDVMTRDLSAAAGKPVGVRLRTLDEVAEEGIAALDGLCIDDLDVTIEDYDSPRPELLRSDSLRQVEERVYSHLLKSNCPVTGQPDWGTVVIEYRGAALDHGSLLAYLVSFRQHADFHEQCVERIFLDLQRVLTPDRLSVHARYVRRGGLDINPYRSTHDVFPDNGRQVRQ

SEQ ID NO: 49034 - protein, 276 aa, Pseudomonas zhaodongensis
  misc_feature (1)..(276): tr|A0A3M2HS19|A0A3M2HS19_9PSED NADPH-dependent 7-cyano- 7-deazaguanine reductase OS=Pseudomonas zhaodongensis O X=1176257 GN=queF PE=3 SV=1
MQHPAELSPLGKTSAYVATYSPEQLFPIPRAPKWAELGLTADTLPYGGVDIWNCYELSWLLPSGKPVVAIGEFSIPADSPNIIESKSFKLYLNSLNQSVFENRDALVKVMISDLSAAAGKPVGVRLRTLDEVALDGIAPLRGHCVDELDVAIDHYDAPRADLLRCDANRQVEECLYSHLLKSNCPVTGQPDWGTVVIEYRGAALNHPSLVAYLVSFRQHADFHEQCVERIFLDLQRLLAPERLSVHARYVRRGGLDINPYRSTDYVNADNGRLVRQ

SEQ ID NO: 49035 - protein, 152 aa, Pseudooceanicola marinus
  misc_feature (1)..(152): tr|A0A1X6ZYC6|A0A1X6ZYC6_9RHOB NADPH-dependent 7-cyano- 7-deazaguanine reductase OS=Pseudooceanicola marinus OX =396013 GN=queF PE=3 SV=1
MTDTTGLTQLGQTTGLPASPEAAVLERVPQPNPGERYNVRFTAPEFTSLCPMTGQPDFAHIMIDYVPRDWLVESKSLKLFLGSFRNHGAFHEECTVMIGRRLADLLDPEWLRIGAYWYPRGGIPIDVFWATGPAPEDLWIPDQGVPPYRGRG

SEQ ID NO: 49036 - protein, 154 aa, Pseudorhizobium pelagicum
  misc_feature (1)..(154): tr|A0A081MRN2|A0A081MRN2_9RHIZ NADPH-dependent 7-cyano- 7-deazaguanine reductase OS=Pseudorhizobium pelagicum O X=1509405 GN=queF PE=3 SV=1
MSMTDTSSLSQLGQAVETPQNPEAAVLEKVPNGNQGTDYVVRFTAPEFTSLCPMTGQPDFAHIVIDYIPDGFLVESKSLKLFLHSFRNHGAFHEDCSVYIAKRIVDLLAPKWLRIGAYWYPRGGIPIDVFWQTGAVPEGVWLPDQGVPTYRGRG

SEQ ID NO: 49037 - protein, 154 aa, Pseudorhodobacter sp.
  misc_feature (1)..(154): tr|A0A257GHP8|A0A257GHP8_9RHOB NADPH-dependent 7-cyano- 7-deazaguanine reductase OS=Pseudorhodobacter sp. PARRP 1 OX=2015560 GN=queF PE=3 SV=1
MTQTDVSGLTQLGAASALPASPDQAVLEKVPAGHAGTLYCVRFTAPEFTSLCPMTGQPDFAHIVIDYVPRDWLVESKSLKLYLGSFRNHGAFHEDCTLDIGKKLVALLGPVWLRIGAYWFPRGGIPIDVFWQTAAPPDGVWLPDQGVAPYRGRG

SEQ ID NO: 49038 - protein, 281 aa, Pseudorhodoferax soli
  misc_feature (1)..(281): tr|A0A368YBG1|A0A368YBG1_9BURK NADPH-dependent 7-cyano- 7-deazaguanine reductase OS=Pseudorhodoferax soli OX=54 5864 GN=queF PE=3 SV=1
MNSPDQSPLGKASPYADQYDASLLFPIPRAGKRAEIGADGASPFFGADLWTAYELSWLNTRGKPQVALVHFTIPCETPNIVESKSFKLYLGSFTNTVLESVDEVRARLRTDISEAVWRGSDTPATVGVRVLMPEQFDQQPIHELDGLSLDRLDLECTHYQPAPELLTASFDESPVTEVLSSNLLKSNCLVTGQPDWGSVQISYSGPQIDQAGLLRYIVSFRNHNEFHEQCVERIFMDIWRRCRPVKLTVYARYTRRGGLDINPWRTSHPGAVPANVRTARQ

SEQ ID NO: 49039 - protein, 281 aa, Pseudorhodoferax sp.
  misc_feature (1)..(281): tr|A0A0Q4YAZ0|A0A0Q4YAZ0_9BURK NADPH-dependent 7-cyano- 7-deazaguanine reductase OS=Pseudorhodoferax sp. Leaf26 7 OX=1736316 GN=queF PE=3 SV=1
MTSPDQSPLGKASAYADRYDASLLFPIPRADKRAELGIQGASPFFGADLWTAYELSWLNTRGKPQVALAHFTVPCETPNIIESKSLKLYLGSFSNTPFESVDAVRAHLRTDLSEAVWRGSDQPATIGVRVLGPELFDREPVHELDGLSLDRLDLECTHYQPAPELLTAAFDEAPVTEVLTSNLLKSNCLVTGQPDWGAVQVSYSGPQIDQAGLLRYIVSFRNHNEFHEQCVERMFMDIWRRCRPVKLTVYARYTRRGGLDINPWRTSHPGAVPANVRTARQ

SEQ ID NO: 49040 - protein, 284 aa, Pseudorhodoferax sp.
  misc_feature (1)..(284): tr|A0A0S9MUQ7|A0A0S9MUQ7_9BURK NADPH-dependent 7-cyano- 7-deazaguanine reductase OS=Pseudorhodoferax sp. Leaf27 4 OX=1736318 GN=queF PE=3 SV=1
MNSPDQSPLGKASPYADQYDASLLFPIARAEKRAEIGVDGTGARPPFFGADLWTAYELSWLNPRGKPQVALVQFTIPCETPHIVESKSFKLYLGSFTNTRFDSVDAVRARLRTDISEAVWRGSATPSTVGVRVLLPEQFDQQAIHELDGLSLDRLDLECTQYQPDPTLLTAAFDEVPVTEVLTSGLLKSNCLVTGQPDWGSVQISYSGPQIDQAGLLQYIVSFRNHNEFHEQCVERFFMDIWRRCRPVKLTVYARYTRRGGLDINPWRTSHPGAAPANVRTARQ

SEQ ID NO: 49041 - protein, 159 aa, Pseudorhodoplanes sinuspersici
  misc_feature (1)..(159): tr|A0A1W6ZWC2|A0A1W6ZWC2_9RHIZ NADPH-dependent 7-cyano- 7-deazaguanine reductase OS=Pseudorhodoplanes sinuspers ici OX=1235591 GN=queF PE=3 SV=1
MARKKTSQVLPNPALQLGRATALPASPDEAVLDRVDNPHPDTNYVARFTMPEFTALCPITGQPDFAHFVIDYVPNKFLVESKSLKLYLNSFRNHGSFHEDCTVSIGKRLVSLLKPRWLRIGGYWYPRGGMPIDVFWQAGKLPNGVWVPDQGVAPYRGRG

SEQ ID NO: 49042 - protein, 129 aa, Pseudoroseicyclus aestuarii
  misc_feature (1)..(129): tr|A0A318T6M2|A0A318T6M2_9RHOB NADPH-dependent 7-cyano- 7-deazaguanine reductase OS=Pseudoroseicyclus aestuarii OX=1795041 GN=queF PE=3 SV=1
MLERVPNPQPEARYAVRFTAPEFTSLCPMTGQPDFAHLVIDYVPQDWLVESKSLKLYLTSFRNHGAFHEDCTVAIGLRLRELLDPHWLRIGGYWYPRGGIPIDVFYQTGATPQDVWIPDQGVPPYRGRG

SEQ ID NO: 49043 - protein, 281 aa, Pseudospirillum japonicum
  misc_feature (1)..(281): tr|A0A1H6SVW5|A0A1H6SVW5_9GAMM NADPH-dependent 7-cyano- 7-deazaguanine reductase OS=Pseudospirillum japonicum O X=64971 GN=queF PE=3 SV=1
MHPAEASNLGKASPYPKKYDSKWLYPIARHLQRQHLQTEGVPCYGEDMWTAYEVSWLDMKAKPQIALASIRLPLQSQNLIESKSLKLYLNSFNQSQWPSLEAVQAQISQDLTQVAGMQVQVDLWTWQQAEMYLQPKPIQGMCLDDLELQDEIASAPVDQPDLLADVEKGKKLVKPEYYYSHLLKSNCPVTGQPDWATLWIEYQGAPLNLSALLAYILSFRQHQDFHEHCVERIYYTLWHVCQPEKLSVYARYTRRGGLDINPWRTSDAKAAHAPLIRTIRQ

SEQ ID NO: 49044 - protein, 136 aa, Pseudothermotoga hypogea
  misc_feature (1)..(136): tr|A0A0X1KRZ6|A0A0X1KRZ6_9THEM NADPH-dependent 7-cyano- 7-deazaguanine reductase OS=Pseudothermotoga hypogea DS M 11164 = NBRC 106472 OX=1123384 GN=queF PE=3 SV=1
MPKAEGKTFQFEGHESIRTDFLETIDFDGKDEYIKIETDEFSAVCPFSGLPDIGRVIIEYYPDGGKIVELKSLKYYFVSFRNVGIYQEEATKRIYEDLKRLLKTDRLRVTVVYNVRGGIKTTTQMGDLAGHDRKVE

SEQ ID NO: 49045 - protein, 136 aa, Pseudothermotoga sp.
  misc_feature (1)..(136): tr|A0A3D3V138|A0A3D3V138_9THEM NADPH-dependent 7-cyano- 7-deazaguanine reductase OS=Pseudothermotoga sp. OX=203 3661 GN=queF PE=3 SV=1
MPRAEGKTFQFEGHESIRTDFLETIDFDGKDEYIKIETDEFSAVCPFSGLPDIGRVIIEYYPDGGKIVELKSLKYYFVSFRNVGIYQEEVTKRIYEDLRKLLKTGRLRVTVVYNIRGGIKTTTQMGDLAGHDRKVE

SEQ ID NO: 49046 - protein, 155 aa, Pseudovibrio axinellae
  misc_feature (1)..(155): tr|A0A165UN64|A0A165UN64_9RHOB NADPH-dependent 7-cyano- 7-deazaguanine reductase OS=Pseudovibrio axinellae OX=9 89403 GN=queF PE=3 SV=1
MSKDDIYKNLTMLGGETVQPQSPEEAVLERVPNPQQGTPYAIRFTAPEFTSLCPITNQPDFAHLVIDYVPDEWLVESKSLKLFLTSFRNHGAFHEDCTVSIGKRLVDTLKPIWLRIGGYWYPRGGIPIDVFYQTGEEPKGVWIPEQGVPTYRGRG

SEQ ID NO: 49047 - protein, 155 aa, Pseudovibrio denitrificans
  misc_feature (1)..(155): tr|A0A1I6XPY1|A0A1I6XPY1_9RHOB NADPH-dependent 7-cyano- 7-deazaguanine reductase OS=Pseudovibrio denitrificans OX=258256 GN=queF PE=3 SV=1
MSKDDIYKNLTMLGGDTVQPQSPEEAVLEKVPNPQQGTPYAIRFTAPEFTSLCPITNQPDFAHLVIDYVPDQWLVESKSLKLFLTSFRNHGAFHEDCTVSIGKRLVDTLNPIWLRIGGYWYPRGGIPIDVFYQTGEEPKGVWIPEQGVPTYRGRG

SEQ ID NO: 49048 - protein, 155 aa, Pseudovibrio sp.
  misc_feature (1)..(155): tr|A0A1H1FAH1|A0A1H1FAH1_9RHOB NADPH-dependent 7-cyano- 7-deazaguanine reductase OS=Pseudovibrio sp. Tun.PSC04- 5.I4 OX=1798213 GN=queF PE=3 SV=1
MSKSDIYKNLTMLGGATVQPQSPEEAVLEKVPNPQQSTRYAIRFTAPEFTSLCPITGQPDFAHLVIDYVPDEWLVESKSLKLFLTSFRNHGAFHEDCTVSIGKRIVDTLNPIWLRIGGYWYPRGGIPIDVFYQTGEAPKGVWIPEQGVPTYRGRG

SEQ ID NO: 49049 - protein, 155 aa, Pseudovibrio sp.
  misc_feature (1)..(155): tr|A0A165UC54|A0A165UC54_9RHOB NADPH-dependent 7-cyano- 7-deazaguanine reductase OS=Pseudovibrio sp. Ad26 OX=98 9410 GN=queF PE=3 SV=1
MSNDDIYKNLTMLGGDTVQPQSPEEAVLERVPNPQQGTPYAVRFTAPEFTSLCPITNQPDFAHLVIDYVPDEWLVESKSLKLFLTSFRNHGAFHEDCTVSIGKRLVDTLNPIWLRIGGYWYPRGGIPIDVFYQTGEEPKGVWIPEQGVPTYRGRG

SEQ ID NO: 49050 - protein, 274 aa, Pseudoxanthomonas composti
  misc_feature (1)..(274): tr|A0A4V1N158|A0A4V1N158_9GAMM NADPH-dependent 7-cyano- 7-deazaguanine reductase OS=Pseudoxanthomonas composti OX=2137479 GN=queF PE=3 SV=1
MSTPADSMLGREVAYPAHYDPSLLFPIPREGARRQLGLDPQALPFIGHDRWHAYELGWLDIKGKPQVGTATLTVPCDSQHLIESKSLKLYLNSLNGERFNSAEAVRERIATDLSARAGAPVAVLLGLPPLPRDESADAGVVLDHQDLEIDDYGPPNPGYLSVQADTPAAETLVSHLLKSNCPVTGQPDWATLIVRYRGARIDRAGLLRYIVSYRNHSGFHEQCVEGIFADLLRTCEPECLYVEARYTRRGGLDINPCRATPGMTLPPPVREVRQ

SEQ ID NO: 49051 - protein, 271 aa, Pseudoxanthomonas dokdonensis
  misc_feature (1)..(271): tr|A0A0R0CQ12|A0A0R0CQ12_9GAMM NADPH-dependent 7-cyano- 7-deazaguanine reductase OS=Pseudoxanthomonas dokdonens is OX=344882 GN=queF PE=3 SV=1
MNTPEDSSLGREVAYPDRYDPGLLFPIPRAGARAAMGIDDNALPFIGHDRWHAYELSWLDAGGKPCVGTATLYVPFDSPALIESKSLKLYLNSLNGVRFNSPAAVCERIGNDLSARAGAVVRVSLGLPDMQQHRKGESLDGLSLEINDYGPPNADYLGTLAGGPVTEILFSDLLKSNCPVTGQPDWATLEIRYHGAPINREGLLRYLVSFRDHAGFHEQCVERIFHDLINHCQPQQLSVEARYTRRGGLDINPWRATPGFLPPVPVRDLRQ

SEQ ID NO: 49052 - protein, 271 aa, Pseudoxanthomonas indica
  misc_feature (1)..(271): tr|A0A1T5KM06|A0A1T5KM06_9GAMM NADPH-dependent 7-cyano- 7-deazaguanine reductase OS=Pseudoxanthomonas indica OX =428993 GN=queF PE=3 SV=1
MSTPEESLLGRDVTYPDHYDPSLLFPIPRQAARDSLGLSGDALPFIGHDRWHGYELSWLDARGKPRVATATFTVPCTSSNLIESKSFKLFLNSLNNARFNSDAAVLDCLRTDLSARAGADIEVTFGLPPMAEYPEGDSLDDLDVEIDHYGPPRADGLLVDPSERVQEVLRSALLKSNCPVTGQPDWATVIIRYAGPRIDRNELLRYLISFRNHAEFHEHCVERIYSDLMAHCQPEWVSVEARYTRRGGLDINPWRASPGVAAPVALRENRQ

SEQ ID NO: 49053 - protein, 272 aa, Pseudoxanthomonas sp.
  misc_feature (1)..(272): tr|A0A4V2HD72|A0A4V2HD72_9GAMM NADPH-dependent 7-cyano- 7-deazaguanine reductase OS=Pseudoxanthomonas sp. NML17 1200 OX=2480816 GN=queF PE=3 SV=1
MNTPQESLLGREVAYPSHYDPALLFPIPRAAARAEIGLDAAALPFTGHDRWHAYELAWLDTRGKPQVATATLTVPADAPNLIESKSLKLYLNSLNAERFETLDAVCARVAADLSARAGGAVTVQAGLPPFGEQPGTLLDALELDMDDYGPPNPTHLSADVDDQASETLVSHLLKSNCPVTGQPDWGTVVLRYDGPRIDHAGLLRYLVSFRDHAGFHEQCVERIFADVSARCAPQRLSVEARYTRRGGLDINPWRITPGWDAGITAPIRELRQ

SEQ ID NO: 49054 - protein, 272 aa, Pseudoxanthomonas sp.
  misc_feature (1)..(272): tr|A0A3R8TZJ2|A0A3R8TZJ2_9GAMM NADPH-dependent 7-cyano- 7-deazaguanine reductase OS=Pseudoxanthomonas sp. SGD-1 0 OX=2493089 GN=queF PE=3 SV=1
MNTPHDSSLGREVAYPTRYDPTLLFPIPRAGARAELGLQAGAALPFTGHDRWHAYELGWLDGRGRPQAATATVLVPADSPCLVESKSFKLYLNSLNGERFADAGALRARIAADLSQAAGAAVRVEFGLPPMAAGAEGASIDDADVDIDHYGPPQAEVLRADPAEVAEEYLHSGLLKSNCPVTGQPDWGSVHLRYRGPRIDRGSLLRYLAGYREHAGFHEQCVEQIFLDVLARCRPQWLSVEARYTRRGGLDINPWRATPGQPAPAPLRDLRQ

SEQ ID NO: 49055 - protein, 272 aa, Pseudoxanthomonas spadix
  misc_feature (1)..(272): tr|G7USW1|G7USW1_PSEUP NADPH-dependent 7-cyano-7-deazag uanine reductase OS=Pseudoxanthomonas spadix (strain BD -a59) OX=1045855 GN=queF PE=3 SV=1
MNTPQDSLLGRTVAYPAHYDPDLLFAIARAGARAELGLDSAALPFVGHDRWHAYELGWLDLRGKPQVATATLTVPQDSPNLIESKSLKLYLNSLNATGFASAEAVCAQIAQDLSARAGAPVTVAPGLPGFGHHADALLLDTLELDIDDYGPPNPGHLAAGSHVVSETLVSHLLKSNCPVTGQPDWGSVVLRYEGPKIDHEGLLRYLVSFREHAGFHEQCVERIFVDLSARCAPIRLSVEARYTRRGGLDINPWRVTPGWEDHAPAPLRELRQ

SEQ ID NO: 49056 - protein, 272 aa, Pseudoxanthomonas spadix; identical to SEQ ID NO: 49055
  misc_feature (1)..(272): tr|A0A3M6PMG5|A0A3M6PMG5_9GAMM NADPH-dependent 7-cyano- 7-deazaguanine reductase OS=Pseudoxanthomonas spadix OX =415229 GN=queF PE=3 SV=1

SEQ ID NO: 49057 - protein, 272 aa, Pseudoxanthomonas suwonensis
  misc_feature (1)..(272): tr|E6WP12|E6WP12_PSEUU NADPH-dependent 7-cyano-7-deazag uanine reductase OS=Pseudoxanthomonas suwonensis (strai n 11-1) OX=743721 GN=queF PE=3 SV=1
MNTPQDSSLGREVAYPTRYDPTLLFPIPRAGARAELGLAPGTALPFIGHDRWHAYELGWLDGRGRPQAGTATVVVPADSPCLVESKSFKLYLNSLNAARFDDAEALRLRVVDDLSRAAGAPVEVRFGLPPMAGGQEGTSVDDADVDIDHYGPPQAEVLRADAGEVVEEYLHSGMLKSNCPVTGQPDWGSVHLRYLGPRIDRGSLLRYIAGYREHAGFHEQCVEQIFLDVLARCQPQWLSVEARYTRRGGLDINPWRATPGQPAPGAERDLRQ

SEQ ID NO: 49058 - protein, 277 aa, Pseudoxanthomonas suwonensis
  misc_feature (1)..(277): tr|A0A0E3Z0M7|A0A0E3Z0M7_9GAMM NADPH-dependent 7-cyano- 7-deazaguanine reductase OS=Pseudoxanthomonas suwonensi s OX=314722 GN=queF PE=3 SV=1
MNTPHDSSLGREVAYPTRYDPSLLFPIPRAAGRAELGLAAGATPPFVGHDRWHAYELSWLDARGKPQVSTATLQVPCDSPNLVESKSLKLYLNSLNAARFDDAQALHAAIAGDLSRCTGAAVTVAAGLPPMTGSGADAGNDGESLDGIEADFDDYGPPNAGYLRADDAVQVEEHLCSALLKSNCPVTGQPDWASLHLRYRGPRIDRTGLLRYLVSFREHAGFHEQCVERIFIDLLRQCRPAALSVEARYTRRGGLDINPWRATAGMPAPPALRDLRQ

SEQ ID NO: 49059 - protein, 254 aa, Pseudoxanthomonas taiwanensis
  misc_feature (1)..(254): tr|A0A562DZU6|A0A562DZU6_9GAMM 7-cyano-7-deazaguanine r eductase OS=Pseudoxanthomonas taiwanensis J19 OX=935569 GN=L613_000200000290 PE=4 SV=1
  misc_feature (122)..(130): Xaa can be any naturally occurring amino acid
MNTPHDSSLGREVAYPTRYDPTLLFPIPRAGARAELGLQAGAALPFTGHDRWHAYELGWLDGRGRPQAATATVLVPADSPCLVESKSFKLYLNSLNGERFADAGALRARIAADLSQAAGAAXXXXXXXXXHYGPPQAEVLRADPAEVAEEYLHSGLLKSNCPVTGQPDWGSVHLRYRGPRIDRGSLLRYLAGYREHAGFHEQCVEQIFLDVLARCRPQWLSVEARYTRRGGLDINPWRATPGQPAPAPLRDLRQ

SEQ ID NO: 49060 - protein, 264 aa, Pseudoxanthomonas wuyuanensis
  misc_feature (1)..(264): tr|A0A286D9P2|A0A286D9P2_9GAMM NADPH-dependent 7-cyano- 7-deazaguanine reductase OS=Pseudoxanthomonas wuyuanens is OX=1073196 GN=queF PE=3 SV=1
MLGRDVAYPSQFDPSLLFPIPRAAARESIGIIPDALPFIGHDRWHAYELSWLDARGKPRVATATFTVPCDSPHLIESKSLKLYLNSLNATRFNSDTAVLDRITLDLSVRTGADVAVAFGLPPLAELEEGESLDTLDIEIDHYGPPQADYLVADRQAIVTEVLSSQLLKSNCPVTGQPDWASVIIRYHGPRIDRGELLRYLISFRDHAEFHEQCVERLFHDLMAHCRPQALSVEARYTRRGGLDINPWRATAGFQAPTARRDLRQ

SEQ ID NO: 49061 - protein, 166 aa, Psychrobacillus insolitus
  misc_feature (1)..(166): tr|A0A2W7MFG9|A0A2W7MFG9_9BACI NADPH-dependent 7-cyano- 7-deazaguanine reductase OS=Psychrobacillus insolitus O X=1461 GN=queF PE=3 SV=1
MSGRSQDEGLKDLTLLGNQGTKYSFDYAPEILESVDNLHSTRDYFVKFNCPEFTSLCPITGQPDFATMYISYIPDKKIVESKSLKLYLFSFRNHGDFHEDCVNIIMNDLIELLDPRYIEVWGKFTPRGGISIDPWCNYGRPDTKYVEMADFRLMNHDLYPEKIDNR

SEQ ID NO: 49062 - protein, 166 aa, Psychrobacillus lasiicapitis
  misc_feature (1)..(166): tr|A0A544T6X0|A0A544T6X0_9BACI NADPH-dependent 7-cyano- 7-deazaguanine reductase OS=Psychrobacillus lasiicapiti s OX=1636719 GN=queF PE=3 SV=1
MSGRSHEEGLKDLTLLGNQGTQYSFEYAPEVLESVDSLHSNRDYFVKFNCPEFTSLCPITQQPDFATMYISYIPDKKIVESKSLKLYLFSFRNHGDFHEDCVNIIMNDLIKLLDPRYIEVWGKFTPRGGISIDPWCNYGRPGTKYEEMADYRLMNHDLYPEKIDNR

SEQ ID NO: 49063 - protein, 166 aa, Psychrobacillus psychrodurans
  misc_feature (1)..(166): tr|A0A1I4X977|A0A1I4X977_9BACI NADPH-dependent 7-cyano- 7-deazaguanine reductase OS=Psychrobacillus psychrodura ns OX=126157 GN=queF PE=3 SV=1
MSGRSHDEGLKDLTLLGNQGTKYSFDYAPEVLESVDNLHSTRDYFVKFNCPEFTSLCPITNQPDFATMYISYIPDKKIVESKSLKLYLFSFRNHGDFHEDCVNIIMNDLIELLDPRYIEVWGKFTPRGGISIDPWCNYGRPGTKYVEMADFRLMNHDLYPEKIDNR

SEQ ID NO: 49064 - protein, 166 aa, Psychrobacillus psychrotolerans
  misc_feature (1)..(166): tr|A0A1I5XZ89|A0A1I5XZ89_9BACI NADPH-dependent 7-cyano- 7-deazaguanine reductase OS=Psychrobacillus psychrotole rans OX=126156 GN=queF PE=3 SV=1
MSGRSHDEGLKDLTLLGNQGTKYSFDYAPEVLESVDNLHSTRDYFVKFNCPEFTSLCPITNQPDFATMYISYIPDKKIVESKSLKLYLFSFRNHGDFHEDCVNIIMNDLIELLDPRYIEVWGKFTPRGGISIDPWCNYGRPGTKYVEIADFRLMNHDLYPEKIDNR

SEQ ID NO: 49065 - protein, 166 aa, Psychrobacillus soli
  misc_feature (1)..(166): tr|A0A544TGC9|A0A544TGC9_9BACI NADPH-dependent 7-cyano- 7-deazaguanine reductase OS=Psychrobacillus soli OX=154 3965 GN=queF PE=3 SV=1
MSGRSQEEGLKDLTLLGNQGTQYSFEYAPEVLESVDSLHSNRDYFVKFNCPEFTSLCPITQQPDFATMYISYIPDKKIVESKSLKLYLFSFRNHGDFHEDCVNIIMNDLIKLLDPRYIEVWGKFTPRGGISIDPWCNYGRPGTKYEEIANYRLMNHDLYPEKIDNR

SEQ ID NO: 49066 - protein, 166 aa, Psychrobacillus sp.; identical to SEQ ID NO: 49065
  misc_feature (1)..(166): tr|A0A1H9VVR8|A0A1H9VVR8_9BACI NADPH-dependent 7-cyano- 7-deazaguanine reductase OS=Psychrobacillus sp. OK032 O X=1884358 GN=queF PE=3 SV=1

SEQ ID NO: 49067 - protein, 166 aa, Psychrobacillus sp.
  misc_feature (1)..(166): tr|A0A544TMM6|A0A544TMM6_9BACI NADPH-dependent 7-cyano- 7-deazaguanine reductase OS=Psychrobacillus sp. Z8 OX=2 325572 GN=queF PE=3 SV=1
MSGRSQEEGLKDLTLLGNQGTQYSFEYAPEVLESVDSLHTNRDYFVKFNCPEFTSLCPITQQPDFATMYISYIPDKKIVESKSLKLYLFSFRNHGDFHEDCVNIIMNDLIKLLDPRYIEVWGKFTPRGGISIDPWCNYGRPGTKYEEIANYRLMNHDLYPEKIDNR

SEQ ID NO: 49068 - protein, 292 aa, Psychrobacter alimentarius
  misc_feature (1)..(292): tr|A0A144NHH8|A0A144NHH8_9GAMM NADPH-dependent 7-cyano- 7-deazaguanine reductase OS=Psychrobacter alimentarius OX=261164 GN=A3K91_0543 PE=3 SV=1
MSIHGILGEQTTNYPTQYSPETLYPIAREMGRNAIGWHADKLTIGVDWWQAFEMSWLNTQGVSQVAIARFSIPASSPYIVESKSLKLYLNSINFTEFASWQEVETLIAKDLSACVQADVTVELFGLEEDLSSLLIAKPEGICIDNALDALSDITEKVTLCEHPDASLLQDQTRADDSQLERDESQPYTFYSNLLRSNCPVTNQPDWGTLAVSITTDKPFSNANMLRYILSFRQHNGFHEQCVEQIFADLSKYYEPSELMVRAWYTRRGGIDINPCRVSDASLLPKPSRLIRQ

SEQ ID NO: 49069 - protein, 289 aa, Psychrobacter aquaticus
  misc_feature (1)..(289): tr|U4T659|U4T659_9GAMM NADPH-dependent 7-cyano-7-deazag uanine reductase OS=Psychrobacter aquaticus CMS 56 OX=1 354303 GN=M917_0678 PE=3 SV=1
MSIHGILGEQTTDYPTEYNPETLYPIARSMGRDAIAWHAGKLAVGVDWWQAFEMSWLNTQGLSQVAIARFSIPASSPFIVESKSLKLYLNSINFTEFASWEDVETLIAKDLSACVQADVTVELFGLEDDRSELLIIQPEGVCIDSALADTTDKVTLCEHPDASLLQDQTQADDSKLESGKPQPYTFYSNLLRSNCPVTNQPDWGTLAVSITSEKSVNEANMLRYILSFRQHNGFHEQCVEQIFADLSQYYAPSELMVRAWYTRRGGIDINPCRVSNVSLLPKPSRLIRQ

SEQ ID NO: 49070 - protein, 285 aa, Psychrobacter arcticus
  misc_feature (1)..(285): sp|Q4FUL7|QUEF_PSYA2 NADPH-dependent 7-cyano-7-deazagua nine reductase OS=Psychrobacter arcticus (strain DSM 17 307 / 273-4) OX=259536 GN=queF PE=3 SV=1
MSIHGILGEQTTDYPTEYSPETLYPIARSMGRDVIGWQNDKLEVGVDWWQAFELSWLNQQGISQVAIARFGIPANSPFIVESKSLKLYLNSINFTEFGSWAEVQKLIAEDLSKCVQAEVQVELFHLADRHSGLLIAQPDGICIDDALVNSTEKVALMLHPDASLLERDSSDAQISDGKTFSFYSNLLRSNCPVTNQPDWAALAVSITSKKVVNQANMLRYILSFRQHNGFHEQCVEQIFADLSQYYEPSKLMVRAWYTRRGGIDINPCRVSDIALLPVPSRLIRQ

SEQ ID NO: 49071 - protein, 285 aa, Psychrobacter cryohalolentis
  misc_feature (1)..(285): sp|Q1QDK8|QUEF_PSYCK NADPH-dependent 7-cyano-7-deazagua nine reductase OS=Psychrobacter cryohalolentis (strain K5) OX=335284 GN=queF PE=3 SV=1
MSIHGILGEQTTDYPTEYSPETLYPIARSMGREVIGWQDDKLEVGFDWWQAFELSWLNEQGISQVAIARFGIPASSPFIVESKSLKLYLNSINFTEFGSLETVQTLIAKDLSKCVQAEVNVELFDLEDEHSGLLIAQPDGICIDDALADSTEKVALTLHPDASLLERNTSDAKISEGKTFSFYSNLLRSNCPVTNQPDWGTLAVSITSNKPVNNANMLRYILSFRQHNGFHEQCVEQIFADLSQYYEPSELMVRAWYTRRGGIDINPCRVSDIALLPVPSRLIRQ

SEQ ID NO: 49072 - protein, 290 aa, Psychrobacter fozii
  misc_feature (1)..(290): tr|A0A2V4UWH9|A0A2V4UWH9_9GAMM NADPH-dependent 7-cyano- 7-deazaguanine reductase OS=Psychrobacter fozii OX=1984 80 GN=DFP82_10960 PE=3 SV=1
MSIHGILGEQTTDYPTEYSPETLYPIARSMGRDVIGWQDDKLTVGVDWWQAFEMSWLNTQGISQVAIARFAIPASSPFIVESKSLKLYLNSINFTEFASWAEVQTLIAKDLSACIQADVIVELFGLDDEQGNKQSGLLIAQPEGVCIDEALANSSEKVALCEHPDASLLNDHEAESMISDSTQPYTFYSNLLRSNCPVTNQPDWGTLAVSITTDKPVNTANVLRYILSFRQHNGFHEQCVEQIFADLSRYYKPSALMVRAWYTRRGGIDINPCRVSDITLLPQPSRLIRQ

SEQ ID NO: 49073 - protein, 288 aa, Psychrobacter frigidicola
  misc_feature (1)..(288): tr|A0A5C7AA40|A0A5C7AA40_9GAMM NADPH-dependent 7-cyano- 7-deazaguanine reductase OS=Psychrobacter frigidicola O X=45611 GN=queF PE=3 SV=1
MSIHGILGEQTTTYPTQYNPEMLYPIARSVGRDAINWQDDKLNVGVDWWHSFEMSWLNPQGISQVAMARFSIPASSPFIVESKSLKLYLNSINFTEFNSWQEVETLIAKDLSKCVQADVQVELFELNDNDSGLLITQPDGVCIDNALADSTDKVALTVHPDASLLGINDSGHAGITKNEDQSFTFYSNLLRSNCPVTNQPDWGTLAVTITTTQMINQANMLRYILSFRQHNGFHEQCVEQIFADLSQYYQPSSLMVRAWYTRRGGIDINPCRVSELSLLPQPSRLIRQ

SEQ ID NO: 49074 - protein, 291 aa, Psychrobacter immobilis
  misc_feature (1)..(291): tr|A0A2V1ZZ80|A0A2V1ZZ80_PSYIM NADPH-dependent 7-cyano- 7-deazaguanine reductase OS=Psychrobacter immobilis OX= 498 GN=C8D84_109104 PE=3 SV=1
MSIHGILGEQTTDYPTEYSPETLYPIARSMGRDVIGWQDDKLMVGIDWWQAFEMSWLNQQGISQVAIARFGIPASSPFIVESKSLKLYLNSINFTEFVSWAEVQALIAKDLSACVQADVQVELFGLNDDLHDKTSGLLVAQSEGICIDDALANSSEKVALCEHPDASLLNDDQTGAHSGVDSAQPYTFYSNLLRSNCPVTNQPDWGTLAVSMTSNKTVDEAGMLRYILSFRQHNGFHEQCVEQIFADLSKYYEPSELMVRAWYTRRGGIDINPCRVSDITLLPKPSRLIRQ

SEQ ID NO: 49075 - protein, 289 aa, Psychrobacter pacificensis
  misc_feature (1)..(289): tr|A0A1G6X4K4|A0A1G6X4K4_9GAMM NADPH-dependent 7-cyano- 7-deazaguanine reductase OS=Psychrobacter pacificensis OX=112002 GN=SAMN05660405_01174 PE=3 SV=1
MSIHGILGEQTTDYPTEYSPETLYPIARSMGRDVIGWHADKLTVGVDWWQAFELSWLNLQGISQVAMVRFSIPASSPFIVESKSLKLYLNSINFTEFASWNDVQALIAKDLSACLQAEVQVELFTLNDAASLLIAQPTGICIDDALAGSTGKIALTEHPDASLLSNDETEASSERVANNSNQPYVFYSNLLRSNCPVTNQPDWGTLAVSITTDKTFNNANMLRYILSFRQHNGFHEQCVEQIFADLSQYYQPSELMVRAWYTRRGGIDINPCRVSDMALLPAPSRLIRQ

SEQ ID NO: 49076 - protein, 292 aa, Psychrobacter pasteurii
  misc_feature (1)..(292): tr|A0A1R4EGH8|A0A1R4EGH8_9GAMM NADPH-dependent 7-cyano- 7-deazaguanine reductase OS=Psychrobacter pasteurii OX= 1945520 GN=queF PE=3 SV=1
MSIHGVLGESTSYPKTYQPDTLYAIPRSMGRNEINWQDDKLQVGVDWWHAFEVSWLNPQGISQMAIARFGIPASSPNIVESKSLKLYLNSLNFTEFESWEAVQQTIAKDLAACVGADVEVSLFELDAISSGSEADTGFLIAHPKGKCIDKALDNSEIKVELVEHPDAKFLAEEGQSESVSNEAEKEYQLYSNLLRSNCPVTNQPDWGTLAIDITTSQYIDEAKLLSYILSFRQHNGFHEQCVEQIFADLSQRYSPSKLMVRAWYTRRGGIDINPCRVSDSSLLPKPSRLVRQ

SEQ ID NO: 49077 - protein, 292 aa, Psychrobacter phenylpyruvicus
  misc_feature (1)..(292): tr|A0A379LLI7|A0A379LLI7_9GAMM NADPH-dependent 7-cyano- 7-deazaguanine reductase OS=Psychrobacter phenylpyruvic us OX=29432 GN=queF PE=3 SV=1
MSIHGVLGESTSYPKTYQPDTLYAIPRSMGRKEINWQDDNLQVGVDWWHAFEVSWLNSKGISQMAIARFGIPASSPNIVESKSLKLYLNSLNFTEFESWQTVEQTIAKDLAACVGAEVQVSLFELDAISSGRDADSGFLIAHPQGKCIDQALDNLQGKVELVEHPDATLLAEDADSKPSLDQAEIEYQLYSNLLRSNCPVTNQPDWGTLAIDITTSQDIDEAKLLTYILSFRQHNGFHEQCVEQIFADLSQRYSPSKLMVRAWYTRRGGIDINPCRVSDSRLLPKPSRLVRQ

SEQ ID NO: 49078 - protein, 292 aa, Psychrobacter piechaudii
  misc_feature (1)..(292): tr|A0A1R4GUI8|A0A1R4GUI8_9GAMM NADPH-dependent 7-cyano- 7-deazaguanine reductase OS=Psychrobacter piechaudii OX =1945521 GN=queF PE=3 SV=1
MSIHGVLGESTSYPKTYQPDTLYAIPRSMGRNEINWQEDKLQVGVDWWHAFEMSWLNSQGISQMAIARFGIPASSPNIVESKSLKLYLNSLNFTEFDSWETVEQTIAKDLAACVGAEVQVSLFGLDAISSGREADTGFLIAHPQGKCIDQALDNLPGKVELVEHPDASLLAEDVDVSASLDQAEKQYQLYSNLLRSNCPVTNQPDWGTLAIDITTSQNIDEAKLLTYILSFRQHNGFHEQCVEQIFADLSQRYSPSKLMVRAWYTRRGGIDINPCRVSDSSLLPQPSRLVRQ

SEQ ID NO: 49079 - protein, 289 aa, Psychrobacter piscatorii
  misc_feature (1)..(289): tr|A0A0T6DTM4|A0A0T6DTM4_9GAMM NADPH-dependent 7-cyano- 7-deazaguanine reductase OS=Psychrobacter piscatorii OX =554343 GN=AS194_05550 PE=3 SV=1
MSIHGILGEQTTDYPTEYSPETLYPIARSMGRDVIGWHADKLTVGVDWWQAFEISWLNLQGISQVAMARFSIPASSPFIVESKSLKLYLNSINFTEFASWNDVQALIAKDLSACLQAEVQVELFTLNDAASLLIAQPTGICIDDALAGSTGKIELTEHPDASLLSNDETEASSERVANNSNQPYVFYSNLLRSNCPVTNQPDWGTLAVSITTDKTFNNANMLRYILSFRQHNGFHEQCVEQIFADLSQYYQPETLMVRAWYTRRGGIDINPCRVSDMALLPAPSRLIRQ

SEQ ID NO: 49080 - protein, 292 aa, Psychrobacter sp.
  misc_feature (1)..(292): tr|A0A229G135|A0A229G135_9GAMM NADPH-dependent 7-cyano- 7-deazaguanine reductase OS=Psychrobacter sp. DAB_AL32B OX=1028414 GN=CAN34_13120 PE=3 SV=1
MSIHGILGEQTTDYPTNYSPETLYPIARSMGRNIIGWQDDKLKVGVDWWHAFELSWLNTQGISQVAVARFGIPASSEYIVESKSLKLYLNSINFTEFASWAEVQTLITKDLSACVQAEVTVELFGLDNDLHDKNSGLLVTQPEGVCIDDALAGSTDKVALTVHPDASLLNSLEDKSTEIQQDISQSFTFYSNLLRSNCPVTNQPDWGTLAVSINSNKPVNNANMLRYILSFRQHNGFHEQCVEQIFADLSKYYEPSELMVRAWYTRRGGIDINPCRVSDIALLPVPSRLIRQ

SEQ ID NO: 49081 - protein, 291 aa, Psychrobacter sp.
  misc_feature (1)..(291): tr|X0RG78|X0RG78_9GAMM NADPH-dependent 7-cyano-7-deazag uanine reductase OS=Psychrobacter sp. JCM 18903 OX=1298 610 GN=JCM18903_2236 PE=3 SV=1
MSIHGILGEQTTDYPTEYSPETLYPIARSMGRDVIGWQDDKLMVGIDWWQAFEMSWLNPQGLSQVAIARFGIPASSPFIVESKSLKLYLNSINFTEFASWNDVQALIAKDLSAVYKQTVQVELFSLNDDLHNKTTGLLIAQPEGVCIDNALGNSTDKVALTMHPDASLLSGDKTDAHSEIHSVQPYTFYSNLLRSNCPVTNQPDWGTLAVSITSNKTVDEAGMLRYILSFRQHNGFHEQCVEQIFADLSQYYEPSELMVRAWYTRRGGIDINPCRVSDIRLMPQPSRLIRQ

SEQ ID NO: 49082 - protein, 287 aa, Psychrobacter urativorans
  misc_feature (1)..(287): tr|A0A0M4TFP3|A0A0M4TFP3_9GAMM NADPH-dependent 7-cyano- 7-deazaguanine reductase OS=Psychrobacter urativorans O X=45610 GN=AOC03_08835 PE=3 SV=1
MNIHGILGEQTTDYPTQYSPETLYPIARSIGRDAIGWQDDKLNVGVDWWHAFEMSWLNTQGISQVAMARFSIPASSPFIVESKSLKLYLNSLNFTEFNNWQAVETLIAKDLSKCVQAAVQVELFALNNNDSGLLITQPAGVCIDNALADSTDKVALSLHPDASLLKVDSVDADAQQNGSQTFTFYSNLLRSNCPVTNQPDWGTLAVTMTSEKAVNQANMLRYILSFRQHNGFHEQCVEQIFADLSQYYEPSALMVRAWYTRRGGIDINPCRLSESSLLPTPSRLIRQ

SEQ ID NO: 49083 - protein, 285 aa, Psychromonas ingrahamii
  misc_feature (1)..(285): sp|A1SYB5|QUEF_PSYIN NADPH-dependent 7-cyano-7-deazagua nine reductase OS=Psychromonas ingrahamii (strain 37) O X=357804 GN=queF PE=3 SV=1
MTNKPLYDQDSTLKNLSLGKITEYKSSYDPTLLQAVPRSLNRNELQLSEHNLPFYGVDLWNIYELSWLNSKGKPVVATGVVKVPFDSKNLIESKSFKLYLNSFNQSKFVSIEAVQKVLTADLSHCADKAVSVELHTDLDNFSDKLGTFSGQCLDVLDIEIDNYQLNADYLQDLSSQEQVTETLYSHLLKSNCLITSQPDWASIEISYTGKKLDREKLLRYLISFRQHNEFHEQCVERIYCDIMKFGQIDSLCVYARYTRRGGLDINPLRTTEHINEINNLRLLRQ

SEQ ID NO: 49084 - protein, 285 aa, Psychromonas sp.
  misc_feature (1)..(285): tr|A0A4Y7ZYP0|A0A4Y7ZYP0_9GAMM NADPH-dependent 7-cyano- 7-deazaguanine reductase OS=Psychromonas sp. RZ22 OX=25 55643 GN=queF PE=3 SV=1
MSNSNLYTQDDALKNLSLGKVTEYKCHYDNTLLQGVPRSLNRNELALAAESLPFYGDDLWNIYELSWLNKKGKPMVATGLVKVPFDSEFLIESKSFKLYLNSFNQSRFDSVETVQNTLMADLSACANKPVEVTLNATLDNINDTLGTFSGINLDTLDIEVSEYQLSPSLLENISSAETVTETLYSHLLKSNCLITSQPDWASVEISYTGGQLDREKLLRYLISFRQHNEFHEQCVERIFCDLMKYGSLTSLTVYARYTRRGGLDINPLRSTTPSPSINNMRLLRQ

SEQ ID NO: 49085 - protein, 285 aa, Psychromonas sp.
  misc_feature (1)..(285): tr|A0A366WD21|A0A366WD21_9GAMM NADPH-dependent 7-cyano- 7-deazaguanine reductase OS=Psychromonas sp. B3M02 OX=2 267226 GN=queF PE=3 SV=1
MSNSTLYDQDVALTGLSLGKVTEYKCHYDNSLLQGVPRSLNRNELSLEANSLPFYGIDLWNIYELSWLNSKGKPIVATGVVKVPYDSEFLIESKSFKLYLNSFNQSKFDSVETVQKILSNDLSACAKKPVEVTLNANLNTVVDELGTLSGINIDELDIEVDQYQLSPNLLQDISLEETVTETLYSNLLKSNCLITSQPDWGSVQISYTGKQLDQEKLLRYLVSFRQHNEFHEQCVERIFCDLMAHGSLTSLTVYARYTRRGGLDINPLRSTEASPSIDNVRLVRQ

SEQ ID NO: 49086 - protein, 282 aa, Psychrosphaera saromensis
  misc_feature (1)..(282): tr|A0A2S7UWE3|A0A2S7UWE3_9GAMM NADPH-dependent 7-cyano- 7-deazaguanine reductase OS=Psychrosphaera saromensis O X=716813 GN=queF PE=3 SV=1
MTSKYTETGALDELTLGKQTAYETKYNPKLLQPVPRSLNRDDLNLSNPLPFYGHDLWTGYEVSWLNAKGKPVVAIAEFVVPATSANLIESKSFKLYLNSFNQTKFANWDDVQSAMVKDLSQCAGQAVDVDLLSVDQVAPFQVTALNGNNIDELDIEIDNYDFNNQLLQLDATNIKVTEELNSHLLKSNCLITSQPDWASIVISYTGLKIDHESLLRYLISFRMHNEFHEQCVERIFTDIQALCKPSELTVYARYTRRGGLDINPYRTTSSTLIPDRIRTNRQ

SEQ ID NO: 49087 - protein, 153 aa, Puniceibacterium antarcticum
  misc_feature (1)..(153): tr|A0A2G8RF77|A0A2G8RF77_9RHOB NADPH-dependent 7-cyano- 7-deazaguanine reductase OS=Puniceibacterium antarcticu m OX=1206336 GN=queF PE=3 SV=1
METIYSNLTQLGGKTELPASPEEATLERVANPQADVSYCVRFTAPEFTSLCPMTGQPDFAHLVIDYVPDAFLVESKSLKLFLGAFRNHGAFHEDCTISIARRLVDLLSPRWLRIGGYWYPRGGIPIDVFWQTGATPNEVWIPDQGVPPYRGRG

SEQ ID NO: 49088 - protein, 140 aa, Puniceicoccaceae bacterium
  misc_feature (1)..(140): tr|A0A2E6TK06|A0A2E6TK06_9BACT NADPH-dependent 7-cyano- 7-deazaguanine reductase OS=Puniceicoccaceae bacterium OX=2026784 GN=queF PE=3 SV=1
MKEGNPEHVNLTKLGEGGTSPKRELETFPNRNPERDYVVELRTSEFTCICPKTGQPDFADILIRYVPDQKIVESKSLKLYLWTFRDQGTFHEHFANLLLDDLVAALDPRWCRVEVDFNARGGIGIMVSAEHGTNPEIGYS

SEQ ID NO: 49089 - protein, 124 aa, Puniceicoccaceae bacterium
  misc_feature (1)..(124): tr|A0A368BEY2|A0A368BEY2_9BACT NADPH-dependent 7-cyano- 7-deazaguanine reductase OS=Puniceicoccaceae bacterium OX=2026784 GN=queF PE=3 SV=1
MDIETFPNPNAERNYTIQHIQEEFTSTCPMTGHPDYATVVFSYAPDEVCMELKAMKLYLHSFRNKGIFFEAASNQIFEDFYVACKPRWARLETIWRGRGGIRSNVVVEDSQDGYDGPVTLPFSA

SEQ ID NO: 49090 - protein, 270 aa, Pusillimonas ginsengisoli
  misc_feature (1)..(270): tr|A0A4U5LHV5|A0A4U5LHV5_9BURK NADPH-dependent 7-cyano- 7-deazaguanine reductase OS=Pusillimonas ginsengisoli O X=453575 GN=queF PE=3 SV=1
MLQHAPLGQDVAFPQAYDPLLLFPISRSTNRQTLPIPAKWYGADIWNAYELSWLTPRGKPVVAVGQFTFPYSSPSLVESKSFKLYLNSFSEERYVDAAAVSAVMRHDLEKVTEQQIAINIVPLSGNERQLCQPLEGINIDAADIEIKHYSPAPERLACLSDASVVTETLVSDLLKSNCPVTGQPDWASVQIRYTGPQINREALLEYIVSLRRHTEFHEHCVEKMFCDIWAACAPQALFVRACYTRRGGLDINPWRSSEPAQPQPARTIRQ

SEQ ID NO: 49091 - protein, 273 aa, Pusillimonas noertemannii
  misc_feature (1)..(273): tr|A0A2U1CSW2|A0A2U1CSW2_9BURK NADPH-dependent 7-cyano- 7-deazaguanine reductase OS=Pusillimonas noertemannii O X=305977 GN=queF PE=3 SV=1
MNTPLIHAPLGQEVVYPTSYDPKLLFPIDRAPNRQTLGPLPDWAGADIWNAYEISWLNPRGKPIVATARFVFPHSSPRLVESKSFKLYLNSFNDERFANEQEVGERMRADLAAACGATVEVEITRVGRQAGQGYEALEGENIDDIDVEIEVYTPSPELLRCVPGGAVVEETLVSDLLKSNCPVTGQPDWASVQVRYTGPQIDRAALLKYIVSLRRHDEFHEHCVEKMYCDIWRICRPESLLVYARYTRRGGLDINPWRASSKVEVSQVRTVRQ

SEQ ID NO: 49092 - protein, 274 aa, Pusillimonas sp.
  misc_feature (1)..(274): tr|A0A368WHT5|A0A368WHT5_9BURK NADPH-dependent 7-cyano- 7-deazaguanine reductase OS=Pusillimonas sp. EA3 OX=218 3983 GN=queF PE=3 SV=1
MSSSSLDQAPLGRDVVYPTHYDASILFPVNREINRAQLPFIPNWAGADIWHAYEVSWLNARGKPMVAMARFIVPHNSPNIIESKSFKLYLNSFNESRFNSMNHVQQRLEKDLSAVAGAHIEVALTDLHDIQTIQCAPLEGLNIDGADVDIEHYQPNAGLLKCTTNPQPVNETLTSDLLKSNCPVTGQPDWGSLQIQYQGPQIDRESLLKYIVSLRQHTEFHEHCVEKIYCDIWQACQPEFLFVYACYTRRGGLDINPWRSSGPLVFEPARTPRQ

SEQ ID NO: 49093 - protein, 274 aa, Pusillimonas sp.
  misc_feature (1)..(274): tr|A0A410GBG1|A0A410GBG1_9BURK NADPH-dependent 7-cyano- 7-deazaguanine reductase OS=Pusillimonas sp. ye3 OX=202 8345 GN=queF PE=3 SV=1
MQDTHLAHAPLGQDVVYPVTYDAGLLFPIERARNRQQLNIPSVWHGADIWNAYELSWLDARGKPVVAIGRFVFDHSSPRLIESKSFKLYLNSFNEERQQDEATVRGTLQRDLERACGGPVEVSLQRLGDGQALQCAPMDGISIDGADIEISAYEPTPGLLQCVADAPQVTETLTSDLLKSNCPVTGQPDWGSVQVRYTGPRIDRDALLRYIVSLRRHTEFHEHCVEKMYCDIWQACQPESLFVYARYTRRGGLDINPWRSSAATTVVDARTPRQ

SEQ ID NO: 49094 - protein, 130 aa, Unknown
  misc_feature (1)..(130): tr|A0A1E4ZHQ3|A0A1E4ZHQ3_9BACT NADPH-dependent 7-cyano- 7-deazaguanine reductase OS=PVC group bacterium (ex Bug ula neritina AB1) OX=1868283 GN=queF PE=3 SV=1
MEKKTYQNAQGDLSNLQTPDIEVWENQYKDRDYTVSFELAEFTCVCPKTGLPDFATLYLNYVPEKWCIELKSFKMYILFYRDIGIFHEHFVNKILDDIVKACSPRSASLKAIVNTRGGILTTVESIYPYK

SEQ ID NO: 49095 - protein, 163 aa, Pyramidobacter piscolens
  misc_feature (1)..(163): tr|D1Y6U4|D1Y6U4_9BACT NADPH-dependent 7-cyano-7-deazag uanine reductase OS=Pyramidobacter piscolens W5455 OX=3 52165 GN=queF PE=3 SV=1
MTRTPEEMKDLSLLGRRTAYKSDYAPEVLESFPNKHPGRDYFVKFNCPEFTSLCPMTGQPDFANITISYVPDGRLVESKSLKLYLFSFRNHGDFHEDCVNVILEDLVRLLSPKYIEVWGRFTPRGGLSIDPYANWGKPGTAWEKTAEDRLRLHDLSPELVNYR

SEQ ID NO: 49096 - protein, 163 aa, Pyramidobacter sp.
  misc_feature (1)..(163): tr|A0A3A9HNH0|A0A3A9HNH0_9BACT NADPH-dependent 7-cyano- 7-deazaguanine reductase OS=Pyramidobacter sp. CG50-2 O X=2382160 GN=queF PE=3 SV=1
MTRTPEEMKDLSLLGHKTAYRSDYAPEVLESFPNKHPGRDYFVKFNCPEFTSLCPMTGQPDFANITISYVPDERLVESKSLKLYLFSFRNHGDFHEDCVNVILEDLVRLMSPKYIEVWGRFTPRGGLSIDPYANWGKPGTVWEKTAEERLRLHDLSPELVNYR

SEQ ID NO: 49097 - protein, 163 aa, Pyramidobacter sp.; identical to SEQ ID NO: 49096
  misc_feature (1)..(163): tr|A0A1V4AN84|A0A1V4AN84_9BACT NADPH-dependent 7-cyano- 7-deazaguanine reductase OS=Pyramidobacter sp. C12-8 OX =1943580 GN=queF PE=3 SV=1

SEQ ID NO: 49098 - protein, 147 aa, Pyrinomonas methylaliphatogenes
  misc_feature (1)..(147): tr|A0A0B6WZ87|A0A0B6WZ87_9BACT NADPH-dependent 7-cyano- 7-deazaguanine reductase OS=Pyrinomonas methylaliphatog enes OX=454194 GN=queF PE=3 SV=1
MKVTTEGMVLPPPNWQGLDIRSTPREEMNLYPLDTFPYEFVGREIRIHFEIPEFTCICPFSDFPDFATIRIEYVPNERCIELKSLKLYINSFRQVKIFHEHVVNVILEDFVRACDPLRVEIEGDFNVRGNIKTIVRASYQRPQQADK

SEQ ID NO: 49099 - protein, 166 aa, Quasibacillus thermotolerans
  misc_feature (1)..(166): tr|A0A0F5HV10|A0A0F5HV10_9BACI NADPH-dependent 7-cyano- 7-deazaguanine reductase OS=Quasibacillus thermotoleran s OX=1221996 GN=queF PE=3 SV=1
MAGRNEEELKKDISLLGNQGTTYTFEYDPSILETFENKHQNRDYFVKFNCPEFTSLCPMTGQPDFATIYISYIPDVKMVESKSLKLYLFSFRNHGDFHEDCMNIILNDLVELMDPRYIEVWGKFTPRGGISIDPYTNYGRPGTKYEKMAEYRMMNHDLYPETVDNR

SEQ ID NO: 49100 - protein, 139 aa, Quisquiliibacterium sp.
  misc_feature (1)..(139): tr|A0A5C8P1N5|A0A5C8P1N5_9BURK NADPH-dependent 7-cyano- 7-deazaguanine reductase OS=Quisquiliibacterium sp. CC- CFT501 OX=2498847 GN=queF PE=3 SV=1
MPSKPATQLETFPNPAPRRDYVVHIEIPEFTCLCPLTGQPDFATIVLDYIPDKRNLELKALKLYMWSFRDQGAFHEDVTNRLLDAFAKATAPRFMRVTAKWYVRGGIFTTVVAEHRKRGWKPAPRVELEHFPSERSTRG

SEQ ID NO: 49101 - protein, 281 aa, Rahnella aquatilis
  misc_feature (1)..(281): tr|H2IXL3|H2IXL3_RAHAC NADPH-dependent 7-cyano-7-deazag uanine reductase OS=Rahnella aquatilis (strain ATCC 330 71 / DSM 4594 / JCM 1683 / NBRC 105701 / NCIMB 13365 / CIP 78.65) OX=745277 GN=queF PE=3 SV=1
MSSYQDNPALAQLTLGKSTAYVDQYDASLLQAVPRSMNREPLGLYPDDLPFHGADIWTLYELSWLNAKGLPQVAVGEISLNAHSQNLIESKSFKLYLNSFNQTVFPDWQAVQETLTRDLSACAQGDVTVTVSRLSEIEGSPVGHFEGTCIDEQDIEIDSYVFSTDYLANAKGDEIVEETLVSHLLKSNCLITHQPDWGSVQIQYRGPKIDREALLRYLVSFRHHNEFHEQCVERIFNDLMRFCQPEKLAVYARYTRRGGLDINPWRSNFPFEPATTRLVRQ

SEQ ID NO: 49102 - protein, 281 aa, Rahnella aquatilis
  misc_feature (1)..(281): tr|H8NMN8|H8NMN8_RAHAQ NADPH-dependent 7-cyano-7-deazag uanine reductase OS=Rahnella aquatilis HX2 OX=1151116 G N=queF PE=3 SV=1
MSSYQDNPALAQLTLGKSTAYVDQYDASLLQAVPRSMNREPLGLYPDNLPFHGADIWTLYELSWLNAKGLPQVAVGEISLNANSQNLIESKSFKLYLNSFNQTVFADWQAVKETLTRDLSACAQGEVTVSVSRLSEIEGSAVGHFDGVCIDEQDIEIDSYEFSTDYLANAKGAEIVEESLVSHLLKSNCLITHQPDWGSVQVQYRGPKIDREALLRYLVSFRHHNEFHEQCVERIFNDLLRFCQPEKLAVYARYTRRGGLDINPWRSNFPFEPATARLVRQ

SEQ ID NO: 49103 - protein, 281 aa, Rahnella inusitata
  misc_feature (1)..(281): tr|A0A419LYI5|A0A419LYI5_9GAMM NADPH-dependent 7-cyano- 7-deazaguanine reductase OS=Rahnella inusitata OX=58169 GN=queF PE=3 SV=1
MSSYQDNPALAQLTLGKSTAYVDHYDASLLQAVPRSMNREPLGLFPDTLPFHGADIWTLYELSWLNAKGLPQVAVGEISLNADSQNLIESKSFKLYLNSFNQTVFPDWQAVQETLTRDLSACAQGNVTVTISRLSDIEGSPVGHFSGECIDDQDIEIDSYEFSTGYLAEAAGDEIVEESLVSHLLKSNCLITHQPDWGSVQIQYRGPKIDREALLRYVVSFRHHNEFHEQCVERIFNDILRFCQPEKLAVYARYTRRGGLDINPWRSNFPFEPATARLVRQ

SEQ ID NO: 49104 - protein, 281 aa, Rahnella sp.; identical to SEQ ID NO: 49102
  misc_feature (1)..(281): tr|A0A0H3F6J2|A0A0H3F6J2_RAHSY NADPH-dependent 7-cyano- 7-deazaguanine reductase OS=Rahnella sp. (strain Y9602) OX=741091 GN=queF PE=3 SV=1

SEQ ID NO: 49105 - protein, 281 aa, Rahnella sp.
  misc_feature (1)..(281): tr|A0A2N0VWU2|A0A2N0VWU2_9GAMM NADPH-dependent 7-cyano- 7-deazaguanine reductase OS=Rahnella sp. AA OX=2057180 GN=queF PE=3 SV=1
MSSYQDNPALAQLTLGKSTAYVDHYDASLLQAVPRSMNREPLGLFPDNLPFQGADIWTLYELSWLNAKGLPQVAVGEISLKADSQNLIESKSFKLYLNSFNQTVFPDWQAVQETLTRDLSACAQGDVTVTVSRLSDIEGSPVGHFAGTCIDDQDIEIDSYEFSTDYLADAAGEEIVEESLVSHLLKSNCLITHQPDWGSVQIQYRGPKIDREALLRYLVSFRHHNEFHEQCVERIFNDILRFCQPEKLAVYARYTRRGGLDINPWRSNFPFEPATARLVRQ

SEQ ID NO: 49106 - protein, 281 aa, Rahnella woolbedingensis
  misc_feature (1)..(281): tr|A0A419N3L0|A0A419N3L0_9GAMM NADPH-dependent 7-cyano- 7-deazaguanine reductase OS=Rahnella woolbedingensis OX =1510574 GN=queF PE=3 SV=1
MSSYQDNPALAQLTLGKSMAYVDHYDASLLQAVPRSMNREPLGLYPDNLPFHGADIWTLYELSWLNAKGLPQVAVGEISLNANSQNLIESKSFKLYLNSFNQTVFPDWETVQETLTRDLSACAQGDVTVTVSRLSEIEGTPVGHFAGVCIDEQDIEIDSYEFSTDYLANAKGDEIVEESLVSHLLKSNCLITHQPDWGSVQIQYRGPKIDREALLRYLVSFRHHNEFHEQCVERIFNDLLRFCQPEKLAVYARYTRRGGLDINPWRSNFPFEPATARLVRQ

SEQ ID NO: 49107 - protein, 278 aa, Ralstonia insidiosa
  misc_feature (1)..(278): tr|A0A191ZTB2|A0A191ZTB2_9RALS NADPH-dependent 7-cyano- 7-deazaguanine reductase OS=Ralstonia insidiosa OX=1907 21 GN=queF PE=3 SV=1
MSNQPEHSPLGKTSAYKTEYDPSLLFPIPRQGKRDEIGLPAGSALPFFGVDLWNLYELSWLNLRGKPQVAIGTVIVPADSPNIVESKSFKLYLNSFNQTKVASYEALQQLIHHDLSEACGAPVQVRIVPQEEFARQKMHELDGLLLDRLDIETDVYQPTPELLHADEEESPVEETLVSHLLKSNCLVTGQPDWGSVQIRYVGAPINQEALLKYLISFREHNEFHEQCVERIFTDIQRQCRPVKLAVYARYTRRGGLDINPFRTNYNTPWPDNLRNARQ

SEQ ID NO: 49108 - protein, 278 aa, Ralstonia mannitolilytica
  misc_feature (1)..(278): tr|A0A2N5L3M9|A0A2N5L3M9_9RALS NADPH-dependent 7-cyano- 7-deazaguanine reductase OS=Ralstonia mannitolilytica O X=105219 GN=queF PE=3 SV=1
MHNQPEHSPLGKTSAYKTEYDPSLLFPIPRQGKRDEIGLPAGTALPFFGVDLWNLYELSWLNLKGKPQVAVGTVIVPADSPNIVESKSFKLYLNSFNQTKVASHEALQQLIHHDLSEACGAPVQVRIVPQEEFARQKMGELDGLLLDRLDIETDIYQPAPELLQADGNESPVEETLVSHLLKSNCLVTGQPDWGSVQIRYVGAPINQEGLLKYLISFREHNEFHEQCVERIFTDILRQCRPVKLAVYARYTRRGGLDINPFRTNTNTPWPDNLRNARQ

SEQ ID NO: 49109 - protein, 278 aa, Ralstonia mannitolilytica
  misc_feature (1)..(278): tr|A0A160BUC6|A0A160BUC6_9RALS NADPH-dependent 7-cyano- 7-deazaguanine reductase OS=Ralstonia mannitolilytica O X=105219 GN=queF PE=3 SV=1
MHNQPEHSPLGKTSAYKTEYDPSLLFPIPRQGKRDEIGLPAGTALPFFGVDLWNLYELSWLNLKGKPQVAVGTVIVPADSPNIVESKSFKLYLNSFNQTKVASYEALQQLVHHDLSEACGAPVQVRIVPQEEFARQKMGELDGLLLDRLDIETDIYQPAPELLQADENESPVEETLVSHLLKSNCLVTGQPDWGSVQIRYVGAPINQEGLLKYLISFREHNEFHEQCVERIFTDILRQCRPVKLAVYARYTRRGGLDINPFRTNTNTPWPDNLRNARQ

SEQ ID NO: 49110 - protein, 278 aa, Ralstonia pickettii
  misc_feature (1)..(278): tr|R0CHF7|R0CHF7_RALPI NADPH-dependent 7-cyano-7-deazag uanine reductase OS=Ralstonia pickettii OR214 OX=126467 5 GN=queF PE=3 SV=1
MSNQPEHSPLGKTSAYKTEYDPHLLFPIPRQGKRDEIGLAAGTPLPFFGVDLWNLYELSWLNLRGKPQVALGTVIVPADSPNIVESKSFKLYLNSFNQTKVASHEALQQLIHHDLSEACGAPVQVRIVTQEEFARQKMGELDGLLLDRLDIETDVYQPTPELLHADEEESPVEETLVSHLLKSNCLVTGQPDWGSVQIRYVGAPINQEALLKYLISFREHNEFHEQCVERIFTDILRQCRPVKLAVYARYTRRGGLDINPFRTNYNTPWPDNLRNARQ

SEQ ID NO: 49111 - protein, 278 aa, Ralstonia pickettii
  misc_feature (1)..(278): tr|C6BC11|C6BC11_RALP1 NADPH-dependent 7-cyano-7-deazag uanine reductase OS=Ralstonia pickettii (strain 12D) OX =428406 GN=queF PE=3 SV=1
MSNQPEHSPLGKTSAYKTEYDPSLLFPIPRQGKRDEIGLAAGTPLPFFGVDLWNLYELSWLNLRGKPQVALGTVIVPADSPNIVESKSFKLYLNSFNQTKVASHEALQQLIHHDLSEACGAPVQVRIVTQEEFARQKMGELDGLLLDRLDIETDVYQPTPELLHADEEESPVEETLVSHLLKSNCLVTGQPDWGSVQIRYVGAPINQEALLKYLISFREHNEFHEQCVERIFTDILRQCHPVKLAVYARYTRRGGLDINPFRTNYNTPWPDNLRNARQ

SEQ ID NO: 49112 - protein, 277 aa, Ralstonia pseudosolanacearum
  misc_feature (1)..(277): tr|A0A454TW33|A0A454TW33_9RALS NADPH-dependent 7-cyano- 7-deazaguanine reductase OS=Ralstonia pseudosolanacearu m OX=1310165 GN=queF PE=3 SV=1
MSHPEHSPLGKASAYKTQYDPSLLFPIPRQAKRDEIGLAAGSALPFFGIDLWNLYELSWLNLKGKPQVAIGTVIVPADSPNIVESKSFKLYLNAFNQTKVASSEALQQLIHHDLSEACGAPVQVRIVPQEEFARQKMGELAGLSLDRLDVETDVYQPTPGLLHADQDESPVEEVLVSHLLKSNCLVTGQPDWGSVQIRYVGAPINQEGLLKYLISFREHNEFHEQCVERIFMDIQRQCRPVKLAVYARYTRRGGLDINPFRTNFNTPWPDNLRNARQ

SEQ ID NO: 49113 - protein, 277 aa, Ralstonia pseudosolanacearum
  misc_feature (1)..(277): tr|A0A223GJ94|A0A223GJ94_9RALS NADPH-dependent 7-cyano- 7-deazaguanine reductase OS=Ralstonia pseudosolanacearu m OX=1310165 GN=queF PE=3 SV=1
MSHPEHSPLGKASAYKTQYDPSLLFPIPRQAKRDEIGLAAGSALPFFGIDLWNLYELSWLNLKGKPQVAIGTVIVPADSPNIVESKSFKLYLNTFNQTKVASSEALQQLIHHDLSEACGAPVQVRIVPQEEFARQKMGELAGLSLDRLDVETDVYQPTPGLLHADQDESPVEEVLVSHLLKSNCLVTGQPDWGSVQIRYVGAPINQEGLLKYLISFREHNEFHEQCVERIFMDIQRQCRPVKLAVYARYTRRGGLDINPFRTNFNTPWPDNLRNARQ

SEQ ID NO: 49114 - protein, 277 aa, Ralstonia solanacearum; identical to SEQ ID NO: 49113
  misc_feature (1)..(277): sp|Q8Y288|QUEF_RALSO NADPH-dependent 7-cyano-7-deazagua nine reductase OS=Ralstonia solanacearum (strain GMI100 0) OX=267608 GN=queF PE=3 SV=1

SEQ ID NO: 49115 - protein, 277 aa, Ralstonia solanacearum
  misc_feature (1)..(277): tr|A0A0S4TQ96|A0A0S4TQ96_RALSL NADPH-dependent 7-cyano- 7-deazaguanine reductase OS=Ralstonia solanacearum OX=3 05 GN=queF PE=3 SV=1
MSHPEHSPLGKASAYKTQYDPSLLFPIPRQAKRDEIGLAAGSALPFFGIDLWNLYELSWLNLKGKPQVAIGTVIVPADSPNIVESKSFKLYLNSFNQTKVASSEALQQLIHHDLSEACGAPVQVRIVPQEEFARQKMGELAGLSLDRLDVETDVYQPTPELLRADQDESPVEEVLVSHLLKSNCLVTGQPDWGSVQIRYVGAPISQEGLLKYLISFREHNEFHEQCVERIFMDIQRQCRPVKLAVYARYTRRGGLDINPFRTNFNTPWPDNLRNARQ

SEQ ID NO: 49116 - protein, 278 aa, Ralstonia sp.
  misc_feature (1)..(278): tr|A0A0B1YA21|A0A0B1YA21_9RALS NADPH-dependent 7-cyano- 7-deazaguanine reductase OS=Ralstonia sp. A12 OX=121705 2 GN=queF PE=3 SV=1
MSNQPEHSPLGKTSAYITQYDPSLLFPIPRQGKRDEIGLPAGSALPFFGVDLWNLYELSWLNLRGKPQVAIGTVIVPADSPNIIESKSFKLYLNSFNQTKVASYEALQQLIHHDLSEACGAPVQVRIVPHEEFARQKMGELDGLLLDRLDIETDIYQPTPELLQVNEEESPVEESLVSHLLKSNCLVTGQPDWGSVQIRYVGAPINQEGLLKYLISFREHNEFHEQCVERIFTDILRQCRPVKLAVYARYTRRGGLDINPFRTNYNTPWPDNMRNARQ

SEQ ID NO: 49117 - protein, 278 aa, Ralstonia sp.
  misc_feature (1)..(278): tr|A0A0J9GHT0|A0A0J9GHT0_9RALS NADPH-dependent 7-cyano- 7-deazaguanine reductase OS=Ralstonia sp. MD27 OX=16766 17 GN=queF PE=3 SV=1
MSNQPEHSPLGKTSAYKTEYDPSLLFPIPRQGKRDEIGLPTGSALPFFGVDLWNLYELSWLNLRGKPQVAIGTVIVPADSPNIIESKSFKLYLNSFNQTKVASYEALQQLIHHDLSEACGAPVQVRIVPQEEFARQKMHELDGLLLDRLDIETDVYQPTPELLHADEEESPVEETLVSHLLKSNCLVTGQPDWGSVQIRYVGAPINQEALLKYLISFREHNEFHEQCVERIFTDILRQCRPVKLAVYARYTRRGGLDINPFRTNYNTPWPDNLRNARQ

SEQ ID NO: 49118 - protein, 277 aa, Ralstonia syzygii
  misc_feature (1)..(277): tr|G3A4H2|G3A4H2_9RALS NADPH-dependent 7-cyano-7-deazag uanine reductase OS=Ralstonia syzygii R24 OX=907261 GN= queF PE=3 SV=1
MSHPEHSPLGKVSAYKTQYDPSLLFPIPRQAKRDEIGLAAGSALPFFGVDLWNLYELSWLNLKGKPQVAIGTVIVPADSPNLVESKSFKLYLNSFNQTKVASSEALQQLIHHDLSEACGAPVQVRIVPREEFGRQKMGELEGLSLDRLDIETDIYQPTPGLLHADLDESPVEEVLVSHLLKSNCLVTGQPDWGSVQIRYVGAPINQEGLLKYLVSFREHNEFHEQCVERIFMDIQHQCQPVKLAVYARYTRRGGLDINPFRTNFNTPWPDNLRNARQ

SEQ ID NO: 49119 - protein, 283 aa, Ramlibacter henchirensis
  misc_feature (1)..(283): tr|A0A4Z0C1F6|A0A4Z0C1F6_9BURK NADPH-dependent 7-cyano- 7-deazaguanine reductase OS=Ramlibacter henchirensis OX =204072 GN=queF PE=3 SV=1
MQDNTPGGSLLGKPAAYRDQYAPELLYPIPRLDKRQELGIDGQPPFFGADLWTAYELSWLTPRGKPVVAIAHVTVPCETPNIVESKSFKLYLNSFSNTRFGSAGEVLARLRGDLSEAVWRNSGSSGSVGVRLLAPDVFDQEQVHELDGFNLDRLDIECTHYEPEPSLLTAAFDEQPVEEVLVSNLLKSNCLVTGQPDWGAVQIRYSGPQIDQGGLLRYLVSFRNHNEFHEQCVERIFMDIRRRCRPAKLAVYARYTRRGGLDINPFRTSHPLALPANIRTARQ

SEQ ID NO: 49120 - protein, 282 aa, Ramlibacter rhizophilus
  misc_feature (1)..(282): tr|A0A4Z0BQL8|A0A4Z0BQL8_9BURK NADPH-dependent 7-cyano- 7-deazaguanine reductase OS=Ramlibacter rhizophilus OX= 1781167 GN=queF PE=3 SV=1
MSNSPEQSLLGKPAAYADRYDASLLYPLSRAGHRAELGIGTRPPFFGADLWTAYELSWLTPRGKPQVALAHVTIPCESPNLVESKSFKLYLNSFTNTPFASADAVRDRIRADVSEAVWRGAPAASTVGVRLLMPEQFDLELVSELDGVNLDRLDIECTQYTPAPELLTAAFDEQPVEEVLTSNLLKSNCLVTGQPDWGSVQIRYSGPQIDQGQLLRYLVSFRNHNEFHEQCVERIFMDIRERCRPVKLSVYARYTRRGGLDINPFRTSHPGGVPANVRTARQ

SEQ ID NO: 49121 - protein, 281 aa, Ramlibacter sp.
  misc_feature (1)..(281): tr|A0A4Y7BBJ3|A0A4Y7BBJ3_9BURK NADPH-dependent 7-cyano- 7-deazaguanine reductase OS=Ramlibacter sp. WS9 OX=1882 741 GN=queF PE=3 SV=1
MNTPEQSQLGKPAPYIDHYDASLLFPISRQPKRVELGLHGAVPFFGADLWTAFELSWLTPRGKPQVAIVHVTVPCETPNIVESKSFKLYLNSFTNTAFASADEVRDRIRADISEAAWRGAPAQSSVGVRILMPDQFDKEPVHELDGLNLDRLDIECTQYTPAPELLTAAFDEKPVDEVLTSNLLKSNCLVTGQPDWGSVQIRYSGPQIDQGGLLRYLVSFRNHNEFHEQCVERIFMDVWKQCKPVKLAVYARYTRRGGLDINPFRTSHPMAIPPNIRTARQ

SEQ ID NO: 49122 - protein, 282 aa, Ramlibacter sp.
  misc_feature (1)..(282): tr|A0A4Z0BXF5|A0A4Z0BXF5_9BURK NADPH-dependent 7-cyano- 7-deazaguanine reductase OS=Ramlibacter sp. 18x22-1 OX= 2530451 GN=queF PE=3 SV=1
MDNVPEDSLLGKPAPYRDEYAPDLLYPIPRAPKRHEIGVAGQPPFFGADLWTAYELSWLTPRGKPAVAIAHFTVPCETPNIVESKSFKLYLNSFTNTRFAGAEEVSARLRADVSEAVWRGGAGSASVGVRLVSPDAFDQQQVHEMDGLNVDRLDIECTEYTPNPELLTAALDEKPVDETLVSHLLKSNCLVTGQPDWGSVQVRYSGPQIDQGGLLRYLVSFRNHHEFHEQCVERIFMDIRRRCRPTKLAVYARYTRRGGLDINPLRTSHPLPLPANVRTARQ

SEQ ID NO: 49123 - protein, 283 aa, Ramlibacter tataouinensis
  misc_feature (1)..(283): tr|F5Y6C5|F5Y6C5_RAMTT NADPH-dependent 7-cyano-7-deazag uanine reductase OS=Ramlibacter tataouinensis (strain A TCC BAA-407 / DSM 14655 / LMG 21543 / TTB310) OX=365046 GN=queF PE=3 SV=1
MTRTPEQSLLGKAADYRDRYDASLLFPIARAPKREELGLAPDTIPFFGADLWTAFELSWLTPRGKPQVAIAHVTVPCETPNIVESKSFKLYLGSFSNTPFASADEVRERIRADVSEAVWRGAPAASSVGVRLLTPELFDREPIHELDGLNLDRLDIECSQYTPAPELLTAAFDEQPVQEVLVSQLLKSNCLVTGQPDWGSVQIRYSGPQIDQAGLLRYLVSFRNHNEFHEQCVERIFMDIRRRCRPVKLSVYARYTRRGGLDINPFRTSHPGALPPNVRTARQ

SEQ ID NO: 49124 - protein, 281 aa, Ramlibacter tataouinensis
  misc_feature (1)..(281): tr|A0A127JQD9|A0A127JQD9_9BURK NADPH-dependent 7-cyano- 7-deazaguanine reductase OS=Ramlibacter tataouinensis O X=94132 GN=queF PE=3 SV=1
MTTPEQSQLGKPSAYADSYDPALLFPISREPKRLELGLRQPLPFSGADLWTAFELSWLTPRGKPHVAIAHLTVPCETPNIVESKSFKLYLNSFSNTSFGSADEVRERIRADVSEAVWRGAPTRATVGVRLLGPEQFDAEPIHELDGLCLDRLDIECSQYTPAPELLTAAFDEQPVDEVLTSNLLKSNCLVTGQPDWGSVQIRYCGPQIDQGGLLRYLVSFRNHNEFHEQCVERIFVDLWKRCQPAKLAVYARYTRRGGLDINPFRSSHPMAAPRNVRTARQ

SEQ ID NO: 49125 - protein, 281 aa, Raoultella electrica
  misc_feature (1)..(281): tr|A0A514EMC8|A0A514EMC8_9ENTR NADPH-dependent 7-cyano- 7-deazaguanine reductase OS=Raoultella electrica OX=125 9973 GN=queF PE=3 SV=1
MSSYDNHQALAGLTLGKSTDYRDTYDASLLQGVPRSLNRDPLGLHADNLPFHGGDIWTLYELSWLNAKGLPQVAVGHVELNDTTVNLVESKSFKLYLNSFNQTRFASWHEVQATLTHDLSACAQGEVTVSLYRLDELEGQPVAHLHGTCIDFQDIEIDNYQFSADYLQDAASGKVVEETLVSHLLKSNCLITHQPDWGSVQIQYRGSRIDREKLLRYLVSFRHHNEFHEQCVERIFNDIQRFCQPETLSVYARYTRRGGLDINPWRSNTDFVPATGRLARQ

SEQ ID NO: 49126 - protein, 281 aa, Raoultella ornithinolytica
  misc_feature (1)..(281): tr|A0A4S3RQA2|A0A4S3RQA2_RAOOR NADPH-dependent 7-cyano- 7-deazaguanine reductase OS=Raoultella ornithinolytica OX=54291 GN=queF PE=3 SV=1
MSSYDNHQALAGLTLGKSTDYRDTYDASLLQGVPRSLNRDPLGLHADNLPFHGADIWTLYELSWLNAKGLPQVAVGHVELNDTTVNLVESKSFKLYLNSFNQTRFADWQEVKATLTRDLSACAEGEVQVSLYRLDELEGQPVAHLHGACIDDQDIEIDNYQFSADYLQDAASGKVVEETLVSHLLKSNCLITHQPDWGSVQIQYRGAKIDREKLLRYLVSFRHHNEFHEQCVERIFNDILRFCQPEALSVYARYTRRGGLDINPWRSNTDFVPAIGRLARQ

SEQ ID NO: 49127 - protein, 281 aa, Raoultella ornithinolytica
  misc_feature (1)..(281): tr|A0A1Y6GCQ4|A0A1Y6GCQ4_RAOOR NADPH-dependent 7-cyano- 7-deazaguanine reductase OS=Raoultella ornithinolytica OX=54291 GN=queF PE=3 SV=1
MSSYDNHQALAGLTLGKSTDYRDTYDASLLQGVPRSLNRDPLGLHADNLPFHGADIWTLYELSWLNAKGLPQVAVGHVELNDTTVNLVESKSFKLYLNSFNQTRFADWQEVEATLTRDLSACAEGEVQVSLYRLDELEGQPVAHLHGACIDDQDIEIDNYQFSADYLQDAANGKVVEETLVSHLLKSNCLITHQPDWGSVQIQYRGAKIDREKLLRYLVSFRHHNEFHEQCVERIFNDILRFCQPEALSVYARYTRRGGLDINPWRSNTDFVPAIGRLARQ

SEQ ID NO: 49128 - protein, 281 aa, Raoultella planticola
  misc_feature (1)..(281): tr|A0A377T358|A0A377T358_RAOPL NADPH-dependent 7-cyano- 7-deazaguanine reductase OS=Raoultella planticola OX=57 5 GN=queF PE=3 SV=1
MSSYDNHQALAGLTLGKSTDYRDTYDASLLQGVPRSLNRDPLGLHADNLPFHGADIWTLYELSWLNAKGLPQVAVGHVELNDTTVNLVESKSFKLYLNSFNQTRFADWQEVEATLTRDLSACAEGEVQVSLYRLDELEGQPVAHLHGACIDDQDIEIDNYQFSADYLQDAASGKVVEETLVSHLLKSNCLITHQPDWGSVQIQYRGAKIDREKLLRYLVSFRHHNEFHEQCVERIFNDILRFCQPEALSVYARYTRRGGLDINPWRSNTDFVPAIGRLARQ

SEQ ID NO: 49129 - protein, 269 aa, Raoultella planticola
  misc_feature (1)..(269): tr|A0A0D8MH26|A0A0D8MH26_RAOPL NADPH-dependent 7-cyano- 7-deazaguanine reductase (Fragment) OS=Raoultella plant icola OX=575 GN=queF PE=3 SV=1
MSSYDNHQALAGLTLGKSTDYRDTYDASLLQGVPRSLNRDPLGLHADNLPFHGADIWTLYELSWLNAKGLPQVAVGHVELNDTTVNLVESKSFKLYLNSFNQTRFADWQEVEATLTRDLSACAEGEVQVSLYRLDELEGQPVAHLHGACIDDQDIEIDNYQFSADYLQDAASGKVVEETLVSHLLKSNCLITHQPDWGSVQIQYRGAKIDREKLLRYLVSFRHHNEFHEQCVERIFNDILRFCQPEALSVYARYTRRGGLDINPWRSNT

SEQ ID NO: 49130 - protein, 281 aa, Raoultella sp.
  misc_feature (1)..(281): tr|A0A509BND3|A0A509BND3_9ENTR NADPH-dependent 7-cyano- 7-deazaguanine reductase OS=Raoultella sp. NCTC 9189 OX =2583577 GN=queF PE=3 SV=1
MSSYENHQALAGLTLGKSTDYRDTYDASLLQGVPRSLNRDPLGLHADSLPFHGGDIWTLYELSWLNAKGLPQVAVGHVELSDTSVNLVESKSFKLYLNSFNQTRFADWQEVQATLSRDLSACAQGEVTVALYRLDELEGQPVAHLHGTCIDDQDIEVDNYEFSTDYLLDAAGDKIVEETLVSHLLKSNCLITHQPDWGSVQIQYRGPKIDREKLLRYLVSFRHHNEFHEQCVERIFNDLLRFCRPQSLSVYARYTRRGGLDINPWRSNADFVPAIGRLARQ

SEQ ID NO: 49131 - protein, 281 aa, Raoultella sp.
  misc_feature (1)..(281): tr|A0A4R3ZDN6|A0A4R3ZDN6_9ENTR NADPH-dependent 7-cyano- 7-deazaguanine reductase OS=Raoultella sp. BIGb0138 OX= 2485115 GN=queF PE=3 SV=1
MSSYDNHQALSGLTLGKSTDYRDTYDASLLQGVPRSLNRDPLGLRADNLPFHGGDIWTLYELSWLNAKGLPQVAVGHVELSDTSVNLVESKSFKLYLNSFNQTRFASWQEVQATLTRDLSACAQGEVSVSLYRLDELEGQPVAHLHGTCIDDQDIAIDNYEFSTDYLQDAAGEKIVEETLVSHLLKSNCLITHQPDWGSVQIQYRGPKIDREKLLRYLVSFRHHNEFHEQCVERIFNDLLRFCQPQSLSVYARYTRRGGLDINPWRSNAEFVPSIARLARQ

SEQ ID NO: 49132 - protein, 122 aa, Raoultella terrigena
  misc_feature (1)..(122): tr|A0A3P8K8I2|A0A3P8K8I2_RAOTE NADPH-dependent 7-cyano- 7-deazaguanine reductase OS=Raoultella terrigena OX=577 GN=queF PE=4 SV=1
MEFSTDYLLDAAGDKIVEETLVSHLLKSNCLITHQPDWGSVQIQYRGPKIDREKLLRYLISFRHHNEFHEQCVERIFNDLLRFCRPQSLSVYARYTRRGGLDINPWRSNADFVPAIARLARQ

SEQ ID NO: 49133 - protein, 192 aa, Raoultella terrigena
  misc_feature (1)..(192): tr|A0A4U9D2C6|A0A4U9D2C6_RAOTE NADPH-dependent 7-cyano- 7-deazaguanine reductase OS=Raoultella terrigena OX=577 GN=queF PE=4 SV=1
MPRSLNRDPLGLHADSLPFHGGDIWTLYELSWLNAKGLPQVAVGHVELSDTSVNLVESKSFKLYLNSFNQTRFADWQEVQATLSRDLSACAQGEVTVALYRLDELEGQPVAHLHGTCIDDQDIEVDNYEFSTDYLLDAAGDKIVEETLVSPSAEIQLPDHPSAGLGFGANPVSRAKNRSRKAAALPGLVPPP

SEQ ID NO: 49134 - protein, 142 aa, Raphidiopsis brookii; identical to SEQ ID NO: 45555
  misc_feature (1)..(142): tr|D4TT55|D4TT55_9CYAN NADPH-dependent 7-cyano-7-deazag uanine reductase OS=Raphidiopsis brookii D9 OX=533247 G N=queF PE=3 SV=1

SEQ ID NO: 49135 - protein, 141 aa, Raphidiopsis curvata
  misc_feature (1)..(141): tr|A0A1Z4VCL6|A0A1Z4VCL6_9CYAN NADPH-dependent 7-cyano- 7-deazaguanine reductase OS=Raphidiopsis curvata NIES-9 32 OX=1973482 GN=queF PE=3 SV=1
MSHSVSNILPSENPVKEVKYGEREIEEGKLITFPNPRVGREYTIDITLPEFTCKCPFSGYPDFATIHITYIPDQRVVELKALKLYINSYRDKYISHEEVTNQILDDMVIACAPLEMTVKADFSPRGNVHMVVEVNYKKGAG

SEQ ID NO: 49136 - protein, 275 aa, Reinekea blandensis
  misc_feature (1)..(275): tr|A4BGN8|A4BGN8_9GAMM NADPH-dependent 7-cyano-7-deazag uanine reductase OS=Reinekea blandensis MED297 OX=31428 3 GN=queF PE=3 SV=1
MALPEQSPLGKQSAYVDTYTPSLLFPIPRQDKRDEIGVSGDLPFQGVDIWNAYELSWLNQRGKPVVALAEFFIPADSKNIIESKSFKLYLNTFNQTRFASARDVQDRLTEDLSTAAQAPVKVTVVELGQAGHSADIYQWNAQCIDDLDIDVTQYHADPSILSIEDGEPVHERLCSHLLKSNCLVTGQPDWGSVLIEYRGPKINHDALLAYLISFRQHNEFHEQCVERIFVDLMAQCDCQELTVYARYVRRGGLDINPYRSNRPDAYPENERLVRQ

SEQ ID NO: 49137 - protein, 273 aa, Reinekea forsetii
  misc_feature (1)..(273): tr|A0A2K8KU73|A0A2K8KU73_9GAMM NADPH-dependent 7-cyano- 7-deazaguanine reductase OS=Reinekea forsetii OX=133680 6 GN=queF PE=3 SV=1
MKPEYSPLGKSSAYADQYDASLLFPIPRLDKRLELGLTTDLPFSGVDIWNAYELSWLNARGKPRVALAEFSVPAGSPNIVESKSLKLYLNSFNQTRFDDDEQVQQRLVQDLSSAANSPVQVKVIALNAEPSSLVFQSDSAECIDDLDIEIENYQPSPGGLVVSDTVVSEQLVSHLLKSNCLVTGQPDWGSVYIDYTGPQIDRATLLRYLISFRQHNEFHEQCVERIFVDLKSACQCDKLTVYARYIRRGGLDINPFRSDDPSAVVNNIRHIRQ

SEQ ID NO: 49138 - protein, 275 aa, Reinekea marinisedimentorum
  misc_feature (1)..(275): tr|A0A4R3I489|A0A4R3I489_9GAMM NADPH-dependent 7-cyano- 7-deazaguanine reductase OS=Reinekea marinisedimentorum OX=230495 GN=queF PE=3 SV=1
MNSPESSPLGKASSYKDTYDASLLFPIARQEKRTEIGVDSAELPFAGVDVWNGYELSWLNPKGKPVVAIAVFRIPAESPKLIESKSFKLYLNSFNQSHFDSIDEVQARLAADLTAAAEAAVGVDVFKLDQAAEHEQVSAMAAECIDDLDVQITGYQTDASLLECSDEIVSEKLCSHLLKSNCLVTGQPDWGSVFIEYTGPKINRESLLKYLISFRQHNEFHEQCVERIFVDLKAQCRCQTLTVYARYVRRGGLDINPFRSDDAQAEVNNIRLVRQ

SEQ ID NO: 49139 - protein, 275 aa, Reinekea sp.
  misc_feature (1)..(275): tr|A0A5C8ZDG6|A0A5C8ZDG6_9GAMM NADPH-dependent 7-cyano- 7-deazaguanine reductase OS=Reinekea sp. SSH23 OX=25933 01 GN=queF PE=3 SV=1
MNSPESSPLGKTSRYIDQYDASLLFPIARVAKREELGLTDRDLPFHGVDIWNGYELSWLNLKGKPMVAIAVFYIPASSVNIIESKSFKLYLNSFNQSRFESLNVVSSLLAEDLTKAVGAEVKVALHSLNKAVTHEQIHQWQADCIDDLDIEITDYQTDASLLRCSDEQVQESLCSHLLKSNCLVTGQPDWGSVYIEYSGAKIDRESLLKYLISFRQHNEFHEQCVERIFVDLQQHCQCKSLTVYARYVRRGGLDINPFRSNQADAIVNNLRMVRQ

SEQ ID NO: 49140 - protein, 152 aa, Reyranella soli
  misc_feature (1)..(152): tr|A0A512NIL2|A0A512NIL2_9PROT NADPH-dependent 7-cyano- 7-deazaguanine reductase OS=Reyranella soli OX=1230389 GN=queF PE=3 SV=1
MTKYPKLSQLGRPAILPDSPEKAVLETVPNPQPRALYLVRFTAPEFTTLCPVTGQPDFAHLVIDYAPRAKLVESKSLKLYLGSFRNHADFHEACTLAIGMRLEKVLAPRWLRIGGYWYPRGGMPIDVFWQTGQPPKGLWLPDPGVQPYRGRG

SEQ ID NO: 49141 - protein, 152 aa, Reyranella sp.
  misc_feature (1)..(152): tr|A0A5C5ST45|A0A5C5ST45_9PROT NADPH-dependent 7-cyano- 7-deazaguanine reductase OS=Reyranella sp. CPCC 100927 OX=2599616 GN=queF PE=3 SV=1
MAKYKHLQQLGQATSLPASPDQAVLETVPNPHPRTLYLVRFTQPEFTSLCPMTGQPDFAHLVIDYAPAAKLIESKSLKLFLGSFRNHGAFHEDCTMLIAKRLVAALKPKWLRIGGYWYPRGGMPIDVFWQTGAPPRGLWLPDQGVAPYRGRG

SEQ ID NO: 49142 - protein, 91 aa, Reyranella sp.
  misc_feature (1)..(91): tr|A0A521LXD7|A0A521LXD7_9PROT NADPH-dependent 7-cyano- 7-deazaguanine reductase (Fragment) OS=Reyranella sp. O X=1929291 GN=EPO67_03950 PE=3 SV=1
VIDYVPRARLVESKSLKLYLNSFRSEAAFHEDCTVGIAKRLVKELAPRWLRIAGYWYPRGGMPIDVFWQTAAPPKGLWLPDTGVAPYRGRG

SEQ ID NO: 49143 - protein, 285 aa, Rheinheimera nanhaiensis
  misc_feature (1)..(285): tr|I1E1S7|I1E1S7_9GAMM NADPH-dependent 7-cyano-7-deazag uanine reductase OS=Rheinheimera nanhaiensis E407-8 OX= 562729 GN=queF PE=3 SV=1
MTATEMIKGHADALAGLSLGKVTAYADQYDASLLQAVPRSLGRDDIGLDAAALPFCGQDIWHGYELSWLNAKGKPMVALATFVVPFDSANLIESKSFKLYLNSFNQSRFADLGQVYQHLQRDLSACAGKPVKVSLHNVNEIMAFQPTWIPGRCIDDLDIEITQYQYDAALLQLQPGGDKVEEKLNSHLLKSNCLITSQPDWASVFIHYRGAAIDHASLLRYLISFRSHNEFHEQCVERIFTDIWQRCQPEFLAVYARYTRRGGLDINPWRASEPCNPPAIRLSRQ

SEQ ID NO: 49144 - protein, 285 aa, Rheinheimera pacifica
  misc_feature (1)..(285): tr|A0A1H6MWI0|A0A1H6MWI0_9GAMM NADPH-dependent 7-cyano- 7-deazaguanine reductase OS=Rheinheimera pacifica OX=17 3990 GN=queF PE=3 SV=1
MTKTDMTSSHSELLAGLSLGKVTAYADQYDASLLQAVPRSLGRDDIGLASAALPFVGQDIWHGYELSWLNAKGKPMVALATFVVPYDSANLIESKSFKLYLNSFNQSRFADLGQVYQHLQRDLSACAGKTVKVSLHNVNEIMAFQPTWIPGRCIDDLDIEITQYHYDASLLQTQTDADIVEEKLHSHLLKSNCLITSQPDWASVYIHYRGKALDHAALLRYLISFRSHNEFHEQCVERIFSDIWSHCQPSFLCVYARYTRRGGLDINPWRASEPCTPPAIRLSRQ

SEQ ID NO: 49145 - protein, 280 aa, Rheinheimera salexigens
  misc_feature (1)..(280): tr|A0A1E7Q8S7|A0A1E7Q8S7_9GAMM NADPH-dependent 7-cyano- 7-deazaguanine reductase OS=Rheinheimera salexigens OX= 1628148 GN=queF PE=3 SV=1
MSNDPSEILASLSLGKATDYIDQYDASLLQGVPRSMGRKAIGLNSTDLPFVGHDTWHGYELSWLNHKGKPQVALATFTVPFDSVNLIESKSFKLYLNSFNQSRFADLGQVYQHLQRDLSACAGAAVAVNLHNVNEITTFQPTWIPGHCLDDQDIAIDQYQYDASLLHTQKDADIVAEKLHSHLLKSNCLITSQPDWASIYIDYRGVQIDHESLLRYLISFRNHNEFHEQCVERIFLDIWSRCQPQYLAVYARYTRRGGLDINPWRCSEQRSPPAIRLSRQ

SEQ ID NO: 49146 - protein, 279 aa, Rheinheimera sp.
  misc_feature (1)..(279): tr|A0A3S2UJ90|A0A3S2UJ90_9GAMM NADPH-dependent 7-cyano- 7-deazaguanine reductase OS=Rheinheimera sp. YQF-1 OX=2 499626 GN=queF PE=3 SV=1
MTKIQTEQLAGLTLGQATAYIDHYSPELLQAVPRTLGRQAIGLGEELPFVGQDTWHGYELSWLTPKGKPMVALATFVVPFNTPNLIESKSFKLYLNSLNQSKFADISQLYRTMKTDLSACAGGPVQVTLHNVNELTAFQPTWLPGRCIDDLDIEVEHYDYKPELLQLNPTGALVDEKLHSHLLKSNCLITSQPDWASVYIHYKGKAIDHASLLKYLISFRSHNEFHEQCVERIYLDLWKLCQPEFLMVYARYTRRGGLDINPLRSSEPCAQPNLRLTRQ

SEQ ID NO: 49147 - protein, 280 aa, Rheinheimera sp.
  misc_feature (1)..(280): tr|A0A486XGZ0|A0A486XGZ0_9GAMM NADPH-dependent 7-cyano- 7-deazaguanine reductase OS=Rheinheimera sp. BAL341 OX= 1708203 GN=queF PE=3 SV=1
MTSRHSDALTGLSLGKITAYADKYDASLLQAVPRSLGRDDIGLTASALPFVGHDIWHGYELSWLNAKGKPMVALATFVVPFDSANLIESKSFKLYLNSFNQSRFADLGQVYQHLQRDLSACAGKQVKVSLHNVNEIMAFQPTWIPGRCIDDLDIEIEHYQYDASLLQLQQDGDRVEEKLHSHLLKSNCLITSQPDWASVYLHYRGPAIDHASLLRYLISFRSHNEFHEQCVERIFNDIWSRCQPEFLAVYARYTRRGGLDINPWRSSEPVSPPPIRLSRQ

SEQ ID NO: 49148 - protein, 281 aa, Rheinheimera tuosuensis
  misc_feature (1)..(281): tr|A0A285J481|A0A285J481_9GAMM NADPH-dependent 7-cyano- 7-deazaguanine reductase OS=Rheinheimera tuosuensis OX= 1323745 GN=queF PE=3 SV=1
MTKSHSEIMAGLSLGKTTAYAEQYDPSLLQPVPRILGRDSLGLEHSATLPFIGEDIWHGYELSWLNAKGKPMVALATFVVPVTSANLIESKSFKLYLNSFNQSRFADLRQVYQALQRDLSGCAGSPVQVTLHNVNEIMAFQPTWIPGHCIDDLDISIDSYQYDPSLLQLADAAEAIDEKVHSHLLKSNCLITSQPDWASVYIHYRGPAIDHAALLRYLISFRSHNEFHEQCIERIFLDIWQRCNPEYLLVYARYTRRGGLDINPVRASASYKLPNLRLSRQ

SEQ ID NO: 49149 - protein, 147 aa, Rhizobacter gummiphilus
  misc_feature (1)..(147): tr|A0A1W6LHR9|A0A1W6LHR9_9BURK NADPH-dependent 7-cyano- 7-deazaguanine reductase OS=Rhizobacter gummiphilus OX= 946333 GN=queF PE=3 SV=1
MGHREKPATPPSAPSKQLDVFANPTPKRDYAIQFQVPEFTCHCPLTGQPDFAHFTIDMIADKLCVELKSLKMYMWSYRHEGAFHEKVTNDILDDIVRATDPRFIRITAKWYVRGGIYTNVVAEHRKKGWKPQPVVVMPAHTVATGLA

SEQ ID NO: 49150 - protein, 147 aa, Rhizobacter sp.
  misc_feature (1)..(147): tr|A0A0Q6WGD8|A0A0Q6WGD8_9BURK NADPH-dependent 7-cyano- 7-deazaguanine reductase OS=Rhizobacter sp. Root1221 OX =1736433 GN=queF PE=3 SV=1
MGQREKPAKPPSVPSKQIDVFPNPTPKRDYAIQFQVPEFTCHCPLTGQPDFAHFTIDMIADKLCVELKSLKMYMWSYRHEGAFHEKVTNDILDDIVRATDPRFIRITAKWYVRGGIYTNVVAEHRKKGWKPQPVVVMPAHAPATGLA

SEQ ID NO: 49151 - protein, 157 aa, Rhizobacter sp.
  misc_feature (1)..(157): tr|A0A0Q7AMF1|A0A0Q7AMF1_9BURK NADPH-dependent 7-cyano- 7-deazaguanine reductase OS=Rhizobacter sp. Root404 OX= 1736528 GN=queF PE=3 SV=1
MAKTATPKTAPSQRQKPANPPSAPSKELQVFPNPTPQRDYVIQFQIPEFTCHCPLTGQPDFAHFTIDMVADRLCVELKSLKMYMWSYRNEGAFHEKVTNDIVDDIVRATDPRFIRITAKWYVRGGIYTNVVAEHRKKGWKPEPVVQLPRHDAATGLL

SEQ ID NO: 49152 - protein, 154 aa, Rhizobiaceae bacterium
  misc_feature (1)..(154): tr|A0A522S2J4|A0A522S2J4_9RHIZ NADPH-dependent 7-cyano- 7-deazaguanine reductase OS=Rhizobiaceae bacterium OX=1 913961 GN=queF PE=3 SV=1
MTKTGNLTQLGKTVSQPASPQEAVLETVPFAAGGDGAPAIVRFTCPEFTSLCPVTGQPDFAHIVIDYAPDRLLVESKSLKLFLTSFRNHGAFHEECTVTIGKRIVAAAKPLWLRIGGYWYPRGGIPIDVFWQTGAPPEGAWLPDTGVPPYRGRG

SEQ ID NO: 49153 - protein, 154 aa, Rhizobiaceae bacterium
  misc_feature (1)..(154): tr|A0A4Q3HVB4|A0A4Q3HVB4_9RHIZ NADPH-dependent 7-cyano- 7-deazaguanine reductase OS=Rhizobiaceae bacterium OX=1 913961 GN=queF PE=3 SV=1
MTMTDVSGLSQLGNQVEAPTSPETAVLEKVPNGNQGTDYVVRFTAPEFTSLCPMTGQPDFAHIVIDYIPDGFLVESKSLKLFLHAFRNHGAFHEDCSVYIGKRIVDLLNPKWLRIGAYWYPRGGIPIDVFWQTGEAPKGVWLPDQGVATYRGRG

SEQ ID NO: 49154 - protein, 155 aa, Rhizobiales bacterium
  misc_feature (1)..(155): tr|A0A1M3MI53|A0A1M3MI53_9RHIZ NADPH-dependent 7-cyano- 7-deazaguanine reductase OS=Rhizobiales bacterium 63-22 OX=1895812 GN=queF PE=3 SV=1
MSENTIYSGLKQLGSETKIPATPEAAMLERVANPQKDVRYCVRFTAPEFTSLCPMTGQPDFAHLVIDYVPRDWLVESKSLKLFLFSFRNHGAFHEDCTVTIARRLADLLDPEWLRIGGYWYPRGGIPIDVFYQTGPAPQDVWIPAQDVPNYRGRG

SEQ ID NO: 49155 - protein, 150 aa, Rhizobiales bacterium; identical to SEQ ID NO: 44178
  misc_feature (1)..(150): tr|A0A257ZH06|A0A257ZH06_9RHIZ NADPH-dependent 7-cyano- 7-deazaguanine reductase OS=Rhizobiales bacterium 12-68 -15 OX=1970546 GN=queF PE=3 SV=1

SEQ ID NO: 49156 - protein, 154 aa, Rhizobium acidisoli
  misc_feature (1)..(154): tr|A0A0N0LEF1|A0A0N0LEF1_9RHIZ NADPH-dependent 7-cyano- 7-deazaguanine reductase OS=Rhizobium acidisoli OX=1538 158 GN=queF PE=3 SV=1
MPNTDVSSLSMLGQQTETAQSPEAAVLEKVPSNHAGTDYVVRFTAPEFTSLCPMTGQPDFAHIVIDYIPGEWLVESKSLKLFLHSFRNHGAFHEDCSIYIAKRIVELLDPKWLRIGAYWYPRGGIPIDVFWQTGKPPEGVWLPEQGVATYRGRG

SEQ ID NO: 49157 - protein, 154 aa, Rhizobium aethiopicum
  misc_feature (1)..(154): tr|A0A1C3XY03|A0A1C3XY03_9RHIZ NADPH-dependent 7-cyano- 7-deazaguanine reductase OS=Rhizobium aethiopicum OX=11 38170 GN=queF PE=3 SV=1
MPNTDVSSLSMLGQQTETAKSPEDAVLEKVPSNHAGTDYVVRFTAPEFTSLCPMTGQPDFAHIVIDYIPGEWLVESKSLKLFLHSFRNHGAFHEDCSIYIAKRIVELLDPKWLRIGAYWYPRGGIPIDVFWQTGKPPEDVWLPEQGVATYRGRG

SEQ ID NO: 49158 - protein, 154 aa, Rhizobium altiplani
  misc_feature (1)..(154): tr|A0A109JQH2|A0A109JQH2_9RHIZ NADPH-dependent 7-cyano- 7-deazaguanine reductase OS=Rhizobium altiplani OX=1864 509 GN=queF PE=3 SV=1
MPTTDVSNLSMLGSQTESPKSPEEAVLEKVPSSHASTDYVVRFTAPEFTSLCPMTGQPDFAHIVIDYIPNEWLVESKSLKLFLHAFRNHGAFHEDCSVYIAKRLVELLDPKWLRIGAYWYPRGGIPIDVFWQTGKPPEGVWLPDQGVATYRGRG

SEQ ID NO: 49159 - protein, 154 aa, Rhizobium anhuiense
  misc_feature (1)..(154): tr|A0A432NTK2|A0A432NTK2_9RHIZ NADPH-dependent 7-cyano- 7-deazaguanine reductase OS=Rhizobium anhuiense OX=1184 720 GN=queF PE=3 SV=1
MPSTDVSSLSMLGQQTETAQSPEEAVLEKVPSNHAGTDYVVRFTAPEFTSLCPMTGQPDFAHIVIDYIPGEWLVESKSLKLFLHSFRNHGAFHEDCSIYIAKRIVELLDPRWLRIGAYWYPRGGIPIDVFWQTGRPPEGVWLPEQGVATYRGRG

SEQ ID NO: 49160 - protein, 154 aa, Rhizobium azibense
  misc_feature (1)..(154): tr|A0A4R8A8C5|A0A4R8A8C5_9RHIZ NADPH-dependent 7-cyano- 7-deazaguanine reductase OS=Rhizobium azibense OX=11361 35 GN=queF PE=3 SV=1
MPKTDVSSLSMLGKETETAKSPEEAVLEKVPSNHAGTDYVVRFTAPEFTSLCPMTGQPDFAHIVIDYIPNEWLVESKSLKLFLHSFRNHGAFHEDCSIYIAKRIVELLDPKWLRIGAYWYPRGGIPIDVFWQTGKPPEGVWLPDQGVGTYRGRG

SEQ ID NO: 49161 - protein, 154 aa, Rhizobium azibense
  misc_feature (1)..(154): tr|A0A4R3QPG5|A0A4R3QPG5_9RHIZ NADPH-dependent 7-cyano- 7-deazaguanine reductase OS=Rhizobium azibense OX=11361 35 GN=queF PE=3 SV=1
MPKTDVSSLSMLGKETETAKSPEEAVLEKVPSNHAGTDYVVRFTAPEFTSLCPMTGQPDFAHIVIDYIPNEWLVESKSLKLFLHSFRNHGAFHEDCSIYIAKRIVELLDPKWLRIGAYWYPRGGIPIDVFWQTGKPPEGVWLPDQGVTTYRGRG

SEQ ID NO: 49162 - protein, 154 aa, Rhizobium esperanzae
  misc_feature (1)..(154): tr|A0A246DYK6|A0A246DYK6_9RHIZ NADPH-dependent 7-cyano- 7-deazaguanine reductase OS=Rhizobium esperanzae OX=196 7781 GN=queF PE=3 SV=1
MPNTDVSSLSMLGQQTETAKSPEEAVLEKVPSNHAGTDYVVRFTAPEFTSLCPMTGQPDFAHIVIDYIPGEWLVESKSLKLFLFSFRNHGAFHEDCSIYIAKRIVELLDPKWLRIGAYWYPRGGIPIDVFWQTGKPPEGVWLPEQGVATYRGRG

SEQ ID NO: 49163 - protein, 154 aa, Rhizobium etli
  misc_feature (1)..(154): tr|F2A578|F2A578_RHIET NADPH-dependent 7-cyano-7-deazag uanine reductase OS=Rhizobium etli CNPAF512 OX=993047 G N=queF PE=3 SV=1
MPNTDVSSLSMLGQQTETANSPEEAVLEKVPSNHAGTDYVVRFTAPEFTSLCPMTGQPDFAHIVIDYIPSEWLVESKSLKLFLHSFRNHGAFHEDCSIYIAKRIVELLDPKWLRIGAYWYPRGGIPIDVFWQTGKPPEGVWLPEQGVATYRGRG

SEQ ID NO: 49164 - protein, 155 aa, Rhizobium etli
  misc_feature (1)..(155): sp|B3PV52|QUEF_RHIE6 NADPH-dependent 7-cyano-7-deazagua nine reductase OS=Rhizobium etli (strain CIAT 652) OX=4 91916 GN=queF PE=3 SV=1
MMPNTDVSSLSMLGQQTETAKSPEEAVLEKVPSNHAGTDYVVRFTAPEFTSLCPMTGQPDFAHIVIDYIPSEWLVESKSLKLFLHSFRNHGAFHEDCSIYIAKRIVELLDPKWLRIGAYWYPRGGIPIDVFWQTGKPPEGVWLPEQGVATYRGRG

SEQ ID NO: 49165 - protein, 154 aa, Rhizobium favelukesii
  misc_feature (1)..(154): tr|W6RWG9|W6RWG9_9RHIZ NADPH-dependent 7-cyano-7-deazag uanine reductase OS=Rhizobium favelukesii OX=348824 GN= queF PE=3 SV=1
MPTTDVSNLSMLGSQTESPKSPEEAVLERVPSSHAGTDYVVRFTAPEFTSLCPMTGQPDFAHIVIDYIPNDWLVESKSLKLFLHAFRNHGAFHEDCSIYIAKRLVELLDPKWLRIGAYWYPRGGIPIDVFWQTGKPPENVWLPDQGVATYRGRG

SEQ ID NO: 49166 - protein, 154 aa, Rhizobium fredii
  misc_feature (1)..(154): tr|A0A2A6M299|A0A2A6M299_RHIFR NADPH-dependent 7-cyano- 7-deazaguanine reductase OS=Rhizobium fredii OX=380 GN= queF PE=3 SV=1
MTKTDVSGLSQLGTKVDLPQSPEEAVLERVPSGHEGTDFVVRFTAPEFTSLCPMTGQPDFAHIVIDYVPNGWLVESKSLKLFLHSFRNHGAFHEDCTIDIAKRLVSLLSPKWLRIGAYWYPRGGIPIDVFWQTGNPPEGVWLPDQGVPTYRGRG

SEQ ID NO: 49167 - protein, 154 aa, Rhizobium fredii
  misc_feature (1)..(154): tr|A0A2L0H6V1|A0A2L0H6V1_RHIFR NADPH-dependent 7-cyano- 7-deazaguanine reductase OS=Rhizobium fredii OX=380 GN= queF PE=3 SV=1
MPKTDVSGLSQLGAKVDLPQSPEEAVLERVPSGHEGTDFLVRFTAPEFTSLCPMTGQPDFAHIVIDYVPNGWLVESKSLKLFLHSFRNHGAFHEDCTIDIAKRLVSLLSPKWLRIGAYWYPRGGIPIDVFWQTGNPPAGVWLPDQGVPTYRGRG

SEQ ID NO: 49168 - protein, 154 aa, Rhizobium freirei
  misc_feature (1)..(154): tr|N6VA78|N6VA78_9RHIZ NADPH-dependent 7-cyano-7-deazag uanine reductase OS=Rhizobium freirei PRF 81 OX=363754 GN=queF PE=3 SV=1
MPKTDVSGLSMLGSQTETAANPESAVLEKVPAGHAGTDYVVRFTAPEFTSLCPMTGQPDFAHIVIDYVPNEWLVESKSLKLFLHSFRNHGAFHEDCSIYIAKRLVELLEPKWLRIGAYWYPRGGIPIDVFWQTGKPPEGVWLPDQGVQPYRGRG

SEQ ID NO: 49169 - protein, 154 aa, Rhizobium galegae
  misc_feature (1)..(154): tr|A0A5J5KRZ2|A0A5J5KRZ2_RHIGA NADPH-dependent 7-cyano- 7-deazaguanine reductase QueF OS=Rhizobium galegae OX=3 99 GN=queF PE=4 SV=1
MTMTDVSGLSQLGSQVEAPQSPETAVLEKVPNGNQGTDYVVRFTAPEFTSLCPMTGQPDFAHIVIDYIPDGFLVESKSLKLFLHSFRNHGAFHEDCSIYIAKRIVDLLAPKWLRIGAYWYPRGGIPIDVFWQTGEAPAGVWLPEQGVATYRGRG

SEQ ID NO: 49170 - protein, 154 aa, Rhizobium gallicum; identical to SEQ ID NO: 49160
  misc_feature (1)..(154): tr|A0A0B4X659|A0A0B4X659_9RHIZ NADPH-dependent 7-cyano- 7-deazaguanine reductase OS=Rhizobium gallicum bv. gall icum R602 OX=1418105 GN=queF PE=3 SV=1

SEQ ID NO: 49171 - protein, 154 aa, Rhizobium gallicum
  misc_feature (1)..(154): tr|A0A1L5NKH9|A0A1L5NKH9_9RHIZ NADPH-dependent 7-cyano- 7-deazaguanine reductase OS=Rhizobium gallicum OX=56730 GN=queF PE=3 SV=1
MPKTDVSSLSMLGKETETAKSPEEAVLERVPSNHAGTDYVVRFTAPEFTSLCPMTGQPDFAHIVIDYIPNEWLVESKSLKLFLHSFRNHGAFHEDCSIYIAKRIVELLDPKWLRIGAYWYPRGGIPIDVFWQTGKPPEGVWLPDQGVATYRGRG

SEQ ID NO: 49172 - protein, 154 aa, Rhizobium grahamii
  misc_feature (1)..(154): tr|A0A370KPY6|A0A370KPY6_9RHIZ NADPH-dependent 7-cyano- 7-deazaguanine reductase OS=Rhizobium grahamii OX=11200 45 GN=queF PE=3 SV=1
MPTTDVSNLSMLGSQTESPKSPEEAVLEKVPASHVGTDYVVRFTAPEFTSLCPMTGQPDFAHIVIDYIPNEWLVESKSLKLFLHAFRNHGAFHEDCSIYIARRLVELLDPKWLRIGAYWYPRGGIPIDVFWQTGKPPEGVWLPDQGVATYRGRG

SEQ ID NO: 49173 - protein, 154 aa, Rhizobium grahamii
  misc_feature (1)..(154): tr|S3HGC1|S3HGC1_9RHIZ NADPH-dependent 7-cyano-7-deazag uanine reductase OS=Rhizobium grahamii CCGE 502 OX=9902 85 GN=queF PE=3 SV=1
MPTTDVSNLSMLGSQTESPKSPEEAVLEKVPASHVGTDYVVRFTAPEFTSLCPMTGQPDFAHIVIDYIPDEWLVESKSLKLFLHAFRNHGAFHEDCSVYIAKRLVELLDPKWLRIGAYWYPRGGIPIDVFWQTGKPPEGVWLPDQGVATYRGRG

SEQ ID NO: 49174 - protein, 154 aa, Rhizobium hainanense
  misc_feature (1)..(154): tr|A0A1C3U3M8|A0A1C3U3M8_9RHIZ NADPH-dependent 7-cyano- 7-deazaguanine reductase OS=Rhizobium hainanense OX=521 31 GN=queF PE=3 SV=1
MPKTDVSGLSMLGNQTETASNPEEAVLEKVPSGHAGTDYVVRFTAPEFTSLCPMTGQPDFAHIVIDYIPNEWLVESKSLKLFLHSFRNHGAFHEDCSIYIAKRLVDLLQPKWLRIGAYWYPRGGIPIDVFWQTGKPPEGVWLPDQGVQPYRGRG

SEQ ID NO: 49175 - protein, 154 aa, Rhizobium hidalgonense
  misc_feature (1)..(154): tr|A0A2A6KBM1|A0A2A6KBM1_9RHIZ NADPH-dependent 7-cyano- 7-deazaguanine reductase OS=Rhizobium hidalgonense OX=1 538159 GN=queF PE=3 SV=1
MPNTDVSSLSMLGQQTETAQSPEAAVLEKVPSNHAGTDYVVRFTAPEFTSLCPMTGQPDFAHIVIDYIPGEWLVESKSLKLFLHSFRNHGAFHEDCSIYIAKRIVELLNPKWLRIGAYWYPRGGIPIDVFWQTGKPPEGVWLPDQGVATYRGRG

SEQ ID NO: 49176 - protein, 154 aa, Rhizobium ipomoeae
  misc_feature (1)..(154): tr|A0A4S8P123|A0A4S8P123_9RHIZ NADPH-dependent 7-cyano- 7-deazaguanine reductase OS=Rhizobium ipomoeae OX=12109 32 GN=queF PE=3 SV=1
MSKTDTSGLTQLGQAVEAPTSPETAVLERVPNGNAGTDYVVRFTAPEFTSLCPMTGQPDFAHIVIDYIPGDWLVESKSLKLFLFAFRNHGAFHEDCSVYIAKRIVELLDPKWLRIGAYWYPRGGIPIDVFWQTGAPPEGVWLPDQGVATYRGRG

SEQ ID NO: 49177 - protein, 154 aa, Rhizobium jaguaris
  misc_feature (1)..(154): tr|A0A387FWE1|A0A387FWE1_9RHIZ NADPH-dependent 7-cyano- 7-deazaguanine reductase OS=Rhizobium jaguaris OX=13121 83 GN=queF PE=3 SV=1
MPTTDVSGLSMLGSQTETAANPEAAVLEKVPSGHAGTDYVVRFTAPEFTSLCPMTGQPDFAHIVIDYVPSEWLVESKSLKLFLHSFRNHGAFHEDCSIYIAKRLVDLLEPKWLRIGAYWYPRGGIPIDVFWQTGKPPEGVWLPDQGVQPYRGRG

SEQ ID NO: 49178 - protein, 154 aa, Rhizobium laguerreae
  misc_feature (1)..(154): tr|A0A4R3QJZ7|A0A4R3QJZ7_9RHIZ NADPH-dependent 7-cyano- 7-deazaguanine reductase OS=Rhizobium laguerreae OX=107 6926 GN=queF PE=3 SV=1
MPSTDVSSLSMLGKQTETAQSPEEAVLEKVPSNHAGTDYVVRFTAPEFTSLCPMTGQPDFAHIVIDYIPGEWLVESKSLKLFLHSFRNHGAFHEDCSIYIAKRIVELLDPRWLRIGAYWYPRGGIPIDVFWQTGKPPEGVWLPEQGVATYRGRG

SEQ ID NO: 49179 - protein, 154 aa, Rhizobium laguerreae
  misc_feature (1)..(154): tr|A0A1S9GS64|A0A1S9GS64_9RHIZ NADPH-dependent 7-cyano- 7-deazaguanine reductase OS=Rhizobium laguerreae OX=107 6926 GN=queF PE=3 SV=1
MPSTDVSSLSMLGQQTETAQSPEEAVLEKVPSNHAGTDYVVRFTAPEFTSLCPMTGQPDFAHIVIDYIPGEWLVESKSLKLFLHSFRNHGAFHEDCSIYIAKRIVELLDPRWLRIGAYWYPRGGIPIDVFWQTDKPPEGVWLPEQGVATYRGRG

SEQ ID NO: 49180 - protein, 154 aa, Rhizobium leguminosarum
  misc_feature (1)..(154): tr|A0A444IC00|A0A444IC00_RHILE NADPH-dependent 7-cyano- 7-deazaguanine reductase OS=Rhizobium leguminosarum OX= 384 GN=queF PE=3 SV=1
MPSTDVSSLSMLGQQTETAQSPEEAVLEKVPSNHAGTDYVVRFTAPEFTSLCPMTGQPDFAHMVIDYIPGEWLVESKSLKLFLHSFRNHGAFHEDCSIYIAKRIVELLDPRWLRIGAYWYPRGGIPIDVFWQTGKPPEGVWLPEQGVASYRGRG

SEQ ID NO: 49181 - protein, 154 aa, Rhizobium leguminosarum
  misc_feature (1)..(154): sp|B5ZY95|QUEF_RHILW NADPH-dependent 7-cyano-7-deazagua nine reductase OS=Rhizobium leguminosarum bv. trifolii (strain WSM2304) OX=395492 GN=queF PE=3 SV=1
MPNTDVSSLSMLGQQTETAQSPEQAVLEKVPSNHAGTDYVVRFTAPEFTSLCPMTGQPDFAHIVIDYIPGEWLVESKSLKLFLHSFRNHGAFHEDCSIYIAKRIVELLDPKWLRIGAYWYPRGGIPIDVFWQTGKPPEGVWLPEQGVATYRGRG

SEQ ID NO: 49182 - protein, 154 aa, Rhizobium loessense
  misc_feature (1)..(154): tr|A0A1G4RAK9|A0A1G4RAK9_9RHIZ NADPH-dependent 7-cyano- 7-deazaguanine reductase OS=Rhizobium loessense OX=1588 90 GN=queF PE=3 SV=1
MPKTDVSSLSMLGKETETAKSPEEAVLEKVPSNHAGTDYVVRFTAPEFTSLCPMTGQPDFAHIVIDYIPNEWLVESKSLKLFLHSFRNHGAFHEDCSIYIAKRIVELLDPKWLRIGAYWYPRGGIPIDVFWQTGKPPEGVWLPDQGVATYRGRG

SEQ ID NO: 49183 - protein, 159 aa, Rhizobium loti
  misc_feature (1)..(159): tr|A0A1B4YYJ5|A0A1B4YYJ5_RHILI NADPH-dependent 7-cyano- 7-deazaguanine reductase OS=Rhizobium loti OX=381 GN=qu eF PE=3 SV=1
MKEIPLMIDTKTLTQLGAHVETPQSPEQAVLETVPFTRGDGPPAIVRFTCPEFTSLCPVTGQPDFAHIVIDYAPDAALVESKSLKLFMTSFRNHGAFHEDCTVMIGRRIVAATKPLWLRIGGYWYPRGGIPIDVFWQTGAPPEGAWLPETGVAPYRGRG

SEQ ID NO: 49184 - protein, 153 aa, Rhizobium loti
  misc_feature (1)..(153): tr|A0A1A5QXZ6|A0A1A5QXZ6_RHILI NADPH-dependent 7-cyano- 7-deazaguanine reductase OS=Rhizobium loti OX=381 GN=qu eF PE=3 SV=1
MIDTKTLTQLGAHVETPQSPEQAVLETVPFSRGDGPPAIVRFTCPEFTSLCPVTGQPDFAHIVIDYAPDAALVESKSLKLFMTSFRNHGAFHEDCTVMIGRRIVAATKPLWLRIGGYWYPRGGIPIDVFWQTGAPPDGAWLPDTGVAPYRGRG

SEQ ID NO: 49185 - protein, 154 aa, Rhizobium lusitanum
  misc_feature (1)..(154): tr|A0A1C3X295|A0A1C3X295_9RHIZ NADPH-dependent 7-cyano- 7-deazaguanine reductase OS=Rhizobium lusitanum OX=2939 58 GN=queF PE=3 SV=1
MPNTDVSGLSMLGSQTETAANPEAAVLEKVPSGHAGTDYVVRFTAPEFTSLCPMTGQPDFAHIVIDYVPNEWLVESKSLKLFLHSFRNHGAFHEDCSIYIAKRLVELLDPKWLRIGAYWYPRGGIPIDVFWQTGKPPEGVWLPDQGVQPYRGRG

SEQ ID NO: 49186 - protein, 154 aa, Rhizobium meliloti
  misc_feature (1)..(154): tr|A0A2J0Z4I9|A0A2J0Z4I9_RHIML NADPH-dependent 7-cyano- 7-deazaguanine reductase OS=Rhizobium meliloti OX=382 G N=queF PE=3 SV=1
MTKTDVSGLSQLGTKVDLPQSPEEAVLERVPSGHGGTDFVVRFTAPEFTSLCPMTRQPDFAHIVIDYVPDGWLVESKSLKLFLHSFRNHGAFHEDCTIEIAKRLVSLLSPKWLRIGAYWYPRGGIPIDVFWQTGNPPDGVWLPDQGVPTYRGRG

SEQ ID NO: 49187 - protein, 154 aa, Rhizobium meliloti
  misc_feature (1)..(154): sp|Q92N45|QUEF_RHIME NADPH-dependent 7-cyano-7-deazagua nine reductase OS=Rhizobium meliloti (strain 1021) OX=2 66834 GN=queF PE=3 SV=1
MTKTDVSGLSQLGAKVDLPQSPEEAVLERVPSGHGGTDFVVRFTAPEFTSLCPMTGQPDFAHIVIDYVPDGWLVESKSLKLFLHSFRNHGAFHEDCTIEIAKRLVSLLSPKWLRIGAYWYPRGGIPIDVFWQTGNPPEGVWLPDQGVPTYRGRG

SEQ ID NO: 49188 - protein, 144 aa, Rhizobium mesoamericanum
  misc_feature (1)..(144): tr|K0PJA7|K0PJA7_9RHIZ NADPH-dependent 7-cyano-7-deazag uanine reductase OS=Rhizobium mesoamericanum STM3625 OX =1211777 GN=queF PE=3 SV=1
MLGSQTESPKSPEEAVLEKVPSNHAGTDYVVRFTAPEFTSLCPMTGQPDFAHIVIDYIPNEWLVESKSLKLFLHAFRNHGAFHEDCSIYIAKRLVELLDPKWLRIGAYWYPRGGIPIDVFWQTGKPPEGVWLPDQGVATYRGRG

SEQ ID NO: 49189 - protein, 154 aa, Rhizobium miluonense
  misc_feature (1)..(154): tr|A0A1C3WKE9|A0A1C3WKE9_9RHIZ NADPH-dependent 7-cyano- 7-deazaguanine reductase OS=Rhizobium miluonense OX=411 945 GN=queF PE=3 SV=1
MPKTDVSGLSMLGSQTETASNPEEAVLEKVPAGHAGTDYVVRFTAPEFTSLCPMTGQPDFAHIVIDYVPNEWLVESKSLKLFLHSFRNHGAFHEDCSIYIAKRLVDLLEPKWLRIGAYWYPRGGIPIDVFWQTGKPPEGVWLPDQGVQPYRGRG

SEQ ID NO: 49190 - protein, 154 aa, Rhizobium mongolense
  misc_feature (1)..(154): tr|A0A559SLH9|A0A559SLH9_9RHIZ NADPH-dependent 7-cyano- 7-deazaguanine reductase OS=Rhizobium mongolense USDA 1 844 OX=1079460 GN=queF PE=3 SV=1
MPKTDVSSLSMLGKETETAKSPEEAVLEKVPSNHVGTDYVVRFTAPEFTSLCPMTGQPDFAHIVIDYIPNEWLVESKSLKLFLHSFRNHGAFHEDCSIYIAKRIVELLNPKWLRIGAYWYPRGGIPIDVFWQTGKPPEGVWLPDQGVATYRGRG

SEQ ID NO: 49191 - protein, 154 aa, Rhizobium multihospitium; identical to SEQ ID NO: 49174
  misc_feature (1)..(154): tr|A0A1C3VF64|A0A1C3VF64_9RHIZ NADPH-dependent 7-cyano- 7-deazaguanine reductase OS=Rhizobium multihospitium OX =410764 GN=queF PE=3 SV=1

SEQ ID NO: 49192 - protein, 154 aa, Rhizobium naphthalenivorans
  misc_feature (1)..(154): tr|A0A512HEV8|A0A512HEV8_9RHIZ NADPH-dependent 7-cyano- 7-deazaguanine reductase OS=Rhizobium naphthalenivorans OX=1118451 GN=queF PE=3 SV=1
MSKTDVSGLSQLGQSVEAPTSPEAAVLEKVPNGNAGTDYVVRFTAPEFTSLCPMTGQPDFAHIVIDYIPGDWLVESKSLKLFLFSFRNHGAFHEDCSIYIAKRLVELLDPKWLRIGAYWYPRGGIPIDVFWQTGAPPEGVWLPEQGVATYRGRG

SEQ ID NO: 49193 - protein, 154 aa, Rhizobium nepotum
  misc_feature (1)..(154): tr|A0A0D8KID7|A0A0D8KID7_9RHIZ NADPH-dependent 7-cyano- 7-deazaguanine reductase OS=Rhizobium nepotum 39/7 OX=1 368418 GN=queF PE=3 SV=1
MSVTDVSGLSQLGTKVDTPESPEKAILEKVPNGNAGTDYVVRFTAPEFTSLCPMTGQPDFAHIVIDYIAGDFLVESKSLKLFLQSFRNHGAFHEDCSVYIARRLVELLQPKWLRIGAYWYPRGGIPIDVFWQTGPVPEGVWLPDQGVPTYRGRG

SEQ ID NO: 49194 - protein, 154 aa, Rhizobium oryzae
  misc_feature (1)..(154): tr|A0A1Q9AVD3|A0A1Q9AVD3_9RHIZ NADPH-dependent 7-cyano- 7-deazaguanine reductase OS=Rhizobium oryzae OX=464029 GN=queF PE=3 SV=1
MTKTDVTGLSQLGQKTDLPANPDDAVLERVPSGHQGADFVVRFTAPEFTSLCPMTGQPDFAHIVIDYVPAGWLVESKSLKLFLHSFRNHGAFHEDCTLDIAKRLVDLLAPKWLRIGAYWYPRGGIPIDVFWQTGAPPEGLWLPDQGVPTYRGRG

SEQ ID NO: 49195 - protein, 154 aa, Rhizobium oryzae
  misc_feature (1)..(154): tr|A0A1X7GTT6|A0A1X7GTT6_9RHIZ NADPH-dependent 7-cyano- 7-deazaguanine reductase OS=Rhizobium oryzae OX=464029 GN=queF PE=3 SV=1
MTMTDVSGLKQLGSNVEAPQSPEAAVLEKVPNGNQGTDYVVRFTAPEFTSLCPMTGQPDFAHIVIDYIPDGFLVESKSLKLFLHSFRNHGAFHEDCSIYIAKRIVDLLAPKWLRIGAYWYPRGGIPIDVFWQTGEAPAGVWLPEQGVATYRGRG

SEQ ID NO: 49196 - protein, 154 aa, Rhizobium oryziradicis
  misc_feature (1)..(154): tr|A0A1Q8ZQZ7|A0A1Q8ZQZ7_9RHIZ NADPH-dependent 7-cyano- 7-deazaguanine reductase OS=Rhizobium oryziradicis OX=1 867956 GN=queF PE=3 SV=1
MSKTDVSGLSQLGQQVDAPTSPETAVMERVPNGNAGTDYVVRFTAPEFTSLCPMTGQPDFAHIVIDYVPGEFLVESKSLKLFLFSFRNHGAFHEDCSVYIAKRLVELLNPKWLRIGAYWYPRGGIPIDVFWQTGEAPKGVWLPDQGVPTYRGRG

SEQ ID NO: 49197 - protein, 155 aa, Rhizobium phaseoli; identical to SEQ ID NO: 49164
  misc_feature (1)..(155): tr|A0A0M3GKU9|A0A0M3GKU9_9RHIZ NADPH-dependent 7-cyano- 7-deazaguanine reductase OS=Rhizobium phaseoli Ch24-10 OX=1128399 GN=queF PE=3 SV=1

SEQ ID NO: 49198 - protein, 154 aa, Rhizobium phaseoli
  misc_feature (1)..(154): tr|A0A2U3CXY0|A0A2U3CXY0_9RHIZ NADPH-dependent 7-cyano- 7-deazaguanine reductase OS=Rhizobium phaseoli OX=396 G N=queF PE=3 SV=1
MPNTDVSSLSMLGQQTETANSPEEAVLEKVPSNHAGTDYVVRFTAPEFTSLCPMTGQPDFAHIVIDYIPSEWLVESKSLKLFLHSFRNHGAFHEDCSIYIAKRIVELLDPKWLRIGAYWYPRGGIPIDVFWQTGKPPESVWLPEQGVATYRGRG

SEQ ID NO: 49199 - protein, 154 aa, Rhizobium pisi
  misc_feature (1)..(154): tr|A0A3R9GY71|A0A3R9GY71_9RHIZ NADPH-dependent 7-cyano- 7-deazaguanine reductase OS=Rhizobium pisi OX=574561 GN =queF PE=3 SV=1
MPNTDVSSLSMLGQQTETAKSPEEAVLEKVPSNHAGTDYVVRFTAPEFTSLCPMTGQPDFAHIVIDYIPGEWLVESKSLKLFLHSFRNHGAFHEDCSIYIAKRIVELLDPKWLRIGAYWYPRGGIPIDVFWQTGKPPEGVWLPDQGVATYRGRG

SEQ ID NO: 49200 - protein, 154 aa, Rhizobium pusense; identical to SEQ ID NO: 43810
  misc_feature (1)..(154): tr|A0A1L9CEG0|A0A1L9CEG0_9RHIZ NADPH-dependent 7-cyano- 7-deazaguanine reductase OS=Rhizobium pusense OX=648995 GN=queF PE=3 SV=1

SEQ ID NO: 49201 - protein, 154 aa, Rhizobium radiobacter
  misc_feature (1)..(154): tr|A0A1B9UVK3|A0A1B9UVK3_RHIRD NADPH-dependent 7-cyano- 7-deazaguanine reductase OS=Rhizobium radiobacter OX=35 8 GN=queF PE=3 SV=1
MSVTDVSSLSQLGAKVDTPESPEKAILEKVPNGNAGTDYVVRFTAPEFTSLCPMTGQPDFAHIVIDYIAGDFLVESKSLKLFLQSFRNHGAFHEDCSVYIARRLVELLQPKWLRIGAYWYPRGGIPIDVFWQTGPVPEGVWLPDQGVPTYRGRG

SEQ ID NO: 49202 - protein, 154 aa, Rhizobium radiobacter; identical to SEQ ID NO: 43797
  misc_feature (1)..(154): tr|A0A083ZSU4|A0A083ZSU4_RHIRD NADPH-dependent 7-cyano- 7-deazaguanine reductase OS=Rhizobium radiobacter OX=35 8 GN=queF PE=3 SV=1

SEQ ID NO: 49203 - protein, 154 aa, Rhizobium rhizosphaerae
  misc_feature (1)..(154): tr|A0A1Q9APE6|A0A1Q9APE6_9RHIZ NADPH-dependent 7-cyano- 7-deazaguanine reductase OS=Rhizobium rhizosphaerae OX= 1672749 GN=queF PE=3 SV=1
MTKTDVSGLSLLGQKTDLPAGPDEAVLERVPSGHQGTNFVVRFTAPEFTSLCPMTGQPDFAHIVIDYVPDEWLVESKSLKLFLHSFRNHGAFHEDCSIDIAKRLVDLLAPKWLRIGAYWYPRGGIPIDVFWQTGAPPEGVWLPDQGVQPYRGRG

SEQ ID NO: 49204 - protein, 154 aa, Rhizobium rosettiformans
  misc_feature (1)..(154): tr|A0A4S8PV91|A0A4S8PV91_9RHIZ NADPH-dependent 7-cyano- 7-deazaguanine reductase OS=Rhizobium rosettiformans W3 OX=538378 GN=queF PE=3 SV=1
MSKTDTSGLTQLGQSVEAPTSPETAVMERVPNGNAGTDYVVRFTAPEFTSLCPMTGQPDFAHIVIDYIPGDWLVESKSLKLFLFSFRNHGAFHEDCSVYIAKRIVELLDPKWLRIGAYWYPRGGIPIDVFWQTGEPPKGVWLPDQGVATYRGRG

SEQ ID NO: 49205 - protein, 155 aa, Rhizobium selenitireducens
  misc_feature (1)..(155): tr|A0A376AE85|A0A376AE85_9RHIZ NADPH-dependent 7-cyano- 7-deazaguanine reductase OS=Rhizobium selenitireducens ATCC BAA-1503 OX=1336235 GN=queF PE=3 SV=1
MMSKTDVSGLSQLGQTVEAPTSPETAVLERVPNGNAGTDYVVRFTAPEFTSLCPMTGQPDFAHIVLDYIPGDWLVESKSLKLFLFSFRNHGAFHEDCSIYIAKRLVDLLDPKWLRIGAYWYPRGGIPIDVFWQTGAPPQGVWLPDQGVATYRGRG

SEQ ID NO: 49206 - protein, 154 aa, Rhizobium smilacinae
  misc_feature (1)..(154): tr|A0A5C4XHI4|A0A5C4XHI4_9RHIZ NADPH-dependent 7-cyano- 7-deazaguanine reductase OS=Rhizobium smilacinae OX=139 5944 GN=queF PE=3 SV=1
MTMTDVSGLSQLGKQVDAPKSPEEAVLERVPNSNQGMDYVTRFTAPEFTSLCPMTGQPDFAHIVIDYIPDAYLVESKSLKLFLTSFRNHGAFHEDCSVYIAKRLVDLLAPKWLRIGAYWYPRGGIPIDVFWQTGAVPEGVWLPDQGVPTYRGRG

SEQ ID NO: 49207 - protein, 154 aa, Rhizobium sophoriradicis
  misc_feature (1)..(154): tr|A0A2A5KYF0|A0A2A5KYF0_9RHIZ NADPH-dependent 7-cyano- 7-deazaguanine reductase OS=Rhizobium sophoriradicis OX =1535245 GN=queF PE=3 SV=1
MPNTDVSSLSMLGQQTETAKSPEEAVLEKVPSNHAGTDYVVRFTAPEFTSLCPMTGQPDFAHIVIDYIPGEWLVESKSLKLFLHSFRNHGAFHEDCSIYIAKRIVELLDPKWLRIGAYWYPRGGIPIDVFWQTGQPPEGVWLPEQGVATYRGRG

SEQ ID NO: 49208 - protein, 154 aa, Rhizobium sp.; identical to SEQ ID NO: 49162
  misc_feature (1)..(154): tr|A0A192LZM5|A0A192LZM5_9RHIZ NADPH-dependent 7-cyano- 7-deazaguanine reductase OS=Rhizobium sp. N113 OX=17039 60 GN=queF PE=3 SV=1

SEQ ID NO: 49209 - protein, 154 aa, Rhizobium sp.
  misc_feature (1)..(154): tr|A0A4V2QG69|A0A4V2QG69_9RHIZ NADPH-dependent 7-cyano- 7-deazaguanine reductase OS=Rhizobium sp. BK251 OX=2512 125 GN=queF PE=3 SV=1
MPNTDVSGLTMLGTNTEAPKTPEEAVLERVPAGHGGTNYVVRFTAPEFTSLCPMTGQPDFAHIVIDYIPDEWLVESKSLKLFLHSFRNHGAFHEDCSIYIAKRIVDLLQPKWLRIGAYWYPRGGIPIDVFWQTGAPPEGVWLPEQGVAPYRGRG

SEQ ID NO: 49210 - protein, 154 aa, Rhizobium straminoryzae
  misc_feature (1)..(154): tr|A0A549TDG2|A0A549TDG2_9RHIZ NADPH-dependent 7-cyano- 7-deazaguanine reductase OS=Rhizobium straminoryzae OX= 1387186 GN=queF PE=3 SV=1
MSMTDVSGLSQLGKQVDAPTSPETAVLERVPNSNAGTDYVVRFTAPEFTSLCPMTGQPDFAHIVIDYIPGEFLVESKSLKLFLFSFRNHGAFHEDCSVYIAKRLVDLLAPKWLRIGAYWYPRGGIPIDVFWQTGAAPEGVWLPDQGVPTYRGRG

SEQ ID NO: 49211 - protein, 154 aa, Rhizobium subbaraonis
  misc_feature (1)..(154): tr|A0A285UJY5|A0A285UJY5_9RHIZ NADPH-dependent 7-cyano- 7-deazaguanine reductase OS=Rhizobium subbaraonis OX=90 8946 GN=queF PE=3 SV=1
MSKTDVSNLSQLGRNVDLPTTPEEAVLEKVPNGNQGTDYVVRFTAPEFTSLCPMTGQPDFAHIVIDYIPDAALVESKSLKLFLHSFRNHGAFHEDCSIYVAKRLVDLLEPKWLRIGAYWYPRGGIPIDVFWQTGIAPDGVWLPDQGVPTYRGRG

SEQ ID NO: 49212 - protein, 154 aa, Rhizobium sullae
  misc_feature (1)..(154): tr|A0A4R3Q735|A0A4R3Q735_RHISU NADPH-dependent 7-cyano- 7-deazaguanine reductase OS=Rhizobium sullae OX=50338 G N=queF PE=3 SV=1
MPKTDVSSLSMLGKETETAKSPEEAVLEKVPSNHAGTDFVVRFTAPEFTSLCPMTGQPDFAHIVIDYIPNAWLVESKSLKLFLHSFRNHGAFHEDCSIYIAKRLVELLDPKWLRIGAYWYPRGGIPIDVFWQTGKPPEGVWLPDQGVATYRGRG

SEQ ID NO: 49213 - protein, 154 aa, Rhizobium sullae
  misc_feature (1)..(154): tr|A0A2N0D560|A0A2N0D560_RHISU NADPH-dependent 7-cyano- 7-deazaguanine reductase OS=Rhizobium sullae OX=50338 G N=queF PE=3 SV=1
MPKTDVSSLSMLGNETETAKSPEEAVLEKVPSNHAGTDFVVRFTVPEFTSLCPMTGQPDFAHIVIDYIPNAWLVESKSLKLFLHSFRNHGAFHEDCSIYIAKRLVELLDPKWLRIGAYWYPRGGIPIDVFWQTGKPPEGVWLPDQGVATYRGRG

SEQ ID NO: 49214 - protein, 154 aa, Rhizobium taibaishanense
  misc_feature (1)..(154): tr|A0A1Q9A496|A0A1Q9A496_9RHIZ NADPH-dependent 7-cyano- 7-deazaguanine reductase OS=Rhizobium taibaishanense OX =887144 GN=queF PE=3 SV=1
MSKTDVSGLSMLGSQVEAPTSPETAVLEKVPNNNAGTDYVVRFTAPEFTSLCPMTGQPDFAHIVIDYIPGDFLVESKSLKLFMTSFRNHGSFHEDCSIYIAKRLVDLLAPKWLRIGAYWYPRGGIPIDVFWQTGEVPAGVWLPDQGVPTYRGRG

SEQ ID NO: 49215 - protein, 154 aa, Rhizobium tibeticum
  misc_feature (1)..(154): tr|A0A1H8HJV6|A0A1H8HJV6_9RHIZ NADPH-dependent 7-cyano- 7-deazaguanine reductase OS=Rhizobium tibeticum OX=5010 24 GN=queF PE=3 SV=1
MPTTDVSNLSMLGSQTESPKTPEEAVLERVPSSHAGTDYVVRFTAPEFTSLCPMTGQPDFAHIVIDYIPNDWLVESKSLKLFLHAFRNHGAFHEDCSIYIAKRLVELLDPKWLRIGAYWYPRGGIPIDVFWQTGKPPENVWLPDQGVATYRGRG

SEQ ID NO: 49216 - protein, 154 aa, Rhizobium tropici; identical to SEQ ID NO: 49174
  misc_feature (1)..(154): tr|L0LPC2|L0LPC2_RHITR NADPH-dependent 7-cyano-7-deazag uanine reductase OS=Rhizobium tropici CIAT 899 OX=69876 1 GN=queF PE=3 SV=1

SEQ ID NO: 49217 - protein, 203 aa, Rhizobium tropici
  misc_feature (1)..(203): tr|A0A2T0PGV7|A0A2T0PGV7_RHITR NADPH-dependent 7-cyano- 7-deazaguanine reductase OS=Rhizobium tropici OX=398 GN =queF PE=3 SV=1
MALLLPQCIGREKAGWRPPLHGVVLQENRFPLFRIMLYETRTETPMAKTSSKSTTSPGLQLGRAVEWPDAPEKAQLDRVPNPQAGTDYLVRFTVPEFTSICPVTGQPDFAHLVIDYVPGRWLLESKSLKLFAASFRNHGAFHEDCTVMIGKRIADEIKPKWLRIGGYWYPRGGIPIDVFYQTGRLPKGLWVPDQGVAPYRGRG

SEQ ID NO: 49218 - protein, 154 aa, Rhizobium tubonense
  misc_feature (1)..(154): tr|A0A2W4D9P4|A0A2W4D9P4_9RHIZ NADPH-dependent 7-cyano- 7-deazaguanine reductase OS=Rhizobium tubonense OX=4840 88 GN=queF PE=3 SV=1
MPSTDVSGLSMLGSHTDAPTNPEDAILEKVPSGHQGTDYVVRFTAPEFTSLCPMTGQPDFAHIVIDYIPQEWLVESKSLKLFLHSFRNHGAFHEDCSIYIAKRIVDLLQPKWLRIGAYWYPRGGIPIDVFWQTGKPPEGVWLPDQGVQPYRGRG

SEQ ID NO: 49219 - protein, 154 aa, Rhizobium tumorigenes
  misc_feature (1)..(154): tr|A0A2W4CTA0|A0A2W4CTA0_9RHIZ NADPH-dependent 7-cyano- 7-deazaguanine reductase OS=Rhizobium tumorigenes OX=20 41385 GN=queF PE=3 SV=1
MPNTDVSGLSMLGSQTATPTSPETAMLEKVPATHQGAEYLVRFTAPEFTSLCPMTGQPDFAHIVIDYVPGEWLVESKSLKLFLHAFRNHGAFHEDCSVYIAKRIVELLQPKWLRIGAYWYPRGGIPIDVFWQTGKPPEGLWLPDQGVPTYRGRG

SEQ ID NO: 49220 - protein, 154 aa, Rhizobium vallis
  misc_feature (1)..(154): tr|A0A432PDX7|A0A432PDX7_9RHIZ NADPH-dependent 7-cyano- 7-deazaguanine reductase OS=Rhizobium vallis OX=634290 GN=queF PE=3 SV=1
MPNTDVSSLSMLGQQTETAKSPEEAVLEKVPSNHAGTDYVVRFTAPEFTSLCPMTGQPDFAHIVIDYIPGEWLVESKSLKLFLHSFRNHGAFHEDCSIYIAKRIVELLDPKWLRIGAYWYPRGGIPIDVFWQTGKPPEGVWLPEQGVATYRGRG

SEQ ID NO: 49221 - protein, 144 aa, Rhizobium yanglingense
  misc_feature (1)..(144): tr|A0A245Z450|A0A245Z450_9RHIZ NADPH-dependent 7-cyano- 7-deazaguanine reductase OS=Rhizobium yanglingense OX=6 1013 GN=queF PE=3 SV=1
MLGKETETAKSPEEAVLERVPSNHAGTDYVVRFTAPEFTSLCPMTGQPDFAHIVIDYIPNEWLVESKSLKLFLHSFRNHGAFHEDCSIYIAKRIVELLDPKWLRIGAYWYPRGGIPIDVFWQTGKPPEGVWLPDQGVATYRGRG

SEQ ID NO: 49222 - protein, 150 aa, Rhizomicrobium sp.
  misc_feature (1)..(150): tr|A0A177Q8Y1|A0A177Q8Y1_9PROT NADPH-dependent 7-cyano- 7-deazaguanine reductase OS=Rhizomicrobium sp. SCGC AG- 212-E05 OX=1799655 GN=queF PE=3 SV=1
MAKKLTQLGHQVKQPASPDKAVLEAVANPHADTDYLVRFTAPEFTTLCPITGQPDFAHFVIDYVPGAKIVESKSLKLFLTSFRNASGFHEDCSLKIGKRIQAAIKPKFIRVAGYWYPRGGIPIDIFWQSGKLPAGVWLPDTGVASYRGRG

SEQ ID NO: 49223 - protein, 150 aa, Rhizorhabdus dicambivorans
  misc_feature (1)..(150): tr|A0A2A4G1Y9|A0A2A4G1Y9_9SPHN NADPH-dependent 7-cyano- 7-deazaguanine reductase OS=Rhizorhabdus dicambivorans OX=1850238 GN=queF PE=3 SV=1
MAMTPLHLGKTSALPASPEQAVLDYVPNPRPGSLYLVRFAAPEFTSLCPVTGQPDFAHLVIDYAPGETIVESKSLKLFLGSFRNHAAFHEDCTVGIGERLVAEMQPRWLRIGGYWYPRGGIPIDVFWQSGAPPEGLWVPDQGVAGYRGRG

SEQ ID NO: 49224 - protein, 86 aa, Rhizorhabdus sp.
  misc_feature (1)..(86): tr|A0A521T6B5|A0A521T6B5_9SPHN NADPH-dependent 7-cyano- 7-deazaguanine reductase (Fragment) OS=Rhizorhabdus sp. OX=1968843 GN=EPO38_04090 PE=3 SV=1
PGETIVESKSLKLFLGAFRNHAAFHEDCTVGIGERLFAEMQPRWLRIGGYWYPRGGIPIDVFWQSGTPPEGLWVPDQGVAGYRGRG

SEQ ID NO: 49225 - protein, 79 aa, Rhizorhabdus sp.
  misc_feature (1)..(79): tr|A0A521STR3|A0A521STR3_9SPHN NADPH-dependent 7-cyano- 7-deazaguanine reductase QueF (Fragment) OS=Rhizorhabdu s sp. OX=1968843 GN=EPO38_07465 PE=3 SV=1
MSQPTLHLGKTSALPASPEQAVLDYVPNPRPGSLYLVRFAAPEFTSLCPVTGQPDFAHLVIDYAPGDTIVESKSLKLFL

SEQ ID NO: 49226 - protein, 274 aa, Rhodanobacter denitrificans
  misc_feature (1)..(274): tr|I4WJV1|I4WJV1_9GAMM NADPH-dependent 7-cyano-7-deazag uanine reductase OS=Rhodanobacter denitrificans OX=6666 85 GN=queF PE=3 SV=1
MSTPEHSPLGKDTVYADRYEPRLLFPIPRADKRAELGIAESLPFHGVDIWNAYELSWLDPRGKPQVALAEFRVPAASPHIIESKSFKLYLNGFAQERLADAATLAATLMRDLSAAAGAVVGVQLREARTDALPVVDLDGHLLDTQDIAIDHYGPPQADFLQADTTAAPVAETVLSHLLRSNCPVTGQPDWGSVQIAYRGAPIDHAGLLRYLVSFRTHNEFHEQCVERIFVDLMQRCAPRQLSVHARYTRRGGLDINPFRSSTPATPGNLRTVRQ

SEQ ID NO: 49227 - protein, 274 aa, Rhodanobacter denitrificans
  misc_feature (1)..(274): tr|A0A368KC46|A0A368KC46_9GAMM NADPH-dependent 7-cyano- 7-deazaguanine reductase OS=Rhodanobacter denitrificans OX=666685 GN=queF PE=3 SV=1
MSTPEHSPLGKDTVYAGRYDPSLLFPIPRADKRAEIGIADTLPFHGVDIWNAYELSWLDLRGKPQVAMAEFRVPALSPQIIESKSFKLYLNGFAQERIADAAALAATLTHDLSAAAGAAVGVQLRDARADALPVIDLDGHLLDDQNIAIDHYGPPQADFLQADTGAMPVAETVLSHLLRSNCPVTGQPDWGSVQIAYRGAPIDHAGLLRYLVSFRTHNEFHEQCVERIFVDLTQRCAPRQLSVYARYTRRGGLDINPFRSSAPASPGNPRTVRQ

SEQ ID NO: 49228 - protein, 274 aa, Rhodanobacter fulvus
  misc_feature (1)..(274): tr|I4VRA1|I4VRA1_9GAMM NADPH-dependent 7-cyano-7-deazag uanine reductase OS=Rhodanobacter fulvus Jip2 OX=116340 8 GN=queF PE=3 SV=1
MNSPEHSPLGKETPYANRYDPALLFPIPRDSNRAALGLAEPLPFHGVDIWNAYELSWLDMRGKPVAALAEFRVPATSPQLIESKSFKLYLNGFAGERIADAATLTSTLVRDLSTAAGAVVGVQLSDARAAVYPVSDMDGHLLDHQAIDIDDYGPPNADFLRADRNATPVAETLVSHLLRSNCPVTGQPDWGSVQIAYRGAPIDHAGLLRYLVSFRNHNEFHEHCVERIFVDLGRCCEPQQLSVYARYTRRGGLDINPFRSSTPVTPPNLRTVRQ

SEQ ID NO: 49229 - protein, 274 aa, Rhodanobacter glycinis
  misc_feature (1)..(274): tr|A0A502CFV0|A0A502CFV0_9GAMM NADPH-dependent 7-cyano- 7-deazaguanine reductase OS=Rhodanobacter glycinis OX=5 82702 GN=queF PE=3 SV=1
MSTPEHSPLGKDTIYADRYDPGLLFAIPRADKRVEIGVGEVLPFHGVDIWNAYELSWLDLRGKPQVALAEFHVPAASPHIIESKSFKLYLNGFAQERIADAASLTDALLHDLSAAAGAVVNVQLHAAHGATLPVTGLEGDLLDDQDIEVDHYGPPDADFLLVDRAATPVAETLVSHLLRSNCPVTGQPDWGSVQIAYCGAPIDHAGLLRYLISFRTHNEFHEQCVERIFVDLTQRCAPQQLSVYARYTRRGGLDINPFRSSTPGTPDNARTVRQ

SEQ ID NO: 49230 - protein, 275 aa, Rhodanobacter glycinis
  misc_feature (1)..(275): tr|A0A5B9E333|A0A5B9E333_9GAMM NADPH-dependent 7-cyano- 7-deazaguanine reductase OS=Rhodanobacter glycinis OX=5 82702 GN=queF PE=3 SV=1
MSTPDHSPLGKATVYADRYDPGLLFPIPRAAKRNEIGVGMPLPFHGTDIWNAYELSWLDMRGKPQAAVAEFRIPASTPNIIESKSFKLYLNGFAQEPLASTAALRALLQQDLTTAAGDVVEVILHPARTAAHTFTDLAGESIDELPVAIDDYGPPKADYLHADTAAAVVEETLVSDLLRSNCPVTGQPDWGSVQIAYRGAPIDREGLLRYLVSFRTHSEFHEQCVERIFMDISARCAPERLSVYARYTRRGGLDINPFRSSVPGNVPDNRRGARQ

SEQ ID NO: 49231 - protein, 274 aa, Rhodanobacter lindaniclasticus
  misc_feature (1)..(274): tr|A0A4S3KLH8|A0A4S3KLH8_9GAMM NADPH-dependent 7-cyano- 7-deazaguanine reductase OS=Rhodanobacter lindaniclasti cus OX=75310 GN=queF PE=3 SV=1
MSTPEHSPLGKDTVYADRYDPSLLFPIPRADKRAEIGVAEALPFHGVDIWNAYELSWLDPRGKPQVALAEFRVPAASPYIIESKSFKLYLNGFAQESIADIDALAETLRHDLSAAAGAVVGVELSPLRAAALPVVELDGELLDEQDIAVDSYGPPDADFLQADTTATAVEETLVSHLLRSNCPVTGQPDWGSVQIAYRGAPIDHAGLLRYLVSFRTHNEFHEQCVERIFVDLTRRCAPLQLRVHARYTRRGGLDINPFRSSTPATPGNPRTVRQ

SEQ ID NO: 49232 - protein, 274 aa, Rhodanobacter sp.
  misc_feature (1)..(274): tr|A0A1V3PA20|A0A1V3PA20_9GAMM NADPH-dependent 7-cyano- 7-deazaguanine reductase OS=Rhodanobacter sp. C05 OX=19 45855 GN=queF PE=3 SV=1
MSTPEHSPLGKSTIYADRYDPSLLFPIPRAGKRGEIGVAEPLPFHGVDIWNAYELSWLDLRGKPVVALAEFRVPAASPNIIESKSFKLYLNGFAQERIADATTLAATLTRDLSAAAGAVVDVKLRDANAAAYAVTDLDGHPLDGQDIAIDHYGPPQADFLHADVSANPIEETVVSHLLRSNCPVTGQPDWGSVQIAYRGAPIDYAGLLRYLVSFRDHNEFHEQCVERIFVDVMQRCAPQELSVHARYTRRGGLDINPFRSSMPATPANSRTVRQ

SEQ ID NO: 49233 - protein, 274 aa, Rhodanobacter sp.
  misc_feature (1)..(274): tr|A0A522N2Z5|A0A522N2Z5_9GAMM NADPH-dependent 7-cyano- 7-deazaguanine reductase OS=Rhodanobacter sp. OX=188344 6 GN=queF PE=3 SV=1
MSTPEHSPLGKDTGYPDRYDPDRLFPIPRADKRAELGLAEILPFHGVDIWNAYELSWLDRRGKPVVALAEFRVPAASPYIIESKSFKLYLNGFAQERVADADALAATLVRDLSAAVGAVVNVQLSAASATAHHLADLDGYLLDDQLLEIDHYGPPRADFLGTDATAQAIEETLVSHLLRSNCPVTGQPDWGSVQIAYRGTPIGHAGLLRYLVSFRNHNEFHEQCVERIFVDLMQRCAPQQLSVYARYTRRGGLDINPFRSSTPITPDNPRSARQ

SEQ ID NO: 49234 - protein, 274 aa, Rhodanobacter spathiphylli
  misc_feature (1)..(274): tr|I4W7A4|I4W7A4_9GAMM NADPH-dependent 7-cyano-7-deazag uanine reductase OS=Rhodanobacter spathiphylli B39 OX=1 163407 GN=queF PE=3 SV=1
MSTPEHSPLGKDTVYADRYDPGLLFPIPRADKRAEIGLGDVLPFHGVDIWNAYELSWLDLRGKPQVALAEFHVPAASPNIIESKSFKLYLNGFAQERIADAASLTDTLLHDLSAAAGAVVSVQLHAAGGASLPVSVLDGQLLDEQDIAIDSYGPPDADFLQADTAATPVAETLVSHLLRSNCPVTGQPDWGSVQIAYRGAPIDHAGLLRYLVSFRTHNEFHEQCVERIFVDLTQRCAPRQLSVYARYTRRGGLDINPFRSSTPATPDNPRTVRQ

SEQ ID NO: 49235 - protein, 274 aa, Rhodanobacter thiooxydans
  misc_feature (1)..(274): tr|A0A154QFU9|A0A154QFU9_9GAMM NADPH-dependent 7-cyano- 7-deazaguanine reductase OS=Rhodanobacter thiooxydans O X=416169 GN=queF PE=3 SV=1
MSSPEHSPLGKDTVYADRYDPSLLFPIPRADKRAELGIAESLPFHGVDIWNAYELSWLDLRGKPQVALAEFRVPAASPHIIESKSFKLYLNGFAQERIADATTLAATLARDLSAAAGAVVGVQLRDVRADALPVVELDGLLLDGQDIAIDHYGPPDAGFLQADRTATPVAETLLSHLLRSNCPVTGQPDWGSVQIAYRGAPIDHAGLLRYLVSFRTHNEFHEQCVERIFVDLIRRCAPQQLSVHARYTRRGGLDINPFRSSAPATPGNPRTVRQ

SEQ ID NO: 49236 - protein, 275 aa, Rhodanobacteraceae bacterium
  misc_feature (1)..(275): tr|A0A2Z6E1N2|A0A2Z6E1N2_9GAMM NADPH-dependent 7-cyano- 7-deazaguanine reductase OS=Rhodanobacteraceae bacteriu m Dysh456 OX=2010829 GN=queF PE=3 SV=1
MSLLDHSPLGKPSVYADRYDPSRLFPIPRAAKRAELGLGEALPFHGVDVWNAYELSWLDARGKPCVAIAELRVPAASPCIIESKSLKLYLNGFAQERIADADALAATLVRDLSAAAGAAVAVTLHAPRVAALPLAELAGSSIDDQRLDIDDYGPPNPGYLRLVAGAAEVEETLVSDLLRSNCPVTGQPDWGSVRIRYRGAPIDRAGLLRYLVSFRTFDEFHEQCVERIFVDVMARCAPRALEVYARYTRRGGLDINPFRSTDPHASPDNLRTPRQ

SEQ ID NO: 49237 - protein, 273 aa, Rhodanobacteraceae bacterium
  misc_feature (1)..(273): tr|A0A522R3N9|A0A522R3N9_9GAMM NADPH-dependent 7-cyano- 7-deazaguanine reductase (Fragment) OS=Rhodanobacterace ae bacterium OX=2052182 GN=queF PE=3 SV=1
ANPLGHVVEYPATIDPAVLFAVPRAEARRAIGLDPDALPFTGADLWNAWEFSWLDARGLPRVAVLRLAVPCTSPNIVESKSLKLYLGAYAMTPFTGPEAVRAQVERDVSGCIGAKLAMTLLDPHDIERSGIAALAGESLDDQRIEANDYGPARPEFLRAQAGVQAVEETLSTRLFRSLCPVTGQPDWASVVLHYRGAAIDRAGLLRYLVSYRRHPDFHEACVERIFSDVMARCAPEGLSVHARFLRRGGIDINPWRTTPRFAAAPGNPREARQ

SEQ ID NO: 49238 - protein, 157 aa, Rhodobacter aestuarii
  misc_feature (1)..(157): tr|A0A1N7PCB2|A0A1N7PCB2_9RHOB NADPH-dependent 7-cyano- 7-deazaguanine reductase OS=Rhodobacter aestuarii OX=45 3582 GN=queF PE=3 SV=1
MERTDTSGLTQLGQSVAAPTSPEEAVLERVPASHPGTDYTVRFTAPEFTSLCPLTGQPDFAHIVIDYIPGDWLVESKSLKLYLASFRNHGVFHETCSVEIALSWWSCSRRNGYASGPIGIRAGAFRLMSFGKPGRRPKVFGSPIRVWPPIAGAVEKA

SEQ ID NO: 49239 - protein, 154 aa, Rhodobacter sp.
  misc_feature (1)..(154): tr|A0A3D6CN94|A0A3D6CN94_9RHOB NADPH-dependent 7-cyano- 7-deazaguanine reductase OS=Rhodobacter sp. OX=1062 GN= queF PE=3 SV=1
MTKTDVSGLTQLGQSTTLPDGPENAVLERVPAGHAGTLYVVRFTAPEFTSLCPMTGQPDFAHIVIDYVPQDWLVESKSLKLYLHSFRNHGAFHEDCTLDIGKKLVALLDPVWLRIGAYWFPRGGIPIDVFWQTGAAPEGVWIPDQGVAPYRGRG

SEQ ID NO: 49240 - protein, 144 aa, Rhodobacteraceae bacterium
  misc_feature (1)..(144): tr|A0A3N9QCE6|A0A3N9QCE6_9RHOB NADPH-dependent 7-cyano- 7-deazaguanine reductase OS=Rhodobacteraceae bacterium CH30 OX=2490538 GN=queF PE=3 SV=1
MDLHTDLQSLGNKKTDYRYDEPDASLLERFPNPYAQSAINPNGVTGSLNITCPEFTSLCPVTGQPDFATIVIDMVPGDWCVESKSLKLYLGSFRMHGEFHESCICRICNDLVNLLKPRHIVVEGRFTPRGGIPLWPKAEWKSPA

SEQ ID NO: 49241 - protein, 154 aa, Rhodobacteraceae bacterium
  misc_feature (1)..(154): tr|A0A2V2LLU2|A0A2V2LLU2_9RHOB NADPH-dependent 7-cyano- 7-deazaguanine reductase OS=Rhodobacteraceae bacterium TG-679 OX=2072018 GN=queF PE=3 SV=1
MSGIYDGLSQLGGPAAPLPESPEAAVLERVANPQADVAYFVRFTAPEFTSLCPITGQPDFAHLVIDYVPGPWLVESKSLKLYLGAFRNHGAFHEDCTISIARRLVDLMAPAWLRIGGYWYPRGGIPIDVFWQTGTPPEGVWIPDQGVPSYRGRG

SEQ ID NO: 49242 - protein, 155 aa, Rhodobacterales bacterium
  misc_feature (1)..(155): tr|A0A1Z8A396|A0A1Z8A396_9RHOB NADPH-dependent 7-cyano- 7-deazaguanine reductase OS=Rhodobacterales bacterium 5 2_120_T64 OX=1856301 GN=queF PE=3 SV=1
MTKEDIYSNLKQLGGATVLPESPEKAELERVPNPQEGTGYCVRFTAPEFTSLCPMTGQPDFAHLVIDYVPGKWLVESKSLKLYLGSFRNHGAFHEDCTVSIGKRLVDLLEPEWLRIGGYWYPRGGIPIDVFFQTGDVPPNVWIPDQGVPTYRGRG

SEQ ID NO: 49243 - protein, 153 aa, Rhodobacterales bacterium
  misc_feature (1)..(153): tr|A0A259M7G0|A0A259M7G0_9RHOB NADPH-dependent 7-cyano- 7-deazaguanine reductase OS=Rhodobacterales bacterium 3 4-62-10 OX=1970561 GN=queF PE=3 SV=1
MTDIYKDLQQLGSATALPQSPEAAVLEKVANPQAGTAYCVRFTAPEFTSLCPMTGQPDFAHLVIDYVPQHWLVESKSLKLYLGSFRNHGAFHEDCTVSIGRRLVDLLAPEWLRIGGYWYPRGGIPIDVFYQTGPLPDNVWFPDQGVPPYRGRG

SEQ ID NO: 49244 - protein, 154 aa, Rhodobiaceae bacterium
  misc_feature (1)..(154): tr|A0A3C1BKK6|A0A3C1BKK6_9RHIZ NADPH-dependent 7-cyano- 7-deazaguanine reductase OS=Rhodobiaceae bacterium OX=2 026785 GN=queF PE=3 SV=1
MSEPSDTTGAHMLGQATDLPASPDEAVLERVPNPHPDTRYVARFSVPEFTSICPVTGQPDFARLVIDYVPDAFLVESKSFKLYMGSFRNHGAFHEDCTIAIAKRLVDTLAPHWLRIGGYWYPRGGIPIDVFWQSGAVPEGLYVPDPGVASYQGR

SEQ ID NO: 49245 - protein, 145 aa, Rhodobiaceae bacterium
  misc_feature (1)..(145): tr|A0A2E2DX46|A0A2E2DX46_9RHIZ NADPH-dependent 7-cyano- 7-deazaguanine reductase OS=Rhodobiaceae bacterium OX=2 026785 GN=queF PE=3 SV=1
  misc_feature (24)..(24): Xaa can be any naturally occurring amino acid
  misc_feature (29)..(29): Xaa can be any naturally occurring amino acid
  misc_feature (90)..(90): Xaa can be any naturally occurring amino acid
  misc_feature (95)..(95): Xaa can be any naturally occurring amino acid
MKHLGKENKNFTEPSVKILDKVEXKRKEXFLVRFSQPEFTSICPVTSQPDFAHIVIDYVPNKWIVESKSLKLYFQSFRNHQSFHEDVTMXIAKDXTKFLKPKWFRIGTYWYPRGGMPIDVFWQSSLPPKNLWIPDQGVSGYRGRG

SEQ ID NO: 49246 - protein, 153 aa, Rhodoblastus acidophilus
  misc_feature (1)..(153): tr|A0A212RIL4|A0A212RIL4_RHOAC NADPH-dependent 7-cyano- 7-deazaguanine reductase OS=Rhodoblastus acidophilus OX =1074 GN=queF PE=3 SV=1
MVQTHEGAGLLGVQTRAPQSPDEARLDRVPNPHPDALYLARFTQPEFTSLCPVTGQPDFAHLVIDYVPDKYLVESKSLKLYLTSYRNHGAFHEACTIRIAKDLVSALAPRWLRIGGYWYPRGGMPIDVFWQTGEPPKGLWLPDQGAPSYRGRG

SEQ ID NO: 49247 - protein, 153 aa, Rhodoblastus sphagnicola
  misc_feature (1)..(153): tr|A0A2S6MXZ3|A0A2S6MXZ3_9RHIZ NADPH-dependent 7-cyano- 7-deazaguanine reductase OS=Rhodoblastus sphagnicola OX =333368 GN=queF PE=3 SV=1
MVRTHEGAGLLGAQAQTPKNPDEARLDRVPNPHPDAVYLARFTQPEFTSLCPVTGQPDFAHLVIDYAPDRFLVESKSFKLYLTSFRNHGAFHEDCTIRIAKDLVSALEPRWLRIGGYWYPRGGMPIDVFWQTGEPPKGLWLPDQGAPSYRGRG

SEQ ID NO: 49248 - protein, 166 aa, Rhodococcus qingshengii
  misc_feature (1)..(166): tr|A0A4R6A051|A0A4R6A051_9NOCA NADPH-dependent 7-cyano- 7-deazaguanine reductase OS=Rhodococcus qingshengii OX= 334542 GN=queF PE=3 SV=1
MSGRSHEEGLKDLTLLGNQNTQYSFEYAPEVLEAVDNLHPERDYFVKFNCPEFTSLCPLTHQPDFATMYISYIPNQKIVESKSLKLYLFSFRNHGDFHEDCVNIIMNDLIKLLDPRYIEVWGKFTPRGGISIDPWCNYGKPGTKFEEMATFRLMNHDLYPEKVDNR

SEQ ID NO: 49249 - protein, 139 aa, Rhodococcus sp.; identical to SEQ ID NO: 46975
  misc_feature (1)..(139): tr|A0A2S7TTQ5|A0A2S7TTQ5_9NOCA NADPH-dependent 7-cyano- 7-deazaguanine reductase OS=Rhodococcus sp. SAORIC-690 OX=1923970 GN=queF PE=3 SV=1

SEQ ID NO: 49250 - protein, 284 aa, Rhodocyclaceae bacterium
  misc_feature (1)..(284): tr|A0A2K9LCG6|A0A2K9LCG6_9RHOO NADPH-dependent 7-cyano- 7-deazaguanine reductase OS=Rhodocyclaceae bacterium OX =1898103 GN=queF PE=3 SV=1
MNNSMQTAPHGAESSPLGRAVTYRDTYAPELLFPIDRQLKRDELGIAANALPFIGADLWNAYELSWLNPRGKPVVALGHIEVPADSPRLVESKSLKLYLNAFNQTRFDSAEAVAATVRADLSAAVGAAVNVTVFPLAASTVRSFGLPDGVCVDELDIEIDTYQPTPEFLRTGCRSRVVEETLYSHLLKSNCLVTGQPDWGMVAVRYRGAAIDRAGLLRYIVSFRSHNEFHEQCVERMFCDIMARCAPQALLVWARYTRRGGLDINPWRGTPGSGSPGNFMEVRQ

SEQ ID NO: 49251 - protein, 277 aa, Rhodocyclaceae bacterium
  misc_feature (1)..(277): tr|A0A524B6R5|A0A524B6R5_9RHOO NADPH-dependent 7-cyano- 7-deazaguanine reductase OS=Rhodocyclaceae bacterium OX =1898103 GN=queF PE=3 SV=1
MSHDPSLLSPLGKATEYRADYAPELLFPIPRQIKRDELGISSDALPFVGEDLWNAYELSWLTPSGKPAVALASFRFPADSPMLVESKSFKLYLNSFNQTVFSDKTAVLATLVADLSAAAGAPVSAEIAFLSEQPPVVVDYPQGILLDDLDVACDRYQPAPELLGVSDGAEVEETLYSHLLKSNCLVTGQPDWALVVIRYRGRPIDRAGLLRYIVSFRNHNEFHEQCVERIYCDIRLHCQPSALAVHARYTRRGGLDINPFRSSGGFPAPDNTREARQ

SEQ ID NO: 49252 - protein, 143 aa, Rhodocyclales bacterium
  misc_feature (1)..(143): tr|A0A1G3HSB4|A0A1G3HSB4_9RHOO NADPH-dependent 7-cyano- 7-deazaguanine reductase OS=Rhodocyclales bacterium RIF CSPLOWO2_02_FULL_63_24 OX=1802018 GN=queF PE=3 SV=1
MPKPAIPTRAKALETFPNPAPQRDYQIHMEIPEFTCLCPKTGQPDFAVLTLDYIADKLCVELKSLKLYIWSFRDEGHFHEDVTNRVLDDLVKATRPRFMRLTARFYVRGGIFTNVVAEHRKKGWTPAARIELAEFPAQSNTRG

SEQ ID NO: 49253 - protein, 143 aa, Rhodocyclales bacterium
  misc_feature (1)..(143): tr|A0A1G3H7N5|A0A1G3H7N5_9RHOO NADPH-dependent 7-cyano- 7-deazaguanine reductase OS=Rhodocyclales bacterium GWA 2_65_20 OX=1802017 GN=queF PE=3 SV=1
MPKPAVQARAKSLETFANPAPHRDYQIHMEIPEFTCLCPKTGQPDFAVLTLDYIADKVCIELKSLKLYVWSFRDEGHFHEDVANRILDDLAQAAKPRFMRLTARFYVRGGIFTNVVAEHRKKGWKPAAKIELAEFSAQSNTRG

SEQ ID NO: 49254 - protein, 281 aa, Rhodoferax antarcticus
  misc_feature (1)..(281): tr|A0A1Q8YKE9|A0A1Q8YKE9_9BURK NADPH-dependent 7-cyano- 7-deazaguanine reductase OS=Rhodoferax antarcticus ANT. BR OX=1111071 GN=queF PE=3 SV=1
MSIIRSSPLGQTTPYADQYDATLLYPIARAPQRDALGLSARLPFLGADLWTAFELSWLNARGKPQVALAHITVPCESANMIESKSLKLYLGSFSNSRFADAAEVLTHLRTDLNEAAWRGAVVQSSVGVKLIAAEQFDREPLYELDGLSLDRLDLDCDAYTPAAQLLSSQTDEAPVSEVLTSNLLKSNCPVTGQPDWASVQINYFGPQIDQAGLLRYIVSFRNHNGFHEDCVERMFMDIQTRCQTHKLSVYARYTRRGGLDINPFRTSFPQALPANVRTGRQ

SEQ ID NO: 49255 - protein, 281 aa, Rhodoferax fermentans
  misc_feature (1)..(281): tr|A0A1T1AWH4|A0A1T1AWH4_RHOFE NADPH-dependent 7-cyano- 7-deazaguanine reductase OS=Rhodoferax fermentans OX=28 066 GN=queF PE=3 SV=1
MNPIAHSPLGQATQYVDQYDASLLFPIPRVAQREKLGISQRLPFLGADLWTAFELSWLNTRGKPQLALAHITVPCESANIIESKSFKLYLGSFSNTRFADAAEVQARLRADLTEAAWRGAVVLSSVGVKLIAAELFDQEPIHELDGLSLDRLDLDCDRYTPAPEFLSSATEESPVSEVLTSNLLKSNCPVTGQPDWGSVQISYFGPQIDQAGLLRYIVSFRNHNGFHEDCVERIFMDIQARCLPHKLSVYARYTRRGGLDINPFRSSFPQALPSNVRSARQ

SEQ ID NO: 49256 - protein, 289 aa, Rhodoferax ferrireducens
  misc_feature (1)..(289): sp|Q21VW6|QUEF_RHOFT NADPH-dependent 7-cyano-7-deazagua nine reductase OS=Rhodoferax ferrireducens (strain ATCC BAA-621 / DSM 15236 / T118) OX=338969 GN=queF PE=3 SV= 1
MNTPQNSPLGQATAYLDQYDASLLFPIARATKRAEIGVTGALPFLGADMWTAFELSWLNLRGKPQVALARFTVPCESPNIIESKSFKLYLNSFNNTRFADVDAVKARLRADLSEAVWRDAGKNVSPDAAAPPSIGVTLLLPELFDREPIYELDGLSLDRLDVECTHYTPAPDLLRVVPDEAPVSEVLVSNLLKSNCPVTGQPDWASVQISYSGAPIDQEGLLQYLVSFRNHNEFHEQCVERIFMDLWTRCKPVRLAVYARYTRRGGLDINPFRTSYAQALPANVRNARQ

SEQ ID NO: 49257 - protein, 285 aa, Rhodoferax ferrireducens
  misc_feature (1)..(285): tr|A0A1W9KW60|A0A1W9KW60_9BURK NADPH-dependent 7-cyano- 7-deazaguanine reductase OS=Rhodoferax ferrireducens OX =192843 GN=queF PE=3 SV=1
MQPSLSHPAGNPLGQATVYADQYDAALLFPIPRAPQREKLGLSGRLPFLGADLWTAFELSWLNKRGKPQVALVHITVPCESANIIESKSLKLYLGSFSNTRFAEASEVLARLRTDLTEAAWRGAVMQSSVGVKLIAADQFDREPLFELDGLSLDRLDLDCDTYTPAPELLSAATGEAPVSETLTSHLLKSNCPVTGQPDWASLKISYFGPQIDQAGLLRYIVSFRNHTGFHEDCVERMFMDIQTRCQTHKLSVYARYTRRGGLDINPFRTSFPQALPPNVRTGRQ

SEQ ID NO: 49258 - protein, 288 aa, Rhodoferax koreense
  misc_feature (1)..(288): tr|A0A1P8JTI2|A0A1P8JTI2_9BURK NADPH-dependent 7-cyano- 7-deazaguanine reductase OS=Rhodoferax koreense OX=1842 727 GN=queF PE=3 SV=1
MNTPEQSQLGKTSAYIDQYDASLLFPIPRAGKRAEIGLGADASTGQQPVPFFGADLWTAFELSWLNPRGKPQVALAHITVPCETPNIVESKSFKLYLNSFNNTRFADAQAVRDRIRADISEAVWRGSETPSTVGVKLLLPDAFDREPVHEIDGLSLDRLDLECTHYTPAPELLTATFDEAPVTEVLTSNLLKSNCLVTGQPDWGSVQISYSGPQIDQAGLLRFIVSFRNHNEFHEQCVERIFMEIWRRCRPIKLTVYARYTRRGGLDINPFRTSHPAALPANIRMARQ

SEQ ID NO: 49259 - protein, 281 aa, Rhodoferax saidenbachensis
  misc_feature (1)..(281): tr|A0A1P8KCN7|A0A1P8KCN7_9BURK NADPH-dependent 7-cyano- 7-deazaguanine reductase OS=Rhodoferax saidenbachensis OX=1484693 GN=queF PE=3 SV=1
MNTPEQSQLGKASAYIDQYDASLLFPIPRAGKRAEIGVTGAAPFFGADMWTAFELSWLNTRGKPQVALAHFTVPCETTHIVESKSFKLYLNSFNNTRFADFAEVQARLRADISEAVWHGGPMQSSVGVTLIAPELFDREPVFELDGMNLDRLDVECTQYQPAPELLTVGQADAPVSEVLVSNLLKSNCLVTGQPDWGSVQISYTGAPIHQEGLLQYLVSFRNHNEFHEQCVERIFMDIWTRCKPTKLTVYARYTRRGGLDINPFRTSHPQALPGNTRTARQ

SEQ ID NO: 49260 - protein, 281 aa, Rhodoferax sp.
  misc_feature (1)..(281): tr|A0A515DES8|A0A515DES8_9BURK NADPH-dependent 7-cyano- 7-deazaguanine reductase OS=Rhodoferax sp. CHu59-6-5 OX =2509614 GN=queF PE=3 SV=1
MNSPEDSLLGKPASYVDHYDASQLFPIARAAKRAEIGVVGAPPFFGADLWTAFELSWLNLRGKPQVALAHIMVPCESPNIVESKSFKLYLGSFSNTKFADAEAVRACIRADINEAVWRGGPVQSSVGVKVLLPEMFDREPVHELDGLSLDRLDVECSQYTPAPELLMAAFDEQPVTEVLTSNLLKSNCLVTGQPDWGSVQISYSGPQIEQGGLLQYLVSFRNHNEFHEQCVERIFMDLWTRCRPTKLAVYARYTRRGGLDINPFRTSYPQTLPPNIRTARQ

SEQ ID NO: 49261 - protein, 288 aa, Rhodoferax sp.
  misc_feature (1)..(288): tr|A0A515ES48|A0A515ES48_9BURK NADPH-dependent 7-cyano- 7-deazaguanine reductase OS=Rhodoferax sp. Gr-4 OX=2527 691 GN=queF PE=3 SV=1
MNTPEQSQLGKSSAYVDQYDASLLFPIPRKGKREEIGIAGAPPFFGADLWTAFELSWLGPKGKPHVALAHFTIPCEAPNIIESKSFKLYLNSFNNSRFADADEVKNLLRTDLTEALWRDTSGSGAAVPAGSIGVKLVLPELFDREPIYEMDGLSLDRLDVECTRYTPAPELLRVVPDEESPVSEVLTSNLLKSNCLVTGQPDWGSVQISYTGLPIDQEGLLQYLVSFRNHNEFHEQCVERIFMDIWRQCKPQKLTVYARYTRRGGLDINPLRTSAPQALPVNTRTARQ

SEQ ID NO: 49262 - protein, 153 aa, Rhodomicrobium udaipurense
  misc_feature (1)..(153): tr|A0A037UW19|A0A037UW19_9RHIZ NADPH-dependent 7-cyano- 7-deazaguanine reductase OS=Rhodomicrobium udaipurense JA643 OX=858455 GN=queF PE=3 SV=1
MNDPTVHLTQLGQRADLPASPDAAALETVPNPHTGSLYVVRFTAPEFTSLCPVTGQPDFAHIVIDYVPRDLLVESKSLKLYLGAFRNHGAFHEDCTVAIGKRLDATLNPHWLRIGGYWYPRGGMPIDVFFAVGDLPHGLWVPEQGVAPYRGRG

SEQ ID NO: 49263 - protein, 153 aa, Rhodomicrobium vannielii
  misc_feature (1)..(153): tr|E3I3W5|E3I3W5_RHOVT NADPH-dependent 7-cyano-7-deazag uanine reductase OS=Rhodomicrobium vannielii (strain AT CC 17100 / ATH 3.1.1 / DSM 162 / LMG 4299) OX=648757 GN =queF PE=3 SV=1
MNDPTVHLTQLGQRADLPASPDAAALETVPNPHPGSLYVVRFTAPEFTSLCPVTGQPDFAHIVIDYVPRDLLVESKSLKLYLGAFRNHGAFHEDCTVAIGKRLDATLNPHWLRIGGYWYPRGGMPIDVFFAVGDLPHGLWVPEQGVAPYRGRG

SEQ ID NO: 49264 - protein, 154 aa, Rhodopila globiformis
  misc_feature (1)..(154): tr|A0A2S6NI48|A0A2S6NI48_RHOGL NADPH-dependent 7-cyano- 7-deazaguanine reductase OS=Rhodopila globiformis OX=10 71 GN=queF PE=3 SV=1
MTETPYDHLTLLGHHAAQPGSPDAAKLERVANPAPGKAYVIRLTCPEFTSLCPLTGQPDFAHIMIDYIPGDWIVESKSFKLLMASYRNHGAFHEGCTMEIAAKLVDFLNPVWLRIGAYWYPRGGIPIDIFWQTGPAPSDAWLPAQDVPPYRGRG

SEQ ID NO: 49265 - protein, 121 aa, Rhodopirellula bahusiensis
  misc_feature (1)..(121): tr|A0A2G1W2V5|A0A2G1W2V5_9PLAN NADPH-dependent 7-cyano- 7-deazaguanine reductase OS=Rhodopirellula bahusiensis OX=2014065 GN=queF PE=3 SV=1
MSDSASFRDTLEVFDNPAPTRNFTIEHFCPEFTSVCPKTGQPDYGTIVFTYVPDRVCVELKSLKMYLQKFRNEGIFYEQVTNRILDDFVAVVQPRKVTVESKWTPRGGLNSNIIVTYPDPA

SEQ ID NO: 49266 - protein, 121 aa, Rhodopirellula baltica
  misc_feature (1)..(121): tr|L7CC96|L7CC96_RHOBT NADPH-dependent 7-cyano-7-deazag uanine reductase OS=Rhodopirellula baltica SWK14 OX=993 516 GN=queF PE=3 SV=1
MSDTASFRDTLEVFENPAPTRNFTIEHHCPEFTSVCPKTGQPDYGTIVFTYVPDRVCVELKSLKMYLQKFRNEGIFYEQVTNRILDDFVAVVQPRKVTVESKWTPRGGLNSNIIVTYPDEA

SEQ ID NO: 49267 - protein, 121 aa, Rhodopirellula baltica; identical to SEQ ID NO: 49266
  misc_feature (1)..(121): sp|Q7UVG9|QUEF_RHOBA NADPH-dependent 7-cyano-7-deazagua nine reductase OS=Rhodopirellula baltica (strain DSM 10 527 / NCIMB 13988 / SH1) OX=243090 GN=queF PE=3 SV=1

SEQ ID NO: 49268 - protein, 121 aa, Rhodopirellula europaea; identical to SEQ ID NO: 49266
  misc_feature (1)..(121): tr|M5SQ66|M5SQ66_9PLAN NADPH-dependent 7-cyano-7-deazag uanine reductase OS=Rhodopirellula europaea SH398 OX=12 63868 GN=queF PE=3 SV=1

SEQ ID NO: 49269 - protein, 121 aa, Rhodopirellula europaea; identical to SEQ ID NO: 49266
  misc_feature (1)..(121): tr|M2AX69|M2AX69_9PLAN NADPH-dependent 7-cyano-7-deazag uanine reductase OS=Rhodopirellula europaea 6C OX=12638 67 GN=queF PE=3 SV=1

SEQ ID NO: 49270 - protein, 121 aa, Rhodopirellula islandica
  misc_feature (1)..(121): tr|A0A0J1B8R8|A0A0J1B8R8_RHOIS NADPH-dependent 7-cyano- 7-deazaguanine reductase OS=Rhodopirellula islandica OX =595434 GN=queF PE=3 SV=1
MSDTASFRETLEVFDNPAPTRNFTIEHHCPEFTSVCPKTGQPDYGTIVFTYVPDQVCVELKSLKMYLQKFRNEGIFYEQVTNRILDDFVAVVQPRKVTVESKWTPRGGLNSNIIVNYPDEA

SEQ ID NO: 49271 - protein, 128 aa, Rhodopirellula maiorica
  misc_feature (1)..(128): tr|M5RNG8|M5RNG8_9PLAN NADPH-dependent 7-cyano-7-deazag uanine reductase OS=Rhodopirellula maiorica SM1 OX=1265 738 GN=queF PE=3 SV=1
MEKSKLSDSNHFRELLEVFENPSPTRNFTIQHHCPEFTSVCPKTGQPDYGTIIFTYVPDELCVELKSLKMYLQRFRNEGIFYEAVTNRIMDDFLAVVKPRQATVESRWTPRGGLNSNIIVQYPDVPLG

SEQ ID NO: 49272 - protein, 124 aa, Rhodopirellula sallentina
  misc_feature (1)..(124): tr|M5U8S7|M5U8S7_9PLAN NADPH-dependent 7-cyano-7-deazag uanine reductase OS=Rhodopirellula sallentina SM41 OX=1 263870 GN=queF PE=3 SV=1
MNSNPSEFRDILEVFDNPAPQRNFTIEHHCPEFTSVCPKTGQPDYGTIVFTYVPDKICVELKSLKMYLQRFRNEGIFYEAVTNRILDDFVAVVQPRRVKVESRWTPRGGLNSNIIVEYPEESSK

SEQ ID NO: 49273 - protein, 121 aa, Rhodopirellula sp.
  misc_feature (1)..(121): tr|A0A1Z8M964|A0A1Z8M964_9PLAN NADPH-dependent 7-cyano- 7-deazaguanine reductase OS=Rhodopirellula sp. TMED11 O X=1986614 GN=queF PE=3 SV=1
MSESDKFSDILEVFENPNTSRDFTIIHHCPEFTSVCPKTGQPDYGKIIFTYVPDQKCVELKSLKMYLQRFRNEGIFYEAITNRIMDDFLAVVQPKSAKVESQWTPRGGLHSNIVVQFPTES

SEQ ID NO: 49274 - protein, 124 aa, Rhodopirellula sp.
  misc_feature (1)..(124): tr|M5T675|M5T675_9PLAN NADPH-dependent 7-cyano-7-deazag uanine reductase OS=Rhodopirellula sp. SWK7 OX=595460 G N=queF PE=3 SV=1
MNSNPSEFRDILEVFDNPARQRNFTIEHHCPEFTSVCPKTGQPDYGTIVFTYVPDEVCVELKSLKMYLQRFRNEGIFYEAVTNRILDDFVAVVQPRRLKVESRWTPRGGLNSNIIVEYPDQPAK

SEQ ID NO: 49275 - protein, 163 aa, Rhodoplanes elegans
  misc_feature (1)..(163): tr|A0A327KQW7|A0A327KQW7_9RHIZ NADPH-dependent 7-cyano- 7-deazaguanine reductase OS=Rhodoplanes elegans OX=2940 8 GN=queF PE=3 SV=1
MPRTARPRPSPGRRAGAPLQLGTPTPIPDSPETATLDRVPNPHADTPYVARFTFPEFTSLCPVTGQPDFATLVIDYVPAAWLVESKSLKLYLNSFRNHGSFHEDCTVAIGKRLVAALKPRWLRIGGYFYPRGGMPIDVFFQAGKLPAGVWVPDQGVPTYRGRG

SEQ ID NO: 49276 - protein, 158 aa, Rhodoplanes piscinae
  misc_feature (1)..(158): tr|A0A327KDL7|A0A327KDL7_9RHIZ NADPH-dependent 7-cyano- 7-deazaguanine reductase OS=Rhodoplanes piscinae OX=444 923 GN=queF PE=3 SV=1
MARQPSPRPNSRPLQLGRPAAIPASPAEASLDRVPNPHPDTPYVARFTFPEFTSLCPVTGQPDFATLVIDYVPKAFLVESKSLKLYLNSFRNEGSFHEDCTVAIGKRLAAVLKPRWLRIGGYFYPRGGMPIDVFFQMGKLPAGVWVPDQGVPTYRGRG

SEQ ID NO: 49277 - protein, 152 aa, Rhodoplanes roseus
  misc_feature (1)..(152): tr|A0A327KRN2|A0A327KRN2_9RHIZ NADPH-dependent 7-cyano- 7-deazaguanine reductase OS=Rhodoplanes roseus OX=29409 GN=queF PE=3 SV=1
MPRTPRPLQLGRPTSLPASPDDAPLDRVPNPHPDTPYVARFTFPEFTSLCPVTGQPDFATLVIDYVPARHLVESKSLKLYLNSFRNHGSFHEDCTVAIGKRLVSVLKPRWIRIGGYFYPRGGMPIDVFFQAGRLPKGVWVPDQGVPTYRGRG

SEQ ID NO: 49278 - protein, 161 aa, Rhodoplanes sp.
  misc_feature (1)..(161): tr|A0A127EYP3|A0A127EYP3_9RHIZ NADPH-dependent 7-cyano- 7-deazaguanine reductase OS=Rhodoplanes sp. Z2-YC6860 O X=674703 GN=queF PE=3 SV=1
MPRSPKSRKAQTSDGPLLLGRPVPQPASPEEAVLDRVPNPHPDTDYVSRFTAPEFTCMCPITGQPDFAHFVIDYAPGKWLLESKSLKLYLASFRNTGAFHEDCTVGIGKRIAGLLKPKWLRIGGYWYPRGGIPIDIYWQTGKLPGGVWVPDQGVPPYRGRG

SEQ ID NO: 49279 - protein, 164 aa, Rhodopseudomonas faecalis
  misc_feature (1)..(164): tr|A0A318TL15|A0A318TL15_9BRAD NADPH-dependent 7-cyano- 7-deazaguanine reductase OS=Rhodopseudomonas faecalis O X=99655 GN=queF PE=3 SV=1
MPKTPRRSPRQPAAAATPELQLGHEVEWPTTPEAARLDRVPNPQRDTDYLARFTAPEFTSLCPVTGQPDFAHLVIDYAPGAWLLESKSLKLYLAAFRNHGAFHEDCTVAIGKRIAQEIKPKWLRIGGYWYPRGGIPIDVFWQTGRIPKGLWVPEQGVQPYRGRG

SEQ ID NO: 49280 - protein, 158 aa, Rhodopseudomonas palustris
  misc_feature (1)..(158): tr|A0A0D7EVI6|A0A0D7EVI6_RHOPL NADPH-dependent 7-cyano- 7-deazaguanine reductase OS=Rhodopseudomonas palustris OX=1076 GN=queF PE=3 SV=1
MSKTPSKTPKPANLQLGRAVEWPATPEAARLDRVPNPQADTNYLVRFTAPEFTSLCPVTGQPDFAHLMIDYVPGAWLLESKSLKLYIASFRNHGAFHEDCTVAIGKRIAAEIKPKWLRIGGYWYPRGGIPIDVFWQTGKLPKGMWIPEQGVAPYRGRG

SEQ ID NO: 49281 - protein, 158 aa, Rhodopseudomonas palustris
  misc_feature (1)..(158): sp|Q136E4|QUEF_RHOPS NADPH-dependent 7-cyano-7-deazagua nine reductase OS=Rhodopseudomonas palustris (strain Bi sB5) OX=316057 GN=queF PE=3 SV=1
MSRSPRKTPKSPSLQLGQAVEWPATPDAARLDRVPNPQAGTDYLVRFTAPEFTSLCPVTGQPDFAHLVIDYAPGAWLVESKSLKLYLASFRNHGGFHEDCTVSIGKRIAAEIKPKWLRIGGYWYPRGGIPIDVFWQTGKLPKGMWVPDQGVAPYRGRG

SEQ ID NO: 49282 - protein, 158 aa, Rhodopseudomonas pentothenatexigens
  misc_feature (1)..(158): tr|A0A336JGX7|A0A336JGX7_9BRAD NADPH-dependent 7-cyano- 7-deazaguanine reductase OS=Rhodopseudomonas pentothena texigens OX=999699 GN=queF PE=3 SV=1
MSKTPRKSAASSPLQLGQAVEWPDRPEAAKLDRVPNPQKDTNFLARFTAPEFTSLCPVTGQPDFAHLVIDYVPGPWLLESKSLKLYLASFRNHGAFHEDCTVAIGKRIAAEIKPKWLRIGGYWYPRGGIPIDVFWQTGKLPKDVWVPDQGVQPYRGRG

SEQ ID NO: 49283 - protein, 158 aa, Rhodopseudomonas pseudopalustris; identical to SEQ ID NO: 49281
  misc_feature (1)..(158): tr|A0A1H8T9B6|A0A1H8T9B6_9BRAD NADPH-dependent 7-cyano- 7-deazaguanine reductase OS=Rhodopseudomonas pseudopalu stris OX=1513892 GN=queF PE=3 SV=1

SEQ ID NO: 49284 - protein, 158 aa, Rhodopseudomonas sp.
  misc_feature (1)..(158): tr|A0A0N1LSQ0|A0A0N1LSQ0_9BRAD NADPH-dependent 7-cyano- 7-deazaguanine reductase OS=Rhodopseudomonas sp. AAP120 OX=1523430 GN=queF PE=3 SV=1
MSKTPRKTSKPAGLQLGRAVEWPTSPETAQLDRVPNPQAGTDYLVRFTAPEFTSLCPVTGQPDFAHLVIDYVPGAWLVESKALKLYLASFRNHGGFHEDCTVSVGKRIVAAIKPKWLRIGGYWYPRGGMPIDVFWQTGRLPKGVWVPDQGVQPYRGRG

SEQ ID NO: 49285 - protein, 152 aa, Rhodospirillaceae bacterium
  misc_feature (1)..(152): tr|A0A0F2RMC7|A0A0F2RMC7_9PROT NADPH-dependent 7-cyano- 7-deazaguanine reductase OS=Rhodospirillaceae bacterium BRH_c57 OX=1629718 GN=queF PE=3 SV=1
MTTDTTSLTQLGTLSGLPASPDAAVLETVPNPHPGTLYLARFAVPEFTSLCPVTGQPDFAHLVIDYVPDELLVESKSLKLFLGSFRNHGAFHEDCTVAVGKRLVEALEPTWLRIGGYWYPRGGIPIDVFWQTGTPPDGLWLPDQGVPAYRGR

SEQ ID NO: 49286 - protein, 154 aa, Rhodospirillaceae bacterium
  misc_feature (1)..(154): tr|A0A5J6MDG1|A0A5J6MDG1_9PROT NADPH-dependent 7-cyano- 7-deazaguanine reductase OS=Rhodospirillaceae bacterium R5913 OX=2602015 GN=queF PE=4 SV=1
MARKSRPALTQLGHATKPPASPDEAVLERIPNSQPRERYLVRFACPEFTSICPVTGQPDFAHIVIDYVPKAWIVESKSLKLYLGSFRNHGAFHEDCTVTIGKRLVDELKPHWLRIAGYWYPRGGIPIDVFWQTGAPPKNLWLPEQGVAPYRGRG

SEQ ID NO: 49287 - protein, 147 aa, Rhodospirillales bacterium
  misc_feature (1)..(147): tr|A0A1G3IBH8|A0A1G3IBH8_9PROT NADPH-dependent 7-cyano- 7-deazaguanine reductase OS=Rhodospirillales bacterium RIFCSPLOWO2_12_FULL_58_28 OX=1802022 GN=queF PE=3 SV=1
MTVTQLGSRTEIADGPERAVLETVADPHPDKDYLVRFSCPEFTSLCPVTGQPDFAHIVIDYVPDALIVESKSLKLFLASFRNHGAFHEDCALAVADKIIKAAKPKWLRIGGYWYPRGGIPIDVFYQTGAPPADLWIPDQGVEAYRGR

SEQ ID NO: 49288 - protein, 152 aa, Rhodospirillales bacterium
  misc_feature (1)..(152): tr|A0A259MBP5|A0A259MBP5_9PROT NADPH-dependent 7-cyano- 7-deazaguanine reductase OS=Rhodospirillales bacterium 39-66-50 OX=1970570 GN=queF PE=3 SV=1
MAKYAKLRQLGQATALPASPDQAVLETVPNPHPGTLYLARFTQPEFTSLCPVTGQPDFAHLVIDYVPRAKLVESKSLKLYLNSFRNEAAFHEDCTVGIGKRLVKELTPRWLRIAGYWYPRGGMPIDVFWQTAAPPKGLWLPDTGVAPYRGRG

SEQ ID NO: 49289 - protein, 154 aa, Rhodothalassium salexigens
  misc_feature (1)..(154): tr|A0A4R2PEY1|A0A4R2PEY1_RHOSA NADPH-dependent 7-cyano- 7-deazaguanine reductase OS=Rhodothalassium salexigens DSM 2132 OX=1188247 GN=queF PE=3 SV=1
MKETIYSDLTQLGAAAHMPATPDEAVLETVANPHPDTLYLVRFTCPEFTSLCPVTGQPDFAHLVIDYVPGPKLVESKALKLYLHSFRNTAGFHEACTVKIAKRLAAETEAQWLRIGGYWYPRGGIPIDVFYQTGEPPAGLWLPDPGVASYRGRG

SEQ ID NO: 49290 - protein, 178 aa, Rhodothermaceae bacterium
  misc_feature (1)..(178): tr|A0A2E3R1K7|A0A2E3R1K7_9BACT NADPH-dependent 7-cyano- 7-deazaguanine reductase OS=Rhodothermaceae bacterium O X=2026787 GN=queF PE=3 SV=1
MADTPTAADRLDDFHQRALDHTKASLAHMARYGIEPEGRVALFLPPDARQQDIHRMPYTHAARQVVTYTTEPGEFTALCPFSGLPDSGTVRIEYVPGSWLLELKSLKYYLMSWRHIGAAQEDITALLFEDLMRHLGDPHRLVVTTDYTVRGGIHTVCAVDSRDQPAGLGAEAGGDGAA

SEQ ID NO: 49291 - protein, 140 aa, Rhodothermaeota bacterium
  misc_feature (1)..(140): tr|A0A2A5WXX6|A0A2A5WXX6_9BACT NADPH-dependent 7-cyano- 7-deazaguanine reductase OS=Rhodothermaeota bacterium M ED-G19 OX=1986240 GN=CND83_03545 PE=3 SV=1
MDLKSNIVDPYIGQTAEGKKIRFESVESIKKDELKVFKFNSKKQYIKIYTKEFIAVCPFSGLPDVAKIKIEYYPEGSVALELKSLKYYLISFKNVGIYQEEVTKRIYKDLKKVLDTDKIKITTKYNVRGGLYTTCVEGKL

SEQ ID NO: 49292 - protein, 140 aa, Rhodothermaeota bacterium
  misc_feature (1)..(140): tr|A0A2A5XQD6|A0A2A5XQD6_9BACT NADPH-dependent 7-cyano- 7-deazaguanine reductase OS=Rhodothermaeota bacterium M ED-G16 OX=1986238 GN=queF PE=3 SV=1
MDLKSNIVDPYIGQTAEGKKIEFESTDSIEKEEIKVFKFNSIKQYIKIYTKEFIAVCPFSGLPDVAKIKIEYYPEGKLALELKSLKYYLISFKNVGIYQEEVTKRIYNDLKEVLKTKKIRITTKYNVRGGLYTTCVEGNL

SEQ ID NO: 49293 - protein, 168 aa, Rhodothermus marinus
  misc_feature (1)..(168): tr|D0MDN3|D0MDN3_RHOM4 NADPH-dependent 7-cyano-7-deazag uanine reductase OS=Rhodothermus marinus (strain ATCC 4 3812 / DSM 4252 / R-10) OX=518766 GN=queF PE=3 SV=1
MTEQERQALAEKLAALREEALAHTEQALAYMARFGVRPEGRIQPFLPPEARQQHIDRLPYEHAVRQVVVYETEPGEFSAVCPFSGLPDYGVLRIEYVPGSWILELKSLKYYIVSWRNIGAAQEDLTAIIYQDLMRHLEDPEYLRVITVYNVRGGIRTTCTIDSREQGR

SEQ ID NO: 49294 - protein, 168 aa, Rhodothermus marinus
  misc_feature (1)..(168): tr|G2SH23|G2SH23_RHOMG NADPH-dependent 7-cyano-7-deazag uanine reductase OS=Rhodothermus marinus (strain SG0.5J P17-172) OX=762570 GN=queF PE=3 SV=1
MTEQERQALAEKLAALREEALAHTEQALAYMARFGVRPEGRIQPFLPPEARQQHIDRLPYEHAVRQVVVYETEPGEFSAVCPFSGLPDYGVLRIEYVPGSWILELKSLKYYIVSWRNIGAAQEDLTAIIYQDLMRHLEDPEYLRVTTVYNVRGGIRTTCTIDSREQGR

SEQ ID NO: 49295 - protein, 168 aa, Rhodothermus profundi
  misc_feature (1)..(168): tr|A0A1M6VWK4|A0A1M6VWK4_9BACT NADPH-dependent 7-cyano- 7-deazaguanine reductase OS=Rhodothermus profundi OX=63 3813 GN=queF PE=3 SV=1
MTEQERQRLAEKLAALREEALAHTEQALTYMARFGIRPEGRIQPFLPPESRQQHIDRLPYEHRVRQVVVYETEPGEFSAVCPFSGLPDYGVLRIEYVPGSWILELKSLKYYLVSWRNIGAAQEDLTAIIYQDLMRHLEDPEYLRVTTVYNVRGGIRTTCTIDSREQGR

SEQ ID NO: 49296 - protein, 158 aa, Rhodovarius sp.
  misc_feature (1)..(158): tr|A0A437MMI9|A0A437MMI9_9PROT NADPH-dependent 7-cyano- 7-deazaguanine reductase OS=Rhodovarius sp. CCP-6 OX=19 79269 GN=queF PE=3 SV=1
MSKKSTATETEGLTQLGHATSLPASPDQAVLERVPNPHPDQSYCIRFAAPEFTSLCPLTGQPDFAHLVIDYVPRKWIVESKSLKLYLGSFRNHGSFHEACTMDIGLRIKELLSPRWLRIGGYWYPRGGMPIDVFWQTGEPPKGVWIPEQGVPGYRGRG

SEQ ID NO: 49297 - protein, 157 aa, Rhodovulum sp.
  misc_feature (1)..(157): tr|J6LGQ6|J6LGQ6_9RHOB NADPH-dependent 7-cyano-7-deazag uanine reductase OS=Rhodovulum sp. PH10 OX=1187851 GN=q ueF PE=3 SV=1
MPRKVTPRKNETLQLGHAVAIPASPEEATLDRVPNPHLDTPYVARFTFPEFTSLCPVTGQPDFATLVIDYVPKAYLVESKSLKLYLNSFRNHGAFHEDCTVGIGKRLGALLKPHWLRIGGYFYPRGGMPIDVFFQVGRLPAGVWVPDQGVPTYRGRG

SEQ ID NO: 49298 - protein, 154 aa, Rhodovulum sp.
  misc_feature (1)..(154): tr|A0A095CW91|A0A095CW91_9RHOB NADPH-dependent 7-cyano- 7-deazaguanine reductase OS=Rhodovulum sp. NI22 OX=1469 613 GN=queF PE=3 SV=1
MAKTDVSGLSQLGQAVAQPASPEEATLEKVPAGHAGTKYVVRFTAPEFTSLCPMTGQPDFAHIVIDYIPRDWLVESKSLKLFLTSFRNHGAFHEDCTIDITKRLVALLDPEWLRIGAYWYPRGGIPIDVFWQTGPAPDGVWIPDQGVAPYRGRG

SEQ ID NO: 49299 - protein, 136 aa, Richelia intracellularis
  misc_feature (1)..(136): tr|M1WW40|M1WW40_9NOST NADPH-dependent 7-cyano-7-deazag uanine reductase OS=Richelia intracellularis HM01 OX=11 65095 GN=queF PE=3 SV=1
MIQETTSTFNQTAKYGERNIVDGKLITFPNPRTGRHYNINISLPEFTCKCPFSGYPDFATIYIIYIPYEKVIELKSLKLYINGYRDKYISHEESANQILDDFVEACDPLEATVKADFSPRGNVHMIVETKYSQNNH

SEQ ID NO: 49300 - protein, 136 aa, Richelia intracellularis
  misc_feature (1)..(136): tr|M1X4M2|M1X4M2_9NOST NADPH-dependent 7-cyano-7-deazag uanine reductase OS=Richelia intracellularis HH01 OX=11 65094 GN=queF PE=3 SV=1
MVQETTSTFNQTVKYGERNIVEGKLITFPNPRIGRHYNINISLPEFTCKCPFSGYPDFATIYITYIPYEKVMELKALKLYINGYRDKYISHEESANQILDDFVEACDPLEATVKADFSPRGNVHMIVETKYSQNNH

SEQ ID NO: 49301 - protein, 117 aa, Richelia sp.
  misc_feature (1)..(117): tr|A0A3B9F6I2|A0A3B9F6I2_9NOST NADPH-dependent 7-cyano- 7-deazaguanine reductase OS=Richelia sp. OX=2053605 GN= queF PE=3 SV=1
MVEGKLITFPNPRIGRHYNINISLPEFTCKCPFSGYPDFATIYITYIPYEKVMELKALKLYINGYRDKYISHEESANQILDDFVEACDPLEATVKADFSPRGNVHMIVETKYSQNNH

SEQ ID NO: 49302 - protein, 273 aa, Rickettsia africae
  misc_feature (1)..(273): sp|C3PMB3|QUEF_RICAE NADPH-dependent 7-cyano-7-deazagua nine reductase OS=Rickettsia africae (strain ESF-5) OX= 347255 GN=queF PE=3 SV=1
MPLSTSLLGKKSTYKDSYDVTLLFKIPRINNRNELGINSNNLPFYGVDVWNTYELSCLNKNGKPWVGVGTFYIPTDSENIVESKSFKLYLNSFNNFVVESVKELERIILQDLSNVTHAKVTGRIFSINTKVEFGVPSGKNIDDLDIVCNNYGAPDNSLIEYEDVLVEEEINSNLLKSNCLVTGQPDWGTIVIKYKGKKLKYDSFLKYLISFRNCNEFAEQCAERIFTDIKNAISPDFLSIYIVYARRGGIDICPYRSTDKSYTLPSDKRFIRQ

SEQ ID NO: 49303 - protein, 273 aa, Rickettsia akari
  misc_feature (1)..(273): sp|A8GM19|QUEF_RICAH NADPH-dependent 7-cyano-7-deazagua nine reductase OS=Rickettsia akari (strain Hartford) OX =293614 GN=queF PE=3 SV=1
MPLSTSLLGKTSTYKDSYDATLLFKIPRINNRNALGINSNNLPFYGVDIWNTYELSCINKKGKPWVGVGTFYIPTDSENIVESKSFKLYLNSFNNFVVESVEELERIILQDLSNVTHAKVTGRIFPINTKIAFGVPSGKNIDALDIVCNNYGPPDNSLVEYEEVLVEEEINSNLLKSNCLVTGQPDWGSIVIKYKGKKLKHDSFLKYLISFRNYHEFAEQCAERIFTDIKNAIKPDFLSLYIVYTRRGGIDICPYRSTDKSYSLPSDKRLIRQ

SEQ ID NO: 49304 - protein, 273 aa, Rickettsia amblyommatis
  misc_feature (1)..(273): tr|A0A0F3N0M7|A0A0F3N0M7_RICAM NADPH-dependent 7-cyano- 7-deazaguanine reductase OS=Rickettsia amblyommatis str . Ac/Pa OX=1359164 GN=queF PE=3 SV=1
MPLSTSLLGKKSTYKDSYDVTLLFKIPRINNRNELGINSNNLPFYGVDVWNTYELSCLNKNGKPWVGVGTFYIPTDSENIVESKSFKLYLNSFNNFVVESVKELERIILQDLSNVTHAKVTGRIFPINTKVEFGVPSGKNIDDLDIVCNNYGAPDNSLIEYEDVLVEEEINSNLLKSNCLVTGQPDWGTIVIKYKGKKLKHDSFLKYLISFRNCNEFAEQCAERIFTDIKNAISPGFLSIYIVYTRRGGIDICPYRSTDKSYTLPSDKRFIRQ

SEQ ID NO: 49305 - protein, 273 aa, Rickettsia amblyommatis; identical to SEQ ID NO: 49304
  misc_feature (1)..(273): tr|H8K439|H8K439_RICAG NADPH-dependent 7-cyano-7-deazag uanine reductase OS=Rickettsia amblyommatis (strain GAT -30V) OX=1105111 GN=queF PE=3 SV=1

SEQ ID NO: 49306 - protein, 273 aa, Rickettsia argasii
  misc_feature (1)..(273): tr|A0A0F3RD55|A0A0F3RD55_9RICK NADPH-dependent 7-cyano- 7-deazaguanine reductase OS=Rickettsia argasii T170-B O X=1268837 GN=queF PE=3 SV=1
MPLSTSLLGKKSTYKDSYDVTLLFKIPRINNRNELGINSNNLPFYGVDVWNTYELSCLNKNGKPWVGVGTFYIPTDSENIVESKSFKLYLNSFNNFVVESVKELERIILQDLSNVTHAKVTGRIFPINTRVEFGVPSGKNIDDLDIVCNNYGAPDNSLIEYEDVLVEEEINSNLLKSNCLVTGQPDWGTIVIKYKGKKLKYNSFLKYLISFRNCNEFAEQCAERIFTDIKNAISPDFLSIYIVYTRRGGIDICPYRSTDKSYTLPSDKRFIRQ

SEQ ID NO: 49307 - protein, 273 aa, Rickettsia asembonensis
  misc_feature (1)..(273): tr|A0A0C2MPE1|A0A0C2MPE1_9RICK NADPH-dependent 7-cyano- 7-deazaguanine reductase OS=Rickettsia asembonensis OX= 1068590 GN=queF PE=3 SV=1
MPLSNSLLGKKSTYKDSYDATLLFKIPRINNRNELGINSNNLPFYGVDIWNTYELSCLNKNGKPWVGVGTFYIPMDSENIVESKSFKLYLNSFNNFVVESLEELKRIILQDLSNVTHAKVTGRIFPINTKIEFGVPSGKNIDDLDIVCNNYGPPDNSLIEYEDVLVEEEINSNLLKSNCLVTGQPDWGTIVIKYKGKKLKYDSFLKYLISFRNCNEFAEQCAECIFTDIKNAINPDFLSIYIVYTRRGGIDICPYRSTNKSYTLPSDKRFIRQ

SEQ ID NO: 49308 - protein, 273 aa, Rickettsia asiatica
  misc_feature (1)..(273): tr|A0A510G8Y9|A0A510G8Y9_9RICK NADPH-dependent 7-cyano- 7-deazaguanine reductase OS=Rickettsia asiatica OX=2388 00 GN=queF PE=3 SV=1
MPLSTSLLGKKSTYKDSYDATLLFKIPRINNRNALGINSNNLPFYGVDVWNTYELSCLNKNGKPWVGVGTFYIPTDSENIVESKSFKLYLNSFNNFVVESIEALERIILQDLSNVTYAKVTGRILPINTKIEFGVPSGKNIDDLDIVCNNYGPPDNSLIEYEDVLVEEEINSNLLKSNCLVTGQPDWGTIVIKYKGKKLKHDYFLKYLISFRNCNEFAEQCAERIFTDIKNAINPDFLSIYIVYTRRGGIDICPCRSTDKSYTLPSDKRLIRQ

SEQ ID NO: 49309 - protein, 273 aa, Rickettsia australis
  misc_feature (1)..(273): tr|H8K948|H8K948_RICAC NADPH-dependent 7-cyano-7-deazag uanine reductase OS=Rickettsia australis (strain Cutlac k) OX=1105110 GN=queF PE=3 SV=1
MTLSTSLLGKKSTYKDSYDATLLFKIPRINNRNELGINSNNLPFYGVDIWNTYELSCLNKKGKPWVGVGTFYIPTDSENIVESKSFKLYLNSFNNFVVESVEELERIILQDLSNVTHAKVTGRIFPINTKIAFGVPSGKNIDDLDIVCNNYGPPDNSLVEYEDVLVEEEINSNLLKSNCLVTGQPDWGSIVIKYKGKKLKHDSFLKYLISFRNCHEFAEQCAERIFTDIKNAIKPDFLSIYIVYTRRGGIDICPYRSTDKSYSVPSDKRLIRQ

SEQ ID NO: 49310 - protein, 273 aa, Rickettsia bellii
  misc_feature (1)..(273): sp|Q1RGY9|QUEF_RICBR NADPH-dependent 7-cyano-7-deazagua nine reductase OS=Rickettsia bellii (strain RML369-C) O X=336407 GN=queF PE=3 SV=1
MTLSNSALGKKSTYKDTYDPTLLFKIPRIDNRKELGIVNDKLPFHGVDIWNAYELSWLDKKGKPCVAIFTFFVPTTSSHIVESKSVKLYLNSFNNFVVDSMEELKRTILQDLSNNTHAEVTGEIFPINTKIEFGSPTGINIDDIDIECSEYGPPNNSLIKHEDVLVEEELNSNLLKSNCLVTGQPDWGTIIIKYKGKKLKHDALLKYLVSFRNCNEFAEQCAERIFTDIKNAINPEFLSIYIIYTRRGGIDICPYRSTDSNYTLPSSKRLIRQ

SEQ ID NO: 49311 - protein, 273 aa, Rickettsia bellii; identical to SEQ ID NO: 49310
  misc_feature (1)..(273): tr|A0A0F3QKE7|A0A0F3QKE7_RICBE NADPH-dependent 7-cyano- 7-deazaguanine reductase OS=Rickettsia bellii str. RML Mogi OX=1359194 GN=queF PE=3 SV=1

SEQ ID NO: 49312 - protein, 200 aa, Rickettsia buchneri
  misc_feature (1)..(200): tr|A0A067AKT6|A0A067AKT6_9RICK NADPH-dependent 7-cyano- 7-deazaguanine reductase OS=Rickettsia buchneri OX=1462 938 GN=queF PE=4 SV=1
MDSENIVESKSFKLYLNSFNNFVVESVEELERIILQDLSNVTHAKVTGRIFPINTKIEFGVPSGKNIDDLDIVCNNYGPPDNSLIEYEDVLVEEEINSNLLKSNCLVTGQPDWGTIIIKYKGKKLKHDSFLKYLISFRNCNEFAEQCAERIFTDIKNAINPDFLSIYIVYTRRGGIDICPYRSSTDKSYTLPSDKRLIRQ

SEQ ID NO: 49313 - protein, 273 aa, Rickettsia canadensis
  misc_feature (1)..(273): sp|A8EXD9|QUEF_RICCK NADPH-dependent 7-cyano-7-deazagua nine reductase OS=Rickettsia canadensis (strain McKiel) OX=293613 GN=queF PE=3 SV=1
MPLSASLLGKNSTYKDSYDATLLFKIPRINNRNELGINSNNLPFYGVDIWNTYELSCLNKNGKPWVGVGTFYIPTDSENIVESKSFKLYLNSFNNFVVESIEELERIILQDLSNVTHAKVTGQIFPINTKIEFGLPSGKNIDDLNIECNNYCPPDNSLIEYEDVLVEEEINSNLLKSNCLVTGQPDWGTIVIKYRGKKLKHDSFLKYLISFRNYNEFAEQCAERIFTDINNSINPDFLSIYIVYTRRGGIDICPYRSLDQNYNLPSNKRLIRQ

SEQ ID NO: 49314 - protein, 420 aa, Rickettsia canadensis
  misc_feature (1)..(420): tr|A8EXE5|A8EXE5_RICCK 7-cyano-7-deazaguanine reductase OS=Rickettsia canadensis (strain McKiel) OX=293613 GN= queF PE=4 SV=1
MNRSKLVFSSVIANTFEWYDYVLFGYFAPIIGAKFFPNDEANTALLQAFLVFAIGYLARLLGGIFFGVIGDRFGRKVALTSALFCMSAPTVLIGILPTYHTIGITATILMIIVRILQGLSMGGALTGSISFVIEHTSSKHRGFTGSILMSSICSGLLLGAFVSYIVRHILTASQFDNFGWRIPFLLGFFILFAAFYIKKHTDETPNFKNLREQKKILQSPLEKVITNHWFDILISIFINAPGSIIFYLTTIYLVSFLKISRNFTEDEVNSLASVCYVIMIAVTLLSGYLSDIIGRRKIFVINLVIIIVMTPFLLNNFKNGDFTSIIISQFILAVLAASYIGPEPALQAEFYHANIRNTALSISYNTATSIFGGTTPLVFEYLVQKTGHVTSAVYYIILSCIFALIALSFYKNRSLDKMQS

SEQ ID NO: 49315 - protein, 273 aa, Rickettsia conorii
  misc_feature (1)..(273): sp|Q92JG5|QUEF_RICCN NADPH-dependent 7-cyano-7-deazagua nine reductase OS=Rickettsia conorii (strain ATCC VR-61 3 / Malish 7) OX=272944 GN=queF PE=3 SV=1
MPLSTSLLGKKSTYKDSYDVTLLFKIPRINNRNELGINSNNLPFYGVDVWNTYELSCLNKNGKPWVGVGTFYIPTDSENIVESKSFKLYLNSFNNFVVESVKELERIILQDLSNVTHAKVTGRIFPINTKVEFGVPSGKNIDDLDIVCNNYGAPDNSLIEYEDVLVEEEINSHLLKSNCLVTGQPDWGTIVIKYKGKKLKYDSFLKYLISFRNCNEFAEQCAERIFTDIKNAISPDFLSIYIVYARRGGIDICPYRSTDKSYTLPSDKRFIRQ

SEQ ID NO: 49316 - protein, 274 aa, Rickettsia endosymbiont
  misc_feature (1)..(274): tr|A0A0F3R6F3|A0A0F3R6F3_9RICK NADPH-dependent 7-cyano- 7-deazaguanine reductase OS=Rickettsia endosymbiont of Ixodes pacificus OX=1133329 GN=queF PE=3 SV=1
MPLSTSLLGKKSTYKDSYDATLLFKIPRINNRNELGINSNNLPFYGVDVWNTYELSCLNKNGKPWVGVGTFYIPTDSENIVESKSFKLYLNSFNNFVVESVEELERIILQDLSNVTHAKVTGRIFPINTKIEFGVPSGKNIDDLDIVCNNYGPPDNSLIEYEDVLVEEEINSNLLKSNCLVTGQPDWGTIVIKYKGKKLKHDSFLKYLISFRNCNEFAEQCAERIFTDIKNAINPDFLSIYIVYTRRGGIDICPYRSSTDKSYTLPSDKRLIRQ

SEQ ID NO: 49317 - protein, 273 aa, Rickettsia endosymbiont
  misc_feature (1)..(273): tr|A0A161PZ77|A0A161PZ77_9RICK NADPH-dependent 7-cyano- 7-deazaguanine reductase OS=Rickettsia endosymbiont of Proechinophthirus fluctus OX=1462733 GN=queF PE=3 SV=1
MPLSTSLLGKKSTYKDSYDVTLLFKIPRINNRNELGINSNNLPFYGVDVWNTYELSCLNKNGKPWVGVGTFYIPTDSENIVESKSFKLYLNSFNNFVVESVKELERIILQDLSNVTHAKVTGRIFPINTKVEFGVPSGKNIDDLDIVCNNYGAPDNSLIEYEDVLVEEEINSNLLKSNCLVTSQPDWGTIVIKYKGKKLKYDSFLKYLISFRNCNEFAEQCAERIFTDIKNAISPDFLSIYIVYARRGGIDICPYRSTDKSYTLPSDKRFIRQ

SEQ ID NO: 49318 - protein, 273 aa, Rickettsia felis
  misc_feature (1)..(273): sp|Q4UNF0|QUEF_RICFE NADPH-dependent 7-cyano-7-deazagua nine reductase OS=Rickettsia felis (strain ATCC VR-1525 / URRWXCal2) OX=315456 GN=queF PE=3 SV=1
MPLSTSLLGKKSTYKDSYDATLLFKIPRINNRNELGINSNNLPFYGVDIWNTYELSCLNKNGKPWVGVGTFYIPTDSENIVESKSFKLYLNSFNNFVVESVEELERIILQDLSNVTHAKVTGRIFPINTKIEFSIPSGKNIDDLDIVCNNYGPPDNSLIEYEDVLVEEEINSNLLKSNCLVTGQPDWGTIVIKYKGKKLKHDSFLKYLISFRNCNEFAEQCAERIFTDIKNAINPDFLSIYIVYTRRGGIDICPYRFTNKSYTLPSDKRFIRQ

SEQ ID NO: 49319 - protein, 273 aa, Rickettsia felis; identical to SEQ ID NO: 49318
  misc_feature (1)..(273): tr|A0A0F3MRJ5|A0A0F3MRJ5_RICFI NADPH-dependent 7-cyano- 7-deazaguanine reductase OS=Rickettsia felis str. Pedre ira OX=1359196 GN=queF PE=3 SV=1

SEQ ID NO: 49320 - protein, 273 aa, Rickettsia heilongjiangensis
  misc_feature (1)..(273): tr|G0GWN7|G0GWN7_RICH0 NADPH-dependent 7-cyano-7-deazag uanine reductase OS=Rickettsia heilongjiangensis (strai n ATCC VR-1524 / 054) OX=1032845 GN=queF PE=3 SV=1
MPLSTSLLGKKSTYKDSYDVTLLFKIPRINHRNELGININNLPFYGVDVWNTYELSCLNKNGKPWVGVGTFYIPTDSENIVESKSFKLYLNSFNNFVVESVKELERIILQDLSNVTHAKVTGRIFPINTRVEFGVPSGKNIDDLDIVCNNYGAPDNSLIEYEDVLVEEEINSNLLKSNCLVTGQPDWGTIVIKYKGKKLKYDSFLKYLISFRNCNEFAEQCAERIFTDIKNAISPDFLSIYIVYTRRGGIDICPYRSTDKSYTLPSDKRFIRQ

SEQ ID NO: 49321 - protein, 273 aa, Rickettsia japonica
  misc_feature (1)..(273): tr|A0A3B7DDJ7|A0A3B7DDJ7_RICJA NADPH-dependent 7-cyano- 7-deazaguanine reductase OS=Rickettsia japonica OX=3579 0 GN=queF PE=3 SV=1
MPLSTSLLGKKSTYKDSYDVTLLFKIPRINHRNELGINSNNLPFYGVDVWNTYELSCLNKNGKPWVGVGTFYIPTDSENIVESKSFKLYLNSFNNFVVESVKELERIILQDLSNVTHAKVTGRIFPINTRVEFGVPSGKNIDDLDIVCNNYGAPDNSLIEYEDVLVEEEINSNLLKSNCLVTGQPDWGTIVIKYKGKKLKYDSFLKYLISFRNCNEFAEQCAERIFTDIKNAISPDFLSIYIVYTRRGGIDICPYRSTDKSYTLPSDKRFIRQ

SEQ ID NO: 49322 - protein, 273 aa, Rickettsia japonica; identical to SEQ ID NO: 49321
  misc_feature (1)..(273): tr|G4KLZ3|G4KLZ3_RICJY NADPH-dependent 7-cyano-7-deazag uanine reductase OS=Rickettsia japonica (strain ATCC VR -1363 / YH) OX=652620 GN=queF PE=3 SV=1

SEQ ID NO: 49323 - protein, 273 aa, Rickettsia massiliae
  misc_feature (1)..(273): sp|A8F0H9|QUEF_RICM5 NADPH-dependent 7-cyano-7-deazagua nine reductase OS=Rickettsia massiliae (strain Mtu5) OX =416276 GN=queF PE=3 SV=1
MPLSTSLLGKKSTYKDSYDVTLLFKIPRINNRNELGINSNNLPFYGVDVWNTYELSCLNKNGKPWVGVGTFYIPTDSENIVESKSFKLYLNSFNNFVVESVKELERIILQDLSNVTHAKVTGRIFPINTKVEFGVPSGKNIDDLDIVCNNYGAPDNSLIEYEDVLVEEEINSNLLKSNCLVTGQPDWGTIVIKYKGKKLKHDSFLKYLISFRNCNEFAEQCAERIFTDIKNAISPDFLSISIVYTRRGGIDICPYRSTDKSYTLPSDKRFIRQ

SEQ ID NO: 49324 - protein, 273 aa, Rickettsia massiliae
  misc_feature (1)..(273): tr|H6QKQ2|H6QKQ2_RICMA NADPH-dependent 7-cyano-7-deazag uanine reductase OS=Rickettsia massiliae str. AZT80 OX= 1105112 GN=queF PE=3 SV=1
MPLSTSLLGKKSTYKDSYDVTLLFKIPRINNRNELGINSNNLPFYGVDVWNTYELSCLNKNGKPWVGVGTFYIPTDSENIVESKSFKLYLNSFNNFVVESVKELERIILQDLSNVTHAKVTGRIFPINTKVEFGVPNGKNIDDLDIVCNNYGAPDNSLIEYEDVLVEEEINSNLLKSNCLVTGQPDWGTIVIKYKGKKLKHDSFLKYLISFRNCNEFAEQCAERIFTDIKNAISPDFLSISIVYTRRGGIDICPYRSTDKSYTLPSDKRFIRQ

SEQ ID NO: 49325 - protein, 274 aa, Rickettsia monacensis
  misc_feature (1)..(274): tr|A0A0B7J3M2|A0A0B7J3M2_9RICK NADPH-dependent 7-cyano- 7-deazaguanine reductase OS=Rickettsia monacensis OX=10 9232 GN=queF PE=3 SV=1
MPLSTSLLGKKSTYKDSYDATLLFKIPRINNRNELGINSNNLPFYGVDVWNTYELSCLNKNGKPWVGIGTFYIPTDSENIVESKSFKLYLNSFNNFVVESVEELERIILQDLSNVTHAKVTGRIFPINTKIEFGVPSGKNIDDLDIVCNNYGPPDNSLIEYEDVLVEEEINSNLLKSNCLVTGQPDWGTIVIKYKGKKLKHDSFLKYLISFRNCNEFAEQCAERIFTDIKNAINPDFLSIYIVYTRRGGIDICPYRSSTDKSYTLPSDKRLIRQ

SEQ ID NO: 49326 - protein, 273 aa, Rickettsia montanensis
  misc_feature (1)..(273): tr|H8KBH9|H8KBH9_RICMS NADPH-dependent 7-cyano-7-deazag uanine reductase OS=Rickettsia montanensis (strain OSU 85-930) OX=1105114 GN=queF PE=3 SV=1
MPLSTSLLGKKSTYKDSYDVTLLFKIPRINNRNELGINSNNLPFYGVDVWNTYELSCLNKNSKPWVGVGTFYIPTDSENIVESKSFKLYLNSFNNFVVESVKELERIILQDLSNVTRAKVTGRIFPINTKVEFGVPGGKNIDDLDIVCNNYGAPDNSLIEYEDVLVEEEINSNLLKSNCLVTGQPDWGTIVIKYKGKKLKHDSFLKYLISFRNCNEFAEQCAERIFTDIKNAISPDFLSIYIVYTRRGGIDICPYRSTDKSYTLPSDKRFIRQ

SEQ ID NO: 49327 - protein, 273 aa, Rickettsia parkeri
  misc_feature (1)..(273): tr|A0A0F3QNI3|A0A0F3QNI3_RICPA NADPH-dependent 7-cyano- 7-deazaguanine reductase OS=Rickettsia parkeri str. Gra nd Bay OX=1359203 GN=queF PE=3 SV=1
MPLSTSLLGKKSTYKDSYDVTLLFKIPRINNRNELGINSNNLPFYGVDVWNTYELSCLNKNGKPWVGVGTFYIPTDSENIVESKSFKLYLNSFNNFVVESVKELERIILQDLSNVTHAKVTGRIFPINTKVEFGVPSGKNIDDLDIVCNNYGAPDNSLIEYEDVLVEEEINSNLLKSNCLVTGQPDWGTIVIKYKGKKLKYDSFLKYLISFRNCNEFAEQCAERIFTDIKNAISPDFLSIYIVYARRGGIDICPYRSTDKSYTLPSDKRFIRQ

SEQ ID NO: 49328 - protein, 273 aa, Rickettsia peacockii; identical to SEQ ID NO: 49317
  misc_feature (1)..(273): tr|C4K191|C4K191_RICPU NADPH-dependent 7-cyano-7-deazag uanine reductase OS=Rickettsia peacockii (strain Rustic ) OX=562019 GN=queF PE=3 SV=1

SEQ ID NO: 49329 - protein, 273 aa, Rickettsia philipii
  misc_feature (1)..(273): tr|H6PVY3|H6PVY3_RICP3 NADPH-dependent 7-cyano-7-deazag uanine reductase OS=Rickettsia philipii (strain 364D) O X=481009 GN=queF PE=3 SV=1
MPLSTSLLGKKSTYKDSYDVTLLFKIPRINNRNELGINSNNLPFYGVDVWNTYELSCLNKNGKPWVGVGTFYIPTDSENIVESKSFKLYLNSFNNFVVESVKELERIILQDLSNVTHAKVTGRIFPINTKVEFGVPSGKNIDDLDIVCNNYGAPDNSLIEYEDVLVEEEINSNLLKSNCLVTSQPDWGTIVIKYKGKKLKYDSFLKYLISFRNCNEFAEQCAERIFTDIQNAISPDFLSIYIVYARRGGIDICPYRSTDKSYTLPSDKRFIRQ

SEQ ID NO: 49330 - protein, 273 aa, Rickettsia prowazekii
  misc_feature (1)..(273): sp|Q9ZE74|QUEF_RICPR NADPH-dependent 7-cyano-7-deazagua nine reductase OS=Rickettsia prowazekii (strain Madrid E) OX=272947 GN=queF PE=3 SV=1
MPLSTSLLGKKNTYKDSYDATLLFKIPRINNRNVLGIDSNHLPFYGVDIWNTYEISCLNKNGKPLVGIGTFYIPADSENIVESKSFKLYLNSFNNFIIESIEELERIILQDLSNVTYAKVTGRIFPINTKIEFGIPSGKNIDNLDIVCNNYGPPDNSLIEYEDVLVEEEIYSNLFKSNCLVTGQPDWGTIVIKYKGKKLKYDSFLRYLISFRNFNEFAEQCAERIFIDIKNSINLDFLSIYIVYTRRGGIDICPYRSTDKSYTLPNDKRLIRQ

SEQ ID NO: 49331 - protein, 273 aa, Rickettsia prowazekii; identical to SEQ ID NO: 49330
  misc_feature (1)..(273): tr|D5AVZ5|D5AVZ5_RICPP NADPH-dependent 7-cyano-7-deazag uanine reductase OS=Rickettsia prowazekii (strain Rp22) OX=449216 GN=queF PE=3 SV=1

SEQ ID NO: 49332 - protein, 273 aa, Rickettsia raoultii
  misc_feature (1)..(273): tr|A0A126E8K9|A0A126E8K9_9RICK NADPH-dependent 7-cyano- 7-deazaguanine reductase OS=Rickettsia raoultii OX=3698 22 GN=queF PE=3 SV=1
MPLSTSLLGKKSTYKYSYDVTLLFKIPRINNRNELGINSNNLPFYGVDVWNTYELSCLNKNGKPWVGVGTFYIPTDSENIVESKSFKLYLNSFNNFVVESVKELERIILQDLSNVTHAKVTGHIFPINTKVEFGVPSGKNIDDLDIVCNNYGASDNSLIEYEDVLVEEEINSNLLKSNCLVTGQPDWGTIVIKYKGKKLKHDSFLKYLISFRNCNEFAEQCAERIFTDIKNAISPDFLSIYIVYTRRGGIDICPYRSTDKSYTLPSDKRFIRQ

SEQ ID NO: 49333 - protein, 273 aa, Rickettsia rhipicephali
  misc_feature (1)..(273): tr|A0A0S2CAU0|A0A0S2CAU0_RICRH NADPH-dependent 7-cyano- 7-deazaguanine reductase OS=Rickettsia rhipicephali OX= 33992 GN=queF PE=3 SV=1
MPLSTSLLGKKSTYKDSYDVTLLFKIPRINNRNELGINSNNLPFYGVDVWNTYELSCLNKNGKPWVGVGTFYIPTDSENIVESKSFKLYLNSFNNFVVESVKELERIILQDLSNVTHAKVTGRIFPINTKVEFGVPSGKNIDDLDIVCNNYGAPDNSLIEYEDVLVEEEINSNLLKSNCLVTGQPDWGTIVIKYKGKKLKHDSFLKYLISFRNYNEFAEQCAERIFTDIKNAISPDFLSISIVYTRRGGIDICPYRSTDKSYTLPSDKRFIRQ

SEQ ID NO: 49334 - protein, 273 aa, Rickettsia rhipicephali; identical to SEQ ID NO: 49324
  misc_feature (1)..(273): tr|A0A0F3PGD3|A0A0F3PGD3_RICRH NADPH-dependent 7-cyano- 7-deazaguanine reductase OS=Rickettsia rhipicephali str . Ect OX=1359199 GN=queF PE=3 SV=1

SEQ ID NO: 49335 - protein, 273 aa, Rickettsia rickettsii
  misc_feature (1)..(273): sp|B0BW26|QUEF_RICRO NADPH-dependent 7-cyano-7-deazagua nine reductase OS=Rickettsia rickettsii (strain Iowa) O X=452659 GN=queF PE=3 SV=1
MPLSTSLLGKKSTYKDSYDVTLLFKIPRINNRNELGINSNNLPFYGVDVWNTYELSCLNKNGKPWVGVGTFYIPTDSENIVESKSFKLYLNSFNNFVVESVKELERIILQDLSNVTHAKVTGRIFPINTKVEFGVPSGKNIDDLDIVCNNYGAPDNSLIEYEDVLVEEEINSNLLKSNCLVTSQPDWGTIVIKYKGKKLKYDSFLKYLISFRNCNEFAEQCAERIFTDIQNAISPDFLSIYIVYARRGGIDICPYRSTDKNYTLPSDKRFIRQ

SEQ ID NO: 49336 - protein, 273 aa, Rickettsia rickettsii; identical to SEQ ID NO: 49335
  misc_feature (1)..(273): sp|A8GQN6|QUEF_RICRS NADPH-dependent 7-cyano-7-deazagua nine reductase OS=Rickettsia rickettsii (strain Sheila Smith) OX=392021 GN=queF PE=3 SV=1

SEQ ID NO: 49337 - protein, 273 aa, Rickettsia sibirica; identical to SEQ ID NO: 49327
  misc_feature (1)..(273): tr|Q7PAK9|Q7PAK9_RICS2 NADPH-dependent 7-cyano-7-deazag uanine reductase OS=Rickettsia sibirica (strain ATCC VR -151 / 246) OX=272951 GN=queF PE=3 SV=1

SEQ ID NO: 49338 - protein, 273 aa, Rickettsia slovaca; identical to SEQ ID NO: 49327
  misc_feature (1)..(273): tr|H8LP50|H8LP50_RICSL NADPH-dependent 7-cyano-7-deazag uanine reductase OS=Rickettsia slovaca str. D-CWPP OX=1 105109 GN=queF PE=3 SV=1

SEQ ID NO: 49339 - protein, 273 aa, Rickettsia sp.
  misc_feature (1)..(273): tr|A0A249E1N2|A0A249E1N2_9RICK NADPH-dependent 7-cyano- 7-deazaguanine reductase OS=Rickettsia sp. MEAM1 (Bemis ia tabaci) OX=1182263 GN=queF PE=3 SV=1
MTLSNSALGKKSTYKDTYDPTLLFKIPRIDNRKELGIVNDKLPFHGVDIWNAYELSWLDKKGKPCVAIFTFFVPTTSSHIVESKSVKLYLNSFNNFAVDSIDELKKIILQDLSNNTHAEVTGEIFPINTKIEFGEPSGINIDDLDIECSDYGPPNNSLIKHEDVLVEEELNSNLLKSNCLVTGQPDWGTIIIKYKGKKLKHDALLKYLVSFRNCNEFAEQCAERIFTDIKNAINPEFLSIYIIYTRRGGIDICPYRSTDSNYTLPSSKRLIRQ

SEQ ID NO: 49340 - protein, 273 aa, Rickettsia sp.; identical to SEQ ID NO: 49339
  misc_feature (1)..(273): tr|A0A1C3EYI6|A0A1C3EYI6_9RICK NADPH-dependent 7-cyano- 7-deazaguanine reductase OS=Rickettsia sp. wb OX=185151 2 GN=queF PE=3 SV=1

SEQ ID NO: 49341 - protein, 272 aa, Rickettsia typhi
  misc_feature (1)..(272): sp|Q68XU6|QUEF_RICTY NADPH-dependent 7-cyano-7-deazagua nine reductase OS=Rickettsia typhi (strain ATCC VR-144 / Wilmington) OX=257363 GN=queF PE=3 SV=1
MPLSTSLLGKKSTYKDSYDATLLFKIPRINNRNVLGINNNLPFYGVDIWNTYEISCLNKNGKPLVGIGTFYIPADSENIVESKSFKLYLNSFNNFIVKSIEELEQIILQDLSNVTCAKVTGRIFPINTKIEFGIPSGKNIDNLDIVCNNYGPPDNSLIEYEDVLVEEEIHSNLLKSNCLVTGQPDWGTIVIKYKGKKLKYDSFLRYLISFRNCNEFAEQCAERIFIDIKNAINLDFLSIYIVYTRRGGIDICPYRSTDKSYALPSNKRFIRQ

SEQ ID NO: 49342 - protein, 254 aa, Rickettsiales bacterium
  misc_feature (1)..(254): tr|A0A2D7A0Y2|A0A2D7A0Y2_9RICK 7-cyano-7-deazaguanine r eductase OS=Rickettsiales bacterium OX=2026788 GN=CMP39 _06625 PE=4 SV=1
  misc_feature (25)..(26): Xaa can be any naturally occurring amino acid
  misc_feature (31)..(31): Xaa can be any naturally occurring amino acid
  misc_feature (41)..(41): Xaa can be any naturally occurring amino acid
  misc_feature (43)..(43): Xaa can be any naturally occurring amino acid
  misc_feature (56)..(56): Xaa can be any naturally occurring amino acid
  misc_feature (59)..(59): Xaa can be any naturally occurring amino acid
  misc_feature (73)..(73): Xaa can be any naturally occurring amino acid
  misc_feature (91)..(91): Xaa can be any naturally occurring amino acid
  misc_feature (100)..(100): Xaa can be any naturally occurring amino acid
  misc_feature (112)..(112): Xaa can be any naturally occurring amino acid
  misc_feature (114)..(114): Xaa can be any naturally occurring amino acid
  misc_feature (117)..(118): Xaa can be any naturally occurring amino acid
  misc_feature (138)..(138): Xaa can be any naturally occurring amino acid
  misc_feature (140)..(140): Xaa can be any naturally occurring amino acid
  misc_feature (182)..(182): Xaa can be any naturally occurring amino acid
  misc_feature (214)..(214): Xaa can be any naturally occurring amino acid
MKNEKNLLLGKKTNYKKQYSQNILXXIKRAXPSNLSKFYGXDXWNCYDFMFLNEKXVPXAGILTFEVPCESNXIIESKSMKLYLGSFYNRXFKDVDDVLXTLKKDLEEVLKXDXHLXXNLNVNENVKFKKIKSSCLEXDXEKIFESNGIQYCHTNSFRSLCPVTGQPDFASIFFEYESGKIXKDDLRKYIYSFSEKSGFHEECIEEIYTHLKKXYDLHSLVVYGNFNRRGGIDINPIRYSEKKYKVKFERQIRQ

SEQ ID NO: 49343 - protein, 153 aa, Rickettsiales bacterium
  misc_feature (1)..(153): tr|A0A2E9XHC9|A0A2E9XHC9_9RICK NADPH-dependent 7-cyano- 7-deazaguanine reductase OS=Rickettsiales bacterium OX= 2026788 GN=queF PE=3 SV=1
MKKQYTSLKQLGKNAKQPTSPDQALLESVLNTKKVSENYVVRFTCPEFTSICPITEQPDFAHLVIDYIPNKYLLESKSLKLFLNSFRNHGAFHEECTTMIAQKIIKAIKPKWLRIGGYWNPRGGISIDIFYQTKNPPKNIWIPENYKAYTGRS

SEQ ID NO: 49344 - protein, 269 aa, Rickettsiales endosymbiont
  misc_feature (1)..(269): tr|A0A4Q7DI85|A0A4Q7DI85_9RICK NADPH-dependent 7-cyano- 7-deazaguanine reductase OS=Rickettsiales endosymbiont of Peranema trichophorum OX=2486577 GN=queF PE=3 SV=1
MSLSHSPLGKVTTSPNRYDSSVLFRISREVQRRTLPTCTSPMDGVDILNCYELSWLNASNKPEVRIAEILIPASSEFLIESKSLKMYFNSFNNTVFKDQLTVERHIIEDLSQTSGTSVLVKLKSVSTQYFPEELQGVVIDDTEIDVELDKIATNALATSDEYVEEALISHLFRSTCPVTGQPDWGSILVVYKGNKITRDGLLKYLISFRSHSAFHENCIERIFVDIMNSCEPQILSVYGRFTRRGGIDINPFRTTHNRFKPHNIRLLRQ

SEQ ID NO: 49345 - protein, 271 aa, Rickettsiales endosymbiont
  misc_feature (1)..(271): tr|A0A3Q8T975|A0A3Q8T975_9RICK NADPH-dependent 7-cyano- 7-deazaguanine reductase OS=Rickettsiales endosymbiont of Stachyamoeba lipophora OX=2486578 GN=queF PE=3 SV=1
MLENSPLGQKTTYQNKYTPALLFPIARIHKRVEIGIDDHHLPFIGYDIWNAYEVSWLNPKGKPIVQLLEIIYPANSKFIIESKSLKLYLNSFNNTSFNSSDEALQTIKQDLEQTLQTRITLNLVDPETKLGIEAPQGTLIDYLEVEITEYFPNPKLLVIKQDITHETVYSNLLKSNCLITSQPDWGTIIIKYHGQQIDHASLLKYIISFRDHNEFHEQCVERIFKDIMDQCDPKILTVYARYTRRGGIDINPVRSNDPQFIIPQNLRLIRQ

SEQ ID NO: 49346 - protein, 151 aa, Rikenellaceae bacterium
  misc_feature (1)..(151): tr|A0A3B8XE58|A0A3B8XE58_9BACT NADPH-dependent 7-cyano- 7-deazaguanine reductase OS=Rikenellaceae bacterium OX= 2049048 GN=queF PE=3 SV=1
MARNPEELKALGHHTEYSQNYAPEVLETFVNQHQENDYWVRFNCPEFTTLCPITGQPDFAEIRISYVPDVKMVESKSLKLYLFSFRSHGDFHEDCVNTIMKDLVKLMDPKYIEVTGLFTPRGGISIYPYANYGRPGTKWEQLAWERLAKHE

SEQ ID NO: 49347 - protein, 153 aa, Rikenellaceae bacterium
  misc_feature (1)..(153): tr|A0A351NEU1|A0A351NEU1_9BACT NADPH-dependent 7-cyano- 7-deazaguanine reductase OS=Rikenellaceae bacterium OX= 2049048 GN=queF PE=3 SV=1
MTDERKAEGLHALGSKTKYRDDYAPEVLETFVNKHQDNDYWVRFNCPEFTSLCPITGQPDFAEIRISYIPDVRMVESKSLKLYLFSFRNHGDFHEDCVNKIMKDLIALMDPKYIEVTGLFTPRGGISIYPYANYGRPGTKFEALAEQRFAQHQ

SEQ ID NO: 49348 - protein, 142 aa, Rippkaea orientalis
  misc_feature (1)..(142): tr|B7JWF0|B7JWF0_RIPO1 NADPH-dependent 7-cyano-7-deazag uanine reductase OS=Rippkaea orientalis (strain PCC 880 1) OX=41431 GN=queF PE=3 SV=1
MSQVTNTEASNHESDSSTMKYGERIIEEGELITFPNPRIGRRYDINITLPEFTCKCPFSGYPDFATLYLTYIPDEKVVELKALKLYINRYRDRYISHEESINQILDDFVAACDPLEVTLKGDFNPRGNVHTVIEVRHRKGEN

SEQ ID NO: 49349 - protein, 186 aa, Rivibacter subsaxonicus
  misc_feature (1)..(186): tr|A0A4V2FSB1|A0A4V2FSB1_9BURK NADPH-dependent 7-cyano- 7-deazaguanine reductase OS=Rivibacter subsaxonicus OX= 457575 GN=queF PE=3 SV=1
MATTRPKKKPATETPGRPKFPDSPSGGRTPQRGGLGGAPRQREMPANPPTAPSKELHVFPNPAPERDYVIQFQIPEFTCHCPLTGQPDFAHFTIDMIADELCIELKSLKMYFWSFRNEGAFHEKVTNDILSKIVAVTKPRYARISARWYVRGGIYTNVVAEHRKKGWKPAPRIDLPAHAEERGLLG

SEQ ID NO: 49350 - protein, 145 aa, Rivicola pingtungensis
  misc_feature (1)..(145): tr|A0A318L324|A0A318L324_9NEIS NADPH-dependent 7-cyano- 7-deazaguanine reductase OS=Rivicola pingtungensis OX=1 054498 GN=queF PE=3 SV=1
MTLHEHLQHLGSGTTYRYDQPDAALLERFPNPFARGELNPAGVTGTLNISCPEFTSLCPVTGQPDFATIVIDMEPDQWCVESKSLKLYLGSFRMHGEFHEACVCRIANDLVALLQPRWLRVEGRFTPRGGIPLWPKVEYRRPDAG

SEQ ID NO: 49351 - protein, 128 aa, Rivularia sp.
  misc_feature (1)..(128): tr|K9REJ5|K9REJ5_9CYAN NADPH-dependent 7-cyano-7-deazag uanine reductase OS=Rivularia sp. PCC 7116 OX=373994 GN =queF PE=3 SV=1
MTQTDIEVKYGEREISEGKLITFPNPRVGRRYNISITLPEFTCKCPFSGYPDFATIYVNYVPDEKVVELKAIKLYINSYRDRYISHEESANQILDDIVAACDPLEINVKADFTPRGNVHTVVEVNHKK

SEQ ID NO: 49352 - protein, 276 aa, Robbsia andropogonis
  misc_feature (1)..(276): tr|A0A0F5K5I8|A0A0F5K5I8_9BURK NADPH-dependent 7-cyano- 7-deazaguanine reductase OS=Robbsia andropogonis OX=280 92 GN=queF PE=3 SV=1
MTPEQSSLGKSVGYTDRYDPSLLFPIPRAQGRTMLGIAPGATLPFFGADIWNAYELSWLNGRGKPQIAVLTLIVPADAPCIVESKSLKLYLGSFAQTRQESIEILRDTLRHDIGAVCGASVSVQLTPPHAFGRLTLDELSGTDVDRLDLDCEVYTPDPSFLQARFDEAPVEETLVSNLLRSNCPVTGQPDWGSVQIHYAGPQIDQAGLLRYIVSFREHTGFHEQCVEQIFLDLLRQCRPVKLAVYARYTRRGGLDINPFRTNFNMPVPDNARTARQ

SEQ ID NO: 49353 - protein, 274 aa, Robbsia sp.
  misc_feature (1)..(274): tr|A0A494YFT2|A0A494YFT2_9BURK NADPH-dependent 7-cyano- 7-deazaguanine reductase OS=Robbsia sp. DHC34 OX=241977 6 GN=queF PE=3 SV=1
MNPDQSPLGKPAEYLQHYDPTLLFPIERLRGRSAIGLTGALPFFGTDLWNAYELSWLNARGKPQIAIATFAIPAESPHIIESKSFKLYLGSFANTVVESADALAATLRTDLSAVAGAPVKVRLTSPFEFGKLEFDELDGLSLDRLDLDTDVYEPTASLLGANFDEAPVEETLTSNLLKTNCPVTGQPDWGSVQVFYHGPQIDQAGLLRYIISFRNHTGFHEQCVEQMFVDIQRECRPTRLAIYARYTRRGGLDINPFRTNFSMPSPDNARTARQ

SEQ ID NO: 49354 - protein, 157 aa, Robiginitomaculum sp.
  misc_feature (1)..(157): tr|A0A2G2R1E9|A0A2G2R1E9_9RHOB NADPH-dependent 7-cyano- 7-deazaguanine reductase OS=Robiginitomaculum sp. OX=20 30823 GN=queF PE=3 SV=1
  misc_feature (92)..(92): Xaa can be any naturally occurring amino acid
MTDTPYDKLGQLGSHTDTPKTPDEAKLERVANPVLNAKGEPYLIRFTCPEFTSLCPVTGQPDFAHLVIDYAPDKWIVESKSLKLFLTSFRNXGDFHEACTVGIGQRIIKEIKPLWLRIGGYWYPRGGIPIDVFYQHGTQPKGLWVPDQGVAPYRGRG

SEQ ID NO: 49355 - protein, 157 aa, Robiginitomaculum sp.
  misc_feature (1)..(157): tr|A0A2G1YTQ0|A0A2G1YTQ0_9RHOB NADPH-dependent 7-cyano- 7-deazaguanine reductase OS=Robiginitomaculum sp. OX=20 30823 GN=queF PE=3 SV=1
MTDTPYDKLGQLGSHTDTPKTPDEAKLERVANPVLNAKGEPYLIRFTCPEFTSLCPVTGQPDFAHLVIDYAPDKWIVESKSLKLFLTSFRNHGDFHEACTVGIGQRIIKEIKPLWLRIGGYWYPRGGIPIDVFYQHGTQPKGLWVPDQGVAPYRGRG

SEQ ID NO: 49356 - protein, 279 aa, Rodentibacter genomosp.
  misc_feature (1)..(279): tr|A0A1V3J9I1|A0A1V3J9I1_9PAST NADPH-dependent 7-cyano- 7-deazaguanine reductase OS=Rodentibacter genomosp. 1 O X=1908264 GN=queF PE=3 SV=1
MNKQNYGLDALKLGQKTDYANEYDRTLLQPVPRALNRDDLGITKAQPFTIGADIWTAYEISWLNEKGVPQVAIADIYLDHQSKNLIESKSFKLYLNSFNQTKFADFSQVAHIMQQDLAECAQGEVKVRLNPLAFYQTQQIDRLQGECIDEQDIEITDYQFNTGWLENCVSDEVVEEYLVSHLLKSNCLITNQPDWGSLQIHYIGKKIDREKLLRYVVSFRQHNEFHEQCVERIFCDLMHYAKPEKLTVYARYTRRGGLDINPFRSNFEPLPENLRLARQ

SEQ ID NO: 49357 - protein, 279 aa, Rodentibacter genomosp.
  misc_feature (1)..(279): tr|A0A1V3JGN5|A0A1V3JGN5_9PAST NADPH-dependent 7-cyano- 7-deazaguanine reductase OS=Rodentibacter genomosp. 2 O X=1908266 GN=queF PE=3 SV=1
MNKQDYGLASLKLGQKTDYTNKYDRTLLQAVPRALNRDDLGITQKQPFTIGADIWTAYEISWLNEKGVPQVAIADIYLDHQSQNLIESKSFKLYLNSFNQTKFANFNQVAHIMQQDLAECAQGEVKVRLNPLAFYQTQQIDRLQGECIDEQDIEITDYQFNAGWLENCLSDEVVEEYLVSHLLKSNCLITNQPDWGSLQIHYVGKKINREKLLRYVVSFRQHNEFHEQCVERIFCDLMHYAKPEKLTVYARYTRRGGLDINPFRSNFETLPENLRLARQ

SEQ ID NO: 49358 - protein, 279 aa, Rodentibacter heidelbergensis
  misc_feature (1)..(279): tr|A0A1V3ICI8|A0A1V3ICI8_9PAST NADPH-dependent 7-cyano- 7-deazaguanine reductase OS=Rodentibacter heidelbergens is OX=1908258 GN=queF PE=3 SV=1
MNKQDYGLTSLKLGQKTNYANKYDCTLLQAVPRALNRDALGISQSQPFTIGADIWTAYEISWLNEKGVPQVAIADIYLDHQSQNLIESKSFKLYLNSFNQTKFANFNQVAQIMQQDLTECAQGEVKVRLNSLAFYQNQQIDRLQGECIDEQDIEITDYQFNAGWLDNCVSDEVVEEYLVSHLLKSNCLITNQPDWGSLQIHYVGKKIDREKLLRYVVSFRQHNEFHEQCVERIFCDLMHYAKPQKLTVYARYTRRGGLDINPFRSNFENLPENLRLARQ

SEQ ID NO: 49359 - protein, 280 aa, Rodentibacter heylii
  misc_feature (1)..(280): tr|A0A1V3K915|A0A1V3K915_9PAST NADPH-dependent 7-cyano- 7-deazaguanine reductase OS=Rodentibacter heylii OX=190 6744 GN=queF PE=3 SV=1
MTIYQNDILKTLKLGQQTEYTSTYNRALLQPVPRKLNRDNLGITQSQPFDQGADIWTAYELSWLNSKGLPQVAIADVEIDFRSENLIESKSFKLYLNSFNQTKFCTFEEVEQLLQKDLSDCAKGKVKVWLNALENYSQQKINTLNGECLDNQDIEITDYSFNTDWLKNCTTEEVVEETLVSHLLKSNCLITNQPDWGSIQVHYIGRQIDREKLLRYLISFRQHNEFHEQCVERIFCDLMKYAKPKKLTVYARYTRRGGLDINPFRSNFEGVPHNFRLARQ

SEQ ID NO: 49360 - protein, 279 aa, Rodentibacter heylii
  misc_feature (1)..(279): tr|A0A1V3KQZ9|A0A1V3KQZ9_9PAST NADPH-dependent 7-cyano- 7-deazaguanine reductase OS=Rodentibacter heylii OX=190 6744 GN=queF PE=3 SV=1
MNKQDNGLTSLKLGQKTEYVSEYDRTLLQSVPRALNRDDLGITQTQPFTIGADIWTAYEVSWLNEKGVPQVAIADIYLDQQSQNLIESKSFKLYLNSFNQSKFTDFKQVTQVMQQDLTECVQGEVKVRLNPLSFYQTQKIDHLQGDCIDGQDIDITNYEFNPDWLKDCVSNERVEEYLVSHLLKSNCLITNQPDWGTLQIHYIGKKINREKLLRYVVSFRQHNEFHEQCVERIFCDLMRYAKPEKLTVYARYTRRGGLDINPFRSNFETLPENLRLARQ

SEQ ID NO: 49361 - protein, 279 aa, Rodentibacter mrazii; identical to SEQ ID NO: 49357
  misc_feature (1)..(279): tr|A0A1V3IBU5|A0A1V3IBU5_9PAST NADPH-dependent 7-cyano- 7-deazaguanine reductase OS=Rodentibacter mrazii OX=190 8257 GN=queF PE=3 SV=1

SEQ ID NO: 49362 - protein, 279 aa, Rodentibacter myodis
  misc_feature (1)..(279): tr|A0A1V3JNT7|A0A1V3JNT7_9PAST NADPH-dependent 7-cyano- 7-deazaguanine reductase OS=Rodentibacter myodis OX=190 7939 GN=queF PE=3 SV=1
MNYHDNSLKSLKLGHNTEYASKYDRTLLQPVPRALNRDDLGITETQPFTIGADIWTAYEISWLNEKGLPQVAIADIYLDYRSQNLIESKSFKLYLNSFNQSKFANIEQVAQTLQQDLTDCAQGEVKVRLNSLSFYHGQKIDVLAGHCIDESDIEINDYAFNADWLKDCVSNEIVEERLVSHLLKSNCLITHQPDWGTLQIHYVGEKIDREKLLRYVVSFRQHNEFHEQCVERIFCDLMHYAKPEKLTVYARYTRRGGLDINPFRSNFEPVPHNQRLARQ

SEQ ID NO: 49363 - protein, 279 aa, Rodentibacter pneumotropicus
  misc_feature (1)..(279): tr|A0A4V3SQW1|A0A4V3SQW1_9PAST NADPH-dependent 7-cyano- 7-deazaguanine reductase OS=Rodentibacter pneumotropicu s OX=758 GN=queF PE=3 SV=1
MNKQDYGLASLKLGQKTEYADEYDRTLLQAVPRALNRDELGITKTPPFTIGADIWTAYEISWLNEKGVPQVAIADIYLDHQSQNLIESKSFKLYLNSFNQTKFIDFKQVAQIMQQDLAECAQGEVKVRLNPLAFFQTQQIDLLQGECIDDQDIEITDYQFNAGWLENCVSDEVVEEYLVSHLLKSNCLITNQPDWGSLQIHYVGKKIDQEKLLRYVISFRQHNEFHEQCVERIFCDLMHYAKPEKLTVYARYTRRGGLDINPFRSNFETLPKNLRLARQ

SEQ ID NO: 49364 - protein, 42 aa, Rodentibacter pneumotropicus
  misc_feature (1)..(42): tr|A0A3S4U0H8|A0A3S4U0H8_9PAST NADPH-dependent 7-cyano- 7-deazaguanine reductase OS=Rodentibacter pneumotropicu s OX=758 GN=queF_1 PE=4 SV=1
MHYAKPEKLTVYARYTRRGGLDINPFRSNFETLPKNLRLARQ

SEQ ID NO: 49365 - protein, 279 aa, Rodentibacter rarus
  misc_feature (1)..(279): tr|A0A1V3IK85|A0A1V3IK85_9PAST NADPH-dependent 7-cyano- 7-deazaguanine reductase OS=Rodentibacter rarus OX=1908 260 GN=queF PE=3 SV=1
MNKQDYGLASLKLGQKTDYANEYDRTLLQAVPRALNRDDLGITQSQPFTIGADIWTAYEISWLNEKGVPQVAIADIYLDHQSQNLIESKSFKLYLNSFNQTKFANFNQVAQIMQQDLTECAQGEVKVRLNSLAFYQNQQIDTLQGECIDEQDIEITDYQFNAGWLDNCVSDEVVEEYLVSHLLKSNCLITNQPDWGSLQIHYVGKKIDREKLLRYVVSFRQHNEFHEQCVERIFCDLMHYAKPQKLTVYARYTRRGGLDINPFRSNFENLPENLRLARQ

SEQ ID NO: 49366 - protein, 279 aa, Rodentibacter ratti
  misc_feature (1)..(279): tr|A0A1V3LBE5|A0A1V3LBE5_9PAST NADPH-dependent 7-cyano- 7-deazaguanine reductase OS=Rodentibacter ratti OX=1906 745 GN=queF PE=3 SV=1
MNKQDYGLSSLKLGKKTDYANEYNRTLLQAVPRALNRDDLGITQKQPFTIGADIWTAYEISWLNEKGVPQVAIADIYLDHQSQNLIESKSFKLYLNSFNQTKFADFNQVAQIMQQDLAECAQGEVKVRLNPLAFYQTQQIDRLQGECIDEQDIEITDYQFNAGWLENCVSDEVVEEYLVSHLLKSNCLITNQPDWGSLQIHYVGKKIDREKLLRYVVSFRQHNEFHEQCVERIFCDLMHCAKPEKLTVYARYTRRGGLDINPFRSNFEDLPENLRLARQ

SEQ ID NO: 49367 - protein, 279 aa, Rodentibacter ratti
  misc_feature (1)..(279): tr|A0A1V3L529|A0A1V3L529_9PAST NADPH-dependent 7-cyano- 7-deazaguanine reductase OS=Rodentibacter ratti OX=1906 745 GN=queF PE=3 SV=1
MNKQDYGLSSLKLGQKTDYADKYDRTLLQAVPRALNRDDLGITQKQPFTIGADIWTAYEISWLNEKGVPQVAIADIYLDHQSQNLIESKSFKLYLNSFNQTKFADFNQVAQIMQQDLAECAQGEVKVQLNSLAFYHSQKIDRLQGECIDEQDLEIIDYQFNAGWLENCVSDEMVEEYLVSHLLKSNCLITNQPDWGSLQIHYVGKKIDREKLLRYVVSFRQHNEFHEQCVERIFCDLIHYAKPAKLTVYARYTRRGGLDINPFRSNFEDLPENLRLARQ

SEQ ID NO: 49368 - protein, 279 aa, Rodentibacter sp.
  misc_feature (1)..(279): tr|A0A1V3JZK9|A0A1V3JZK9_9PAST NADPH-dependent 7-cyano- 7-deazaguanine reductase OS=Rodentibacter sp. Ppn85 OX= 1908525 GN=queF PE=3 SV=1
MNNQGNGLTSLKLGQKTEYVSEYDRTLLQPVPRALNRDDLGITQTQPFTMGADIWTAYEVSWLNVKGVPQVAIADIYLDQQSQNLIESKSFKLYLNSFNQSKFTDFKQVARVMQQDLTECAQGEVKVRLNPLSFYQAQKIDHLQGDCIDEQDIEITNYEFNPNWLKDCVSDERVEEYLVSHLLKSNCLITNQPDWGTLQIHYIGKKINREKLLRYVVSFRQHNEFHEQCVERIFCDLMRYAKPEKLTVYARYTRRGGLDINPFRSNFEILPENLRLARQ

SEQ ID NO: 49369 - protein, 279 aa, Rodentibacter trehalosifermentans
  misc_feature (1)..(279): tr|A0A1V3IUG5|A0A1V3IUG5_9PAST NADPH-dependent 7-cyano- 7-deazaguanine reductase OS=Rodentibacter trehalosiferm entans OX=1908263 GN=queF PE=3 SV=1
MMHKDYDLTSLKLGQKTDYACEYDRTLLQAVPRALNRDDLGISQVQPFTIGADIWTAYEISWLNKKGIPQVAIADIYLDHQSQYLIESKSFKLYLNSFNQSKFDDFDQVAQIMRRDLAQCAQGDVKVRLNSLEFYDLQKIERLQGECIDAQDIEITDYQFNANWLKNCISDEIVEEYLVSHLLKSNCLITNQPDWGSLQIHYIGQKIDREKLLRYVVSFRQHNEFHEQCVERIFCDLMHYAKPEKLTVYARYTRRGGLDINPFRSNFETLPENLRLARQ

SEQ ID NO: 49370 - protein, 279 aa, Rodentibacter trehalosifermentans
  misc_feature (1)..(279): tr|A0A1V3J1U6|A0A1V3J1U6_9PAST NADPH-dependent 7-cyano- 7-deazaguanine reductase OS=Rodentibacter trehalosiferm entans OX=1908263 GN=queF PE=3 SV=1
MMHKDYDLTSLKLGQKTDYACEYDRTLLQAVPRALNRDDLGISQVQPFTIGADIWTAYEISWLNKKGIPQVAIADIYLDHQSQYLIESKSFKLYLNSFNQSKFDDFDQVAQIMRRDLAQCAQGDVKVRLNSLEFYDLQKIERLQGECIDAQDIEITDYQFNANWLKNCISDEIVEEYLVSHLLKSNCLITNQPDWGSLQIHYIGQKIDREKLLRYVVSFRQHNEFHEQCVERIFCDLMHCAKPEKLTVYARYTRRGGLDINPFRSNFETLPENLRLARQ

SEQ ID NO: 49371 - protein, 143 aa, Roseateles aquatilis
  misc_feature (1)..(143): tr|A0A246IVC5|A0A246IVC5_9BURK NADPH-dependent 7-cyano- 7-deazaguanine reductase OS=Roseateles aquatilis OX=431 061 GN=queF PE=3 SV=1
MPPNPPSRPSKEIHVFPNPAPERDYVIQFQIPEFTCHCPLTGQPDFAHFTIDMIADEYCVELKSLKMYFWSYRDEGAFHEKVTNTILEDIVKVTNPRFIRITAKWYVRGGIYTNVVAEHRKKGWKPLPAVDLPAHGFESGLLR

SEQ ID NO: 49372 - protein, 146 aa, Roseateles depolymerans
  misc_feature (1)..(146): tr|A0A2W5DI46|A0A2W5DI46_9BURK NADPH-dependent 7-cyano- 7-deazaguanine reductase OS=Roseateles depolymerans OX= 76731 GN=queF PE=3 SV=1
MREVPKNPPSKPSKDILVFPNPNPERDYVIQFQVPEFTCHCPLTGQPDFAHFTIDMIADELCVELKSLKMYFWSYRNEGAFHEKVTNTILDDIVKVTDPRFIRITAKWYVRGGIYTNVVAEHRKPGWTPAPRVELPAHGFESGMLG

SEQ ID NO: 49373 - protein, 196 aa, Roseateles depolymerans
  misc_feature (1)..(196): tr|A0A0U3CZM4|A0A0U3CZM4_9BURK NADPH-dependent 7-cyano- 7-deazaguanine reductase OS=Roseateles depolymerans OX= 76731 GN=queF PE=3 SV=1
MAKTTSAKTSSAAASTDSKPAPKAERNAALKPTASEAKGANKGKPAAQPKMREMPPNPPSAPSKEIHVFPNPAPERDYVIQFQVPEFTCHCPLTGQPDFAHFTIDMIADEYCVELKSLKMYFWSYRNEGAFHEKVTNTILDDIVKVTKPRYIRITAKWYVRGGIYTNVVAEHRKKGWKPLPAVDIPSHSFESGLLR

SEQ ID NO: 49374 - protein, 180 aa, Roseateles sp.
  misc_feature (1)..(180): tr|A0A1H7MCL9|A0A1H7MCL9_9BURK NADPH-dependent 7-cyano- 7-deazaguanine reductase OS=Roseateles sp. YR242 OX=185 5305 GN=queF PE=3 SV=1
MAKTTPAKPLNKSPNTASAKAPRKATAAAAAEPKMRDMPPNPPSKPSKEIHVFPNPAPERDYVIQFQVPEFTCHCPLTGQPDFAHFTIDMIADKYCVELKSLKMYFWSYRNEGAFHEKVTNTILDDIVKVTNPRYIRITAKWYVRGGIYTNVVAEHRKKGWKPLPAVDIPSHSFESGLLR

SEQ ID NO: 49375 - protein, 158 aa, Roseburia sp.
  misc_feature (1)..(158): tr|A0A1Q6U1C2|A0A1Q6U1C2_9FIRM NADPH-dependent 7-cyano- 7-deazaguanine reductase OS=Roseburia sp. CAG:197_41_10 OX=1897018 GN=queF PE=3 SV=1
MAGNITLLGNQKTKYPENYAPDVLETFINKHQENDYFVKFNCPEFTSLCPITGQPDFATVTISYVPDVKMVESKSLKLYLFSFRNHGDFHEDCMNIIMKDLIKLMDPRYIEVWGKFTPRGGISIDPYCNYGKPGTKWEEIACNRMANHDMYPEKVDNR

SEQ ID NO: 49376 - protein, 165 aa, Roseburia sp.; identical to SEQ ID NO: 44648
  misc_feature (1)..(165): tr|A0A417UV41|A0A417UV41_9FIRM NADPH-dependent 7-cyano- 7-deazaguanine reductase OS=Roseburia sp. OM04-10AA OX= 2293141 GN=queF PE=3 SV=1

SEQ ID NO: 49377 - protein, 154 aa, Roseiarcus fermentans
  misc_feature (1)..(154): tr|A0A366EQ85|A0A366EQ85_9RHIZ NADPH-dependent 7-cyano- 7-deazaguanine reductase OS=Roseiarcus fermentans OX=14 73586 GN=queF PE=3 SV=1
MTKKPKPEFAHLGKTSTIPDEPDIAILDRAPNPHDDSDFVVRFVTPEFTSICPMTGQPDFAHLVIDYVPDKWIVESKSLKLYLLSFRHHGAFHEDCTVRIGKDLVATLKPRWLRIGGYWYPRGGIPIDVFWQSGKPPAGVWLPDQGVAPYRGRG

SEQ ID NO: 49378 - protein, 137 aa, Roseibacillus sp.
  misc_feature (1)..(137): tr|A0A424HYQ4|A0A424HYQ4_9BACT NADPH-dependent 7-cyano- 7-deazaguanine reductase OS=Roseibacillus sp. TMED18 OX =1986590 GN=queF PE=3 SV=1
MTSGTAEDFSFLGHESSLPASPDEAKLDTFANKSPGRGYTITLDCPEFSSLCPVTGQPDSAHIQISYVPDELCVETKSLKYYLASYRNLPCFNEEIVNRILDDLVAATKPQRMDVVGEFSPRGGISLTASASYPDEW

SEQ ID NO: 49379 - protein, 137 aa, Roseibacillus sp.
  misc_feature (1)..(137): tr|A0A2E5D9V5|A0A2E5D9V5_9BACT NADPH-dependent 7-cyano- 7-deazaguanine reductase OS=Roseibacillus sp. OX=202485 6 GN=queF PE=3 SV=1
MSSGTADDFSFLGHESSLPASPDEAKLDTFANKSPGRGYTITLDCPEFSSLCPVTGQPDTAHLQISYVPDELCVETKSLKYYLASYRNLPCFNEEIVNRILDDLVAATKPQRMDVVGEFSPRGGISLTASASYPDEW

SEQ ID NO: 49380 - protein, 155 aa, Roseibium hamelinense
  misc_feature (1)..(155): tr|A0A562SKM7|A0A562SKM7_9RHOB NADPH-dependent 7-cyano- 7-deazaguanine reductase OS=Roseibium hamelinense OX=15 0831 GN=queF PE=3 SV=1
MSDKSIYENLTQLGSATDLPLSPEDAVLEKVPNPQAGTGYMVRFVAPEFTSLCPLTGAPDFAHLVIDYVPKDFLVESKSLKLFLGSFRNHGAFHEDCTVSIAKRLIDLLEPQWLRIGGYWYPRGGIPIDVFYQTGAAPEGVWIPEQGVQPYRGRG

SEQ ID NO: 49381 - protein, 155 aa, Roseibium sp.
  misc_feature (1)..(155): tr|E2CGX6|E2CGX6_9RHOB NADPH-dependent 7-cyano-7-deazag uanine reductase OS=Roseibium sp. TrichSKD4 OX=744980 G N=queF PE=3 SV=1
MSDKTIYENLTQLGTSTELPRRPEDAVLEKVPNPQAGTGYMVRFVAPEFTSLCPITSAPDFAHLVIDYVPRDFLVESKSLKLFLGSFRNHGAFHEDCTVSIGKRLVDLLDPQWLRIGGYWYPRGGIPIDVFYQTGPAPEGVWIPEQGVAPYRGRG

SEQ ID NO: 49382 - protein, 118 aa, Roseimaritima ulvae
  misc_feature (1)..(118): tr|A0A5B9QMX6|A0A5B9QMX6_9PLAN NADPH-dependent 7-cyano- 7-deazaguanine reductase OS=Roseimaritima ulvae OX=9802 54 GN=queF PE=3 SV=1
MSDNFRETLETFENPRPERDYWIEIQCPEFTSVCPKTGQPDFGTLTFRYVADQHCIELKSLKLYLQRYRSEGIFYERITNRIMDDFVAVVQPRRCTLESRWTPRGGISSVITVEYPDA

SEQ ID NO: 49383 - protein, 167 aa, Roseimicrobium gellanilyticum
  misc_feature (1)..(167): tr|A0A366HJA1|A0A366HJA1_9BACT NADPH-dependent 7-cyano- 7-deazaguanine reductase OS=Roseimicrobium gellanilytic um OX=748857 GN=queF PE=3 SV=1
MAKDKGKDKKKDKSKPTEAKAATLTLLGHSENRLPTSPDEAKLEVFPNRTPGRNYRINLSAPEFSSLCPVTGQPDSAHLEIVYVPDKLCIETKSFKFYLASYRNFPAFNEVIVNRILDDLVKACAPKQMHIRGDFGARGGISLSCEAKFPDWPDDEEAMCEGGCHHH

SEQ ID NO: 49384 - protein, 154 aa, Roseinatronobacter monicus
  misc_feature (1)..(154): tr|A0A543KBC0|A0A543KBC0_9RHOB NADPH-dependent 7-cyano- 7-deazaguanine reductase OS=Roseinatronobacter monicus OX=393481 GN=queF PE=3 SV=1
MTETIYSGLKQLGEATDLPDSPETAELERVQNPQADIAYCVRFVAPEFTSLCPMTGQPDFAHLVIDYVPGDWLVESKSLKLYLGSFRNHGAFHEDCTISIARRLFAFLDPQWLRIGGYWYPRGGIPIDVFWQTGPLPEGVWIPDQGVAPYRGRG

SEQ ID NO: 49385 - protein, 160 aa, Roseinatronobacter thiooxidans
  misc_feature (1)..(160): tr|A0A2W7Q0G4|A0A2W7Q0G4_9RHOB NADPH-dependent 7-cyano- 7-deazaguanine reductase OS=Roseinatronobacter thiooxid ans OX=121821 GN=queF PE=3 SV=1
MEKEIFMTETIYSGLKQLGGATDLPASPETAMLERVQNPQADIAYCVRFVAPEFTSLCPMTGQPDFAHLVIDYVPGEWLVESKSLKLYLGAFRNHGAFHEDCTISIARRLVEFLSPQWLRIGGYWYPRGGIPIDVFWQTGPMPDGVWIPDQGVAPYRGRG

SEQ ID NO: 49386 - protein, 154 aa, Roseivivax pacificus
  misc_feature (1)..(154): tr|A0A2T6B7L7|A0A2T6B7L7_9RHOB NADPH-dependent 7-cyano- 7-deazaguanine reductase OS=Roseivivax pacificus OX=126 7769 GN=queF PE=3 SV=1
MSDDIYSGLEQLGRDTPQPQSPEEARLERVPNPQSDVDYCVRFTAPEFTSLCPMTGQPDFAHLVIDYLPGEWLVESKSLKLYLTSFRNHGAFHEDCTISIARRLTSLLAPKWLRIGGYWYPRGGIPIDVFYQTGPAPGGVWIPETGVAPYRGRG

SEQ ID NO: 49387 - protein, 156 aa, Roseivivax roseus
  misc_feature (1)..(156): tr|A0A1H9TRU9|A0A1H9TRU9_9RHOB NADPH-dependent 7-cyano- 7-deazaguanine reductase OS=Roseivivax roseus OX=641238 GN=queF PE=3 SV=1
MAHGDTPTHGLTQLGQSVGLPASPEEAVLERVANPQAGHRYNVRFTAPEFTSLCPMTGQPDFAHLVIDYVPGDWLVESKSLKLYLTSFRNHGAFHEDCTIGIARRLVDTLDPAWLRIGGYWYPRGGIPIDVFYQTGPMPADVWIPDQGVPPYRGRG

SEQ ID NO: 49388 - protein, 281 aa, Rosenbergiella nectarea
  misc_feature (1)..(281): tr|A0A1H9IVN0|A0A1H9IVN0_9ENTR NADPH-dependent 7-cyano- 7-deazaguanine reductase OS=Rosenbergiella nectarea OX= 988801 GN=queF PE=3 SV=1
MADYENHPTLSDLTLGKSTAYISDYQPSLLQAVPRSLNRDSLQLDEGQLPFHGEDFWTLYELSWLNENGIPQVAIGDVALPASSQNLIESKSFKLYLNSFNQTRFSDWQSVEQTLVRDLSQCAQGEVRVTLRRLSDFAAQPIDDFAGEVIDEQAITVDDYQFNRDYLRGSTSDESVEETLVSHLLKSNCLITQQPDWGSVMIHYQGKKINREALLRYLLSFRQHNEFHEQCVERIYMDIMALCEPQVLTVYARYTRRGGLDINPWRTNQHFTPHNRRLARQ

SEQ ID NO: 49389 - protein, 154 aa, Roseobacter sp.
  misc_feature (1)..(154): tr|A3X3Y6|A3X3Y6_9RHOB NADPH-dependent 7-cyano-7-deazag uanine reductase OS=Roseobacter sp. MED193 OX=314262 GN =queF PE=3 SV=1
MSEDIYSNLKQLGGETRIPTSPEEAELERVPNPQADVAYNVRFTAPEFTSLCPMTGQPDFAHLVIDYVPGPWLIESKSLKLYLTSFRNHGAFHEDCTISIARRLADFLDPQWLRIGGYWYPRGGIPIDVFWQTGPVPEGVWIPDQGVPPYRGRG

SEQ ID NO: 49390 - protein, 154 aa, Roseobacter sp.
  misc_feature (1)..(154): tr|A4EQD2|A4EQD2_9RHOB NADPH-dependent 7-cyano-7-deazag uanine reductase OS=Roseobacter sp. SK209-2-6 OX=388739 GN=queF PE=3 SV=1
MSDSIYSNLKQLGGDTIVPQNPEEAELERVENPQSDVLYNVRFTAPEFTSLCPMTGQPDFAHLVIDYVPGDWLVESKSLKLFLTSFRNHGAFHEDCTISIARRLAEFLEPKWLRIGGYWYPRGGIPIDVFWQTGEMPAGVWIPDQGVPPYRGRG

SEQ ID NO: 49391 - protein, 155 aa, Roseococcus sp.
  misc_feature (1)..(155): tr|A0A4R0YI12|A0A4R0YI12_9PROT NADPH-dependent 7-cyano- 7-deazaguanine reductase OS=Roseococcus sp. SYP-B2431 O X=2496640 GN=queF PE=3 SV=1
MSTRTETGGLTQLGAHTPLPASPDQAVLERVPNPHADLAYCIRFAAPEFTSLCPLTGQPDFAHLVIDYVPRGWIVESKSLKLFLGSFRNHGAFHEACTVDIARRLVALLDPAWLRIGGYWYPRGGIPIDVFYQTGAPPEGVWIPPQDVPGYRGRG

SEQ ID NO: 49392 - protein, 140 aa, Roseofilum reptotaenium
  misc_feature (1)..(140): tr|A0A1L9QXT3|A0A1L9QXT3_9CYAN NADPH-dependent 7-cyano- 7-deazaguanine reductase OS=Roseofilum reptotaenium AO1 -A OX=1925591 GN=queF PE=3 SV=1
MLEDRTYGDRAIEEVAHHRLEIWPNPSPNHDYIIHLEHPEFTALCPRSGYPDFGTIVCDYFPGQSVLELKAFKLYINSFRQQRISHETVVNQVADRLMAEVKPKALRIIGDFTRRGGVKTVITAYRGEDMSFPDYQPNLL

SEQ ID NO: 49393 - protein, 155 aa, Roseomonas aestuarii
  misc_feature (1)..(155): tr|A0A2U1V966|A0A2U1V966_9PROT NADPH-dependent 7-cyano- 7-deazaguanine reductase OS=Roseomonas aestuarii OX=568 898 GN=queF PE=3 SV=1
MTASHDVSGLTMLGQATRQPQSPEEAVLERVPNPHPGRRYCVRFTAPEFTSLCPLTAQPDFAHLVIDYIPGDWLVESKSLKLYLTSFRNHGAFHEACTVGIGVRLAEVLDPVWLRIGGYWYPRGGIPIDVFWQTGAAPEGVWVPAQDVPNYRGRG

SEQ ID NO: 49394 - protein, 155 aa, Roseomonas cervicalis
  misc_feature (1)..(155): tr|D5RRV9|D5RRV9_9PROT NADPH-dependent 7-cyano-7-deazag uanine reductase OS=Roseomonas cervicalis ATCC 49957 OX =525371 GN=queF PE=3 SV=1
MTASHDVSGLTMLGQAVAQPQSPEEAVLERVPNPHPGQRYTVRFVAPEFTSLCPLTGQPDFAHLVIDYIPGDWLVESKSLKLFLTSFRNHGAFHEACTVGIGLRLVETLSPVWLRIGGYWYPRGGIPIDVFWQTGAAPEGVWIPEQGVPPYKGRG

SEQ ID NO: 49395 - protein, 154 aa, Roseomonas deserti
  misc_feature (1)..(154): tr|A0A1V2GWI3|A0A1V2GWI3_9PROT NADPH-dependent 7-cyano- 7-deazaguanine reductase OS=Roseomonas deserti OX=18179 63 GN=queF PE=3 SV=1
MTIHDVSGLTMLGRQVAAPASPEEAVLERVPSPHPGTRYCVRFVAPEFTSLCPLTGQPDFAHLVIDYVPGDWLVESKSLKLFLTSFRNHGAFHEACTVGIGLKLVELLAPAWLRIGGYWYPRGGIPIDVFWQTGTAPDGVWIPSQDVPPYRGRG

SEQ ID NO: 49396 - protein, 144 aa, Roseomonas gilardii
  misc_feature (1)..(144): tr|A0A1L7AK84|A0A1L7AK84_9PROT NADPH-dependent 7-cyano- 7-deazaguanine reductase OS=Roseomonas gilardii OX=2577 08 GN=queF PE=3 SV=1
MLGQHTAQPASPEEARLERVPNPHPDKRYCVRFTAPEFTSLCPITGQPDFAHLVIDYVPDGWLVESKSLKLYLTSFRNHGAFHEACTVEIGDRLVRELKPHWLRIGGYWYPRGGIPIDVFWQTGAAPEGVWIPPQDVPGYRGRG

SEQ ID NO: 49397 - protein, 178 aa, Roseomonas gilardii
  misc_feature (1)..(178): tr|A0A379NDB7|A0A379NDB7_9PROT NADPH-dependent 7-cyano- 7-deazaguanine reductase OS=Roseomonas gilardii subsp. rosea OX=243956 GN=queF PE=3 SV=1
MSDNDTSSGTTGRPTPGHESAADLPPGSPLAGLTMLGQHTAQPASPEEARLERVPNPHPDKRYCVRFTAPEFTSLCPITGQPDFAHLVIDYVPDGWLVESKSLKLYLTSFRNHGAFHEACTVEIGDRLVRELKPHWLRIGGYWYPRGGIPIDVFWQTGAAPEGVWIPPQDVPGYRGRG

SEQ ID NO: 49398 - protein, 144 aa, Roseomonas mucosa
  misc_feature (1)..(144): tr|A0A1S8D8F0|A0A1S8D8F0_9PROT NADPH-dependent 7-cyano- 7-deazaguanine reductase OS=Roseomonas mucosa OX=207340 GN=queF PE=3 SV=1
MLGQHARQPASPEEARLERVPNPHPGKRYCVRFTAPEFTSLCPITGQPDFAHLVIDYVPDGWLVESKSLKLYLTSFRNHGAFHEACTVEIGDRLVRELKPHWLRIGGYWYPRGGIPIDVFWQTGAPPEGVWIPPQDVPGYRGRG

SEQ ID NO: 49399 - protein, 178 aa, Roseomonas mucosa
  misc_feature (1)..(178): tr|A0A379N1C3|A0A379N1C3_9PROT NADPH-dependent 7-cyano- 7-deazaguanine reductase OS=Roseomonas mucosa OX=207340 GN=queF PE=3 SV=1
MSDNDTSSGTTGRPTPGHESAADLPRTDPLAGLTMLGQHARQPASPEEARLERVPNPHPGKRYCVRFTAPEFTSLCPITGQPDFAHLVIDYVPDGWLVESKSLKLYLTSFRNHGAFHEACTVEIGDRLVRELKPHWLRIGGYWYPRGGIPIDVFWQTGAPPEGVWIPPQDVPGYRGRG

SEQ ID NO: 49400 - protein, 153 aa, Roseomonas nepalensis
  misc_feature (1)..(153): tr|A0A502FQZ5|A0A502FQZ5_9PROT NADPH-dependent 7-cyano- 7-deazaguanine reductase OS=Roseomonas nepalensis OX=18 54500 GN=queF PE=3 SV=1
MNHDVSGLTQLGQYTTQPNSPDEAVLERVPNPHPGTHYVARFTAPEFTSLCPITAQPDFAHLVIDYIPGEWLVESKSLKLYLTAFRNHGAFHEACTIDIAKRLADLLQPVWLRIGGYWYPRGGIPIDVFWQTGAPPAGAWIPDQGVPPYRGRG

SEQ ID NO: 49401 - protein, 158 aa, Roseomonas oryzae
  misc_feature (1)..(158): tr|A0A5B2TE99|A0A5B2TE99_9PROT NADPH-dependent 7-cyano- 7-deazaguanine reductase OS=Roseomonas oryzae OX=160894 2 GN=queF PE=3 SV=1
MTQPSPGHDVSGLTMLGQNTRQPQSPEEAVLERVPNPHPGQNYCVRFTAPEFTSLCPITGQPDFAHLVIDYVPGDWLVESKSLKLYLTSFRNHGAFHEACTVGIGLKLAGLLSPQWLRIGGYWYPRGGIPIDVFWQTGDAPAGAWVPSQDVPNYRGRG

SEQ ID NO: 49402 - protein, 158 aa, Roseomonas rhizosphaerae
  misc_feature (1)..(158): tr|A0A2C7AF46|A0A2C7AF46_9PROT NADPH-dependent 7-cyano- 7-deazaguanine reductase OS=Roseomonas rhizosphaerae OX =1335062 GN=queF PE=3 SV=1
MSSPMGTHDVSGLTMLGQNTRQPASPEEAVLERVPNPHPGSCYCVRFTAPEFTSLCPITGQPDFAHLMIDYVPGDWLVESKSLKLFLTAFRNHGAFHEACTVGIGQRLAETLSPVWLRIGGYWYPRGGIPIDVFWQTGDAPAGVWVPAQDVPNYRGRG

SEQ ID NO: 49403 - protein, 153 aa, Roseomonas rosea
  misc_feature (1)..(153): tr|A0A1M6LVG0|A0A1M6LVG0_9PROT NADPH-dependent 7-cyano- 7-deazaguanine reductase OS=Roseomonas rosea OX=198092 GN=queF PE=3 SV=1
MSHDVSGLTMLGRSTAQPNSPEEAVLERVPNPHPGTHYVARFTAPEFTSLCPITAQPDFAHLVIDYIPGEWLVESKSLKLYLTSFRNHGAFHEACTIDIAKRLVELLEPAWLRIGGYWYPRGGIPIDVFWQTGAPPAGAWIPDQGVPPYRGRG

SEQ ID NO: 49404 - protein, 178 aa, Roseomonas sp.; identical to SEQ ID NO: 49399
  misc_feature (1)..(178): tr|A0A1Q2YZW7|A0A1Q2YZW7_9PROT NADPH-dependent 7-cyano- 7-deazaguanine reductase OS=Roseomonas sp. TAS13 OX=192 6319 GN=queF PE=3 SV=1

SEQ ID NO: 49405 - protein, 155 aa, Roseomonas sp.
  misc_feature (1)..(155): tr|A0A317FB68|A0A317FB68_9PROT NADPH-dependent 7-cyano- 7-deazaguanine reductase OS=Roseomonas sp. CQN31 OX=218 4016 GN=queF PE=3 SV=1
MTIKTDVSGLTMLGQHVEQPRSPEEAVLERVPNPHPGTRYCVRFVAPEFTSLCPMTGQPDFAHLVIDYVPRDWLVESKSLKLFLTSFRNHGAFHEACTVGIGKRIVELLDPEWLRIGGYWYPRGGIPIDVFYQTGTPPEGVWIPDQGVAPYRGRG

SEQ ID NO: 49406 - protein, 144 aa, Roseomonas stagni
  misc_feature (1)..(144): tr|A0A1I4CA63|A0A1I4CA63_9PROT NADPH-dependent 7-cyano- 7-deazaguanine reductase OS=Roseomonas stagni DSM 19981 OX=1123062 GN=queF PE=3 SV=1
MLGQQTAQPATPEAAVLERVPNPHPGQRYCVRFTAPEFTSLCPMTGQPDFAHLVIDYVPRDWLVESKSLKLYLTAFRNHGAFHEACTVGIARRLVEELDPEWLRIGGYWYPRGGIPIDVFYATGEPPAGVWVPPQDVPGYRGRG

SEQ ID NO: 49407 - protein, 155 aa, Roseovarius aestuarii
  misc_feature (1)..(155): tr|A0A1X7BNX8|A0A1X7BNX8_9RHOB NADPH-dependent 7-cyano- 7-deazaguanine reductase OS=Roseovarius aestuarii OX=47 5083 GN=queF PE=3 SV=1
MADQDIYKNLTQLGGQTELPNSPEEAVLEKVPNPQSGTDYAVRFTAPEFTSLCPMTGQPDFAHIVLDYIPDGWLVESKSLKLFLGSFRNHGAFHEDCTVTIGKRLIELLEPKWLRVGGYWYPRGGIPIDVFYQTGEQPAGVWIPDQGVPTYRGRG

SEQ ID NO: 49408 - protein, 153 aa, Roseovarius albus
  misc_feature (1)..(153): tr|A0A1X6ZHY6|A0A1X6ZHY6_9RHOB NADPH-dependent 7-cyano- 7-deazaguanine reductase OS=Roseovarius albus OX=124786 7 GN=queF PE=3 SV=1
MSDIYKDLKQLGGATIQPQSPEKAELERVQNPQADVSYNVRFTAPEFTSLCPMTGQPDFAHLVIDYVPGQWLVESKSLKLYLTSFRNHGAFHEDCTISIARRLTEFLEPQWLRIGGYWYPRGGIPIDVFWQTGAMPEGVWIPDQGVPPYRGRG

SEQ ID NO: 49409 - protein, 154 aa, Roseovarius atlanticus
  misc_feature (1)..(154): tr|A0A0T5NU44|A0A0T5NU44_9RHOB NADPH-dependent 7-cyano- 7-deazaguanine reductase OS=Roseovarius atlanticus OX=1 641875 GN=queF PE=3 SV=1
MSDDIYSNLKQLGGATKVPQSPEEAELERVENPQADVAYNVRFTAPEFTSLCPMTGQPDFAHLVIDYVPGRWLVESKSLKLYLTSFRNHGAFHEDCTISIARRLVEFLAPQWLRIGGYWYPRGGIPIDVFWQTGEMPQGVWVPDQGVPPYRGRG

SEQ ID NO: 49410 - protein, 154 aa, Roseovarius azorensis
  misc_feature (1)..(154): tr|A0A1H7WJK6|A0A1H7WJK6_9RHOB NADPH-dependent 7-cyano- 7-deazaguanine reductase OS=Roseovarius azorensis OX=12 87727 GN=queF PE=3 SV=1
MAENIYEGLTQLGGSTKVPQSPEEAVLERVANPQADVRYNVRFTAPEFTSLCPMTGQPDFAHLVIDYVPGDWLVESKSLKLYLTSFRNHGAFHEDCTISIARRLVNFLEPEWLRIGGYWYPRGGIPIDVFWQTGACPEDVWIPDQDVPPYRGRG

SEQ ID NO: 49411 - protein, 155 aa, Roseovarius gaetbuli
  misc_feature (1)..(155): tr|A0A1X6YE97|A0A1X6YE97_9RHOB NADPH-dependent 7-cyano- 7-deazaguanine reductase OS=Roseovarius gaetbuli OX=135 6575 GN=queF PE=3 SV=1
MSDETIYSSLKQLGGATIVPQSPEEAVLERVKNPQGDVAYNVRFTAPEFTSLCPMTGQPDFAHLMIDYVPGEWLVESKSLKLFLGSFRNHGAFHEDCTISIARRLVDFLDPQWLRIGGYWYPRGGIPIDVFYQTGPMPEGVWIPDQGVPPYRGRG

SEQ ID NO: 49412 - protein, 154 aa, Roseovarius halotolerans
  misc_feature (1)..(154): tr|A0A1X6YE29|A0A1X6YE29_9RHOB NADPH-dependent 7-cyano- 7-deazaguanine reductase OS=Roseovarius halotolerans OX =505353 GN=queF PE=3 SV=1
MSDDIYKDLKQLGGMAAMPQSPDEAELERVRNPQADVAYNVRFTAPEFTSLCPMTGQPDFAHLVIDYVPGEWLVESKSLKLFLGSFRNHGAFHEDCTVTIARRLADFLEPRWLRIGGYWYPRGGIPIDVFYQTGEMPSDVWIPDQGVAPYRGRG

SEQ ID NO: 49413 - protein, 154 aa, Roseovarius indicus
  misc_feature (1)..(154): tr|A0A0T5P381|A0A0T5P381_9RHOB NADPH-dependent 7-cyano- 7-deazaguanine reductase OS=Roseovarius indicus OX=5407 47 GN=queF PE=3 SV=1
MSDEIYKGLKQLGGATTMPQSPEEAELERVQNPQADVAYNVRFTAPEFTSLCPMTGQPDFAHLVIDYVPGEWLVESKSLKLFLGSFRNHGAFHEDCTVSIARRLVEFLEPQWLRIGGYWYPRGGIPIDVFYQTGEMPAGVWIPDQGVPPYRGRG

SEQ ID NO: 49414 - protein, 154 aa, Roseovarius litoreus
  misc_feature (1)..(154): tr|A0A1M7F416|A0A1M7F416_9RHOB NADPH-dependent 7-cyano- 7-deazaguanine reductase OS=Roseovarius litoreus OX=115 5722 GN=queF PE=3 SV=1
MSDNIYKDLKQLGGATVVPQRPEDAELERVANPQADVAYNVRFVAPEFTSLCPMTGQPDFAHLVIDYVPGAWLVESKSLKLYLGSFRNHGAFHEDCTISIARRLADFLDPQWLRIGGYWYPRGGIPIDVFYQTGPMPEGVWIPDQGVPPYRGRG

SEQ ID NO: 49415 - protein, 155 aa, Roseovarius lutimaris
  misc_feature (1)..(155): tr|A0A1I5FEC1|A0A1I5FEC1_9RHOB NADPH-dependent 7-cyano- 7-deazaguanine reductase OS=Roseovarius lutimaris OX=10 05928 GN=queF PE=3 SV=1
MSDETIYSNLKQLGGATFVPQNPQEAVLERVQNPQGDVAYNVRFTAPEFTSLCPMTGQPDFAHLVIDYVPGDWLVESKSLKLFLGSFRNHGAFHEDCTVSIARRLVDFLDPQWLRIGGYWYPRGGIPIDVFYQTGPMPEGVWIPDQGVPPYRGRG

SEQ ID NO: 49416 - protein, 155 aa, Roseovarius marisflavi
  misc_feature (1)..(155): tr|A0A1M6VNU8|A0A1M6VNU8_9RHOB NADPH-dependent 7-cyano- 7-deazaguanine reductase OS=Roseovarius marisflavi OX=1 054996 GN=queF PE=3 SV=1
MSDETIYSSLKQLGGATVVPQSPEEAILERVKNPQGDVAYNVRFTAPEFTSLCPMTGQPDFAHLMIDYVPGEWLVESKSLKLFLSSFRNHGAFHEDCTVSIARRLVDFLDPQWLRIGGYWYPRGGIPIDVFYQTGPMPVGVWVPDQGVPPYRGRG

SEQ ID NO: 49417 - protein, 154 aa, Roseovarius mucosus
  misc_feature (1)..(154): tr|A0A1V0RTS9|A0A1V0RTS9_9RHOB NADPH-dependent 7-cyano- 7-deazaguanine reductase OS=Roseovarius mucosus OX=2157 43 GN=queF PE=3 SV=1
MSENIYKDLKQLGGAAQIPQTPEEALLERVANPQADVQYNVRFTAPEFTSLCPMTGQPDFAHLVIDYVPGQWLVESKSLKLYLTSFRNHGAFHEDCTISIARRLVGFLEPEWLRIGGYWYPRGGIPIDVFWQTGPMPEGVWIPDQGVPPYRGRG

SEQ ID NO: 49418 - protein, 154 aa, Roseovarius mucosus
  misc_feature (1)..(154): tr|A0A0A0HMI7|A0A0A0HMI7_9RHOB NADPH-dependent 7-cyano- 7-deazaguanine reductase OS=Roseovarius mucosus DSM 170 69 OX=1288298 GN=queF PE=3 SV=1
MSENIYKDLKQLGGATVVPQSPEEAVLERVSNPQADVRYNVRFTAPEFTSLCPMTGQPDFAHLVIDYVPGKWLVESKSLKLYLTSFRNHGAFHEDCTISIARRLVEFLEPEWLRIGGYWYPRGGIPIDVFWQTGAMPDGVWIPDQGVPPYRGRG

SEQ ID NO: 49419 - protein, 154 aa, Roseovarius nanhaiticus
  misc_feature (1)..(154): tr|A0A1N7FP75|A0A1N7FP75_9RHOB NADPH-dependent 7-cyano- 7-deazaguanine reductase OS=Roseovarius nanhaiticus OX= 573024 GN=queF PE=3 SV=1
MSENIYQDLKQLGANTALPDDPDTAELERVKNPQADVDYNVRFVAPEFTSLCPMTGQPDFAHLVIDYVPGEWLVESKSLKLYLGSFRNHGAFHEDCTITIARRIAEFTEAKWLRIGGYWYPRGGIPIDVFYQTGEMPKGVWIPDQGVPPYRGRG

SEQ ID NO: 49420 - protein, 154 aa, Roseovarius nubinhibens
  misc_feature (1)..(154): tr|A3SN29|A3SN29_ROSNI NADPH-dependent 7-cyano-7-deazag uanine reductase OS=Roseovarius nubinhibens (strain ATC C BAA-591 / DSM 15170 / ISM) OX=89187 GN=queF PE=3 SV=1
MSDTIYSDLKQLGGATVLPANPDEAELERVQNPQADTAYNVRFTAPEFTSLCPMTGQPDFAHLVIDYVPGEWLVESKSLKLFLGAFRNHGAFHEDCTVSIGRRLAEFLAPQWLRIGGYWYPRGGIPIDVFWQTGPMPDSVWIPDQGVPPYRGRG

SEQ ID NO: 49421 - protein, 154 aa, Roseovarius nubinhibens; identical to SEQ ID NO: 49420
  misc_feature (1)..(154): tr|A0A348WIY0|A0A348WIY0_9RHOB NADPH-dependent 7-cyano- 7-deazaguanine reductase OS=Roseovarius nubinhibens OX= 314263 GN=queF PE=3 SV=1

SEQ ID NO: 49422 - protein, 154 aa, Roseovarius pacificus
  misc_feature (1)..(154): tr|A0A1M7DGH3|A0A1M7DGH3_9RHOB NADPH-dependent 7-cyano- 7-deazaguanine reductase OS=Roseovarius pacificus OX=33 7701 GN=queF PE=3 SV=1
MSENIYEGLKQLGGATEMPQSPEEAMLERVRNPQADVAYNVRFVAPEFTSLCPMTGQPDFAHLVIDYVPGEWLVESKSLKLFLGSFRNHGAFHEDCTVSIARRLAEFLEPQWLRIGGYWYPRGGIPIDVFYQTGPMPEGVWIPDQGVAPYRGRG

SEQ ID NO: 49423 - protein, 155 aa, Roseovarius sp.
  misc_feature (1)..(155): tr|A0A365TZ79|A0A365TZ79_9RHOB NADPH-dependent 7-cyano- 7-deazaguanine reductase OS=Roseovarius sp. TE539 OX=22 49812 GN=queF PE=3 SV=1
MSEENIYSNLKQLGGELRLPQSPDEAELERVPNPQADVAYNVRFIAPEFTSLCPMTGQPDFAHLVIDYVPGDWLVESKSLKLFLGAFRNHGAFHEDCTITIARRLADFLEPAWLRIGGYWYPRGGIPIDVFYQTGPMPEGVWIPDQGVPPYRGRG

SEQ ID NO: 49424 - protein, 154 aa, Roseovarius sp.; identical to SEQ ID NO: 45208
  misc_feature (1)..(154): tr|A0A246QVI2|A0A246QVI2_9RHOB NADPH-dependent 7-cyano- 7-deazaguanine reductase OS=Roseovarius sp. 22II1-1F6A OX=1317112 GN=queF PE=3 SV=1

SEQ ID NO: 49425 - protein, 154 aa, Roseovarius tolerans
  misc_feature (1)..(154): tr|A0A1H7XSW0|A0A1H7XSW0_9RHOB NADPH-dependent 7-cyano- 7-deazaguanine reductase OS=Roseovarius tolerans OX=740 31 GN=queF PE=3 SV=1
MSDDIYKDLKQLGGTTQVPQHPEEAVLERVSNPQADTVYNVRFTAPEFTSLCPMTGQPDFAHLVIDYVPGAWLVESKSLKLYLTSFRNHGAFHEDCTITIARRLVEFLDPQWLRIGGYWYPRGGIPIDVFWQTGPMPEGVWIPDQGVPPYRGRG

SEQ ID NO: 49426 - protein, 154 aa, Roseovarius tolerans
  misc_feature (1)..(154): tr|A0A0L6CUL1|A0A0L6CUL1_9RHOB NADPH-dependent 7-cyano- 7-deazaguanine reductase OS=Roseovarius tolerans OX=740 31 GN=queF PE=3 SV=1
MSDNIYKDLKQLGGTTQVPQHPEEAVLERVSNPQSDTVYNVRFTAPEFTSLCPMTGQPDFAHLVIDYVPGAWLVESKSLKLYLTSFRNHGAFHEDCTITIARRLVEFLDPQWLRIGGYWYPRGGIPIDVFWQTGPMPEGVWIPDQGVPPYRGRG

SEQ ID NO: 49427 - protein, 281 aa, Rouxiella badensis
  misc_feature (1)..(281): tr|A0A1X0WEQ7|A0A1X0WEQ7_9GAMM NADPH-dependent 7-cyano- 7-deazaguanine reductase OS=Rouxiella badensis OX=16463 77 GN=queF PE=3 SV=1
MSSYQDNPALSQLTLGKATPYRDQYDATLLQAVPRSMNREPLGLFPDSLPFHGADIWTMYELSWLNAKGLPQVAVGEISLQADSVNLIESKSFKLYLNSFNQTKFQDWDAVKMTLEKDLSACAQGSVTVSLRALHEIEGSPIGRFAGICIDAQDIEITDYGFSTDYLQDATSDKIVDETLVSHLLKSNCLITHQPDWGSVQIQYRGPAIDREALLRYLVSFRNHNEFHEQCVERIFNDLLRFCQPTRLAVYARYTRRGGLDINPWRANFLFEPTTARLVRQ

SEQ ID NO: 49428 - protein, 281 aa, Rouxiella silvae
  misc_feature (1)..(281): tr|A0A1X0W0I7|A0A1X0W0I7_9GAMM NADPH-dependent 7-cyano- 7-deazaguanine reductase OS=Rouxiella silvae OX=1646373 GN=queF PE=3 SV=1
MSSYQDNPALSQLTLGKATPYRDQYDASLLQAVPRSMNREPLGLYPDSLPFHGADIWTMYEISWLNAKGLPQVAVGEISLQADSINLIESKSFKLYLNSFNQTKFDSWNSVKQTLETDLAACANGSVIVSLQPLHALEGSPIGRFAGVCIDAQDIEISDYAFSTDYLLNSTSDKIVDETLVSHLLKSNCLITHQPDWGSVQIQYRGPAIDREALLRYLVSFRNHNEFHEQCVERIFNDILHFCQPTRLAVYARYTRRGGLDINPWRANFLFEPTTARLARQ

SEQ ID NO: 49429 - protein, 155 aa, Rubellimicrobium mesophilum
  misc_feature (1)..(155): tr|A0A017HRF7|A0A017HRF7_9RHOB NADPH-dependent 7-cyano- 7-deazaguanine reductase OS=Rubellimicrobium mesophilum DSM 19309 OX=442562 GN=queF PE=3 SV=1
MSQDSIYSGLTQLGQSTRIPATPEDAVLERVPNPQADVLYAVRFTAPEFTSLCPMTGQPDFAHLVIDYAPGDWLVESKSLKLFLTSFRNHGAFHEDCTVTIARRLVDLLAPKWLRIGGYWYPRGGIPIDVFYQTGPVPDGLWLPDQGVPSYRGRG

SEQ ID NO: 49430 - protein, 154 aa, Rubellimicrobium roseum
  misc_feature (1)..(154): tr|A0A5C4NQQ3|A0A5C4NQQ3_9RHOB NADPH-dependent 7-cyano- 7-deazaguanine reductase OS=Rubellimicrobium roseum OX= 687525 GN=queF PE=3 SV=1
MANDIYSGLTQLGSATRLPQNPEEAVLERVENPQKGTAYVVRFTAPEFTSLCPMTGQPDFAHLVIDYVPGDWLVESKSLKLFLGSFRNHGAFHEDCTVSVGKRLVDLLQPQWLRIGGYWYPRGGIPIDVFYQTGPLPEGVWLPDQGVPPYRGRG

SEQ ID NO: 49431 - protein, 155 aa, Rubellimicrobium roseum
  misc_feature (1)..(155): tr|A0A5C4NAP0|A0A5C4NAP0_9RHOB NADPH-dependent 7-cyano- 7-deazaguanine reductase OS=Rubellimicrobium roseum OX= 687525 GN=queF PE=3 SV=1
MSQDSIYSGLTQLGQATRLPQSPEEAILERVPNPQKDVAYTVRFTAPEFTSLCPMTGQPDFAHLVIDYVPGEWLVESKSLKLFLGSFRNHGAFHEDCTVSVARRLVDLLAPQWLRIGGYWYPRGGIPIDVFYQTGPAPQGVWLPDQGVPPYRGRG

SEQ ID NO: 49432 - protein, 155 aa, Rubellimicrobium sp.
  misc_feature (1)..(155): tr|A0A5C4MSK8|A0A5C4MSK8_9RHOB NADPH-dependent 7-cyano- 7-deazaguanine reductase OS=Rubellimicrobium sp. YIM 13 1921 OX=2585369 GN=queF PE=3 SV=1
MSHDDIYSGLRQLGAAIKLPQCPEEAVLERVLNPQKGVAYAVRFAAPEFTSLCPMTSQPDFAHLVIDYVPGEWLVDSKSLKLFLGSFRNHGAFHEDCTVTIARRLVDLLAPRWLRIGGYWYPRGGIPIDVFYQTGPVPEGVWIPDQGVPPYRGRG

SEQ ID NO: 49433 - protein, 146 aa, Rubidibacter lacunae
  misc_feature (1)..(146): tr|U5DF58|U5DF58_9CHRO NADPH-dependent 7-cyano-7-deazag uanine reductase OS=Rubidibacter lacunae KORDI 51-2 OX= 582515 GN=queF PE=3 SV=1
MTQTPPPASASANPPTEVKYGERAIAEGELLTFPNPRPGRRYTIDISLPEFTCKCPFSGYPDFATIYLSYVPDERVVELKAIKLYINGYRDRHISHEESVNQILDDLVAACDPLEMTVEGDFSPRGNVHTVVKVRHVKPLSDGTGM

SEQ ID NO: 49434 - protein, 128 aa, Rubinisphaera brasiliensis
  misc_feature (1)..(128): tr|F0SLE1|F0SLE1_RUBBR NADPH-dependent 7-cyano-7-deazag uanine reductase OS=Rubinisphaera brasiliensis (strain ATCC 49424 / DSM 5305 / JCM 21570 / NBRC 103401 / IFAM 1448) OX=756272 GN=queF PE=3 SV=1
MTEPSRDLLETFPNPHPQRDYVIETVCPEFTSVCPKTGQPDYGTLTITYVPDHVCFELKSLKMYLQQYRNHGAFYEQVTNDILDDLVAVTKPRMLELRAEFTARGGIRTNVIASYPDDAWEEDEAGEE

SEQ ID NO: 49435 - protein, 122 aa, Rubinisphaera sp.
  misc_feature (1)..(122): tr|A0A2E9VS64|A0A2E9VS64_9PLAN NADPH-dependent 7-cyano- 7-deazaguanine reductase OS=Rubinisphaera sp. OX=202485 7 GN=queF PE=3 SV=1
MSEPSRDLLETFENPNPDRDYVIETICPEFTSVCPKTGQPDFGTLTIAYIPDEVCFELKSLKMYLQQYRNHGAFYESVTNKILDDLVAVTQPRSMEIRAEFTPRGGLRTNVIVSYPDENWDE

SEQ ID NO: 49436 - protein, 152 aa, Rubricoccus marinus
  misc_feature (1)..(152): tr|A0A259U3S3|A0A259U3S3_9BACT NADPH-dependent 7-cyano- 7-deazaguanine reductase OS=Rubricoccus marinus OX=7168 17 GN=BSZ36_08175 PE=3 SV=1
MARYGIKPEGRVATFLPPEVRQHEIHRLPYEHAARQRVSYETEPGEFTALCPFSGLPDSGSVHIEYVPGEWLLELKSLKYYLMSWRHIGAAQEDITAFMYEDLARHLAPFDQLVVTTDYTVRGGIHTVCRVDSREQASGEAAASDDATAASS

SEQ ID NO: 49437 - protein, 146 aa, Rubrimonas cliftonensis
  misc_feature (1)..(146): tr|A0A1H4A4Q2|A0A1H4A4Q2_9RHOB NADPH-dependent 7-cyano- 7-deazaguanine reductase OS=Rubrimonas cliftonensis OX= 89524 GN=queF PE=3 SV=1
MAQLGREAGVPASPDAARLERVPNPHPDALYVARFTCPEFTSLCPVTGQPDFAHLVIDYVPDAWLVESKSLKLYLTSFRNHGAFHEDCTVGVGLRLVEFLAPRWLRIAGYWYPRGGIPIDVFWQTGAPLEGVWLPETGVAVYRGRG

SEQ ID NO: 49438 - protein, 126 aa, Rubripirellula obstinata
  misc_feature (1)..(126): tr|A0A5B1CIC3|A0A5B1CIC3_9PLAN NADPH-dependent 7-cyano- 7-deazaguanine reductase OS=Rubripirellula obstinata OX =406547 GN=queF PE=3 SV=1
MSDGGDGTGGDFRDTLEVFDNPNPARNFTIEHHCPEFTSVCPKTGQPDYGTIVFTYVPDQVCVELKSLKMYLQRFRNEGIFYEAVTNRIMDDFVAVVKPRSATVESRWTPRGGLHSNIIIRHPDES

SEQ ID NO: 49439 - protein, 190 aa, Rubrivirga marina
  misc_feature (1)..(190): tr|A0A271IWC3|A0A271IWC3_9BACT NADPH-dependent 7-cyano- 7-deazaguanine reductase OS=Rubrivirga marina OX=119602 4 GN=BSZ37_01615 PE=3 SV=1
MADTPTAADRLDDFHQRALDHTRASLAHMARYGIEPEGRVALFLPPDARQQEIHRMPYEHAARQVVTYTTEPGEFTALCPFSGLPDSGTVRIEYVPGSWLLELKSLKYYLMSWRHVGAAQEDITALVFEDLMRHLDDPHRLVVTTDYTVRGGIHTVCSVDSRDQPERNSAAVGSVGLGAEAGPAGDGATS

SEQ ID NO: 49440 - protein, 178 aa, Rubrivirga sp.
  misc_feature (1)..(178): tr|A0A271JED7|A0A271JED7_9BACT NADPH-dependent 7-cyano- 7-deazaguanine reductase OS=Rubrivirga sp. SAORIC476 OX =1961794 GN=B1759_08030 PE=3 SV=1
MADTPTAADRLDDFHQRALDHTKASLAHMARYGIEPEGRVALFLPPDARQQDIHRMPYTHAARQVVTYTTEPGEFTALCPFSGLPDSGTVRIEYVPGSWLLELKSLKYYLMSWRHIGAAQEDITALLFEDLMRHLGDPHHLVVTTDYTVRGGIHTVCAVDSRDQPAGLGAEAGGDGAA

SEQ ID NO: 49441 - protein, 147 aa, Rubrivivax benzoatilyticus
  misc_feature (1)..(147): tr|F3LPR9|F3LPR9_9BURK NADPH-dependent 7-cyano-7-deazag uanine reductase OS=Rubrivivax benzoatilyticus JA2 = AT CC BAA-35 OX=987059 GN=queF PE=3 SV=1
MARTPARQRTAPAVPPTQPSKELQVFPNPAPERDYVIRFDVPEFTCLCPLTGQPDFAHFTIEIVPDQLCVELKSLKLYFWSYRNEGAFHEKVTNTILEDLVKAIQPRFLRIHGNWFVRGGIGTHVTVEHRAKGWKPAAPVVLPAPQA

SEQ ID NO: 49442 - protein, 134 aa, Rubrivivax gelatinosus
  misc_feature (1)..(134): tr|I0HRW3|I0HRW3_RUBGI NADPH-dependent 7-cyano-7-deazag uanine reductase OS=Rubrivivax gelatinosus (strain NBRC 100245 / IL144) OX=983917 GN=queF PE=3 SV=1
MPPTQPSKELQVFPNPAPERDYVIRFDVPEFTCLCPLTGQPDFAHFTIEIVPDKLCVELKSLKLYFWSYRNEGAFHEKVTNTILEDLVKAIKPRFLRIHGNWFVRGGIGTHVTVEHRAKGWKPAAPVVLPAPQA

SEQ ID NO: 49443 - protein, 147 aa, Rubrivivax gelatinosus
  misc_feature (1)..(147): tr|A0A4R2MC25|A0A4R2MC25_RUBGE NADPH-dependent 7-cyano- 7-deazaguanine reductase OS=Rubrivivax gelatinosus OX=2 8068 GN=queF PE=3 SV=1
MARTPARQRTAPAVPPTQPSKELQVFPNPAPERDYVIRFDVPEFTCLCPLTGQPDFAHFTIEIVADKLCVELKSLKLYFWSYRDEGAFHEKVTNTILEDIVKAIQPRFLRIHGNWFVRGGIGTHVTVEHRAKGWKPAAPVVLPAPQA

SEQ ID NO: 49444 - protein, 147 aa, Rubrivivax sp.
  misc_feature (1)..(147): tr|A0A1E4IEW3|A0A1E4IEW3_9BURK NADPH-dependent 7-cyano- 7-deazaguanine reductase OS=Rubrivivax sp. SCN 71-131 O X=1660138 GN=queF PE=3 SV=1
MPAKTPPQRPAPSRPPSAPSRELQAFPNPAPQRDYVIRFDVPEFTCLCPLTGQPDFAHFRIEIVPDRFCVETKSLKQYFWSYRNEGAFHEKVTNTIVDDLVAAIAPRFIRIHADWFVRGGIRTFVSVEQRKRGWKPQPAVDLSAFPT

SEQ ID NO: 49445 - protein, 172 aa, Rubrivivax sp.
  misc_feature (1)..(172): tr|A0A519FWE1|A0A519FWE1_9BURK NADPH-dependent 7-cyano- 7-deazaguanine reductase OS=Rubrivivax sp. OX=50259 GN= queF PE=3 SV=1
MAKKAPSARPVKSAPESAAKDAVAVGKRVKPATPPSAPSRQLDVFPNPAPQRDYVIQFQIPEFTCFCPLTGQPDFAHFTIECIADKLCIELKSLKMYMWSYRNDGAFHEKVTNTILDDFVKAIQPRYLRITAKWYVRGGIYTNVVVEHRQKGWKPLPKVDLPQHSAETGLLG

SEQ ID NO: 49446 - protein, 154 aa, Ruegeria atlantica
  misc_feature (1)..(154): tr|A0A0P1ECR7|A0A0P1ECR7_9RHOB NADPH-dependent 7-cyano- 7-deazaguanine reductase OS=Ruegeria atlantica OX=81569 GN=queF PE=3 SV=1
MTESIYSNLTQLGGDTKMPASPEEAVLERVQNPQADVDYNVRFTAPEFTSLCPMTGQPDFAHLVIDYVPDQWLVESKALKLFLGSFRNHGAFHEDCTISIARRLQEFLEPRWLRIGGYWYPRGGIPIDVFWQTGPMPEGVWIPDQGVPPYRGRG

SEQ ID NO: 49447 - protein, 157 aa, Ruegeria atlantica
  misc_feature (1)..(157): tr|A0A0P1E3K1|A0A0P1E3K1_9RHOB NADPH-dependent 7-cyano- 7-deazaguanine reductase OS=Ruegeria atlantica OX=81569 GN=queF PE=3 SV=1
MTDSIYSNLTQLGGDTKMPASPEEAVLERVQNPQADVDYSERFTAPEFTSLCPMTGQPDFAHLVIDYVPDQWLVESKALKLFLGSFRNHGAFHEDCTISIARRLQEFLEPRWLRIGGYRYPRGGIPIDVFWQTGPTPEGVWIPDQGVPPYRGRGCPR

SEQ ID NO: 49448 - protein, 153 aa, Ruegeria denitrificans
  misc_feature (1)..(153): tr|A0A0P1IJW9|A0A0P1IJW9_9RHOB NADPH-dependent 7-cyano- 7-deazaguanine reductase OS=Ruegeria denitrificans OX=1 715692 GN=queF PE=3 SV=1
METIYSDLTQLGGKTELPTSPEAAELERVQNPQADIDYCVRFTAPEFTSLCPMTGQPDFAHLVIDYVPDDWLVESKSLKLFLGSFRNHGAFHEDCTVSIARRLVEFLSPRWLRIGGYWYPRGGIPIDVFWQTGATPEQVWIPDQGVPPYRGRG

SEQ ID NO: 49449 - protein, 155 aa, Ruegeria intermedia
  misc_feature (1)..(155): tr|A0A1M5AWE1|A0A1M5AWE1_9RHOB NADPH-dependent 7-cyano- 7-deazaguanine reductase OS=Ruegeria intermedia OX=9961 15 GN=queF PE=3 SV=1
MANQDIYANLTQLGSKTDLPNSPEEAVLERVPNPQAGTDYAVRFTAPEFTSLCPLTAQPDFAHIVIDYVPGDWLVESKSLKLFLGAFRNHGAFHEDCSVTIGKRLEEVLEPKWLRVGAYWYPRGGIPIDVFYQTGPELPGVWIPDQGVPTYRGRG

SEQ ID NO: 49450 - protein, 154 aa, Ruegeria litorea
  misc_feature (1)..(154): tr|A0A1Y5TNJ5|A0A1Y5TNJ5_9RHOB NADPH-dependent 7-cyano- 7-deazaguanine reductase OS=Ruegeria litorea R37 OX=120 0284 GN=queF PE=3 SV=1
MTDSIYSDLKQLGGATVVPTNPDEAELERVKNPQADVAYNVRFTAPEFTSLCPMTGQPDFAHLVIDYVPGEWLVESKSLKLFLGSFRNHGAFHEDCTVSIGRRLAEFLSPQWLRIGGYWYPRGGIPIDVFWQTGPMPESVWIPDQGVPPYRGRG

SEQ ID NO: 49451 - protein, 155 aa, Ruegeria marina
  misc_feature (1)..(155): tr|A0A1G7BYB9|A0A1G7BYB9_9RHOB NADPH-dependent 7-cyano- 7-deazaguanine reductase OS=Ruegeria marina OX=639004 G N=queF PE=3 SV=1
MVNQDIYANLTQLGGKTELPNSPEEAVLEKVPNPQAGTDYAVRFTAPEFTSLCPLTAQPDFAHIVIDYVPGDWLVESKSLKLYLGSFRNHGAFHEDCSVSIGKRLVETLTPKWLRVGAYWYPRGGMPIDVFYQTGPELPGVWIPDQGVPTYRGRG

SEQ ID NO: 49452 - protein, 155 aa, Ruegeria marisrubri
  misc_feature (1)..(155): tr|A0A0X3TQX2|A0A0X3TQX2_9RHOB NADPH-dependent 7-cyano- 7-deazaguanine reductase OS=Ruegeria marisrubri OX=1685 379 GN=queF PE=3 SV=1
MANQDIYANLTQLGSKTDLPNSPEEAVLERVPNPQAGTDYAVRFTAPEFTSLCPLTAQPDFAHIVIDYVPGDWLVESKSLKLFLGSFRNHGAFHEDCSVTIGKRLEEVLEPKWLRVGAYWYPRGGIPIDVFYQTGPELPGVWIPDQGVPTYRGRG

SEQ ID NO: 49453 - protein, 154 aa, Ruegeria mediterranea
  misc_feature (1)..(154): tr|A0A2R8C6J8|A0A2R8C6J8_9RHOB NADPH-dependent 7-cyano- 7-deazaguanine reductase OS=Ruegeria mediterranea M17 O X=1200281 GN=queF PE=3 SV=1
MTDSIYSDLKQLGGATVMPTNPDEAELERVKNPQAEVAYNVRFTAPEFTSLCPMTGQPDFAHLVIDYVPGEWLVESKSIKLFLGSFRNHGAFHEDCTVSIGRRLAEFLSPQWLRIGGYWYPRGGIPIDVFWQTGPMPESVWIPDQGVPPYRGRG

SEQ ID NO: 49454 - protein, 155 aa, Ruegeria pomeroyi
  misc_feature (1)..(155): sp|Q5LM10|QUEF_RUEPO NADPH-dependent 7-cyano-7-deazagua nine reductase OS=Ruegeria pomeroyi (strain ATCC 700808 / DSM 15171 / DSS-3) OX=246200 GN=queF PE=3 SV=1
MANQDIYANLTQLGGKTELPNSPEEAVLEKVPNPQAGTDYAVRFTAPEFTSLCPLTAQPDFAHIVIDYVPGDWLVESKSLKLYLGSFRNHGAFHEDCSVSIGKRLVELLAPKWLRVGAYWYPRGGIPIDVFYQTGPELPGVWIPDQGVPTYRGRG

SEQ ID NO: 49455 - protein, 154 aa, Ruegeria sp.
  misc_feature (1)..(154): tr|A0A366XDF4|A0A366XDF4_9RHOB NADPH-dependent 7-cyano- 7-deazaguanine reductase OS=Ruegeria sp. A3M17 OX=22672 29 GN=queF PE=3 SV=1
MTDSIYSNLTQLGGDTRMPASPEEAVLERVQNPQADVDYNVRFTAPEFTSLCPMTGQPDFAHLVIDYVPDQWLVESKALKLFLGSFRNHGAFHEDCTISIARRLQEFLEPRWLRIGGYWYPRGGIPIDVFWQTGPTPEGVWIPDQGVPPYRGRG

SEQ ID NO: 49456 - protein, 154 aa, Ruegeria sp.
  misc_feature (1)..(154): sp|Q1GEZ0|QUEF_RUEST NADPH-dependent 7-cyano-7-deazagua nine reductase OS=Ruegeria sp. (strain TM1040) OX=29241 4 GN=queF PE=3 SV=1
MSEDIYQNLKQLGGETRIPASPEEAELERVANPQADVAYNVRFTAPEFTSLCPMTGQPDFAHLVIDYVPGPWLVESKSLKLFLTSFRNHGAFHEDCTISIARRLVDFLDPQWLRIGGYWYPRGGIPIDVFWQSGTIPEGVWIPDQGVPPYRGRG

SEQ ID NO: 49457 - protein, 277 aa, Rugamonas rubra
  misc_feature (1)..(277): tr|A0A1I4S2I8|A0A1I4S2I8_9GAMM NADPH-dependent 7-cyano- 7-deazaguanine reductase OS=Rugamonas rubra OX=758825 G N=queF PE=3 SV=1
MTNTVDLSPLGKTSAYRTDYAPELLFPIPRQGKRDELGLSGTLPFFGVDIWNAYEISWLNGRGKPQVAIARITVPADSPNIVESKSFKLYLNSFNQTRLDSAEALKALLQKDLSQGFGAAVHIALSLPEEFERLKMGELDGLLLDRLDIEVEHYHPAPELLKANFDNGPVEEKLVSHLLKSNCLVTGQPDWASVQIHYYGPQIEQESLLRYLIGFREHNEFHEQCVERIFTDILRQCAPQQLAVYARYTRRGGLDINPWRSNFSTATPPPNLRGARQ

SEQ ID NO: 49458 - protein, 148 aa, Rugosibacter aromaticivorans
  misc_feature (1)..(148): tr|A0A0C5J7I9|A0A0C5J7I9_9RHOO NADPH-dependent 7-cyano- 7-deazaguanine reductase OS=Rugosibacter aromaticivoran s OX=1565605 GN=queF PE=3 SV=1
MTSKPSKKLETFPNPAPHRDYQIHMEIPEFTCLCPKTGQPDFAVLTLDYIADKTCVELKSLKLYMWSFRDEGHFHEDVTNRILDDLASAVKPRYMRLTARFYVRGGVFTTVVAEHRKKGWKPPVKVELADLATLPNANTRGNSLATAA

SEQ ID NO: 49459 - protein, 130 aa, Rugosibacter sp.
  misc_feature (1)..(130): tr|A0A522Y4K3|A0A522Y4K3_9RHOO NADPH-dependent 7-cyano- 7-deazaguanine reductase (Fragment) OS=Rugosibacter sp. OX=1914450 GN=queF PE=3 SV=1
MTSKPSKKLETFPNPAPHRDYQIHMEIPEFTCLCPKTGQPDFAVLTLDYIADKTCVELKSLKLYMWSFRDEGHFHEDVTNRILDDLASAVKPRYMRLTARFYVRGGVFTTVVAEHRKKGWKPPVKVELAD

SEQ ID NO: 49460 - protein, 149 aa, Rugosibacter sp.
  misc_feature (1)..(149): tr|A0A521KCW7|A0A521KCW7_9RHOO NADPH-dependent 7-cyano- 7-deazaguanine reductase OS=Rugosibacter sp. OX=1914450 GN=queF PE=3 SV=1
MNKQAAKQITSQPSKTLETFPNPAAHRDYQIHMEIPEFTCLCPKTGQPDFATLTLDYIADKVCVELKSLKLYMWSFRDEGHFHEDVTNRILDDLASAVKPRYMRLTARFYVRGGVFTTVVAEHRKKGWQPPVKIELANLATLPNANTRG

SEQ ID NO: 49461 - protein, 43 aa, Ruminococcaceae bacterium
  misc_feature (1)..(43): tr|A0A3D0NR40|A0A3D0NR40_9FIRM NADPH-dependent 7-cyano- 7-deazaguanine reductase QueF (Fragment) OS=Ruminococca ceae bacterium OX=1898205 GN=DEO95_05615 PE=4 SV=1
MEKTRENENLTLLGNKNTRYSFDYTPDVLETFENKHKENDYFV

SEQ ID NO: 49462 - protein, 165 aa, Ruminococcaceae bacterium
  misc_feature (1)..(165): tr|A0A1G4W4C7|A0A1G4W4C7_9FIRM NADPH-dependent 7-cyano- 7-deazaguanine reductase OS=Ruminococcaceae bacterium P 7 OX=1200751 GN=queF PE=3 SV=1
MNGRTKKETESLTLLGNKNVQYATDYAPEVLETFPNKHLGNDYFVKFNCPEFTSLCPITGQPDFATIYISYIPDKLMVESKSLKLYLFSFRNHGDFHEDCVNIIMKDLIALMQPKYIEVWGKFLPRGGLSIDPYCNYGKKDTKWENLAWERLSKHDLNPETVNNR

SEQ ID NO: 49463 - protein, 165 aa, Ruminococcus albus
  misc_feature (1)..(165): tr|A0A011V0H3|A0A011V0H3_RUMAL NADPH-dependent 7-cyano- 7-deazaguanine reductase OS=Ruminococcus albus SY3 OX=1 341156 GN=queF PE=3 SV=1
MAGRTENERGSISLLGNNNTKYSADYAPEVLETFPNKHPDRDYFVKFNCPEFTSLCPITGQPDFATIYISYIPAERMVESKSLKLYLFSFRNHGDFHEDCVNIIMNDLIKLMEPKYIEVWGKFLPRGGISIDPYCNYGIKGTKWEELAWQRLAQHDMYPELVNNR

SEQ ID NO: 49464 - protein, 165 aa, Ruminococcus albus; identical to SEQ ID NO: 49463
  misc_feature (1)..(165): tr|A0A1H7GLF9|A0A1H7GLF9_RUMAL NADPH-dependent 7-cyano- 7-deazaguanine reductase OS=Ruminococcus albus OX=1264 GN=queF PE=3 SV=1

SEQ ID NO: 49465 - protein, 165 aa, Ruminococcus callidus
  misc_feature (1)..(165): tr|U2LNS7|U2LNS7_9FIRM NADPH-dependent 7-cyano-7-deazag uanine reductase OS=Ruminococcus callidus ATCC 27760 OX =411473 GN=queF PE=3 SV=1
MAGRSKEETGDITLLGNQNTKYASDYAPEVLETFPNKHPDRDYFVKFNCPEFTSLCPITGQPDFATLYISYVPREIMVESKSLKLYLFSFRNHGDFHEDCVNIIMNDLIRLMEPAYIEVWGKFLPRGGISIDPYCNYGRPGTKWEQVAWDRLTHHDMFPEKVDNR

SEQ ID NO: 49466 - protein, 165 aa, Ruminococcus flavefaciens
  misc_feature (1)..(165): tr|A0A315Y2V2|A0A315Y2V2_RUMFL NADPH-dependent 7-cyano- 7-deazaguanine reductase OS=Ruminococcus flavefaciens O X=1265 GN=queF PE=3 SV=1
MSGRTENEKGSITLLGNNNTKYSSDYDPSVLETFPNKHPDNDYFVKFNCPEFTSLCPITGQPDFASIYISYIPGERMVESKSLKLYLFSFRNHGDFHEDCVNIIMKDLIKLMEPKYIEVWGKFLPRGGISIDPYCNYGMAGTKWEQLAWDRLAHHDMYPESINNR

SEQ ID NO: 49467 - protein, 165 aa, Ruminococcus flavefaciens
  misc_feature (1)..(165): tr|A0A1H6L1I1|A0A1H6L1I1_RUMFL NADPH-dependent 7-cyano- 7-deazaguanine reductase OS=Ruminococcus flavefaciens O X=1265 GN=queF PE=3 SV=1
MSGRSENEKGSITLLGNNNTKYSSDYDPSVLETFPNKHPDNDYFVKFNCPEFTSLCPITGQPDFAAIYISYIPDKVMVESKSLKLYLFSFRNHGDFHEDCVNIIMKDLIKLMSPKYIEVWGKFLPRGGISIDPYCNYGKPGTKWEELAWDRLSHHDLYPESINNR

SEQ ID NO: 49468 - protein, 160 aa, Ruminococcus lactaris
  misc_feature (1)..(160): tr|B5CRR1|B5CRR1_9FIRM NADPH-dependent 7-cyano-7-deazag uanine reductase OS=Ruminococcus lactaris ATCC 29176 OX =471875 GN=queF PE=3 SV=1
MREKENLTLLGNQQNNYETDYNPDLLETFVNKHPENDYFVKFNCPEFTSLCPITGQPDFANIIISYVPGERMVESKSLKLYLFSFRNHGDFHEDCVNVIMKDLIKLMEPKYIEVWGKFTPRGGISIDPYCNYGKPGTKWEDVAFNRMANHDMYPEKVDNR

SEQ ID NO: 49469 - protein, 160 aa, Ruminococcus lactaris; identical to SEQ ID NO: 49468
  misc_feature (1)..(160): tr|A0A3E4LHA1|A0A3E4LHA1_9FIRM NADPH-dependent 7-cyano- 7-deazaguanine reductase OS=Ruminococcus lactaris OX=46 228 GN=queF PE=3 SV=1

SEQ ID NO: 49470 - protein, 164 aa, Ruminococcus sp.
  misc_feature (1)..(164): tr|A0A417KAR5|A0A417KAR5_9FIRM NADPH-dependent 7-cyano- 7-deazaguanine reductase OS=Ruminococcus sp. AM26-12LB OX=2293190 GN=queF PE=3 SV=1
MSRENLEKEGITLLGNQKVKYPDNYAPEVLETFLNKHPDNDYFVKFNCPEFTSLCPITGQPDFATITISYVPGEKMVESKSLKLYLFSFRNHGDFHEDCVNIIMKDLIRLMDPKYIEVWGKFTPRGGISIDPYCNYGKAGTRWEEIAWKRLAEHDMYPEKIDNR

SEQ ID NO: 49471 - protein, 160 aa, Ruminococcus sp.
  misc_feature (1)..(160): tr|A0A373SN76|A0A373SN76_9FIRM NADPH-dependent 7-cyano- 7-deazaguanine reductase OS=Ruminococcus sp. AF25-17 OX =2293164 GN=queF PE=3 SV=1
MREKENLTLLGNQQTKYRMDYDPSVLEAFQNKHPENDYFVKFNCPEFTSLCPITGQPDFATITISYVPDERLVESKSLKLYLFSFRNHGDFHEDVINIIMKDLVKLLEPKYIEVWGKFLPRGGLSIDPYCNYGKPGTNWEQVAWNRMSNHDMFPEKIDNR

SEQ ID NO: 49472 - protein, 160 aa, [Ruminococcus] torques
  misc_feature (1)..(160): tr|D4LZK9|D4LZK9_9FIRM NADPH-dependent 7-cyano-7-deazag uanine reductase OS=[Ruminococcus] torques L2-14 OX=657 313 GN=queF PE=3 SV=1
MREKENLTLLGNQQTEYRMDYDPSVLEAFQNKHPENDYFVKFNCPEFTSLCPITGQPDFATITISYVPDERLVESKSLKLYLFSFRNHGDFHEDVINIIMKDLVKLLEPKYIEVWGKFLPRGGLSIDPYCNYGKPGTNWEQVAWNRMSNHDMFPEKIDNR

SEQ ID NO: 49473 - protein, 160 aa, [Ruminococcus] torques; identical to SEQ ID NO: 49472
  misc_feature (1)..(160): tr|A0A174YR88|A0A174YR88_9FIRM NADPH-dependent 7-cyano- 7-deazaguanine reductase OS=[Ruminococcus] torques OX=3 3039 GN=queF PE=3 SV=1

SEQ ID NO: 49474 - protein, 166 aa, Rummeliibacillus sp.
  misc_feature (1)..(166): tr|A0A3N5ZS11|A0A3N5ZS11_9BACL NADPH-dependent 7-cyano- 7-deazaguanine reductase OS=Rummeliibacillus sp. TYF005 OX=2058214 GN=queF PE=3 SV=1
MSGRTNEQGLKDLSLLGNQNTKYLYEYAPEVLEAVDNLHTQNDFFVKFNCPEFTSLCPMTGQPDFATIYISFIPDKKLVESKSLKLYLFSFRNHGDFHEDCVNIIMKDLIKLLDPRYIEVWGKFTPRGGLSIDPWCNYGRPGTKYEKMAEHRLLNHDLYPEKVDNR

SEQ ID NO: 49475 - protein, 128 aa, Ruthia magnifica
  misc_feature (1)..(128): sp|A1AWC8|QUEF_RUTMC NADPH-dependent 7-cyano-7-deazagua nine reductase OS=Ruthia magnifica subsp. Calyptogena m agnifica OX=413404 GN=queF PE=3 SV=1
MSYQPNKVLEVFDNPKIERDFIIQINMPEFTCLCPKTGQPDFATLHFAYIADKACIELKSLKMYIWLYRNEGAFHEAVTNQILDDLVQVSNPRFIRLKAIFNIRGGVYTTIITEHKQKNWTPKAKVDL

SEQ ID NO: 49476 - protein, 165 aa, Saccharibacillus sp.
  misc_feature (1)..(165): tr|A0A4Y6UX20|A0A4Y6UX20_9BACL NADPH-dependent 7-cyano- 7-deazaguanine reductase OS=Saccharibacillus sp. ATSA2 OX=2583377 GN=queF PE=3 SV=1
MSHSRQDGLEDLTLLGNQGTTYTFEYDPGILESFDNKHEYRDYFVKFNCPEFTSLCPITGQPDFATIYISYIPDVKMVESKSLKLYLFSFRNHGDFHEDCMNIIMNDLIKLMDPRYIEVWGKFTPRGGISIDPYTNYGKPGTKYEEMAWNRLTNHDLYPEKVDNR

SEQ ID NO: 49477 - protein, 165 aa, Saccharibacillus sp.
  misc_feature (1)..(165): tr|A0A254NSI5|A0A254NSI5_9BACL NADPH-dependent 7-cyano- 7-deazaguanine reductase OS=Saccharibacillus sp. O23 OX =2009338 GN=queF PE=3 SV=1
MSHSRQDGLEDLTLLGNQGTKYTFEYDPGILESFDNKHAYRDYFVKFNCPEFTSLCPITGQPDFATIYISYIPDVKMVESKSLKLYLFSFRNHGDFHEDCMNIIMNDLIELMDPRYIEVWGKFTPRGGISIDPYTNYGKPGTKYEEMAFNRLTNHDLYPEKVDNR

SEQ ID NO: 49478 - protein, 162 aa, Saccharibacter sp.; identical to SEQ ID NO: 48220
  misc_feature (1)..(162): tr|A0A060QB74|A0A060QB74_9PROT NADPH-dependent 7-cyano- 7-deazaguanine reductase OS=Saccharibacter sp. AM169 OX =1343158 GN=queF PE=3 SV=1

SEQ ID NO: 49479 - protein, 292 aa, Saccharicrinis carchari
  misc_feature (1)..(292): tr|A0A521B8V2|A0A521B8V2_9BACT 7-cyano-7-deazaguanine r eductase OS=Saccharicrinis carchari OX=1168039 GN=SAMN0 6265379_101776 PE=4 SV=1
MNSIESKVLGKQISHPRAYAPEILVAVPRKLNRQQYHISEQAIPFVGVDAWHAYELGFLTKKGLPVTGILKIVYVCNSQFLVESKSLKLYLNSFNMGRYGDNKKEGITQVLQTIKSDLSQLMQTEIELSFHTEYARHTYDFNDYVLLEDEPEADQIIFDTFKENEKLLISHKASETNELKVATNLLRSNCKITHQPDWGSAFIHIKSQHKINRMALLKYLVSIRDENHFHEEICEMLYKRLLDRFEPEALMVACLYTRRGGIDICPVRANKATYLPQNIIQAKLLTRQAFRQ

SEQ ID NO: 49480 - protein, 292 aa, Saccharicrinis fermentans
  misc_feature (1)..(292): tr|W7YJC9|W7YJC9_9BACT NADPH-dependent 7-cyano-7-deazag uanine reductase OS=Saccharicrinis fermentans DSM 9555 = JCM 21142 OX=869213 GN=JCM21142_93313 PE=4 SV=1
MNPIEGKVLGKQMSHPRNYAPEILVAVPRSLNREQYGMNACELPFVGVDAWHAYELGFLTEKGLPVVGVLKLVYACDNESLVESKSLKLYLNSFNMGRYGENREAGIAQVLKTIRRDLSELLKTTVEVSFHNAHNSGIYDFDGFGLLEEMPEADSALFEKFKEDERLLEAVPTQQSCELKVSTHLLRSNCKITHQPDWGSAFIHLKTKYEIDRISLLRYLVSIRDENHFHEEICEMLYKRLVDKFDPEILMVACLYTRRGGIDICPVRANKKEYLPRNIIQSKIFTSPAFRQ

SEQ ID NO: 49481 - protein, 268 aa, Saccharophagus degradans
  misc_feature (1)..(268): sp|Q21LJ5|QUEF_SACD2 NADPH-dependent 7-cyano-7-deazagua nine reductase OS=Saccharophagus degradans (strain 2-40 / ATCC 43961 / DSM 17024) OX=203122 GN=queF PE=3 SV=1
MSSIELGKQAEYPEQYSPDCLEPIARSLSRSGLGLNASALPFTGLDVWTGYELSWLDLSGKPQVAIGYFEFDAKTDAIVESKSFKYYLNSFNQTRFESWAAVQTLMQQDLANASGGDVNVRLEPLSAVSPLETPAGQCIDDCPLEAAVYTPDAALLKVEQGEVSEQLFSHLLKSNCPVTGQPDWATVWVSYRGNKITPESLLAYVVSYRQHQDFHENCVEKIFTDIMAQCAPVELSVYARYTRRGGLDINPFRTNCGAALPGWRIVRQ

SEQ ID NO: 49482 - protein, 276 aa, Saccharospirillum sp.
  misc_feature (1)..(276): tr|A0A2T6E761|A0A2T6E761_9GAMM NADPH-dependent 7-cyano- 7-deazaguanine reductase OS=Saccharospirillum sp. MSK14 -1 OX=1897632 GN=queF PE=3 SV=1
MSTPEHSPLGKTSAYIAEYDPTLLFPIERQGKRDEIGIDGDELPFAGVDIWNAYELSWLNPKGKPVVALGEFFIPAQSPRLIESKSFKLYLNSFNQSHFASVREVAETMTADLSKAAGADVRVTLVPLGQMGHSADVFGLPGENIDDLDIETDQYQTDPGLLATVPGEPVHEVLNSHLLKSNCLVTGQPDWGSVVIDYRGPKLDRAALLKYLISFRQHNEFHEQCVERIFQDLQRHCGTEQLTVYARYVRRGGLDINPYRSNDPGFEADNRRLARQ

SEQ ID NO: 49483 - protein, 163 aa, Salibacterium halotolerans
  misc_feature (1)..(163): tr|A0A1I5T494|A0A1I5T494_9BACI NADPH-dependent 7-cyano- 7-deazaguanine reductase OS=Salibacterium halotolerans OX=1884432 GN=queF PE=3 SV=1
MPERNDIENLSHLGQEETSYTFHYDSSLLETFENGHPNRDYFVKFNCPEFTTLCPKTGQPDFAALYISYIPEVHMVESKSLKLYLFSFRNHGGFHEDAINTIVNDLVELMNPRYLEVLGRFTPRGGISIDPYANYGRPGTKYEQMAETRLLYHDMYPENINNR

SEQ ID NO: 49484 - protein, 163 aa, Salibacterium qingdaonense
  misc_feature (1)..(163): tr|A0A1I4IGI0|A0A1I4IGI0_9BACI NADPH-dependent 7-cyano- 7-deazaguanine reductase OS=Salibacterium qingdaonense OX=266892 GN=queF PE=3 SV=1
MPERNDIENLSHLGQEETSYTFHYDPSLLETFENGHPNRDYFVKFNCPEFTTLCPKTGQPDFAALYISYIPDVHMVESKSLKLYLFSFRNHGGFHEDAINTIVNDLVDLMNPRYLEVLGRFTPRGGISIDPYANYGRAGTKYEQMAETRLLYHDMYPENINNR

SEQ ID NO: 49485 - protein, 162 aa, Salilacibacter sp.
  misc_feature (1)..(162): tr|A0A514LL79|A0A514LL79_9ACTN NADPH-dependent 7-cyano- 7-deazaguanine reductase OS=Salilacibacter sp. NKC3-5 O X=2502791 GN=queF PE=3 SV=1
MTEEHDSRLSHLGNEGTTYTFEYDPELLETFDNQHPYRDYFVKFNTPEFTTLCPLTGQPDFATLYISYIPDKKMVESKALKLYLFSFRNHGDFHEDVINIIVNDLVEAMAPRYIEIWGKFTPRGGISIDPYVNYGKPDTKYEKMAEQRLLYHDMYPETITNR

SEQ ID NO: 49486 - protein, 163 aa, Salimicrobium flavidum
  misc_feature (1)..(163): tr|A0A1N7JCM9|A0A1N7JCM9_9BACI NADPH-dependent 7-cyano- 7-deazaguanine reductase OS=Salimicrobium flavidum OX=5 70947 GN=queF PE=3 SV=1
MGRENELKDLSLLGSQETHYSFDYNPDVLESFDNKHVHRDYFVKLNCPEFTTLCPKTNQPDFGTVYIKYIPDEKMVESKSLKLYLFSFRNHGDFHEDSMNIIMNDLIELMEPRYIEVLGKFTPRGGISIDPFCNYGKPGTKYEEMADFRMMNHDMYPEKVDNR

SEQ ID NO: 49487 - protein, 163 aa, Salimicrobium halophilum
  misc_feature (1)..(163): tr|A0A1G8TKD9|A0A1G8TKD9_9BACI NADPH-dependent 7-cyano- 7-deazaguanine reductase OS=Salimicrobium halophilum OX =86666 GN=queF PE=3 SV=1
MKRDEELKDLSLLGSQDTAYSFDYTPEVLETFDNKHPNRDYFVKFNCPEFTTLCPKTNQPDFGTVYIKYIPDERMVESKSLKLYLFSFRNHGDFHEDSMNIIMNDLIELMEPRYIEVLGKFTPRGGISIDPFCNYGRPGTKYEEMADYRMMNHDLYPEKVDNR

SEQ ID NO: 49488 - protein, 150 aa, Salinarimonadaceae bacterium
  misc_feature (1)..(150): tr|A0A0P7XRX1|A0A0P7XRX1_9RHIZ NADPH-dependent 7-cyano- 7-deazaguanine reductase OS=Salinarimonadaceae bacteriu m HL-109 OX=1653334 GN=queF1 PE=3 SV=1
MIDNSNLQLGQSADIPATPEEARLDRVPNPHSAGEYVARFTCPEFTSICPVTGQPDFAILVIDYVPGQWLVESKSLKLYLTSFRNHGAFHEDCTVAIGKRLAELLEPVYMRIGGYWYPRGGIPIDVFWQTGEMPKNIWLPDQGVAPYRAR

SEQ ID NO: 49489 - protein, 150 aa, Salinarimonas sp.
  misc_feature (1)..(150): tr|A0A5B2VDH3|A0A5B2VDH3_9RHIZ NADPH-dependent 7-cyano- 7-deazaguanine reductase OS=Salinarimonas sp. BN140002 OX=1638099 GN=queF PE=3 SV=1
MSHLDVSQLGRPTAQPNSPEEAVLERVPNPHADTDYVARFTAPEFTSICPVTGQPDFAILVIDYVPGDWLVESKSLKLYLNSFRNHGAFHEDCTVAIGRKLADLLGPRFLRIGGYWFPRGGIPIDVFWQTGELPRNVFLPDQGVPPYRAR

SEQ ID NO: 49490 - protein, 165 aa, Salinibacillus kushneri
  misc_feature (1)..(165): tr|A0A1I0GR08|A0A1I0GR08_9BACI NADPH-dependent 7-cyano- 7-deazaguanine reductase OS=Salinibacillus kushneri OX= 237682 GN=queF PE=3 SV=1
MSGRRDGELTDLSLLGNQHTKYTFDYTPEVLETFDNKHPNRDYFVKFNCPEFTTLCPKTHQPDFGTVYISYIPDEKMVESKSLKLYLFSFRNHGDFHEDSMNIIMNDLIELMNPRYIEVWGKFTPRGGISIDPYCNYGKAGTKYEEMAQHRLMNHDMYPEKVDNR

SEQ ID NO: 49491 - protein, 172 aa, Salinibacter sp.
  misc_feature (1)..(172): tr|A0A2P6C5E2|A0A2P6C5E2_9BACT NADPH-dependent 7-cyano- 7-deazaguanine reductase OS=Salinibacter sp. 10B OX=192 3971 GN=queF PE=3 SV=1
MPDSHESDNGRSRSRAAREHTEEALEYMAQFGIEPEGQVRPFLPPSARQQTIDRLPYEHEVRQTVVYETEPGEFSAVCPFSGLPDSGTVRVEYVPGDWVVELKSLKYYLISWRDIGITQEDVTAYIYRDVRAELENPDVLMVRTEYTVRGGINTTCTVDSREQGPPSALGDD

SEQ ID NO: 49492 - protein, 178 aa, Salinicoccus alkaliphilus
  misc_feature (1)..(178): tr|A0A1M7F087|A0A1M7F087_9STAP NADPH-dependent 7-cyano- 7-deazaguanine reductase OS=Salinicoccus alkaliphilus D SM 16010 OX=1123231 GN=queF PE=3 SV=1
MCPLRYMVFILKGEMMMTDENTEDLTLLGNRDVEYAFDYDPEVLETFDNKFPDRDYFVKFNCPEFTTLCPITNQPDFATIYISYIPDVKMVESKSLKLYLFSYRDHGGFHESSVNMIMDDLIGLMDPRYIEVWGKFTPRGGISIDPYCNYGRKGTKYEEMADRRLMEHDMNPETITNR

SEQ ID NO: 49493 - protein, 162 aa, Salinicoccus halodurans
  misc_feature (1)..(162): tr|A0A0F7HI19|A0A0F7HI19_9STAP NADPH-dependent 7-cyano- 7-deazaguanine reductase OS=Salinicoccus halodurans OX= 407035 GN=queF PE=3 SV=1
MSEEYTENLSLLGSREVKYDFDYNPEVLETFDNKHEGRDYFVKFNCPEFTTLCPITNQPDFATLYISYIPDVKMVESKALKLYLFSFRNHGGFHENSVNMIMDDLIELMDPKYIEIWGKFTPRGGISIDPYCNYGRKGTKYEKMADHRMMNHDMYPEHVDNR

SEQ ID NO: 49494 - protein, 162 aa, Salinicoccus kekensis
  misc_feature (1)..(162): tr|A0A285UV03|A0A285UV03_9STAP NADPH-dependent 7-cyano- 7-deazaguanine reductase OS=Salinicoccus kekensis OX=71 4307 GN=queF PE=3 SV=1
MTNENTKDLTLLGNEDVKYAFDYDPEVLETFDNKFPDRDYFVKFNCPEFTTLCPITNQPDFATIYISYIPDVKMVESKSLKLYLFSYRNHGGFHESSVNMIMDDLIELMDPRYIEVWGKFTPRGGISIDPYCNYGRAGTKYEKMADHRLMEHDMNPETITNR

SEQ ID NO: 49495 - protein, 162 aa, Salinicoccus qingdaonensis
  misc_feature (1)..(162): tr|A0A1G9DKG8|A0A1G9DKG8_9STAP NADPH-dependent 7-cyano- 7-deazaguanine reductase OS=Salinicoccus qingdaonensis OX=576118 GN=queF PE=3 SV=1
MSGENTEDLTLLGSQEVKYSFDYDPEVLETFDNKFPGRDYFVKFNCPEFTTLCPITNQPDFATIYISYIPDVKMVESKSLKLYLFSYRNHGGFHESSVNMIMDDLIGLMDPRYIEVWGKFTPRGGISIDPYCNYGRAGTKYEEMADKRLMEHDISPETINNR

SEQ ID NO: 49496 - protein, 162 aa, Salinicoccus roseus
  misc_feature (1)..(162): tr|A0A265E6N3|A0A265E6N3_9STAP NADPH-dependent 7-cyano- 7-deazaguanine reductase OS=Salinicoccus roseus OX=4567 0 GN=queF PE=3 SV=1
MSEENTQDLSLLGNQNVKYDFDYNPDVLETFDNKYPGRDYFVKFNCPEFTTLCPITGQPDFATLYISYIPDVKMVESKALKLYLFSYRNHGGFHESSVNMIMDDLVKLMDPKYIEIWGKFTPRGGISIDPYCNYGRPGTKYEEMADYRMMNHDLYPEKVDNR

SEQ ID NO: 49497 - protein, 162 aa, Salinicoccus roseus
  misc_feature (1)..(162): tr|A0A0C2E8W4|A0A0C2E8W4_9STAP NADPH-dependent 7-cyano- 7-deazaguanine reductase OS=Salinicoccus roseus OX=4567 0 GN=queF PE=3 SV=1
MSKENTQDLSLLGNQNVKYDFDYNPDVLETFDNKYPGRDYFVKFNCPEFTTLCPITGQPDFATLYISYIPDVKMVESKALKLYLFSYRNHGGFHESSVNMIMDDLVNLMDPKYIEIWGKFTPRGGISIDPYCNYGRPGTKYEEMADYRMMNHDMYPEKVDNR

SEQ ID NO: 49498 - protein, 162 aa, Salinicoccus sediminis
  misc_feature (1)..(162): tr|A0A0M2SLL8|A0A0M2SLL8_9STAP NADPH-dependent 7-cyano- 7-deazaguanine reductase OS=Salinicoccus sediminis OX=1 432562 GN=queF PE=3 SV=1
MSEDYTKDLSLLGSQEVKYDFDYNPDVLETFENKHQGRDYFVKFNCPEFTTLCPITNQPDFATLYISYIPDIRMVESKALKLYLFSFRNHGGFHENSVNMIMDDLIELMDPKYIEIWGKFTPRGGISIDPFCNYGRAGTKYERMAEHRMMNHDMYPEHVVNR

SEQ ID NO: 49499 - protein, 162 aa, Salinicoccus sp.
  misc_feature (1)..(162): tr|A0A558AQY8|A0A558AQY8_9STAP NADPH-dependent 7-cyano- 7-deazaguanine reductase OS=Salinicoccus sp. CT19 OX=24 93691 GN=queF PE=3 SV=1
MSGENTQDLSLLGNQNVKYDFDYNPDVLETFDNKYPGRDYFVKFNCPEFTTLCPITSQPDFATLYISYIPDVKMVESKALKLYLFSYRNHGGFHESSVNMIMDDLINLMDPKYIEVWGKFTPRGGISIDPYCNYGRPDTKYAEMADYRMMNHDMYPEKVDNR

SEQ ID NO: 49500 - protein, 279 aa, Salinicola socius
  misc_feature (1)..(279): tr|A0A1Q8SMM0|A0A1Q8SMM0_9GAMM NADPH-dependent 7-cyano- 7-deazaguanine reductase OS=Salinicola socius OX=404433 GN=queF PE=3 SV=1
MNQDRPETLVDAPLGQESAYPDRYDASLLFPIERAANRAPLGIEASSLPFVGGDEWWAFELSWLDLRGKPVVAIARFRLPADSPRLIESKSWKLYLNGFNQTTFAGRDAVIDFLQRDLGAAAGAPVTVELFGVDDAALAPRPMPGECIDDIEIDIDRYTPSADLLVCDGNDIVEETLHSHLLKSNCPVTGQPDWGSVLITYRGPRLDRAALLRYIVSYRQHQDFHEHCVEHIFVDLMARCLPHELLVMARYVRRGGLDINPWRATPGWMPELPARLLRQ

SEQ ID NO: 49501 - protein, 279 aa, Salinicola sp.
  misc_feature (1)..(279): tr|A0A1Q8T1R5|A0A1Q8T1R5_9GAMM NADPH-dependent 7-cyano- 7-deazaguanine reductase OS=Salinicola sp. MH3R3-1 OX=1 928762 GN=queF PE=3 SV=1
MTQDRPHTLTDAPLGRESAYPERYDASLLFPIERAANRAPLRIDSTSLPFVGGDEWWAFELSWLDLRGKPVVAVARFRLPADSPQLIESKSWKLYLNSFNQTTFADREAVVEFLQRDLSAAAGAPVTVELYGADDAELAPQPMPGDCLDDIEVDIDRYTPSPDLLACDESDIVEETLHSHLLKSNCPVTGQPDWGSVLIAYRGPRLDRAALLRYVISYRQHQDFHEHCVEHIFVDLMARCRPQELLVMARYVRRGGLDINPWRATPGWTPALPARLLRQ

SEQ ID NO: 49502 - protein, 279 aa, Salinicola sp.
  misc_feature (1)..(279): tr|A0A1S2DDN0|A0A1S2DDN0_9GAMM NADPH-dependent 7-cyano- 7-deazaguanine reductase OS=Salinicola sp. MIT1003 OX=1 882734 GN=queF PE=3 SV=1
MNQDRPQTLIDAPLGEVSSYPERYDASLLFPIERAANRAPLGIEASSLPFVGGDEWWAFELSWLDLRGKPVVAVARFRLPADSPRLIESKSWKLYLNSFNQTTFAGREAVIDFLVRDLSAAAGAPVTVELFGVDDAALAPRAMPGKCIDEIEVDIDRYTPSPELLACDDSDIVEETLHSHLLKSNCPVTGQPDWGSVLIAYRGPRLDRGALLRYIVSYRQHQDFHEHCVEHIFVDLMARCRPQALLVMARYVRRGGLDINPWRATPGWAPELPARLLRQ

SEQ ID NO: 49503 - protein, 279 aa, Salinimonas sediminis
  misc_feature (1)..(279): tr|A0A346NJF0|A0A346NJF0_9ALTE NADPH-dependent 7-cyano- 7-deazaguanine reductase OS=Salinimonas sediminis OX=23 03538 GN=queF PE=3 SV=1
MTNNASSNLPDNLTLGQQVAYDAHYNPELLQGVARSISRDAQHISGPDLPFSGIDTWTGYELSWLNAKGKPQVGIVECHVPVTSANLIESKSFKLYLNSYNQTHFDDLDAVKRTLQADLSRCAGEQVTVAVFLPHQFNRFATAELAGVVIDDIDIEIDQYSPDPNLLRTEHKQVSETLVSHLLKSNCLITSQPDWASVLIKYEGQALNHEQLLRYLIGFRQHNEFHEQCVERIFCDIKALPGIDKLTVLARYTRRGGLDINPFRSNFEAPYPNQRNARQ

SEQ ID NO: 49504 - protein, 279 aa, Salinimonas sp.
  misc_feature (1)..(279): tr|A0A5B7YF69|A0A5B7YF69_9ALTE NADPH-dependent 7-cyano- 7-deazaguanine reductase OS=Salinimonas sp. KX18D6 OX=2 572577 GN=queF PE=3 SV=1
MTNETEARLPEGLSLGREVTYEAHYNPALLQGVPRALSRDLQGISAQALPFSGVDTWTGYELSWLTLKGKPQVGILQCEVPVTSEFLIESKSFKLYLNSFNQTQFESRSDVEKTLRKDLSKCAGEPVSVAIYLPAEFDNFAVTPLPGTNIDDADIEISTYSPDASILQTSATKVSETLNSDLLKSNCLITSQPDWASILIKYEGYALDQSALLKYLVGYRQHNEFHEQCVERIFCDLINLPGMEKLTVLARYTRRGGLDINPFRSNFELPYPNRRTARQ

SEQ ID NO: 49505 - protein, 277 aa, Saliniradius amylolyticus
  misc_feature (1)..(277): tr|A0A2S2E6M7|A0A2S2E6M7_9ALTE NADPH-dependent 7-cyano- 7-deazaguanine reductase OS=Saliniradius amylolyticus O X=2183582 GN=queF PE=3 SV=1
MTQDQHPDALKHLSLGQETNYNSGYDPELLQAVPRRLNREDIGLTGVMPFKGVDIWNGYELSWLNTKGKPCVGILEARVPFNSPNLIESKSFKLYLNSLNQYRLPSTEALQQHLERDLSACAQAPVTARIHPLNAPQYQVSSWQGDCLDDLDISMDDYQYDPSLLTCSDDKVSETLISHLLKSNCLITNQPDWGSVMIRYQGSRIKRENLLTYLITFRQHNEFHEQCVERIYCDIMRHCKPEKLTVYARYTRRGGLDINPFRSNFESEPDNQRLTRQ

SEQ ID NO: 49506 - protein, 129 aa, Salinisphaera halophila
  misc_feature (1)..(129): tr|A0A423Q1Q8|A0A423Q1Q8_9GAMM NADPH-dependent 7-cyano- 7-deazaguanine reductase OS=Salinisphaera halophila YIM 95161 OX=1051139 GN=queF PE=3 SV=1
MPSQPSRDLQTFDNPTPERDYTIRMRIPEFTCLCPVTGQPDFATIHLEYVPEARCVELKSLKLYIWSYRDEGAFHEAVTNQILADLVAATDPRFMRVRAEFWMRGGIDTSVIAEHRADNWHPGTPVALP

SEQ ID NO: 49507 - protein, 105 aa, Salinisphaera hydrothermalis
  misc_feature (1)..(105): tr|A0A084IJV8|A0A084IJV8_SALHC NADPH-dependent 7-cyano- 7-deazaguanine reductase OS=Salinisphaera hydrothermali s (strain C41B8) OX=1304275 GN=queF PE=3 SV=1
MRIPEFTCLCPVTGQPDFATLHLEYVPEATCVELKSLKLYVWSYRDEGAFHEAVTNKILSDLVAATAPRFMRLTAEFWVRGGIDTTVIAEHRAEGWQPAPRVDLP

SEQ ID NO: 49508 - protein, 129 aa, Salinisphaera orenii; identical to SEQ ID NO: 49506
  misc_feature (1)..(129): tr|A0A423PRW5|A0A423PRW5_9GAMM NADPH-dependent 7-cyano- 7-deazaguanine reductase OS=Salinisphaera orenii MK-B5 OX=856730 GN=queF PE=3 SV=1

SEQ ID NO: 49509 - protein, 129 aa, Salinisphaera shabanensis
  misc_feature (1)..(129): tr|U2EL73|U2EL73_9GAMM NADPH-dependent 7-cyano-7-deazag uanine reductase OS=Salinisphaera shabanensis E1L3A OX= 1033802 GN=queF PE=3 SV=1
MSTQPSRDLETFPNPTPERDYTIRMRIPEFTCLCPKTGQPDFATLYLEYVPEASCVELKSLKLYVWSFRDEGAFHEAVTNRILADLVAATQPRFMRLRAEFWMRGGIDTTVIVDHRADNWHPGTPVHLP

SEQ ID NO: 49510 - protein, 129 aa, Salinisphaera sp.
  misc_feature (1)..(129): tr|A0A2E9ALB8|A0A2E9ALB8_9GAMM NADPH-dependent 7-cyano- 7-deazaguanine reductase OS=Salinisphaera sp. OX=191433 0 GN=queF PE=3 SV=1
MSTQPSRDLETFPNPSPERDYTIRMRIPEFTCLCPKTGQPDFATLYLEYVPEASCVELKSLKLYVWSYRDEGAFHEAVTNQILADLVAATQPRFMRLHAEFWMRGGIDTSVIVDHRADNWHPGTPVHLP

SEQ ID NO: 49511 - protein, 129 aa, Salinisphaera sp.
  misc_feature (1)..(129): tr|A0A2Z3J8V4|A0A2Z3J8V4_9GAMM NADPH-dependent 7-cyano- 7-deazaguanine reductase OS=Salinisphaera sp. LB1 OX=21 83911 GN=queF PE=3 SV=1
MPSSPSRSLETFDNPKPERDYTIRMRIPEFTCLCPVTGQPDFATLHLEYVPEASCVELKSLKLYIWSYRDEGAFHEAVTNRILSDLVAATAPRFMRLTAEFWVRGGIDTTVIAEHRAEGWQPAPRVDLA

SEQ ID NO: 49512 - protein, 129 aa, Salinisphaeraceae bacterium
  misc_feature (1)..(129): tr|A0A2D4SEG8|A0A2D4SEG8_9GAMM NADPH-dependent 7-cyano- 7-deazaguanine reductase OS=Salinisphaeraceae bacterium OX=2026789 GN=queF PE=3 SV=1
MSTSPSIDLETFPNPNPGRDYTIRMRMPEFTCLCPKTGQPDFATLYLEYVPDQRCVELKSLKLYLWSFRDRGAFHEAVTNELLEHLATATRPRFMRLRAEFYVRGGIYTDVVVEHRDPEWTTPARVELP

SEQ ID NO: 49513 - protein, 282 aa, Salinivibrio kushneri
  misc_feature (1)..(282): tr|A0A1V3GJN7|A0A1V3GJN7_9GAMM NADPH-dependent 7-cyano- 7-deazaguanine reductase OS=Salinivibrio kushneri OX=19 08198 GN=queF PE=3 SV=1
MSNYQDADALANLSLGEKTDYPTQYDPSQLRAVPRALNRQAIGLDNAPMPFTGYDTWTLYELSWLNQNGLPQVAIGEVRLPASSPNLIESKSFKLYLNSFNQTRFDNWQQVANALQTDLSACAGEEVDVTLSPLSELEGETIAGLAGECIDHQDISIDDYTFNPDWLEGAAQGAVVSETLHSHLLKSNCLITNQPDWGSVRIAYKGNKINREKLLRYLVSFREHNEFHEQCVERIFMDIMRFCQPEKLTVYARYTRRGGLDINPYRTNMGKTPSENNRLARQ

SEQ ID NO: 49514 - protein, 282 aa, Salinivibrio kushneri
  misc_feature (1)..(282): tr|A0A4P8H044|A0A4P8H044_9GAMM NADPH-dependent 7-cyano- 7-deazaguanine reductase OS=Salinivibrio kushneri OX=19 08198 GN=queF PE=3 SV=1
MSNYQDADALANLSLGEKTDYPTQYDPSQLRAVPRALNRQAIGLDNAPMPFTGYDTWTLYELSWLNQNGLPQVAIGEVRLPASSPNLIESKSFKLYLNSFNQTRFDNWQQVANALQTDLSACAGEEVDVTLSPLSELEGETIAGLAGECIDHQDISIDDYTFNPDWLDGAAQGAVVSETLHSHLLKSNCLITNQPDWGSVRIAYKGNKINREKLLRYLVSFREHNEFHEQCVERIFMDIMRFCQPEKLTVYARYTRRGGLDINPYRTNMGKTPSENNRLARQ

SEQ ID NO: 49515 - protein, 282 aa, Salinivibrio sharmensis
  misc_feature (1)..(282): tr|A0A1V3H447|A0A1V3H447_9GAMM NADPH-dependent 7-cyano- 7-deazaguanine reductase OS=Salinivibrio sharmensis OX= 390883 GN=queF PE=3 SV=1
MSNYQDADALANLSLGEKTDYPTQYDPSQLRAVPRALNRQAIGLDNAPMPFTGYDIWTLYELSWLNKNGLPQVAIGEVRLPASSPNLIESKSFKLYLNSFNQTSFDNWQQVANALQTDLSACAGEEVDVTLSPLSELEGETIAGLAGECIDHQDISIDDYTFKPDWLDGAAQGAIVSETLHSHLLKSNCLITNQPDWGSVRIAYKGKKINREKLLRYLVSFREHNEFHEQCVERIFMDIMRFCQPEKLTVYARYTRRGGLDINPYRTNMGKTPSENNRLARQ

SEQ ID NO: 49516 - protein, 282 aa, Salinivibrio sp.
  misc_feature (1)..(282): tr|A0A1V3H8I7|A0A1V3H8I7_9GAMM NADPH-dependent 7-cyano- 7-deazaguanine reductase OS=Salinivibrio sp. MA351 OX=1 909453 GN=queF PE=3 SV=1
MSNYQDADALAKLSLGQHTDYPTEYDPSQLRAVPRELNRQAIGLDQASLPFTGYDTWTLYELSWLNKNGLPQVAIGEVRLPASSPNLVESKSFKLYLNSFNQTRFDSWQQVANALQTDLSACAGEAVDVTLSPLSELEGEVIAGLSGECLDHQDISIDDYRFQPEWLEDAAQGAIVSETLHSHLLKSNCLITHQPDWGSVRIAYKGKKINREKLLRYLVSFREHNEFHEQCVERIFMDIMRFCQPEKLTVYARYTRRGGLDINPYRTNMGKTPSENNRLARQ

SEQ ID NO: 49517 - protein, 282 aa, Salinivibrio sp.
  misc_feature (1)..(282): tr|A0A2A4GKT2|A0A2A4GKT2_9GAMM NADPH-dependent 7-cyano- 7-deazaguanine reductase OS=Salinivibrio sp. YCSC6 OX=2 003370 GN=queF PE=3 SV=1
MSNYQDADALAGLSLGQHTDYPTQYDPSQLRAVPRELNRQAIGLSNETVPFTGYDTWTLYELSWLNQNGLPQVAIGEVRLPASSPNLIESKSFKLYLNSLNQTRFESWQKVADALQKDLSACAGEEVDVTLSPLSELEGETIAGMAGECIDHQDISIDDYTFNPDWLDGAAQGAIVSETLHSHLLKSNCLITNQPDWGSVRIAYKGKKINREKLLRYLVSFREHNEFHEQCVERIFMDIMRFCQPEKLTVYARYTRRGGLDINPYRTNMGKTPSENNRLARQ

SEQ ID NO: 49518 - protein, 164 aa, Salipaludibacillus aurantiacus
  misc_feature (1)..(164): tr|A0A1H9X201|A0A1H9X201_9BACI NADPH-dependent 7-cyano- 7-deazaguanine reductase OS=Salipaludibacillus aurantia cus OX=1601833 GN=queF PE=3 SV=1
MSHKHSREEEVHLLGNTNVEYKMDYDPSILEAFENRHPHRDYFVKFNCPEFTSLCPKTGQPDFATIYISYIPDKKMVESKSLKLYLFSFRNHGDFHEDCMNTILDDLVKLMDPRYIEVWGKFTPRGGISIDPYVNYGKPGTKWENFAENRLLQHDLYPENINHR

SEQ ID NO: 49519 - protein, 162 aa, Salipaludibacillus keqinensis
  misc_feature (1)..(162): tr|A0A323TQQ5|A0A323TQQ5_9BACI NADPH-dependent 7-cyano- 7-deazaguanine reductase OS=Salipaludibacillus keqinens is OX=2045207 GN=queF PE=3 SV=1
MAHNREEEVHLLGNTNVEYKMDYDPSILESFENRHPHRNYFVKFNCPEFTSLCPKTGQPDFATIYISYIPEKNMVESKSLKLYLFSFRNHGDFHEDCMNTILDDLVALMDPRYIEVWGKFTPRGGISIDPYVNYGKTGTKWEDFAEKRLLQHDLYPENIDHR

SEQ ID NO: 49520 - protein, 162 aa, Salipaludibacillus neizhouensis
  misc_feature (1)..(162): tr|A0A3A9KTG8|A0A3A9KTG8_9BACI NADPH-dependent 7-cyano- 7-deazaguanine reductase OS=Salipaludibacillus neizhoue nsis OX=885475 GN=queF PE=3 SV=1
MSHNRENEVNLLGNINVEYKMDYDPTILEAFENRHSYRDYFVKFNCPEFTSLCPITGQPDFATIYISYIPNEKMVESKSLKLYLFSFRNHGDFHEDCMNKMVNDLVELMDPRYIEIWGKFTPRGGISIDPYVNYGKKETKWEAFAEQRLLQHDLYPETINHR

SEQ ID NO: 49521 - protein, 154 aa, Salipiger thiooxidans
  misc_feature (1)..(154): tr|A0A1G7FIN1|A0A1G7FIN1_9RHOB NADPH-dependent 7-cyano- 7-deazaguanine reductase OS=Salipiger thiooxidans OX=28 2683 GN=queF PE=3 SV=1
MTDSIYSNLRQLGGETRIPASPEEAELERVANPQADVTYNVRFTAPEFTSLCPMTGQPDFAHLVIDYAPGKWLVESKSLKLYLTSFRNHGAFHEDCTISIARRLVGFLAPQWLRIGGYWYPRGGIPIDVFWQTGPLPEGLWLPDQGVPPYRGRG

SEQ ID NO: 49522 - protein, 135 aa, Salisediminibacterium haloalkalitolerans
  misc_feature (1)..(135): tr|A0A1H9V0P3|A0A1H9V0P3_9BACI NADPH-dependent 7-cyano- 7-deazaguanine reductase OS=Salisediminibacterium haloa lkalitolerans OX=1464123 GN=queF PE=3 SV=1
MAEDYYLPRSGPMPRPESVEEGQRILAEEAFDAPDVSRITFRALEFTAVCPKTGQPDFGTVEVSYTPRHKCIESKSFKFYLWSYRDHGAFCESLAAQIADDIVSAIEPESVYVTVNQTPRGGIELTTEAERHAGS

SEQ ID NO: 49523 - protein, 282 aa, Salmonella abony
  misc_feature (1)..(282): tr|A0A5H6T7J4|A0A5H6T7J4_SALAB NADPH-dependent 7-cyano- 7-deazaguanine reductase QueF OS=Salmonella abony OX=29 482 GN=queF PE=4 SV=1
MSSYEKHQALDGLTLGKSTDYRDNYDASLLQGVPRSLNRDPLGLTADNLPFHGADIWTLYELSWLNSQGLPQVAVGHVELDYTSVNLIESKSFKLYLNSFNQTRFDTWETVRQTLERDLRACAQGNVSVKLHRLDELEGQPVAHFHGTCIDDQDISIDNYQFTTDYLQHAVSGEKQVEETLVSHLLKSNCLITHQPDWGSIQIQYRGRKIDREKLLRYLVSFRHHNEFHEQCVERIFNDILRFCQPETLSVYARYTRRGGLDINPWRSNTDFLPATGRLARQ

SEQ ID NO: 49524 - protein, 282 aa, Salmonella abony
  misc_feature (1)..(282): tr|A0A5J0DXQ1|A0A5J0DXQ1_SALAB NADPH-dependent 7-cyano- 7-deazaguanine reductase QueF OS=Salmonella abony OX=29 482 GN=queF PE=4 SV=1
MSSYENHQALDGLTLGKSTDYRDNYDASLLQGVPRSLNRDPLGLTADNLPFHGADIWTLYELSWLNSQGLPQVAVGHVELDYTSVNLIESKSFKLYLNSFNQTRFDTWETVRQTLERDLRACAQGNVSVKLHRLDELEGQPVAHFHGTCIDDQDISIDNYQFTTDYLQHAVSGEKQVEETLVSHLLKSNCLITHQPDWGSIQIQYRGRKIDREKLLRYLVSFRHHNEFHEQCVERIFNDILRFCQPETLSVYARYTRRGGLDINPWRSNTDFLPATGRLARQ

SEQ ID NO: 49525 - protein, 282 aa, Salmonella agona
  misc_feature (1)..(282): sp|B5F4R2|QUEF_SALA4 NADPH-dependent 7-cyano-7-deazagua nine reductase OS=Salmonella agona (strain SL483) OX=45 4166 GN=queF PE=3 SV=1
MSSYENHQALDGLTLGKSTDYRDNYDASLLQGVPRSLNRDPLGLTADNLPFHGADIWTLYELSWLNSQGLPQVAVGHVELDYTSVNLIESKSFKLYLNSFNQTRFDTWETVRQTLERDLRACAQGNVSVRLHRLDELEGQPVAHFHGTCIDDQDISIDNYQFTTDYLQHAVSGEKQVEETLVSHLLKSNCLITHQPDWGSIQIQYRGRKIDREKLLRYLVSFRHHNEFHEQCVERIFNDILRFCQPETLSVYARYTRRGGLDINPWRSNTDFVPATGRLARQ

SEQ ID NO: 49526 - protein, 282 aa, Salmonella anatum
  misc_feature (1)..(282): tr|A0A3Y5SEJ0|A0A3Y5SEJ0_SALAN NADPH-dependent 7-cyano- 7-deazaguanine reductase OS=Salmonella anatum OX=58712 GN=queF PE=3 SV=1
MSSYENHQALDGLTLGKSTDYRDNYDASLLQGVPRSLNRDPLGLTADNLPFHGADIWTLYELSWLNSRGLPQVAVGHVELDYTSVNLIESKSFKLYLNSFNQTRFDTWETVRQTLERDLRACAQGNVSVRLHRLDELEGQPVAHFHGTCIDDQDISIDNYQFTTDYLQHAVSGEKQVEETLVSHLLKSNCLITHQPDWGSIQIQYRGRKIDREKLLRYLVSFRHHNEFHEQCVERIFNDILRFCQPETLSVYARYTRRGGLDINPWRSNADFVPATGRLARQ

SEQ ID NO: 49527 - protein, 282 aa, Salmonella anatum
  misc_feature (1)..(282): tr|A0A2T8MKS4|A0A2T8MKS4_SALAN NADPH-dependent 7-cyano- 7-deazaguanine reductase OS=Salmonella anatum OX=58712 GN=queF PE=3 SV=1
MSSYEKHQALDGLTLGKSTDYRDNYDASLLQGVPRSLNRDPLGLTADNLPFHGADIWTLYELSWLNSQGLPQVAVGHVELDYTSVNLIESKSFKLYLNSFNQTRFDTWETVRQTLERDLRACAQGNVSVRLHRLDELEGQPVAHFHGTCIDDQDISIDNYQFTTDYLQHAVSGEKQVEETLVSHLLKSNCLITHQPDWGSIQIQYRGRKIDREKLLRYLVSFRHHNEFHEQCVERIFNDILRFCQPETLSVYARYTRRGGLDINPWRSNTDFVPATGRLARQ

SEQ ID NO: 49528 - protein, 282 aa, Salmonella arizonae
  misc_feature (1)..(282): sp|A9MSB5|QUEF_SALAR NADPH-dependent 7-cyano-7-deazagua nine reductase OS=Salmonella arizonae (strain ATCC BAA- 731 / CDC346-86 / RSK2980) OX=41514 GN=queF PE=3 SV=1
MSSYENHRALDGLTLGKSTDYRDNYDASLLQGVPRSLNRDPLGLTADNLPFHGADIWTLYELSWLNSHGLPQIAIGHVELDYTSVNLIESKSFKLYLNSFNQTRFDTWETVRQTLERDLRACAQGNVSVKLHRLDELEGLPVAHFHGACIDDQDISIDNYQFTASYLQHAVSGEKRVEETLVSHLLKSNCLITHQPDWGSIQIQYRGRKIDREKLLRYLVSFRHHNEFHEQCVERIFNDLLRFCQPETLSVYARYTRRGGLDINPWRSNTDFVPATGRLARQ

SEQ ID NO: 49529 - protein, 282 aa, Salmonella berta; identical to SEQ ID NO: 49525
  misc_feature (1)..(282): tr|A0A3V6R177|A0A3V6R177_SALBE NADPH-dependent 7-cyano- 7-deazaguanine reductase OS=Salmonella berta OX=28142 G N=queF PE=3 SV=1

SEQ ID NO: 49530 - protein, 282 aa, Salmonella berta
  misc_feature (1)..(282): tr|A0A3U8PA40|A0A3U8PA40_SALBE NADPH-dependent 7-cyano- 7-deazaguanine reductase OS=Salmonella berta OX=28142 G N=queF PE=3 SV=1
MSSYEKHQALDGLTLGKSTDYRDNYDASLLQGVPRSLNRDPLGLTADNLPFHGADIWTLYELSWLNSQGLPQVAVGHVELDYTSVNLIESKSFKLYLNSFNQTRFDTWETVRQTLERDLRACAQGNVSVKLHRLDELEGQPVAHFHGTCIDDQDISIDNYQFTTDYLQHAVSGEKQVEETLVSHLLKSNCLITHQPDWGSIQIQYRGRKIDREKLLRYLVSFRHHNEFHEQCVERIFNDILRFCQPETLSVYARYTRRGGLDINPWRSNTDFVPATGRLARQ

SEQ ID NO: 49531 - protein, 282 aa, Salmonella blockley
  misc_feature (1)..(282): tr|A0A5H8H7P0|A0A5H8H7P0_SALBL NADPH-dependent 7-cyano- 7-deazaguanine reductase QueF OS=Salmonella blockley OX =57741 GN=queF PE=4 SV=1
MSSYENHQALDGLTLGKSTDYRDNYDASLLQGVPRSLNRDPLGLTADSLPFHGADIWTLYELSWLNSQGLPQVAVGHVELDYTSVNLIESKSFKLYLNSFNQTRFDTWETVRQTLERDLRACAQGNVSVRLHRLDELEGQPVAHFHGTCIDDQDISIDNYQFTTDYLQHAVSGEKQVEETLVSHLLKSNCLITHQPDWGSIQIQYRGRKIDREKLLRYLVSFRHHNEFHEQCVERIFNDILRFCQPETLSVYARYTRRGGLDINPWRSNTDFVPATGRLARQ

SEQ ID NO: 49532 - protein, 225 aa, Salmonella bongori
  misc_feature (1)..(225): tr|A0A3S4G855|A0A3S4G855_SALBN NADPH-dependent 7-cyano- 7-deazaguanine reductase OS=Salmonella bongori OX=54736 GN=queF_2 PE=3 SV=1
MSSYENHQALDGLTLGKSTNYRDNYDASLLQGVPRSLNRDPLGLKADSLPFHGADIWTLYELSWLNSHGLPQVAVGHVELDYTSVNLIESKSFKLYLNSLNQTRFDTWETVRQTLERDLRACAQGNVSVKLYRLDELEGQPVAHFQGTCIDNQDISIDSYQFTTDYLQHAANGEGRVEETLVSHLLKSNCLITHQPDWGSIQIQYRGRKIDREKTAALSGLLPSS

SEQ ID NO: 49533 - protein, 282 aa, Salmonella bongori
  misc_feature (1)..(282): tr|A0A5I6MW10|A0A5I6MW10_SALBN NADPH-dependent 7-cyano- 7-deazaguanine reductase QueF OS=Salmonella bongori CFS AN000510 OX=1299282 GN=queF PE=4 SV=1
MSSYENHQALDGLTLGKSTNYRDNYDASLLQGVPRSLNRDPLGLKADSLPFHGADIWTLYELSWLNSHGLPQVAVGHVELDYTSVNLIESKSFKLYLNSLNQTRFDTWETVRQTLERDLRACAQGNVSVKLYRLDELEGQPVAHFQGTCIDNQDISIDSYQFTTDYLQHAANGEGRVEETLVSHLLKSNCLITHQPDWGSIQIQYRGRKIDREKLLRYLVSFRHHNEFHEQCVERIFNDILRFCQPETLSVYARYTRRGGLDINPWRSNTDFVPATGRLARQ

SEQ ID NO: 49534 - protein, 282 aa, Salmonella choleraesuis; identical to SEQ ID NO: 49525
  misc_feature (1)..(282): sp|Q57KE9|QUEF_SALCH NADPH-dependent 7-cyano-7-deazagua nine reductase OS=Salmonella choleraesuis (strain SC-B6 7) OX=321314 GN=queF PE=3 SV=1

SEQ ID NO: 49535 - protein, 282 aa, Salmonella derby
  misc_feature (1)..(282): tr|A0A4Z8TQW8|A0A4Z8TQW8_SALDE NADPH-dependent 7-cyano- 7-deazaguanine reductase OS=Salmonella derby OX=28144 G N=queF PE=3 SV=1
MSSYENHQALDGLTLGKSTDYRDNYDASLLQGVPRSLNRDPLGLTADNLPFHGADIWTLYELSWLNSQGLPQVAVGHVELDYTSVNLIESKSFKLYLNSFNQTRFDTWETVRQTLERDLRACAQGNVSVRLHRLDELEGQPVAHFHGACIDDQDISIDNYQFTTDYLQHAVSGEKQVEETLVSHLLKSNCLITHQPDWGSIQIQYRGRKIDREKLLRYLVSFRHHNEFHEQCVERIFNDILRFCQPETLSVYARYTRRGGLDINPWRSNTDFVPATGRLARQ

SEQ ID NO: 49536 - protein, 282 aa, Salmonella derby; identical to SEQ ID NO: 49525
  misc_feature (1)..(282): tr|A0A3V7EU45|A0A3V7EU45_SALDE NADPH-dependent 7-cyano- 7-deazaguanine reductase OS=Salmonella derby OX=28144 G N=queF PE=3 SV=1

SEQ ID NO: 49537 - protein, 282 aa, Salmonella diarizonae
  misc_feature (1)..(282): tr|A0A3U4W350|A0A3U4W350_SALDZ NADPH-dependent 7-cyano- 7-deazaguanine reductase OS=Salmonella diarizonae OX=59 204 GN=queF PE=3 SV=1
MSSYENHQALDGLTLGKSTDYRDNYDASLLQGVPRSLNRDPLGLKADNLPFHGADIWTLYELSWLNSHGLPQVAVGHVELDYTSVNLIESKSFKLYLNSFNQTRFDTRETVRQTLERDLRACAQGNVSVRLHRLNELEGQPVAHFHGACIDDQDISIDNYQFTTDYLQHAVSGEKRVEETLVSHLLKSNCLITHQPDWGSIQIQYRGRKIDREKLLRYLVSFRHHNEFHEQCVERIFNDILHFCQPETLSVYARYTRRGGLDINPWRSNTDFVPATGRLARQ

SEQ ID NO: 49538 - protein, 282 aa, Salmonella diarizonae
  misc_feature (1)..(282): tr|A0A379TTY6|A0A379TTY6_SALDZ NADPH-dependent 7-cyano- 7-deazaguanine reductase OS=Salmonella diarizonae OX=59 204 GN=queF PE=3 SV=1
MSSYENHQALDGLTLGKSTDYRDNYDASLLQGVPRSLNRDPLGLKADNLPFHGADIWTLYELSWLNSHGLPQVAVGHVELDYTSVNLIESKSFKLYLNSFNQTRFDTWETVRQTLERDLRACAQGDVSVRLHRLNELEGQPVAHFHGACIDDQDISIDNYQLTTDYLQHAVSGEKRVEETLVSHLLKSNCLITHQPDWGSIQIQYRGRKIDREKLLRYLVSFRHHNEFHEQCVERIFNDILHFCQPETLSVYARYTRRGGLDINPWRSNTDFVPATGRLARQ

SEQ ID NO: 49539 - protein, 282 aa, Salmonella dublin; identical to SEQ ID NO: 49525
  misc_feature (1)..(282): sp|B5FTX0|QUEF_SALDC NADPH-dependent 7-cyano-7-deazagua nine reductase OS=Salmonella dublin (strain CT_02021853 ) OX=439851 GN=queF PE=3 SV=1

SEQ ID NO: 49540 - protein, 282 aa, Salmonella dublin; identical to SEQ ID NO: 49525
  misc_feature (1)..(282): tr|A0A3T3IFN4|A0A3T3IFN4_SALDU NADPH-dependent 7-cyano- 7-deazaguanine reductase OS=Salmonella dublin OX=98360 GN=queF PE=3 SV=1

SEQ ID NO: 49541 - protein, 123 aa, Salmonella enterica
  misc_feature (1)..(123): tr|G5QNW9|G5QNW9_SALRU NADPH dependent preQ0 reductase (Fragment) OS=Salmonella enterica subsp. enterica serov ar Rubislaw str. A4-653 OX=913081 GN=LTSERUB_4672 PE=4 SV=1
MSSYENHQALDGLTLGKSTDYRDNYDASLLQGVPRSLNRDPLGLTADNLPFHGADIWTLYELSWLNSRGLPQVAVGHVELDYTSVNLIESKSFKLYLNSFNQTRFDTWETVRQTLERDLRACA

SEQ ID NO: 49542 - protein, 282 aa, Salmonella enterica
  misc_feature (1)..(282): tr|A0A3K8WJN0|A0A3K8WJN0_SALER NADPH-dependent 7-cyano- 7-deazaguanine reductase OS=Salmonella enterica OX=2890 1 GN=queF PE=3 SV=1
MSSYENHQALDGLTLGKSTDYRDNYDTSLLQGVPRSLNRDPLGLTADNLPFHGADIWTLYELSWLNSRGLPQVAVGHVELDYTSVNLIESKSFKLYLNSFNQTRFDTWETVRQTLERDLRACAQGNVSVRLHRLDELEGQPVAHFHGTCIDDQDISIDNYQFTTDYLQHAVSGEKQVEETLVSHLLKSNCLITHQPDWGSIQIQYRGRKIDREKLLRYLVSFRHHNEFHEQCVERIFNDILRFCQPETLSVYARYTRRGGLDINPWRSNADFVPATGRLARQ

SEQ ID NO: 49543 - protein, 282 aa, Salmonella enteritidis; identical to SEQ ID NO: 49525
  misc_feature (1)..(282): sp|B5QWQ2|QUEF_SALEP NADPH-dependent 7-cyano-7-deazagua nine reductase OS=Salmonella enteritidis PT4 (strain P1 25109) OX=550537 GN=queF PE=3 SV=1

SEQ ID NO: 49544 - protein, 282 aa, Salmonella enteritidis
  misc_feature (1)..(282): tr|A0A3R0Q7Z4|A0A3R0Q7Z4_SALEN NADPH-dependent 7-cyano- 7-deazaguanine reductase OS=Salmonella enteritidis OX=1 49539 GN=queF PE=3 SV=1
MSSYENHQALDGLTLGKSTDYRDNYDASLLQGVPRSLNRDPLGLKADNLPFHGADIWTLYELSWLNSHGLPQVAVGHVELDYTSVNLIESKSFKLYLNSFNQTRFDTWETVRQTLERDLRACAQGNVSVRLHRLNELEGQPVAHFHGACIDDQDISIDNYQFTTDYLQHAVSGEKRVEETLVSHLLKSNCLITHQPDWGSIQIQYRGRKIDREKLLRYLVSFRHHNEFHEQCVERIFNDILHFCQPETLSVYARYTRRGGLDINPWRSNTDFVPATGRLARQ

SEQ ID NO: 49545 - protein, 282 aa, Salmonella gallinarum; identical to SEQ ID NO: 49525
  misc_feature (1)..(282): sp|B5RDU6|QUEF_SALG2 NADPH-dependent 7-cyano-7-deazagua nine reductase OS=Salmonella gallinarum (strain 287/91 / NCTC 13346) OX=550538 GN=queF PE=3 SV=1

SEQ ID NO: 49546 - protein, 282 aa, Salmonella gallinarum; identical to SEQ ID NO: 49525
  misc_feature (1)..(282): tr|A0A3V9NIU2|A0A3V9NIU2_SALGL NADPH-dependent 7-cyano- 7-deazaguanine reductase OS=Salmonella gallinarum OX=59 4 GN=queF PE=3 SV=1

SEQ ID NO: 49547 - protein, 282 aa, Salmonella hadar; identical to SEQ ID NO: 49525
  misc_feature (1)..(282): tr|A0A4Q8S355|A0A4Q8S355_SALHA NADPH-dependent 7-cyano- 7-deazaguanine reductase OS=Salmonella hadar OX=149385 GN=queF PE=3 SV=1

SEQ ID NO: 49548 - protein, 282 aa, Salmonella heidelberg; identical to SEQ ID NO: 49535
  misc_feature (1)..(282): sp|B4TG16|QUEF_SALHS NADPH-dependent 7-cyano-7-deazagua nine reductase OS=Salmonella heidelberg (strain SL476) OX=454169 GN=queF PE=3 SV=1

SEQ ID NO: 49549 - protein, 282 aa, Salmonella houtenae
  misc_feature (1)..(282): tr|A0A1J6ZL27|A0A1J6ZL27_SALHO NADPH-dependent 7-cyano- 7-deazaguanine reductase OS=Salmonella houtenae OX=5920 5 GN=queF PE=3 SV=1
MSSYENHQALAGLTLGKTTDYRDNYDASLLQGVPRSLNRDPLGLKADNLPFHGTDIWTLYELSWLNSHGLPQVAVGHVELDYTSVNLIESKSFKLYLNSFNQTRFDTWERVRQTLERDLRACAQGNVSVRLHRLDELEGQPVAHFHGACIDDQDIRIDNYQFTTDYLRHAVSGEKQVEETLVSHLLKSNCLITHQPDWGSIQIQYRGRRIDREKLLRYLVSFRHHNEFHEQCVERIFNDLLRFCQPETLSVYARYTRRGGLDINPWRSNTDFVPATGRLARQ

SEQ ID NO: 49550 - protein, 282 aa, Salmonella houtenae
  misc_feature (1)..(282): tr|A0A3Y1WTY5|A0A3Y1WTY5_SALHO NADPH-dependent 7-cyano- 7-deazaguanine reductase OS=Salmonella houtenae OX=5920 5 GN=queF PE=3 SV=1
MSSYENHQALAGLTLGKTTDYRDNYDASLLQGVPRSLNRDPLGLKADNLPFHGTDIWTLYELSWLNSHGLPQVAVGHVELDYTSVNLIESKSFKLYLNSFNQTRFDTWERVRQTLERDLRACAQGNVSVRLHRLDELEGQPVAHFHGACIDDQDIRIDNYQFTTDYLRHAVSGEKRVEETLVSHLLKSNCLITHQPDWGSIQIQYRGRRIDREKLLRYLVSFRHHNEFHEQCVERIFNDILRFCQPETLSVYARYTRRGGLDINPWRSNTDFVPATGRLARQ

SEQ ID NO: 49551 - protein, 282 aa, Salmonella infantis; identical to SEQ ID NO: 49525
  misc_feature (1)..(282): tr|A0A3W0HNZ6|A0A3W0HNZ6_SALIN NADPH-dependent 7-cyano- 7-deazaguanine reductase OS=Salmonella infantis OX=595 GN=queF PE=3 SV=1

SEQ ID NO: 49552 - protein, 282 aa, Salmonella infantis; identical to SEQ ID NO: 49523
  misc_feature (1)..(282): tr|A0A402RC87|A0A402RC87_SALIN NADPH-dependent 7-cyano- 7-deazaguanine reductase OS=Salmonella infantis OX=595 GN=queF PE=3 SV=1

SEQ ID NO: 49553 - protein, 282 aa, Salmonella montevideo
  misc_feature (1)..(282): tr|A0A3V8XHU3|A0A3V8XHU3_SALMO NADPH-dependent 7-cyano- 7-deazaguanine reductase OS=Salmonella montevideo OX=11 5981 GN=queF PE=3 SV=1
MSSYENHQALDGLTLGKSTDYRDNYDTSLLQGVPRSLNRDPLGLTADNLPFHGADIWTLYELSWLNSRGLPQVAVGHVELDYTSVNLIESKSFKLYLNSFNQTRFDTWETVRQTLERDLRACAQGNVSVRLHRLDELEGQPVAHFHGTCIDDQDISIDNYQFTTDYLQHAVSGEKQVEETLVSHLLKSNCLITHQPDWGSIQIQYRGRKIDREKLLRYLVSFRHHNEFHEQCVERIFNDILRFCQPETLSVYARYTRRGGLDINPWRSNANFVPATGRLARQ

SEQ ID NO: 49554 - protein, 282 aa, Salmonella montevideo; identical to SEQ ID NO: 49526
  misc_feature (1)..(282): tr|A0A3V6QBI8|A0A3V6QBI8_SALMO NADPH-dependent 7-cyano- 7-deazaguanine reductase OS=Salmonella montevideo OX=11 5981 GN=queF PE=3 SV=1

SEQ ID NO: 49555 - protein, 282 aa, Salmonella moscow; identical to SEQ ID NO: 49525
  misc_feature (1)..(282): tr|A0A5H7LCN5|A0A5H7LCN5_SALMC NADPH-dependent 7-cyano- 7-deazaguanine reductase QueF OS=Salmonella moscow OX=2 8146 GN=queF PE=4 SV=1

SEQ ID NO: 49556 - protein, 282 aa, Salmonella muenchen; identical to SEQ ID NO: 49525
  misc_feature (1)..(282): tr|A0A3T3EP61|A0A3T3EP61_SALMU NADPH-dependent 7-cyano- 7-deazaguanine reductase OS=Salmonella muenchen OX=596 GN=queF PE=3 SV=1

SEQ ID NO: 49557 - protein, 282 aa, Salmonella muenster
  misc_feature (1)..(282): tr|A0A5J1ART6|A0A5J1ART6_SALMS NADPH-dependent 7-cyano- 7-deazaguanine reductase QueF OS=Salmonella muenster OX =82689 GN=queF PE=4 SV=1
MSSYENHQALDGLTLGKSTDYRDNYDASLLQGVPRSLNRDPLGLTADNLPFHGADIWTLYELSWLNSQGLPQVAVGHVELDYTSVNLIESKSFKLYLNSFNQTRFDTWETVRQTLERDLRACAQGNVSVKLHRLDELEGQPVAHFHGACIDDQDISIDNYQFTTDYLQHAVSGEKQVEETLVSHLLKSNCLITHQPDWGSIQIQYRGRKIDREKLLRYLVSFRHHNEFHEQCVERIFNDILRFCQPETLSVYARYTRRGGLDINPWRSNTDFVPATGRLARQ

SEQ ID NO: 49558 - protein, 282 aa, Salmonella muenster; identical to SEQ ID NO: 49526
  misc_feature (1)..(282): tr|A0A5H9DTT6|A0A5H9DTT6_SALMS NADPH-dependent 7-cyano- 7-deazaguanine reductase QueF OS=Salmonella muenster OX =82689 GN=queF PE=4 SV=1

SEQ ID NO: 49559 - protein, 282 aa, Salmonella newport; identical to SEQ ID NO: 49535
  misc_feature (1)..(282): sp|B4T4W1|QUEF_SALNS NADPH-dependent 7-cyano-7-deazagua nine reductase OS=Salmonella newport (strain SL254) OX= 423368 GN=queF PE=3 SV=1

SEQ ID NO: 49560 - protein, 282 aa, Salmonella newport
  misc_feature (1)..(282): tr|A0A3V9X3Y4|A0A3V9X3Y4_SALNE NADPH-dependent 7-cyano- 7-deazaguanine reductase OS=Salmonella newport OX=10861 9 GN=queF PE=3 SV=1
MSSYENHQALDGLTLGKSTDYRDNYDASLLQGVPRSLNRDPLGLTADNLPFHGADIWTLYELSWLNSQGLPQVAVGHVELDYTSVNLIESKSFKLYLNSFNQTRFDTWETVRQTLERDLRACAQGNVSVKLHRLDELEGQPVAHFHGTCIDDQDISIDNYQFTTDYLQHAVSGEKQVEETLVSHLLKSNCLITHQPDWGSIQIQYRGRKIDREKLLRYLVSFRHHNEFHEQCVERIFNDILRFCQPETLSVYARYTRRGGLDINPWRSNTDFVPATGRLARQ

SEQ ID NO: 49561 - protein, 282 aa, Salmonella oranienberg; identical to SEQ ID NO: 49557
  misc_feature (1)..(282): tr|A0A3Z0YHX8|A0A3Z0YHX8_SALON NADPH-dependent 7-cyano- 7-deazaguanine reductase OS=Salmonella oranienberg OX=2 8147 GN=queF PE=3 SV=1

SEQ ID NO: 49562 - protein, 282 aa, Salmonella oranienberg; identical to SEQ ID NO: 49526
  misc_feature (1)..(282): tr|A0A3V8KTF3|A0A3V8KTF3_SALON NADPH-dependent 7-cyano- 7-deazaguanine reductase OS=Salmonella oranienberg OX=2 8147 GN=queF PE=3 SV=1

SEQ ID NO: 49563 - protein, 282 aa, Salmonella paratyphi
  misc_feature (1)..(282): sp|Q5PEK0|QUEF_SALPA NADPH-dependent 7-cyano-7-deazagua nine reductase OS=Salmonella paratyphi A (strain ATCC 9 150 / SARB42) OX=295319 GN=queF PE=3 SV=1
MSSYENHQALDGLTLGKSTDYRDNYDVSLLQGVPRSLNRDPLGLTADNLPFHGADIWTLYELSWLNSQGLPQVAVGHVELDYTSVNLIESKSFKLYLNSFNQTRFDTWETVRQTLERDLRACAQGNVSVRLHRLDELEGQPVAHFHGACIDDQDISIDNYQFTTDYLQHAVSGEKQVEETLVSHLLKSNCLITHQPDWGSIQIQYRGRKIDREKLLRYLVSFRHHNEFHEQCVERIFNDILRFCQPETLSIYARYTRRGGLDINPWRSNTDFVPATGRLARQ

SEQ ID NO: 49564 - protein, 282 aa, Salmonella paratyphi; identical to SEQ ID NO: 49563
  misc_feature (1)..(282): tr|A0A5J1G6V7|A0A5J1G6V7_SALPT NADPH-dependent 7-cyano- 7-deazaguanine reductase QueF OS=Salmonella paratyphi A OX=54388 GN=queF PE=3 SV=1

SEQ ID NO: 49565 - protein, 282 aa, Salmonella potsdam; identical to SEQ ID NO: 49525
  misc_feature (1)..(282): tr|A0A5I2XB99|A0A5I2XB99_SALPO NADPH-dependent 7-cyano- 7-deazaguanine reductase QueF OS=Salmonella potsdam OX= 597 GN=queF PE=4 SV=1

SEQ ID NO: 49566 - protein, 282 aa, Salmonella rubislaw; identical to SEQ ID NO: 49526
  misc_feature (1)..(282): tr|A0A3V7ILN0|A0A3V7ILN0_SALRU NADPH-dependent 7-cyano- 7-deazaguanine reductase OS=Salmonella rubislaw OX=598 GN=queF PE=3 SV=1

SEQ ID NO: 49567 - protein, 282 aa, Salmonella schwarzengrund; identical to SEQ ID NO: 49526
  misc_feature (1)..(282): sp|B4TUI7|QUEF_SALSV NADPH-dependent 7-cyano-7-deazagua nine reductase OS=Salmonella schwarzengrund (strain CVM 19633) OX=439843 GN=queF PE=3 SV=1

SEQ ID NO: 49568 - protein, 282 aa, Salmonella senftenberg
  misc_feature (1)..(282): tr|A0A401AQ78|A0A401AQ78_SALSE NADPH-dependent 7-cyano- 7-deazaguanine reductase OS=Salmonella senftenberg OX=2 8150 GN=queF PE=3 SV=1
MSSYENHQALDGLTLGKSTDYRDNYDASLLQGVPRSLNRDPLGLTADNLPFHGADIWTLYELSWLNSQGLPQVAVGHVELDYTSVNLIESKSFKLYLNSFNQTRFDTWETVRQTLERDLRACAQGNVSVKLHRLDELEGQPVTHFHGACIDDQDISIDNYQFTTDYLQHAVSGEKQVEETLVSHLLKSNCLITHQPDWGSIQIQYRGRKIDREKLLRYLVSFRHHNEFHEQCVERIFNDILRFCQPETLSVYARYTRRGGLDINPWRSNTDFVPATGRLARQ

SEQ ID NO: 49569 - protein, 282 aa, Salmonella senftenberg; identical to SEQ ID NO: 49525
  misc_feature (1)..(282): tr|A0A3V9FHB5|A0A3V9FHB5_SALSE NADPH-dependent 7-cyano- 7-deazaguanine reductase OS=Salmonella senftenberg OX=2 8150 GN=queF PE=3 SV=1

SEQ ID NO: 49570 - protein, 282 aa, Salmonella sp.; identical to SEQ ID NO: 49535
  misc_feature (1)..(282): tr|A0A509BM52|A0A509BM52_9ENTR NADPH-dependent 7-cyano- 7-deazaguanine reductase OS=Salmonella sp. NCTC 6947 OX =2583581 GN=queF PE=3 SV=1

SEQ ID NO: 49571 - protein, 282 aa, Salmonella sp.
  misc_feature (1)..(282): tr|A0A1F2J8B6|A0A1F2J8B6_9ENTR NADPH-dependent 7-cyano- 7-deazaguanine reductase OS=Salmonella sp. HMSC13B08 OX =1581094 GN=queF PE=3 SV=1
MSSYENHQALDGLTLGKSTDYRDNYDASLLQGVPRSLNRDPLDLKADNLPFHGADIWTLYELSWLNAKGVPQVAVGHVELDYTSVNLIESKSFKLYLNSFNQTRFDSWDAVRQTLENDLRACAQGEVSVALYRLDELEGQPVAHFHGTCIDDQDITIDNYQFSTDYLENAASGEKVVEETLVSHLLKSNCLITHQPDWGSIQICYRGRKIDREKLLRYLVSFRHHNEFHEQCVERIFNDLLRFCQPEKLSVYARYTRRGGLDINPWRSNTDFVPATGRLVRQ

SEQ ID NO: 49572 - protein, 282 aa, Salmonella thompson
  misc_feature (1)..(282): tr|A0A3V4QAP5|A0A3V4QAP5_SALTH NADPH-dependent 7-cyano- 7-deazaguanine reductase OS=Salmonella thompson OX=600 GN=queF PE=3 SV=1
MSSYENHQALDGLTLGKSTDYRDNYDVSLLQGVPRSLNRDPLGLTADNLPFHGADIWTLYELSWLNSQGLPQVAVGHVELDYTSVNLIESKSFKLYLNSFNQTRFDTWETVRQTLERDLRACAQGNVSVRLHRLDELEGQPVAHFHGACIDDQDISIDNYQFTTDYLQHAVSGEKQVEETLVSHLLKSNCLITHQPDWGSIQIQYRGRKIDREKLLRYLVSFRHHNEFHEQCVERIFNDILRFCQPETLSVYARYTRRGGLDINPWRSNTDFLPATGRLARQ

SEQ ID NO: 49573 - protein, 282 aa, Salmonella thompson; identical to SEQ ID NO: 49530
  misc_feature (1)..(282): tr|A0A3Y9ZNU8|A0A3Y9ZNU8_SALTH NADPH-dependent 7-cyano- 7-deazaguanine reductase OS=Salmonella thompson OX=600 GN=queF PE=3 SV=1

SEQ ID NO: 49574 - protein, 282 aa, Salmonella typhi; identical to SEQ ID NO: 49525
  misc_feature (1)..(282): sp|Q8Z437|QUEF_SALTI NADPH-dependent 7-cyano-7-deazagua nine reductase OS=Salmonella typhi OX=90370 GN=queF PE= 3 SV=1

SEQ ID NO: 49575 - protein, 282 aa, Salmonella typhi; identical to SEQ ID NO: 49525
  misc_feature (1)..(282): tr|A0A4U8NJR7|A0A4U8NJR7_SALTI NADPH-dependent 7-cyano- 7-deazaguanine reductase OS=Salmonella typhi OX=90370 G N=queF PE=3 SV=1

SEQ ID NO: 49576 - protein, 282 aa, Salmonella typhimurium
  misc_feature (1)..(282): sp|Q8ZMD3|QUEF_SALTY NADPH-dependent 7-cyano-7-deazagua nine reductase OS=Salmonella typhimurium (strain LT2 / SGSC1412 / ATCC 700720) OX=99287 GN=queF PE=3 SV=1
MSSYENHQALDGLTLGKSTDYRDNYDVSLLQGVPRSLNRDPLGLTADNLPFHGADIWTLYELSWLNSQGLPQVAVGHVELDYTSVNLIESKSFKLYLNSFNQTRFDTWETVRQTLERDLRACAQGNVSVRLHRLDELEGQPVAHFHGTCIDDQDISIDNYQFTTDYLQHAVSGEKQVEETLVSHLLKSNCLITHQPDWGSIQIQYRGRKIDREKLLRYLVSFRHHNEFHEQCVERIFNDILRFCQPETLSVYARYTRRGGLDINPWRSNTDFVPATGRLARQ

SEQ ID NO: 49577 - protein, 282 aa, Salmonella typhimurium; identical to SEQ ID NO: 49576
  misc_feature (1)..(282): tr|A0A3Z2F4M9|A0A3Z2F4M9_SALTU NADPH-dependent 7-cyano- 7-deazaguanine reductase OS=Salmonella typhimurium (str ain ATCC 68169 / UK-1) OX=990282 GN=queF PE=3 SV=1

SEQ ID NO: 49578 - protein, 282 aa, Salmonella virchow; identical to SEQ ID NO: 49530
  misc_feature (1)..(282): tr|A0A5J0U5N5|A0A5J0U5N5_SALVI NADPH-dependent 7-cyano- 7-deazaguanine reductase QueF OS=Salmonella virchow OX= 48409 GN=queF PE=4 SV=1

SEQ ID NO: 49579 - protein, 282 aa, Salmonella virchow
  misc_feature (1)..(282): tr|A0A5I1KRC6|A0A5I1KRC6_SALVI NADPH-dependent 7-cyano- 7-deazaguanine reductase QueF OS=Salmonella virchow OX= 48409 GN=queF PE=4 SV=1
MSSYENHQALDGLTLGKSTDYRDNYDASLLQGVPRSLNRDPLGLTADNLPFHGADIWTLYELSWLNSQGLPQVAVGHVELDYTSVNLIESKSFKLYLNSFNQTRFDTWETVRQTLERDLRACAQGNVSVKLHRLDELEGQPVAHFHGACIDDQDISIDNYQFTTDYLQHAVSGEKQVEETLVSHLLKSNCLITHQPDWGSIQIQYRGRKIDREKLLRYLVSFRHHNEFHEQCVERIFYDILRFCQPETLSVYARYTRRGGLDINPWRSNTDFVPATGRLARQ

SEQ ID NO: 49580 - protein, 165 aa, Salsuginibacillus halophilus
  misc_feature (1)..(165): tr|A0A2P8HLB7|A0A2P8HLB7_9BACI NADPH-dependent 7-cyano- 7-deazaguanine reductase OS=Salsuginibacillus halophilu s OX=517424 GN=queF PE=3 SV=1
MSGRKDDELPSVSHLGSEQTTYTFDYDPSLLETFENNHPNRDYVVKFNCPEFTTLCPKTGQPDFATIYIRYIPEVNMVESKSLKLYLFSFRNHGGFHEDAINTIMNDLIDLMDPRFIEVWGKFTPRGGISIDPYANYGRPETKYEQMAEQRLLYHDLYPEAVDNR

SEQ ID NO: 49581 - protein, 282 aa, Samsonia erythrinae
  misc_feature (1)..(282): tr|A0A4R3VNR4|A0A4R3VNR4_9GAMM NADPH-dependent 7-cyano- 7-deazaguanine reductase OS=Samsonia erythrinae OX=1604 34 GN=queF PE=3 SV=1
MSVYDKHQALSDLTLGKPTPYHDHYNAALLQPVPRSLNREPLGLHPDSLPFHGADIWTLYELSWLNARGVPQVAVGEVRLNAESLNLIESKSFKLYLNSFNQTTFGSWESVRATLARDLSHCAQGDVSVTLFKLSELESQPLAAFAGECIDEQDIQIDNYDFNADYLAANVQDAPVVEETLVSHLLKSNCLITHQPDWGSVQIHYRGKRINREALLRYIVSFRHHNEFHEQCVERIFNDLTRYYQPEKLSVYARYTRRGGLDINPWRSNSPFNPPNGRLPRQ

SEQ ID NO: 49582 - protein, 150 aa, Sandaracinobacter sp.
  misc_feature (1)..(150): tr|A0A501XDM3|A0A501XDM3_9SPHN NADPH-dependent 7-cyano- 7-deazaguanine reductase OS=Sandaracinobacter sp. PAMC 28131 OX=1715348 GN=queF PE=3 SV=1
MSFEPTHLGQSSGLPASPDAAVLDYPPNPHPDALYLIRFVAPEFTSLCPVTGQPDFAHLVIDYAPGETIVESKSLKLFLGSFRNHAGFHEACTVGIGRRLFDEMKPKWLRIGGYWYPRGGIPIDVFWQSGPPPEGLWLPDQGVPPYRGRG

SEQ ID NO: 49583 - protein, 149 aa, Sandarakinorhabdus cyanobacteriorum
  misc_feature (1)..(149): tr|A0A255Y4T6|A0A255Y4T6_9SPHN NADPH-dependent 7-cyano- 7-deazaguanine reductase OS=Sandarakinorhabdus cyanobac teriorum OX=1981098 GN=queF PE=3 SV=1
MVDVLHLGQTSALPASPEAAVLDYPPNPRPGAMFLVRFTCPEFTSLCPVTGAPDFAHIVIDYVPDQTIVESKALKLFLGSFRNHAGFHEDVTVGIGQRLVAEMQPRWLRIGGYWYPRGGIPIDVFWQSGPVPDGLWLPDQGVPTYRGRG

SEQ ID NO: 49584 - protein, 149 aa, Sandarakinorhabdus sp.
  misc_feature (1)..(149): tr|A0A552UIU7|A0A552UIU7_9SPHN NADPH-dependent 7-cyano- 7-deazaguanine reductase OS=Sandarakinorhabdus sp. LB1R 16 OX=2593303 GN=queF PE=3 SV=1
MTDLTHLGRASALPATPADAVLDYPANPRPGTDYLVRFAVPEFTSLCPVTGQPDFAHLVIEYVPAATIVESKSLKLFLGSFRNHAGFHEDCTVGIGQRLFDEMAPKWLRIGGYWYPRGGIPIDVFWQSGPPPAGVWLPDQGVAPYRGRG

SEQ ID NO: 49585 - protein, 291 aa, Sanguibacteroides justesenii
  misc_feature (1)..(291): tr|A0A0C3R6W0|A0A0C3R6W0_9PORP 7-cyano-7-deazaguanine r eductase OS=Sanguibacteroides justesenii OX=1547597 GN= BA92_04975 PE=4 SV=1
MEIEAKVLGQQVAYPTDYCPSILVPVPRSLNREMYDIRQPEELFCGYDTWHAYEAGFITRKGLPVCGVLKIVYPSTSKKLVESKSLKLYLNSFNMARLGENVSEGIRLFTQTVQSDLQELLNTSVQVCFHEKLPDRIPFDFEGYTLLEEIPLNQETEFTEYNEAPALLRQTIQPGGEIKVYSNLLRSNCKITKQPDWGTLYVWIKAQQLPSPVSLLKYIVSLRNENHFHEEICEMTYKRLWDLFHPEILSVSCLYTRRGGIDICPSRANRKEYLPSYLHTPEILTRRNLRQ

SEQ ID NO: 49586 - protein, 278 aa, Sapientia aquatica
  misc_feature (1)..(278): tr|A0A4V3AUM1|A0A4V3AUM1_9BURK NADPH-dependent 7-cyano- 7-deazaguanine reductase OS=Sapientia aquatica OX=15496 40 GN=queF PE=3 SV=1
MQENTPDNSALGKTSTYVTQYDASLLFPIPRAAKRAEIGLGASLPFFGMDIWNAYEVSWLNLRGKPQIAIATFMVPADSHNIIESKSFKLYLNSFNQTKLADSDALLTLLKQDISAGFGAPVQIKLTLPEQFSQYQFGELSGLLLDRLDIDVDQYSPNTALLKSDSEAAPIEETLVSHLLKSNCLVTGQPDWASVQIHYVGAPIEQEGLLKYLIGFRNHNEFHEQCVERIFNDILVACKPQKLAVYARYTRRGGLDINPWRSNFSSNQTPSNLRNSRQ

SEQ ID NO: 49587 - protein, 154 aa, Unknown
  misc_feature (1)..(154): tr|A0A2A5YA86|A0A2A5YA86_9PROT NADPH-dependent 7-cyano- 7-deazaguanine reductase OS=SAR116 cluster bacterium ME D-G05 OX=1986234 GN=queF PE=3 SV=1
MSADQPTELSALGKTTPLPSEPSIDTLEKVPSPHPDDHFVVRFTQPEFTSLCPVTAQPDFAHLVIDYIPDQWMVESKSLKLYLNSFRNHQAFHEACTVNIGKDLITLLSPRWLRIGGYWYPRGGMPIDIFWQTGNVPDNVWLPEQGVATYRGRG

SEQ ID NO: 49588 - protein, 250 aa, Unknown
  misc_feature (1)..(250): tr|A0A2E0JYT4|A0A2E0JYT4_9PROT GTP cyclohydrolase OS=SA R116 cluster bacterium OX=2024888 GN=CMN49_04590 PE=4 S V=1
MAGVLGQTVAAPSDYAPHVLERIDRRRGRKGIEQPSPNIVNGHDVWHCYELSWMLPDGTMTFTTGALIIPADSSFTVESKSLKLYLNSLNAHVFNDDEVAIACIEKDLSELTQSQVRLVRVDPGELQATSSKLDDDAVRVGDLEGTVAFRSTGFRSLCPVTAQPDWASLCIEVSASHYDESSIMAAIESLRNHQGFHEQCVEDLYSRIENALNPSELHVVGFFQRRGGIDITPWRSSDQSAPRITRLFEQ

SEQ ID NO: 49589 - protein, 138 aa, Unknown
  misc_feature (1)..(138): tr|A0A2N0LIM3|A0A2N0LIM3_9CHLR NADPH-dependent 7-cyano- 7-deazaguanine reductase OS=SAR202 cluster bacterium Io 17-Chloro-G5 OX=1926614 GN=queF PE=3 SV=1
MKEQYDGLDQELPSKGEEAVDPACLLTFQYEYPSQKSQVEIDTDEFTAVCPWTGLPDYGDLLISYVPGDLCIELKSLKYYLLSYRDVGIVQEHAANRILNDLVAICQPQSMKIVLDYKVRGGLHTAVTVEYSQEQRGN

SEQ ID NO: 49590 - protein, 129 aa, Unknown
  misc_feature (1)..(129): tr|A0A2N0KIK3|A0A2N0KIK3_9CHLR NADPH-dependent 7-cyano- 7-deazaguanine reductase OS=SAR202 cluster bacterium Ca sp-Chloro-G3 OX=1926605 GN=queF PE=3 SV=1
MDQQLTWKDEATIDSQCLLAFQYEFPEQESEVSIDTDEFTAVCPWTGLPDYGVLYISYVPSQSCIELKSLKFYLLSYRDVGIVQEHAANRILKDLVALCHPHRMKVTLDYKVRGGIHTAVSAEFKTAQD

SEQ ID NO: 49591 - protein, 128 aa, Unknown
  misc_feature (1)..(128): tr|A0A2A4T7C0|A0A2A4T7C0_9DELT NADPH-dependent 7-cyano- 7-deazaguanine reductase OS=SAR324 cluster bacterium OX =2024889 GN=queF PE=3 SV=1
MAVAEGKIFEFVGPEAIRADFLETFEFDSPNQYIETKTNEFGAVCPFSGLPDFGELIIEYYPEGGKCIELKSLKYYVISYRNVGLFQEGVTKRIYEDMKAVLETSRIKVTTIYQPRGGFYTTCVEGQL

SEQ ID NO: 49592 - protein, 136 aa, Unknown
  misc_feature (1)..(136): tr|A0A432GP71|A0A432GP71_9DELT NADPH-dependent 7-cyano- 7-deazaguanine reductase OS=SAR324 cluster bacterium OX =2024889 GN=queF PE=3 SV=1
MDTSSIDYAEGRVFTFEDESAIRPGFLETIEYSGPRQHVSYQMNEFAAVCPFSGLPDTGIVWVDYVPKQKLVELKALKYYFLSFRNVGIFQEAVTARIFKDLYPLLEPEELLIKTRYNTRGGIDTTCTIDSNEQKN

SEQ ID NO: 49593 - protein, 220 aa, Unknown
  misc_feature (1)..(220): tr|J5KFG3|J5KFG3_9GAMM NADPH-dependent 7-cyano-7-deazag uanine reductase OS=SAR86 cluster bacterium SAR86A OX=1 123866 GN=NT01SARS_0559 PE=4 SV=1
MDPIKRQKDNIKYGIDIWNVYDFMYLNHNKIPQLVVLEIVIPYESDLIIESKSLKLYLNEFYKKSFSNKEVLIKKIKSQLELTIKHPIKIKVLKKFRPEPKYLDLNNTKLKKTKPNTIIKFNGFRSICPVTSQPDFANIYLYLDKSIDVGYLNKYLMSYKEHGGFHEKCIDKIFIDLYSKLKPDHIEVCGRFQRRGGIDINPIRGTKKKILFNNFREFNQ

SEQ ID NO: 49594 - protein, 270 aa, Unknown
  misc_feature (1)..(270): tr|A0A2A5C809|A0A2A5C809_9GAMM NADPH-dependent 7-cyano- 7-deazaguanine reductase OS=SAR86 cluster bacterium OX= 2030880 GN=queF PE=3 SV=1
MAENPMGKTSGYPDSFDPELLVALPRSTNREIIGVGDPLPFTGEDVWHAYELSWLNKQGLPTAVIGRFSFSCNSPCLVESKSFKLFLNSLNQEKFNDKKDVISLLTEHLSKCSGDKVGIELIELDASADQTKTPEGLCIDGLNVEIKDYHPNSSLLSCDENNVIEEHLYSDLFKSNCPVTNQPDWASMSIYYKGSAISHESLLAYLVSYRLHSDYHENCVEKIFVDLQKKCKPQVLTVQANFLRRGGLDINPVRSTHGEYIKTPFRFIRQ

SEQ ID NO: 49595 - protein, 277 aa, Unknown
  misc_feature (1)..(277): tr|A0A0R2W3T8|A0A0R2W3T8_9GAMM NADPH-dependent 7-cyano- 7-deazaguanine reductase OS=SAR92 bacterium BACL16 MAG- 120619-bin48 OX=1655625 GN=queF PE=3 SV=1
MADYSNTELGKETQYKDQYDPTLLWPIARAEAREQLSSESLGPLPAFLGADIWTAFEISWLNSDGLPQVAIAEFIFPCTSPNIIESKSFKLYLNSFNQTKFASTQAVSEVMRADLAAVSGADIDIIFYELAEYNGFKPIAEPEGHCLDQQAVAIDSYSPDASYLRVNDSRRTDETLYSHLLRTNCPVTDQPDWASVYISYQGSAIDREGLLKYLVSYRQHQDFHEQCVEKIFSDIMQRCKPEHLDVYARYMRRGGLDINPYRSTRYRLPGAHRQVRQ

SEQ ID NO: 49596 - protein, 273 aa, Unknown
  misc_feature (1)..(273): tr|A0A0R2U288|A0A0R2U288_9GAMM NADPH-dependent 7-cyano- 7-deazaguanine reductase OS=SAR92 bacterium BACL26 MAG- 121220-bin70 OX=1655626 GN=queF PE=3 SV=1
MVDYSDTELGQETRYTDQYDPSLLCSIPRSKARQKSKQGALPFMGADLWTAFEISWLNSDGLPQVAIGEFFFPCISDSIIESKSFKLYLNSVIQTQYETKQALQNVLLKDLSAASGSQVEIVLYELSEYAGFNPISESEGVCVDQQSVVIDTYQPDASLLNADQQELVTETLYSHLLKTNCPVTNQPDWASIYISYQGPRIDRTGLLKYIVSYRMHQDFHEQCVEQIFADLMALCQPTELSVYARYMRRGGLDINPYRSTTFTRPPSMRQVRQ

SEQ ID NO: 49597 - protein, 273 aa, Unknown
  misc_feature (1)..(273): tr|A0A520MCW8|A0A520MCW8_9GAMM NADPH-dependent 7-cyano- 7-deazaguanine reductase OS=SAR92 clade bacterium OX=23 15479 GN=queF PE=3 SV=1
MANYSDTGLGKHTAYSEQYDASLLQPISRSKARQQESGGELPFVGSDFWTAFEISWLNSDGLPQVAIGEFSFPCTSDSIIESKSFKLYLNSLIQTKYPSKQAVTDLLTVDLSHACGEDVGVVLYDLAEYAGFHAISEPQGICLDQRGVSIDTYEPDNKFLIANKREVITETLYSHLLKTNCPVTDQPDWASVYVSYSGPRIDKDGLLKYIVSYRQHQDFHEQCVEQIFTDIMQCCSPFELSVYARYMRRGGLDINPFRSTTSTVPPVWRQVRQ

SEQ ID NO: 49598 - protein, 167 aa, Schlegelella thermodepolymerans
  misc_feature (1)..(167): tr|A0A2S5T6G7|A0A2S5T6G7_9BURK NADPH-dependent 7-cyano- 7-deazaguanine reductase OS=Schlegelella thermodepolyme rans OX=215580 GN=queF PE=3 SV=1
MPKTVSRTASRPAATKAAAPKQRPVPATPPSAPSKELHVFPNPAPKRDYVIQFQIPEFTCHCPLTGQPDFAHFTIDYIADKLCVELKSLKMYMWSYRNEGAFHEKVTNDILDDIVKAIDPRYIRITAKWYVRGGIYTNVVAEHRKKGWKPQPRIELPQHAHETGLLG

SEQ ID NO: 49599 - protein, 164 aa, Schwartzia succinivorans
  misc_feature (1)..(164): tr|A0A1M4SWE6|A0A1M4SWE6_9FIRM NADPH-dependent 7-cyano- 7-deazaguanine reductase OS=Schwartzia succinivorans DS M 10502 OX=1123243 GN=queF PE=3 SV=1
MSRMKDEENLTKLGSNGTKYPQDYAPEMLETFVNKHQENDYWVKFNCPEFTTLCPITGQPDFATLYISYVPDVKMVESKSLKLYLFSFRNHGDFHEDVVNIIMKDLIKLLDPRYIEVWGKFLPRGGISIDPYANYGRPGTKYEKLAEMRFSRHDIECLDKVDNR

SEQ ID NO: 49600 - protein, 166 aa, Scopulibacillus darangshiensis
  misc_feature (1)..(166): tr|A0A4R2NPX5|A0A4R2NPX5_9BACL NADPH-dependent 7-cyano- 7-deazaguanine reductase OS=Scopulibacillus darangshien sis OX=442528 GN=queF PE=3 SV=1
MSGRNHEEGLKDLTLLGNQHTQYAMTYAPEVLEAVDNLHADRDYFVKFNCPEFTSLCPLTHQPDFATMYISYIPDKKIVESKSLKLYLFSFRNHGDFHEDCVNIIMNDLIKLLDPRYIEVWGKFTPRGGISIDPWCNYGRPGTKYEEMANVRLMNHDLYPEKVDNR

SEQ ID NO: 49601 - protein, 125 aa, Scytonema hofmannii
  misc_feature (1)..(125): tr|A0A139WVQ6|A0A139WVQ6_9CYAN NADPH-dependent 7-cyano- 7-deazaguanine reductase OS=Scytonema hofmannii PCC 711 0 OX=128403 GN=queF PE=3 SV=1
MEMKYGERNIAEGQLITFPNPRVGRRYNIDITLPEFTCKCPFSGYPDFATIYITYIPDERVVELKALKLYINNYRDRYISHEETANQILDDFVAACDPLEVVVKADFAPRGNVHMIVEVRHQKHT

SEQ ID NO: 49602 - protein, 125 aa, Scytonema millei
  misc_feature (1)..(125): tr|A0A1D2P4E9|A0A1D2P4E9_9CYAN NADPH-dependent 7-cyano- 7-deazaguanine reductase OS=Scytonema millei VB511283 O X=1245923 GN=queF PE=3 SV=1
MEMKYGERNIAEGQLITFPNPRIGRRYDINITLPEFTCKCPFSGYPDFATIHITYIPNERVVELKALKLYINSYRDRYISHEETANQILDDFVAACDPIDVTVKADFTPRGNVHTVISVRHQKNA

SEQ ID NO: 49603 - protein, 131 aa, Scytonema millei
  misc_feature (1)..(131): tr|A0A4R4ILU7|A0A4R4ILU7_9CYAN NADPH-dependent 7-cyano- 7-deazaguanine reductase OS=Scytonema millei VB511283 O X=1245923 GN=queF PE=3 SV=1
MSVEEIKYGERQIAEGKLITFPNPRIGRRYEIHITLPEFTCKCPFSGYPDFATIHITYVPDQRVVELKAIKLYINSYRDRYISHEESVNQILDDFVAACDPLEAHIKGDFAPRGNVHTVVEVHHHQTPEAF

SEQ ID NO: 49604 - protein, 125 aa, Scytonema sp.
  misc_feature (1)..(125): tr|A0A1Z4J4T7|A0A1Z4J4T7_9CYAN NADPH-dependent 7-cyano- 7-deazaguanine reductase OS=Scytonema sp. HK-05 OX=1137 095 GN=queF PE=3 SV=1
MEMKYGERNIAEGQLITFPNPRVGRRYDINITLPEFTCKCPFSGYPDFATIHVSYIPDERVVELKALKLYINSYRDRYISHEETANQILDDFVAACDPLDVTVKADFTPRGNVHTVITARHQKNA

SEQ ID NO: 49605 - protein, 125 aa, Scytonema sp.
  misc_feature (1)..(125): tr|A0A1Z4PZ43|A0A1Z4PZ43_9CYAN NADPH-dependent 7-cyano- 7-deazaguanine reductase OS=Scytonema sp. NIES-4073 OX= 2005464 GN=queF PE=3 SV=1
MEMKYGERNIAEGQLITFPNPRVGRRYDINITLPEFTCKCPFSGYPDFATIHVSYIPDERVVELKALKLYINSYRDRYISHEETANQILDDFVAACDPLDVTVKADFTPRGNVHTVISVRHQKNA

SEQ ID NO: 49606 - protein, 127 aa, Scytonema tolypothrichoides
  misc_feature (1)..(127): tr|A0A0C2R377|A0A0C2R377_9CYAN NADPH-dependent 7-cyano- 7-deazaguanine reductase OS=Scytonema tolypothrichoides VB-61278 OX=1233231 GN=queF PE=3 SV=1
MTMEMKYGERNIAEGQLITFPNPRVGRRYNIDITLPEFTCKCPFSGYPDFATIHISYIPDERVVELKALKLYINNYRDRYISHEETANQILDDFVAACDPMDVTVKADFTPRGNVHTVVEVRHQKNA

SEQ ID NO: 49607 - protein, 309 aa, Unknown
  misc_feature (1)..(309): tr|J3VT94|J3VT94_9ENTR NADPH-dependent 7-cyano-7-deazag uanine reductase OS=secondary endosymbiont of Ctenaryta ina eucalypti OX=1199245 GN=queF PE=3 SV=1
MHHVLFMHVIFEILPNSCLSNPQVNPMTYNYQHHTFLASLMLGKPTLYNDHRYDPALLKGIPRSLNRSSLGLQAKRLPFHGADIWTLYELSWLNDAGLPQVAIGEITLNATSENLIESKSFKLYLNSFNQTRLPSSDAVRICLIKDLSRCAVGEVKITLRKLEEFTGSPVLNFEGECIDDQSISIKDYTFHNCWLKGSTGSAMVSETLVSHLLKSNCLITHQPDWGSVQIRYVGARIDREALLRYLVSFRKHNEFHEQCVERIFCDLMTFCHPHTLSVYARYTRRGGLDINPWRSNTHFSPVIGRLARQ

SEQ ID NO: 49608 - protein, 279 aa, Unknown
  misc_feature (1)..(279): tr|J3TGS4|J3TGS4_9ENTR NADPH-dependent 7-cyano-7-deazag uanine reductase OS=secondary endosymbiont of Heteropsy lla cubana OX=134287 GN=queF PE=3 SV=1
MKMKKNIFKKLPLGKKTSYIQKYSPALLKGIPRNLNYNKLDLSRDKQFFHGKDIWTLYELSWLNKNGIPQIAIGDVQFNCKNKNIAESKSVKLYLNSFNQSIFNDWNEVKYIIKNDLSKISKGNVDVALYKIEELEKKAIGTLLGFCIDDQDIIIRNFEFNNKYLLHSTRDVLVEETLVSHILKSNCLITNQPDWGSVQIKYSGKKIDHAALLRYLVSFRQHNEFHEQCVERIFHDIMQYCNPKKLSVYARYTRRGGIDINPWRSNTHFIPTKERLSRQ

SEQ ID NO: 49609 - protein, 166 aa, Sedimentibacter sp.
  misc_feature (1)..(166): tr|A0A252CMX6|A0A252CMX6_9FIRM NADPH-dependent 7-cyano- 7-deazaguanine reductase OS=Sedimentibacter sp. SX930 O X=1955060 GN=queF PE=3 SV=1
MTAGRNEADLNGITQLGNQQTKYPQDYDPKVLETFPNKHPDNDYFVKFNCPEFTSLCPMTGQPDFATIYISYVPGEIMVESKSLKLYLFSFRNHGDFHEDCMNIIMKDLIALMAPKYIEVWGKFTPRGGISIDPYCNYGKPETRWADVAWQRLAQHDLYPEKVDNR

SEQ ID NO: 49610 - protein, 129 aa, Sedimenticola selenatireducens
  misc_feature (1)..(129): tr|A0A558E249|A0A558E249_9GAMM NADPH-dependent 7-cyano- 7-deazaguanine reductase OS=Sedimenticola selenatireduc ens OX=191960 GN=queF PE=3 SV=1
MSSQPSKSLETFDNPQPDRDYTIRIEVPEFTCLCPKTGQPDFAELTIEYIADQLCVELKSLKMYAWSFRDEGAFHEAVTNQILSDLVSATQPRFMRLTANFNVRGGIYTSVVAEHRAENWQPPIPVNLP

SEQ ID NO: 49611 - protein, 129 aa, Sedimenticola selenatireducens
  misc_feature (1)..(129): tr|A0A2N6CYP2|A0A2N6CYP2_9GAMM NADPH-dependent 7-cyano- 7-deazaguanine reductase OS=Sedimenticola selenatireduc ens OX=191960 GN=queF PE=3 SV=1
MPSQPSKTLETFDNPQPERDYTIRIEVPEFTCLCPKTGQPDFAELTIEYIADKLCVELKSLKMYAWSFRDEGAFHEAVTNRILSDLVAATQPRFMRLTADFNVRGGIYTTVVAEHRAENWQPPVPVTLP

SEQ ID NO: 49612 - protein, 129 aa, Sedimenticola sp.
  misc_feature (1)..(129): tr|A0A2N6G9G5|A0A2N6G9G5_9GAMM NADPH-dependent 7-cyano- 7-deazaguanine reductase OS=Sedimenticola sp. OX=194028 5 GN=queF PE=3 SV=1
MPSQPSKNLETFDNPQPQRDYTIRIRVPEFTCLCPKTGQPDFAELTLEYVADKLCVELKALKMYVWSFRDTGAFHEAVTNRILSDLVTAIQPRFMRLTADFNVRGGIYTTVVAEHRDENWQPPVAVTLP

SEQ ID NO: 49613 - protein, 89 aa, Sedimenticola thiotaurini
  misc_feature (1)..(89): tr|A0A558CNU5|A0A558CNU5_9GAMM NADPH-dependent 7-cyano- 7-deazaguanine reductase (Fragment) OS=Sedimenticola th iotaurini OX=1543721 GN=queF PE=3 SV=1
DFAELTIEYIADKLCVELKSLKMYAWSFRDEGAFHEAVTNQILSDLVSATQPRFMRLTANFNVRGGIYTSVVAEHRAENWQPPVPVNLP

SEQ ID NO: 49614 - protein, 129 aa, Sedimenticola thiotaurini
  misc_feature (1)..(129): tr|A0A0F7JXM8|A0A0F7JXM8_9GAMM NADPH-dependent 7-cyano- 7-deazaguanine reductase OS=Sedimenticola thiotaurini O X=1543721 GN=queF PE=3 SV=1
MPSQPSKTLETFDNPQPERDYTIRIEVPEFTCLCPKTGQPDFAELTIEYIADKLCVELKSLKMYAWSFRDEGAFHEAVTNQILTDLVNATQPRFMRLTANFNVRGGIYTTVVAEHRAENWQPPVPVTLP

SEQ ID NO: 49615 - protein, 122 aa, Sedimentisphaera cyanobacteriorum
  misc_feature (1)..(122): tr|A0A1Q2HQB2|A0A1Q2HQB2_9BACT NADPH-dependent 7-cyano- 7-deazaguanine reductase OS=Sedimentisphaera cyanobacte riorum OX=1940790 GN=queF PE=3 SV=1
MASETKIDLFDNPRPGRDYVISTEVPEFTSVCPVTGQPDFGTISIDYCPDKYCIELKSLKFYMQSFRNRGIYYESAANEILDYLVECCKPKWMKITASFTPRGGISTEVVCEYVSKTCNEQS

SEQ ID NO: 49616 - protein, 122 aa, Sedimentisphaera salicampi
  misc_feature (1)..(122): tr|A0A1W6LNE3|A0A1W6LNE3_9BACT NADPH-dependent 7-cyano- 7-deazaguanine reductase OS=Sedimentisphaera salicampi OX=1941349 GN=queF PE=3 SV=1
MASETKIDLFDNPRPGRDYVISTDVPEFTSVCPVTGQPDFGTVSIDYCPDKYCIELKSLKFYMQSFRNRGIYYESAANEILDYLVECCKPRWMKITASFTPRGGISTEVVCDYVSKNYHGQS

SEQ ID NO: 49617 - protein, 155 aa, Sedimentitalea sp.
  misc_feature (1)..(155): tr|A0A3T0N205|A0A3T0N205_9RHOB NADPH-dependent 7-cyano- 7-deazaguanine reductase OS=Sedimentitalea sp. W43 OX=2 483033 GN=queF PE=3 SV=1
MANEDIYANLTQLGGKTELPNSPEEAVLERVPNPQAGTDYAVRFTAPEFTSLCPMTGQPDFAHIVLDFVPGDWLVESKSLKLFLGSFRNHGAFHEDCTVTIGKRLVELLQPKWLRVGGYWYPRGGIPIDIFYQTGEQPSTVWIPDQGVPTYRGRG

SEQ ID NO: 49618 - protein, 164 aa, Sediminibacillus albus
  misc_feature (1)..(164): tr|A0A1G8WV59|A0A1G8WV59_9BACI NADPH-dependent 7-cyano- 7-deazaguanine reductase OS=Sediminibacillus albus OX=4 07036 GN=queF PE=3 SV=1
MARRDEDLTDLTLLGSQGTAYAFDYTPEVLESFDNKHPNRDYFVKFNCPEFTTLCPKTGQPDFGTVYISYIPDQKMVESKSLKLYLFSFRNHGDFHEDSMNIIMNDLIDLMDPRYIEVWGKFTPRGGISIDPYCNYGKPGTKFEQMADHRLMNHDLYPEKIDNR

SEQ ID NO: 49619 - protein, 165 aa, Sediminibacillus halophilus
  misc_feature (1)..(165): tr|A0A1G9NXG0|A0A1G9NXG0_9BACI NADPH-dependent 7-cyano- 7-deazaguanine reductase OS=Sediminibacillus halophilus OX=482461 GN=queF PE=3 SV=1
MAGRRDEELTDITLLGSQGTTYQFDYTPEVLETFDNKHPGRDYFVKFNCPEFTTLCPKTGQPDFGTVYISYIPDEKMVESKSLKLYLFSFRNHGDFHEDSMNIIMNDLINLMDPRYIEVWGKFTPRGGISIDPFCNYGKPNTKFVQMADHRMMNHDLYPEKIDNR

SEQ ID NO: 49620 - protein, 160 aa, Seinonella peptonophila
  misc_feature (1)..(160): tr|A0A1M4XJ77|A0A1M4XJ77_9BACL NADPH-dependent 7-cyano- 7-deazaguanine reductase OS=Seinonella peptonophila OX= 112248 GN=queF PE=3 SV=1
MEQSIKGLTKLGQDTEYSFQYDPSVLEAFPNQHPDLDYFVKFNCPEFTSLCPMTGQPDFATLYISYVPNLRLVESKSLKLYLFRFRNHGDFHENCVVTIMKDLQQLLEPKYIEVLGKFLPRGGISIDPYVNYGMEGTKWADMAAYRLHRHDLNPENIDNR

SEQ ID NO: 49621 - protein, 163 aa, Selenomonas artemidis
  misc_feature (1)..(163): tr|E7N049|E7N049_9FIRM NADPH-dependent 7-cyano-7-deazag uanine reductase OS=Selenomonas artemidis F0399 OX=7495 51 GN=queF PE=3 SV=1
MAREKTQEGLTLLGEQRTDYGYDYAPEALETFANKHTDHDYWVRFNCPEFTTLCPITGQPDYGTIYISYMPAERMVESKSLKLYLVSFRNHGDFHEDVVNVIMRDLIAIMAPKYIEVQGKFLPRGGISIDPYANYGIPGTKYEALAWERLSQHDRVPERVDNR

SEQ ID NO: 49622 - protein, 163 aa, Selenomonas flueggei
  misc_feature (1)..(163): tr|C4V3B1|C4V3B1_9FIRM NADPH-dependent 7-cyano-7-deazag uanine reductase OS=Selenomonas flueggei ATCC 43531 OX= 638302 GN=queF PE=3 SV=1
MAREKNQDGLTSLGAQRTDYGYDYAPEALETFQNQHADHDYWVRFNCPEFTTLCPITGQPDYGTIYISYMPAERMVESKSLKLYLVSFRNHGDFHEDVVNVIMRDLIQLMAPKYIEVQGKFLPRGGISIDPYANYGIPGTKYETLAWERLSQHDCVPERVDNR

SEQ ID NO: 49623 - protein, 163 aa, Selenomonas infelix
  misc_feature (1)..(163): tr|G5GLI8|G5GLI8_9FIRM NADPH-dependent 7-cyano-7-deazag uanine reductase OS=Selenomonas infelix ATCC 43532 OX=6 79201 GN=queF PE=3 SV=1
MAREKTAEGLTLLGEQRTDYGYDYAPEALETFQNRHTDLDYWVRFNCPEFTTLCPITGQPDYGTIYISYMPAERMVESKSLKLYLVSFRNHGDFHEDVVNVIMRDLIRLMQPKYIEVQGKFLPRGGISIDPYANYGISGTKYETLAWERLSMHDRVPERVDNR

SEQ ID NO: 49624 - protein, 163 aa, Selenomonas noxia
  misc_feature (1)..(163): tr|D4S7V9|D4S7V9_9FIRM NADPH-dependent 7-cyano-7-deazag uanine reductase OS=Selenomonas noxia ATCC 43541 OX=585 503 GN=queF PE=3 SV=1
MAREKTGEGLTLLGEQRTNYGYDYAPEALETFRNKHTDYDYWVRFNCPEFTTLCPITGQPDYGTIYISYMPAERMVESKSLKLYLVSFRNHGDFHEDVVNIIMKDLIQLMAPKYIEVQGKFLPRGGISIDPYANYGIPGTKYEELAWTRLSMHDRVPERVDNR

SEQ ID NO: 49625 - protein, 163 aa, Selenomonas noxia; identical to SEQ ID NO: 49624
  misc_feature (1)..(163): tr|G5H289|G5H289_9FIRM NADPH-dependent 7-cyano-7-deazag uanine reductase OS=Selenomonas noxia F0398 OX=702437 G N=queF PE=3 SV=1

SEQ ID NO: 49626 - protein, 164 aa, Selenomonas ruminantium
  misc_feature (1)..(164): tr|I0GN91|I0GN91_SELRL NADPH-dependent 7-cyano-7-deazag uanine reductase OS=Selenomonas ruminantium subsp. lact ilytica (strain NBRC 103574 / TAM6421) OX=927704 GN=que F PE=3 SV=1
MSRDKEQEDITLLGKKKVKYHYDYCPEILETFQNKHPENDYWVKFNCPEFTALCPITGQPDYATIYISYVPNEKMVESKSLKLYLVSFRNHGDFHEDVVNVIMKDLIKLMEPKYIEVWGKFLPRGGISIDPYANYGQPGTKFEELAWRRFAEHDMVAMDKVDNR

SEQ ID NO: 49627 - protein, 164 aa, Selenomonas ruminantium
  misc_feature (1)..(164): tr|A0A1G7RG68|A0A1G7RG68_SELRU NADPH-dependent 7-cyano- 7-deazaguanine reductase OS=Selenomonas ruminantium OX= 971 GN=queF PE=3 SV=1
MSRDKVAEEITLLGKKKVNYHYDYCPEILETFQNKHPENDYWVKFNCPEFTALCPITGQPDYATIYISYVPQEKMVESKSLKLYLVSFRNHGDFHEDVVNVIMKDLIKLMDPKYIEVWGKFLPRGGISIDPYANYGKPGTKYEELAWRRFAEHDMVAMDKVDNR

SEQ ID NO: 49628 - protein, 163 aa, Selenomonas sp.
  misc_feature (1)..(163): tr|L1NFD6|L1NFD6_9FIRM NADPH-dependent 7-cyano-7-deazag uanine reductase OS=Selenomonas sp. oral taxon 138 str. F0429 OX=1127695 GN=queF PE=3 SV=1
MARVKTEEGLSLLGEQRTDYGYDYAPEALETFQNKHTDHDYWVRFNCPEFTTLCPITGQPDYGTIYISYMPAERMVESKSLKLYLVSFRNHGDFHEDVVNVIMRDLIRLMEPKYIEVQGKFLPRGGISIDPYVNYGLPGTKYEELAWERLSMHDRVPERVDNR

SEQ ID NO: 49629 - protein, 163 aa, Selenomonas sp.
  misc_feature (1)..(163): tr|A0A109WCM6|A0A109WCM6_9FIRM NADPH-dependent 7-cyano- 7-deazaguanine reductase OS=Selenomonas sp. oral taxon 136 OX=713030 GN=queF PE=3 SV=1
MGREKAEEGLTSLGAQRTDYGYDYAPEALETFQNQHTDHDYWVRFNCPEFTTLCPITGQPDYGTIYISYMPAERMVESKSLKLYLVSFRNHGDFHEDVVNAIMRDLIHLMAPKYIEVQGKFLPRGGISIDPYANYGIPGTRYEALAWERLAQHDRVLERVDNR

SEQ ID NO: 49630 - protein, 158 aa, Selenomonas sputigena
  misc_feature (1)..(158): tr|C9LT21|C9LT21_SELS3 NADPH-dependent 7-cyano-7-deazag uanine reductase OS=Selenomonas sputigena (strain ATCC 35185 / DSM 20758 / VPI D19B-28) OX=546271 GN=queF PE=3 SV=1
MKGVTHLGEKNTQYAADYAPELLETFENKHPDKDYWVKFNCPEFTSLCPITGQPDFATITISYVPERRMVESKSLKLYLFSFRNHGDFHEDVVNIILKDLVRLMEPRYIEVWGKFLPRGGISIDPYTNYGRPGTKYEALAEKRFAEHDLYAMDKVDNR

SEQ ID NO: 49631 - protein, 165 aa, Selenomonas sputigena
  misc_feature (1)..(165): tr|F4EV48|F4EV48_SELS3 NADPH-dependent 7-cyano-7-deazag uanine reductase OS=Selenomonas sputigena (strain ATCC 35185 / DSM 20758 / VPI D19B-28) OX=546271 GN=queF PE=3 SV=1
MSRTSDEMKGVTHLGEKNTQYAADYAPELLETFENKHPDKDYWVKFNCPEFTSLCPITGQPDFATITISYVPERRMVESKSLKLYLFSFRNHGDFHEDVVNIILKDLVRLMEPRYIEVWGKFLPRGGISIDPYTNYGRPGTKYEALAEKRFAEHDLYAMDKVDNR

SEQ ID NO: 49632 - protein, 167 aa, Senegalimassilia anaerobia
  misc_feature (1)..(167): tr|A0A369LEV5|A0A369LEV5_9ACTN NADPH-dependent 7-cyano- 7-deazaguanine reductase OS=Senegalimassilia anaerobia OX=1473216 GN=queF PE=3 SV=1
MTNEKPARVGIDDLSLLGNQGVQYPQTYDPGVLETFDNKHPGNDYFVKFNCPEFTALCPITGQPDFATIYISYVPDVRMVESKSLKLYLFSFRNHGDFHEDCVNVIMKDLIALMDPKYIEVWGKFLPRGGISIDPYCNYGKPGTRWEQVAWDRLANHDLHPEAVNNR

SEQ ID NO: 49633 - protein, 167 aa, Senegalimassilia sp.
  misc_feature (1)..(167): tr|A0A4V1QTT2|A0A4V1QTT2_9ACTN NADPH-dependent 7-cyano- 7-deazaguanine reductase OS=Senegalimassilia sp. KGMB04 484 OX=2509433 GN=queF PE=3 SV=1
MTNEKPTREGADDLSLLGNQGVRYPQTYDPSVLETFENKHPGNDYFVKFNCPEFTALCPITGQPDFATIYISYVPNIRMVESKSLKLYLFSFRNHGDFHEDCVNVIMKDLIALMDPKYIEVWGKFLPRGGISIDPYCNYGKPGTRWEQVAWDRLANHDLHPEAVNNR

SEQ ID NO: 49634 - protein, 302 aa, Serpentinomonas mccroryi
  misc_feature (1)..(302): tr|A0A060NMV2|A0A060NMV2_9BURK NADPH-dependent 7-cyano- 7-deazaguanine reductase OS=Serpentinomonas mccroryi OX =1458426 GN=queF PE=3 SV=1
MPPSSHTHSPIQPMSSTCPPPDQSPQPLLLGQPTAYPERYDPTLLCPLPRAPKRAELGVGATLPFLGADLWTAYELSWLNARGKPQLAIVHFTVPCETPQLIESKSFKLYLNSYNQSVFDSAEAVQQRLRQDLTEALWRGSERSGGVGVRLLRPAQFGQERLQALEGLSLDRLDEECSDYEPAPQHLQADTSQAVVQEVLTSDLLKSNCPVTGQPDWASVQIAYSGAPIDQAGLLRYLVSFRQHTGFHEQCVERIYLDIWQRCRPLKLSVYARYTRRGGLDINPWRCSHPQQPPEPVRTARQ

SEQ ID NO: 49635 - protein, 283 aa, Serpentinomonas raichei
  misc_feature (1)..(283): tr|A0A060NHK4|A0A060NHK4_9BURK NADPH-dependent 7-cyano- 7-deazaguanine reductase OS=Serpentinomonas raichei OX= 1458425 GN=queF PE=3 SV=1
MHTPPPAPLLLGQPTAYPERYDPALLHPVPRAPKRAELGIGATLPFLGADLWTAYELSWLNARGKPQVALAHFTVPCETPHLIESKSFKLYLNSYNQSVYPSFEAVQQQLRQDLAEALWRGSERSGGVGVRLLRPSQFAQERLGVLEGLSLDRLDLECSDYQPAPQHLQADASQAVVQEVLCSELLKSNCPVTGQPDWASVQIAYSGAPIDQAGLLRYLVSFRQHSGFHEQCVERIYQDIWQRCRPAKLSVYARYTRRGGLDINPWRSSHPQQPPEPVRTARQ

SEQ ID NO: 49636 - protein, 280 aa, Serratia ficaria
  misc_feature (1)..(280): tr|A0A240CB00|A0A240CB00_SERFI NADPH-dependent 7-cyano- 7-deazaguanine reductase OS=Serratia ficaria OX=61651 G N=queF_2 PE=3 SV=1
MHIKKQDKITHLGANSDYPDQYAPELLEALPRARGRDLIGVDENNLPFGGFDLWTAFELSWLNAKGKPVVGIGEFTLPHSSTNLIESKSFKLYLNSFNQTRFDSVEQVSAAMRQDLSQAANGQVGVKLYPGLDGYSAQIDRLPGVNIDDLDIAVDDFAFKPEYLDGAAADQGEWVTETLSSNLLKSNCLVTNQPDWGSVVIHYEGRKIDRERLLRYLISFRQHNEFHEQCVERIFNDLKQSCRPEKLSVFARYTRRGGLDINPFRSDFETAPTLGRLIRQ

SEQ ID NO: 49637 - protein, 281 aa, Serratia ficaria
  misc_feature (1)..(281): tr|A0A240C9E2|A0A240C9E2_SERFI NADPH-dependent 7-cyano- 7-deazaguanine reductase OS=Serratia ficaria OX=61651 G N=queF_1 PE=3 SV=1
MSSYQDHQALSELTLGKPTAYRDSYDAALLQAVPRSMNREPLGLSADSLPFHGADIWTLYELSWLNANGLPQVAVGEISLNADSLNLIESKSFKLYLNSFNQTPFADRESVRATLQRDLSACAQGEVSVTLFSVEQLEGSAIARLEGECIDHQDIRIDNYEFNADYLQNAAGAEVVEERLVSHLLKSNCLITHQPDWGSVQIHYRGGKLDREALLRYLVSFRHHNEFHEQCVERIFNDLMRYCRPQSLTVYARYTRRGGLDINPWRSNVDFSPAHGRLARQ

SEQ ID NO: 49638 - protein, 281 aa, Serratia fonticola
  misc_feature (1)..(281): tr|A0A0F7H6R5|A0A0F7H6R5_SERFO NADPH-dependent 7-cyano- 7-deazaguanine reductase OS=Serratia fonticola OX=47917 GN=queF PE=3 SV=1
MSSYQDHQALAALTLGKPTAYRDYYDASLLQAVPRSMNREPLGLYPDSLPFHGADIWTLYELSWLNAKGLPQVAVGEISLNANSINLIESKSFKLYLNSFNQTHFPDWEAVRSTLQRDLAACAQGDVSVSLFSVDRLEGSPIARLEGECLDQQDISIDNYEFDTGYLEGAAGSQIVEETLVSHLLKSNCLITNQPDWGSVQIRYRGPQINREALLRYLVSFRHHNEFHEQCVERIFNDLLRFCQPQQLSVYARYTRRGGLDINPWRSNVAFEPSHGRLARQ

SEQ ID NO: 49639 - protein, 175 aa, Serratia fonticola
  misc_feature (1)..(175): tr|A0A4U9V0K2|A0A4U9V0K2_SERFO NADPH-dependent 7-cyano- 7-deazaguanine reductase OS=Serratia fonticola OX=47917 GN=queF PE=4 SV=1
MNREPLGLYPDSLPFHGADIWTLYELSWLNAKGLPQVAVGEISLNANSINLIESKSFKLYLNSFNQTHFPDWEAVRSTLQRDLAACAQGDVSVSLFSVDRLEGSPIARLEGECLDQQDISIDNYEFDTGYLEGAAGSQIVEETLVSHLLKSNCLITNQPDWGSVQIRYRGPQINP

SEQ ID NO: 49640 - protein, 280 aa, Serratia liquefaciens
  misc_feature (1)..(280): tr|A0A515D4H4|A0A515D4H4_SERLI NADPH-dependent 7-cyano- 7-deazaguanine reductase OS=Serratia liquefaciens OX=61 4 GN=queF PE=3 SV=1
MHIKKQDKITHLGANSDYPDQYAPELLEALPRSRGRDLIGVDEQNLPFSGFDLWTAFELSWLNAKGKPVVGIGEFTLPHSSTNLIESKSFKLYLNSFNQTRFDSVEQVSAAMQKDLSQAANGQVGVKLYPGLDGYSPQIDSLPGINIDDLDIAVDDFDFKPEYLHGAADQHGDIVTETLSSNLLKSNCLVTNQPDWGSVVIHYQGRKIDRERLLRYLISFRQHNEFHEQCVERIFNDIKQSCQPEKLSVFARYTRRGGLDINPFRSDFETAPTLGRLIRQ

SEQ ID NO: 49641 - protein, 281 aa, Serratia liquefaciens; identical to SEQ ID NO: 46644
  misc_feature (1)..(281): tr|A0A484XYB2|A0A484XYB2_SERLI NADPH-dependent 7-cyano- 7-deazaguanine reductase OS=Serratia liquefaciens OX=61 4 GN=queF PE=3 SV=1

SEQ ID NO: 49642 - protein, 281 aa, Serratia marcescens
  misc_feature (1)..(281): tr|A0A379YUS0|A0A379YUS0_SERMA NADPH-dependent 7-cyano- 7-deazaguanine reductase OS=Serratia marcescens OX=615 GN=queF_2 PE=3 SV=1
MSSYQDHQALSGLTLGKPTAYRDRYDATLLQAVPRSMNREPLGLYPDNLPFHGADIWTLYELSWLNANGLPQVAVGEISLNADSLNLIESKSFKLYLNSFNQTPFADWETVRSTLQRDLSACAQGEVSVTLFSVEQLEDTPIARLAGDCIDQQDIRIDNYEFSADYLLNAAGEEVVEEQLVSHLLKSNCLITHQPDWGSVQISYRGGKIDREALLRYLVSFRHHNEFHEQCVERIFNDLMRYCRPQSLTVYARYTRRGGLDINPWRSNVAFAPAHGRLARQ

SEQ ID NO: 49643 - protein, 279 aa, Serratia marcescens
  misc_feature (1)..(279): tr|A0A421HRV8|A0A421HRV8_SERMA NADPH-dependent 7-cyano- 7-deazaguanine reductase OS=Serratia marcescens OX=615 GN=queF PE=3 SV=1
MHIQKQDKITHLGANSDYPDQYAPALLEALPRARGRDLIGVDERQLPFSGFDLWTAFELSWLNAKGKPVVGIGEFTFPHSSSNLIESKSFKLYLNSFNQTRFDSVEQVSAAMQQDLSQAANGQVTVKLYPGLEGYPAQIDRLPGINIDDLDIAVDDFAFKPEYLSGAAERGEPVSETLSSNLLKSNCLVTNQPDWGSVVIRYEGRKIDRESLLRYLISFRQHNEFHEQCVERIFNDIKQSCRPEKLSVFARYTRRGGLDINPFRSDFETAPALGRLIRQ

SEQ ID NO: 49644 - protein, 279 aa, Serratia nematodiphila
  misc_feature (1)..(279): tr|A0A5C7CV27|A0A5C7CV27_9GAMM NADPH-dependent 7-cyano- 7-deazaguanine reductase OS=Serratia nematodiphila OX=4 58197 GN=queF PE=3 SV=1
MHIQKQDKITHLGANSDYPDQYAPALLEALPRARGRDLIGVDERQLPFSGFDLWTAFELSWLNAKGKPVVGIGEFTFPHSSSNLIESKSFKLYLNSFNQTRFDSVEQVSAAMQKDLSQAANGQVTVKLYPGLEGYPAQIDRLPGINIDDLDIAVDDFAFKPEYLSGAAERGEHVAETLSSNLLKSNCLVTNQPDWGSVVIRYEGRQIDRESLLRYLISFRQHNEFHEQCVERIFNDIKQSCRPEKLSVFARYTRRGGLDINPFRSDFETAPTLGRLIRQ

SEQ ID NO: 49645 - protein, 281 aa, Serratia nematodiphila
  misc_feature (1)..(281): tr|A0A5C7CNF0|A0A5C7CNF0_9GAMM NADPH-dependent 7-cyano- 7-deazaguanine reductase OS=Serratia nematodiphila OX=4 58197 GN=queF PE=3 SV=1
MSSYQDHQALSGLTLGKPTAYRDRYDATLLQAVPRSMNREPLGLYPDNLPFHGADIWTLYELSWLNANGLPQVAVGEISLNADSLNLIESKSFKLYLNSFNQTPFADWETVRSTLQRDLSACAQGEVSVTLFSVEQLEGTPIARLAGDCIDQQDIRIDNYEFNADYLLNAAGEEVVEEQLVSHLLKSNCLITHQPDWGSVQISYRGGKIDREALLRYLVSFRHHNEFHEQCVERIFNDLMRYCRPQSLTVYARYTRRGGLDINPWRSNVVFAPAHGRLARQ

SEQ ID NO: 49646 - protein, 281 aa, Serratia odorifera
  misc_feature (1)..(281): tr|A0A447KSE1|A0A447KSE1_SEROD NADPH-dependent 7-cyano- 7-deazaguanine reductase OS=Serratia odorifera OX=618 G N=queF_2 PE=3 SV=1
MSSHQDHQALSGLTLGKPTAYHDHYDAALLQPVPRSMNREPLGLYPDNLPFHGADIWTLYELSWLNNNGLPQVAVGEISLDAASVNLIESKSFKLYLNSFNQTRFADWETVRNTLQRDLAACAQGGIEVALYPLDRLEGQPIAGLRGECIDRQNITIDNYQFNADYLQNAAGTQTVEETLVSHLLKSNCLITNQPDWGSVQICYRGPQIDREALLRYLVSFRHHNEFHEQCVERIFNDIMRFCQPQQLSVYARYTRRGGLDINPWRSNGQFSPSHGRLARQ

SEQ ID NO: 49647 - protein, 280 aa, Serratia odorifera
  misc_feature (1)..(280): tr|D4E0V7|D4E0V7_SEROD NADPH-dependent 7-cyano-7-deazag uanine reductase OS=Serratia odorifera DSM 4582 OX=6671 29 GN=queF PE=3 SV=1
MHIKPQDKITHLGTHSAYPDRYDPSLLEALPRARGRDLVGLDANALPFSGVDIWTAFELSWLNAKGKPVVGIGEFAIPFSSTNLIESKSFKLYLNSFNQTRFASADDVLAALEHDLSAAADGQVGVKLFPGLAGYSHQIDTLPGDNIDDLDIEVTDFAFDPQYLEHAVSAQAEYVSETLSSNLLKSNCLVTHQPDWGSVVIRYAGRKIDREALLRYLISFRQHNEFHEQCVERIFNDITRYCQPEKLSVFARYTRRGGLDINPFRSNFEAAPTLGRLVRQ

SEQ ID NO: 49648 - protein, 281 aa, Serratia oryzae
  misc_feature (1)..(281): tr|A0A1S8CH45|A0A1S8CH45_9GAMM NADPH-dependent 7-cyano- 7-deazaguanine reductase OS=Serratia oryzae OX=2034155 GN=queF PE=3 SV=1
MSSYQNHQALSALTLGKPTAYQDHYDAALLQAVPRSMNREPLGLYPENLPFHGADIWTLYELSWLNAKGLPQVAVGEISLDAGSISLIESKSFKLYLNSFNQTRFPDWETVRNTLQRDLSACAQGEVSVTLCHVDQIAGSSIAHFAGECIDAQDINIDDYEFNAGYLQNATGEQQVEETLVSHLLKSNCLITHQPDWGSVQIRYRGPQINREALLRYLVSFRHHNEFHEQCVERIFNDLLRFCQPQQLSVYARYTRRGGLDINPWRSNVPFEPARGRLARQ

SEQ ID NO: 49649 - protein, 281 aa, Serratia plymuthica
  misc_feature (1)..(281): tr|A0A1B1KVF9|A0A1B1KVF9_SERPL NADPH-dependent 7-cyano- 7-deazaguanine reductase OS=Serratia plymuthica PRI-2C OX=1154756 GN=queF_1 PE=3 SV=1
MSSYQDHHALSELTLGKPTAYRDRYDAQLLQAVPRSMNREPLGLYPDSLPFHGADIWTLYELSWLNDNGLPQVAVGEISLNANSLNLIESKSFKLYLNSFNQTPFTDWETVRSTLQRDLSACAQGDVSVALFSLAQVEGSPIARLDGECIDHQDIRIDNYEFNADYLLNATGTRQVEEQLVSHLLKSNCLITNQPDWGSVQIQYRGAQIDREALLRYLVSFRHHNEFHEQCVERIFNDLMRYCRPESLSVYARYTRRGGLDINPWRSNLDFVPSHGRLARQ

SEQ ID NO: 49650 - protein, 281 aa, Serratia plymuthica
  misc_feature (1)..(281): tr|S4YMU6|S4YMU6_SERPL NADPH-dependent 7-cyano-7-deazag uanine reductase OS=Serratia plymuthica S13 OX=1348660 GN=queF PE=3 SV=1
MSSYQDHHALSALTLGKPTAYRDRYDAQLLQAVPRSMNREPLGLYPDSLPFHGADIWTLYELSWLNGNGLPQVAVGEISLNANSINLIESKSFKLYLNSFNQTQFTDWETVRSTLQRDLSACAQGDVSVALFSIDQVEGSPIARLEGECIDHQDIRIDNYEFNADYLLNATGPRQVEEQLVSHLLKSNCLITNQPDWGSVQIQYRGAQIDREALLRYLVSFRHHNEFHEQCVERIFNDLMRYCRPESLSVYARYTRRGGLDINPWRSNLDFVPSHGRLARQ

SEQ ID NO: 49651 - protein, 280 aa, Serratia proteamaculans
  misc_feature (1)..(280): tr|A0A1W5DRD9|A0A1W5DRD9_9GAMM NADPH-dependent 7-cyano- 7-deazaguanine reductase OS=Serratia proteamaculans OX= 28151 GN=queF PE=3 SV=1
MHIKKQDKITHLGANSDYPDQYAPELLEALPRARGRDLIGVDEQQLPFHGYDLWTAFELSWLNAKGKPVVGIGEFTLPHSSTNLIESKSFKLYLNSFNQTRFDSVEQVSAAMQKDLSQTANGQVGVKLYPGLDGYSSQIDSLPGINIDGLDIAVDDFDFKPEYLDGAASEQAETVTETLSSNLLKSNCLVTNQPDWGSVVIHYQGRKIDRERLLRYLISFRQHNEFHEQCVERIFNDIKQSCRPEKLSVFARYTRRGGLDINPFRSDFETAPTLGRLIRQ

SEQ ID NO: 49652 - protein, 280 aa, Serratia proteamaculans
  misc_feature (1)..(280): tr|A8GJK1|A8GJK1_SERP5 NADPH-dependent 7-cyano-7-deazag uanine reductase OS=Serratia proteamaculans (strain 568 ) OX=399741 GN=queF PE=3 SV=1
MHIKKQDKITHLGANSDYPDQYAPELLEALPRARGRDLIGVDERKLPFSGFDLWTAFELSWLNAKGKPVVGIGEFTLPHSSTNLIESKSFKLYLNSFNQTRFDSVEQVSAAMQKDLSQAANGQVGVKLYPGLDGYSAQIDALPGINIDDLDIAVDDFDFKPEYLIGATSEQAEIVTETLSSNLLKSNCLVTNQPDWGSVVIHYQGRKIDRERLLRYLISFRQHNEFHEQCVERIFNDIKQSCQPEKLSVFARYTRRGGLDINPFRSDFETAPTLGRLIRQ

SEQ ID NO: 49653 - protein, 280 aa, Serratia quinivorans; identical to SEQ ID NO: 49652
  misc_feature (1)..(280): tr|A0A2X2HVL5|A0A2X2HVL5_9GAMM NADPH-dependent 7-cyano- 7-deazaguanine reductase OS=Serratia quinivorans OX=137 545 GN=queF_1 PE=3 SV=1

SEQ ID NO: 49654 - protein, 280 aa, Serratia quinivorans
  misc_feature (1)..(280): tr|A0A4Q8DB28|A0A4Q8DB28_9GAMM NADPH-dependent 7-cyano- 7-deazaguanine reductase OS=Serratia quinivorans OX=137 545 GN=queF PE=3 SV=1
MHIKKQDKITHLGANSDYPDQYAPELLEALPRARGRDLIGVDEQNLPFSGFDLWTAFELSWLNAKGKPVVGIGEFTLPHSSTNLIESKSFKLYLNSFNQTRFDSVEQVSAAMQKDLSQAANGQVGVKLYPGLDGYSSQIDRLPGINIDDLDIAVDDFDFKPEYLDGATHEQAETVTETLSSNLLKSNCLVTNQPDWGSVVIHYQGRKIDRERLLRYLISFRQHNEFHEQCVERIFNDIKKSCQPEKLSVFARYTRRGGLDINPFRSDFEAAPTLGRLIRQ

SEQ ID NO: 49655 - protein, 282 aa, Serratia rubidaea
  misc_feature (1)..(282): tr|A0A2X5AEF5|A0A2X5AEF5_SERRU NADPH-dependent 7-cyano- 7-deazaguanine reductase OS=Serratia rubidaea OX=61652 GN=queF PE=3 SV=1
MSSYQNHQALSGLALGKPTAYHDQYDATLLQPVPRSMNREPLGLYPDSLPFHGADIWTLYELSWLNAKGLPQVAVGEISLDAFSLNLIESKSFKLYLNSFNQTRFENWEAVRCTLLRDLAACAQGEVEVKLFRLDEIEGRPIAQLQGECLDQQDISIDDYQFSADYLQDAAAGSPVVEETLVSHLLKSNCLITNQPDWGSVQIAYRGAQINREALLRYLVSFRHHNEFHEQCVERIFNDIMRFCQPERLSVYARYTRRGGLDINPWRSNVAFAPAHGRLARQ

SEQ ID NO: 49656 - protein, 282 aa, Serratia rubidaea
  misc_feature (1)..(282): tr|A0A126VG15|A0A126VG15_SERRU NADPH-dependent 7-cyano- 7-deazaguanine reductase OS=Serratia rubidaea OX=61652 GN=queF PE=3 SV=1
MSSYQNHQALSGLTLGKPTAYHDQYDAALLQPVPRSMNREPLGLYPDSLPFHGADIWTLYELSWLNAKGLPQVAVGEISLDAFSLNLIESKSFKLYLNSFNQTRFENWEAVRCTLMRDLAACAQGEVTVKLFRLDEIEGRPIAQLQGENLDQQDISIDDYQFNADYLQDAAAGSPVVEETLVSHLLKSNCLITNQPDWGSVQIAYRGAQINREALLRYLVSFRHHNEFHEQCVERIFNDIMRFCQPERLSVYARYTRRGGLDINPWRSNTDFAPTHGRLARQ

SEQ ID NO: 49657 - protein, 281 aa, Serratia sp.
  misc_feature (1)..(281): tr|A0A2G8A376|A0A2G8A376_9GAMM NADPH-dependent 7-cyano- 7-deazaguanine reductase OS=Serratia sp. OLAL2 OX=19319 99 GN=queF PE=3 SV=1
MSSYQDHQALSGLTLGKPTAYRDRYDATLLQAVPRSMNREPLGLYPDNLPFHGADIWTLYELSWLNANGLPQVAVGEISLNADSLNLIESKSFKLYLNSFNQTPFADGETVRSTLQRDLSACAQGEVSVTLFSVEQLEGLPIARLAGDCIDQQDIRIDNYEFNADYLLNAAGEEVVEEQLVSHLLKSNCLITHQPDWGSVQISYRGAKIDREALLRYLVSFRHHNEFHEQCVERIFNDLMRYCRPQSLTVYARYTRRGGLDINPWRSNVAFTPEHGRLARQ

SEQ ID NO: 49658 - protein, 281 aa, Serratia sp.; identical to SEQ ID NO: 45892
  misc_feature (1)..(281): tr|A0A4R6EKS3|A0A4R6EKS3_9GAMM NADPH-dependent 7-cyano- 7-deazaguanine reductase OS=Serratia sp. BIGb0156 OX=24 85132 GN=queF PE=3 SV=1

SEQ ID NO: 49659 - protein, 280 aa, Serratia symbiotica
  misc_feature (1)..(280): tr|E9CLN6|E9CLN6_9GAMM NADPH-dependent 7-cyano-7-deazag uanine reductase OS=Serratia symbiotica str. Tucson OX= 914128 GN=queF PE=3 SV=1
MHIKKQDKITHLGSNSDYPDHYAPALLEALPRARGRDLIGVNEHNLPFSGFDLWTAFELSWLNAKGKPVVGIGEFTLPHSSTNLIESKSFKLYLNSFNQTRFDSVEAVNTVMQKDLSQAANGMVGVKLYPGLDGYSTQIDHLPGVNIDDLDIAIDDYAFKSECLHGAASEQAEWVTETLSSHLLKSNCPVTHQPDWGSVVIHYQGRKIDRERLLRYLISFRQHNEFHEQCVERIFNDFKQYCQPEKLSVFARYTRRGGLDINPFRSDFEAVPVLGRLVRQ

SEQ ID NO: 49660 - protein, 280 aa, Serratia symbiotica
  misc_feature (1)..(280): tr|A0A068RF19|A0A068RF19_9GAMM NADPH-dependent 7-cyano- 7-deazaguanine reductase OS=Serratia symbiotica SCt-VLC OX=1347341 GN=queF PE=3 SV=1
MHIKKQDKITHLGSNSDYPDHYAPALLEALPRARGRDLIGVNEHNLPFSGFDLWTAFELSWLNAKGKPVVGIGEFTLPHSSTNLIESKSFKLYLNSFNQTRFDSVEAVNTVMQKDLSQAANGLVGVKLYPGLDGYSTQIDHLPGVNIDDLDIAIDDYAFKSECLHGAASEQAEWVTETLSSHLLKSNCLVTHQPDWGSVVIHYQGRKIDRKRLLRYLISFRQHNEFHEQCVERIFNDIKQYYQPEKLSVFARYTRRGGLDINPFRSDFEAVPVLGRLVRQ

SEQ ID NO: 49661 - protein, 279 aa, Serratia ureilytica
  misc_feature (1)..(279): tr|A0A5C7BZS6|A0A5C7BZS6_9GAMM NADPH-dependent 7-cyano- 7-deazaguanine reductase OS=Serratia ureilytica OX=3001 81 GN=queF PE=3 SV=1
MHIQKQDKITHLGANSDYPDQYAPALLEALPRARGRDLIGVDERRLPFSGFDLWTAFELSWLNGKGKPVVGIGEFTFPHSSSNLIESKSFKLYLNSFNQTRFDSVEQVSAAMQKDLSQAANGQVTVKLYPGLEGYPAQIDRLPGINIDDLDIAVDDFAFKPEYLSGAADQGEHVAETLSSNLLKSNCLVTNQPDWGSVVIRYEGRKIDRESLLRYLISFRQHNEFHEQCVERIFNDIKQSCRPEKLSVFARYTRRGGLDINPFRSDFETAPTLGRLIRQ

SEQ ID NO: 49662 - protein, 281 aa, Serratia ureilytica
  misc_feature (1)..(281): tr|A0A5C7C5S9|A0A5C7C5S9_9GAMM NADPH-dependent 7-cyano- 7-deazaguanine reductase OS=Serratia ureilytica OX=3001 81 GN=queF PE=3 SV=1
MSSYQDHQALSGLTLGKPTAYRDRYDATLLQAVPRSMNREPLGLYPDNLPFHGADIWTLYELSWLNANGLPQVAVGEISLNADSLNLIESKSFKLYLNSFNQTPFADWETVRSTLQRDLSACAQGEVSVTLFSVDQLEGSPIARLAGDCIDQQDIRIDNYEFNADYLQNAAGEEVVEEQLVSHLLKSNCLITHQPDWGSVQISYRGGKIDREALLRYVVSFRHHNEFHEQCVERIFNDLMRYCRPQSLTVYARYTRRGGLDINPWRSNVAFAPEHGRLARQ

SEQ ID NO: 49663 - protein, 296 aa, Shewanella algae
  misc_feature (1)..(296): tr|A0A1S2TEN6|A0A1S2TEN6_9GAMM NADPH-dependent 7-cyano- 7-deazaguanine reductase OS=Shewanella algae OX=38313 G N=queF PE=3 SV=1
MVTYFDTETRLMTQNHDPYRNAEALSGLTLGQQTDYQEHYAPELLQGVPRKLNRDAINLSAPLPFQGADIWTGYELSWLNAKGKPMVAIAEFQLDLNSEHLIESKSFKLYLNSFNQTRFDSTEAVEQTLTQDLSRCANGEVKVRVIEPKHFNSQRVVELPGHCIDDLDIEVNVYEFNPKWLEDSTDDKQIVAETLNSNLLKSNCLITSQPDWGSVMIRYQGPKIDREKLLRYLISFRQHNEFHEQCVERIFTDLKRFCHCSKLTVYARYTRRGGLDINPFRSDFEHVPESQRLARQ

SEQ ID NO: 49664 - protein, 285 aa, Shewanella algae
  misc_feature (1)..(285): tr|A0A2T3H2C6|A0A2T3H2C6_9GAMM NADPH-dependent 7-cyano- 7-deazaguanine reductase OS=Shewanella algae OX=38313 G N=queF PE=3 SV=1
MTQNHDPYRNAEALSGLTLGQQTDYQEHYAPELLQGVPRKLNRDAINLSAPLPFQGADIWTGYELSWLNAKGKPMVAIAEFQLDLNSEHLIESKSFKLYLNSFNQTRFDSTEAVEQTLTQDLSRCANGEVKVRVIEPKHFNSQRVVELPGHCIDDLDIEVSDYEFNPKWLEDSTDDKQIVAETLNSNLLKSNCLITSQPDWGSVMIRYQGPKIDREKLLRYLISFRQHNEFHEQCVERIFTDLKRFCHCSKLTVYARYTRRGGLDINPFRSDFEHVPESQRLARQ

SEQ ID NO: 49665 - protein, 296 aa, Shewanella amazonensis
  misc_feature (1)..(296): tr|A1S4M1|A1S4M1_SHEAM NADPH-dependent 7-cyano-7-deazag uanine reductase OS=Shewanella amazonensis (strain ATCC BAA-1098 / SB2B) OX=326297 GN=queF PE=3 SV=1
MCPYFDTERCLMTRNHDPYSGAAELEGLTLGQTTEYQAEYAPSLLQGVPRKLNRDAIALTGTLPFHGTDLWTGYELSWLNAKGKPMVAILDVQLDVNSENLIESKSFKLYLNSFNQTRFDSVEAVSRTLEKDLAQCANGEVKVKVIEPKYFGLARIVELPGTCIDDLDIEVDNYDFNPDYLENSTDDKQLVAETLNSNLLKSNCLITSQPDWGSVMIRYQGPKIDREKLLRYLISFRQHNEFHEQCVERIFTDLKHYCGCSKLTVFARYTRRGGLDINPFRSDFEHLPENNRLARQ

SEQ ID NO: 49666 - protein, 290 aa, Shewanella atlantica
  misc_feature (1)..(290): tr|A0A3S0KR88|A0A3S0KR88_9GAMM NADPH-dependent 7-cyano- 7-deazaguanine reductase OS=Shewanella atlantica OX=271 099 GN=queF PE=3 SV=1
MENLLMTQVHDPYTGAEALSELTLGKATGYQAEYDASLLQGVPRKLNRDAIGLNETLPFHGTDIWTGYELSWLNAKGKPMVAIAEFYLSFDSQNLIESKSFKLYLNTFNQTKFDSVEQVQSTLADDLSQCAQGEVLVKVLEPKQFSTQRVVELPGTCIDDLDIEVNDYSFNPDYLQDSTDDKAVVAETLSSNLLKSNCLITSQPDWGSVMIRYQGPKIDREKLLRYLISFRQHNEFHEQCIERIFVDLKRFCNCAKLTVYARYTRRGGLDINPYRSDFENPPESHRLARQ

SEQ ID NO: 49667 - protein, 285 aa, Shewanella baltica
  misc_feature (1)..(285): sp|B8E7T7|QUEF_SHEB2 NADPH-dependent 7-cyano-7-deazagua nine reductase OS=Shewanella baltica (strain OS223) OX= 407976 GN=queF PE=3 SV=1
MTQNHDPYSDAQALVGLTLGKATDYQAEYDASLLQGVPRSLNRNAIALTGTLPFHGADIWTGYELSWLNAKGKPMVAIAEFHLSYESLNLIESKSFKLYLNSFNQTKFDSIDSLQKTLVADLSQCAQGDISVKIIEPKSFGIQRIIELPGTCIDDLDIEVSDYSFNPDYLENSTDDKQTVAETLNSNLLKSNCLITSQPDWGSVMIRYQGPKIDREKLLRYLISFRQHNEFHEQCVERIFVDLKRFCHCTKLTVYARYTRRGGLDINPYRSDFEQPGESHRLARQ

SEQ ID NO: 49668 - protein, 296 aa, Shewanella baltica
  misc_feature (1)..(296): tr|A9KUI5|A9KUI5_SHEB9 NADPH-dependent 7-cyano-7-deazag uanine reductase OS=Shewanella baltica (strain OS195) O X=399599 GN=queF PE=3 SV=1
MCAYFDMETVLMTQNHDPYSDAQALVGLTLGKATDYQAEYDASLLQGVPRSLNRNAIALTGTLPFHGADIWTGYELSWLNAKGKPMVAIAEFHLSYESLNLIESKSFKLYLNSFNQTKFDSIDSLQKTLVADLSQCAQGDISVKIIEPKSFGIQRIIELPGTCIDDLDIEVSDYSFNPDYLENSTDDKQTVAETLNSNLLKSNCLITSQPDWGSVMIRYQGPKIDREKLLRYLISFRQHNEFHEQCVERIFVDLKRFCHCTKLTVYARYTRRGGLDINPYRSDFEQPGESHRLARQ

SEQ ID NO: 49669 - protein, 290 aa, Shewanella benthica
  misc_feature (1)..(290): tr|A9DDC5|A9DDC5_9GAMM NADPH-dependent 7-cyano-7-deazag uanine reductase OS=Shewanella benthica KT99 OX=314608 GN=queF PE=3 SV=1
MEYLLMTQVHDPYTDAEALSGLTLGKATGYQAEYDASLLQGVPRKLNRDAIELNESLPFHGTDIWTGYELSWLNAKGKPVVAIAEFQLSFDSDNLIESKSFKLYLNSFNQTKFDDIEQVQATLTQDLSKCAVGDVSVKVFEPKQFASQRIVELPGTCIDDLDIEVDDYNFNPQYLENSTDEKAVVAETLNSNLLKSNCLITSQPDWGSVMIRYQGPKIDREKLLRYIISFRQHNEFHEQCIERIFVDLKRFCHCAKLTVYARYTRRGGLDINPYRSDFETPPENHRLARQ

SEQ ID NO: 49670 - protein, 285 aa, Shewanella benthica
  misc_feature (1)..(285): tr|A0A330M1E5|A0A330M1E5_9GAMM NADPH-dependent 7-cyano- 7-deazaguanine reductase OS=Shewanella benthica OX=4366 1 GN=queF PE=3 SV=1
MTQVHDPYTDAEALSGLTLGKATGYQAEYDASLLQGVPRKLNRDAIELNENLPFHGTDIWTGYELSWLNAKGKPVVAIAEFQLSFDSDNLIESKSFKLYLNSFNQTKFDDIEQVQATLTQDLSKCAVGDVSVKVFEPKQFASQRIVELPGTCIDDLDIEVDDYNFNPQYLENSTDDKAVVAETLNSNLLKSNCLITSQPDWGSVMIRYQGPKIDREKLLRYIISFRQHNEFHEQCIERIFVDLKRFCHCEKLTVYARYTRRGGLDINPYRSDFETPPENHRLARQ

SEQ ID NO: 49671 - protein, 286 aa, Shewanella bicestrii
  misc_feature (1)..(286): tr|A0A220UKQ5|A0A220UKQ5_9GAMM NADPH-dependent 7-cyano- 7-deazaguanine reductase OS=Shewanella bicestrii OX=201 8305 GN=queF PE=3 SV=1
MTHNHDPYSDAKELAGLTLGKATDYQAEYDASLLQGVPRSLNRNAINLTAESLPFHGADIWTAYELSWLNAKGKPMVAIADIQLSHESQNLIESKSFKLYLNSFNQTKFDNIEAVQKTLVQDLSECAQGQVTVKIIEPKSFGIQRVVELPGTCIDDLDIEVSDYDFNPDYLENSTDDKQIVAETLNSNLLKSNCLITSQPDWGSVMIRYQGPKIDREKLLRYLISFRQHNEFHEQCVERIFVDLKHYCHCTKLTVYARYTRRGGLDINPYRSDFEHPGESHRLARQ

SEQ ID NO: 49672 - protein, 290 aa, Shewanella canadensis
  misc_feature (1)..(290): tr|A0A3S0KV62|A0A3S0KV62_9GAMM NADPH-dependent 7-cyano- 7-deazaguanine reductase OS=Shewanella canadensis OX=27 1096 GN=queF PE=3 SV=1
MENLLMTQVHDPYTGAEALSELTLGKATGYQAEYDASLLQGVPRKLNRDAIGLNETLPFHGTDIWTGYELSWLNAKGKPMVAIAEFHLSYDSQNLIESKSFKLYLNTFNQTKFDSIDQLQTTLADDLSRCAEGEVLVRVLEPKQFSTQRVVELPGTCIDDLDIEVNDYSFNPEYLHDSTDDKAVVAETLNSNLLKSNCLITSQPDWGSVMIRYQGPKIDREKLLRYLISFRQHNEFHEQCIERIFVDLKRFCNCAKLTVYARYTRRGGLDINPYRSDFENPPENHRLARQ

SEQ ID NO: 49673 - protein, 296 aa, Shewanella chilikensis
  misc_feature (1)..(296): tr|A0A2V4VZI1|A0A2V4VZI1_9GAMM NADPH-dependent 7-cyano- 7-deazaguanine reductase OS=Shewanella chilikensis OX=5 58541 GN=queF PE=3 SV=1
MVAYFDTETRLMTQNHDPYRNAEALSGLTLGQQTDYQEHYAPELLQGVPRKLNRDAINLSTPLPFQGADIWTGYELSWLNAKGKPMVAIAEFQLDLNSEHLIESKSFKLYLNSFNQTRFDSTEAVEQTLTQDLSRCANGEVKVRVIEPKHFNSQRVVELPGHCIDDLDIEVSDYEFNPKWLEDSTDDKQIVAETLNSNLLKSNCLITSQPDWGSVMIRYQGPKIDKEKLLRYLISFRQHNEFHEQCVERIFTDLKRFCHCSKLTVYARYTRRGGLDINPFRSDFEHVPESQRLARQ

SEQ ID NO: 49674 - protein, 290 aa, Shewanella colwelliana
  misc_feature (1)..(290): tr|A0A1E5IX60|A0A1E5IX60_SHECO NADPH-dependent 7-cyano- 7-deazaguanine reductase OS=Shewanella colwelliana OX=2 3 GN=queF PE=3 SV=1
MEKRLMTPVHDPYSNAPALSELTLGKSTGYQAEYDASLLQGVPRKLNRDAIALSAELPFHGADIWTGYELSWLNAKGKPMVAIAEFILDYQSANLIESKSFKLYLNSYNQTRFESVEQVQQTLAKDLTACAEGEVVVKILEPKQFGAQRVVELPGTCIDDLDIEVDNYAFTSDYLIDSTDDKSVVAETLSSNLLKSNCLITSQPDWGSVMIRYQGPKIDREKLLRYLISFRQHNEFHEQCVERIFVDLKQFCHCAKLTVYARYTRRGGLDINPYRSDFENPPESHRLARQ

SEQ ID NO: 49675 - protein, 286 aa, Shewanella decolorationis
  misc_feature (1)..(286): tr|A0A5B8QYY3|A0A5B8QYY3_9GAMM NADPH-dependent 7-cyano- 7-deazaguanine reductase OS=Shewanella decolorationis O X=256839 GN=queF PE=3 SV=1
MTHNHDPYSDAKELAGLTLGKATDYQAEYDASLLQGVPRSLNRNAINLSAESLPFHGADIWTAYELSWLNAKGKPMVAIADIQLSHESQNLIESKSFKLYLNSFNQTKFDNIEAVQKTLVRDLSECAQGQVTVKIIEPKSFGIQRVVELPGTCIDDLDIEVSDYDFNPDYLENSTDDKQIVAETLNSNLLKSNCLITSQPDWGSVMIRYQGPKIDREKLLRYLISFRQHNEFHEQCVERIFVDLKHYCHCAKLTVYARYTRRGGLDINPYRSDFEHPGESHRLARQ

SEQ ID NO: 49676 - protein, 351 aa, Shewanella decolorationis
  misc_feature (1)..(351): tr|V1DI85|V1DI85_9GAMM NADPH-dependent 7-cyano-7-deazag uanine reductase OS=Shewanella decolorationis S12 OX=13 53536 GN=queF PE=3 SV=1
MIHQTHLEYTKIAHPAGNIAVIRLKLIGKTDDSFAKIYREQADKTLKHNPISGIMCAYFDMETVLMTHNHDPYSDAKELAGLTLGKATDYQAEYDASLLQGVPRSLNRNAINLSAESLPFHGADIWTAYELSWLNAKGKPMVAIADIQLSHESQNLIESKSFKLYLNSFNQTKFDNIETVQKTLVRDLSECAQGQVTVKIIEPKSFGIQRVVELPGTCIDDLDIEVSDYDFNPDYLENSTDDKQIVAETLNSNLLKSNCLITSQPDWGSVMIRYQGPKIDREKLLRYLISFRQHNEFHEQCVERIFVDLKHYCHCAKLTVYARYTRRGGLDINPYRSDFEHPGESHRLARQ

SEQ ID NO: 49677 - protein, 284 aa, Shewanella denitrificans
  misc_feature (1)..(284): sp|Q12P28|QUEF_SHEDO NADPH-dependent 7-cyano-7-deazagua nine reductase OS=Shewanella denitrificans (strain OS21 7 / ATCC BAA-1090 / DSM 15013) OX=318161 GN=queF PE=3 S V=1
MTHNHDPYSDAQALKGLTLGQATQYQAEYDPSLLQGVPRKLNRDAIELTTELPFHGTDIWTGYELSWLNGKGKPVVAILQVHLDIHSVNLIESKSFKLYLNSLNQTRFNNLDAVKDTLTTDLSQCAQGEVTVKIIEPKHFTIERISELPGNCIDDLDIEIFDYQFNPEYLLDSTEEKNVAETLTSNLLKSNCLITSQPDWGSVMIRYQGPKIDREKLLRYLISFRQHNEFHEQCVERIFMDLKQYCHCAKLTVYARYTRRGGLDINPFRSDFEQAPDSHRLARQ

SEQ ID NO: 49678 - protein, 285 aa, Shewanella fodinae
  misc_feature (1)..(285): tr|A0A4R2FKD1|A0A4R2FKD1_9GAMM NADPH-dependent 7-cyano- 7-deazaguanine reductase OS=Shewanella fodinae OX=55235 7 GN=queF PE=3 SV=1
MTQNQPPYDNAEALVNLTLGKATQYQAHYSPTLLQPVPRKLNRDALSLTEPMPFKGVDIWTAYELSWLNSKGKPMVAIAEVQLDANSRNLVESKSFKLYLNSFNQTKIESIEKLQQLLEADLSRCAEGNVEVHIIEPKQFASLRIKELPGTCIDEQDIEVVEYSFNSDWLRNSTDSKQMVAETLTSNLLKSNCLITSQPDWGSVMIRYQGPKIDREKLLRYLISFRQHNEFHEQCVERIFNDLKRYCKCSKLTVYARYTRRGGLDINPFRSDFEHAPENQRLARQ

SEQ ID NO: 49679 - protein, 285 aa, Shewanella frigidimarina
  misc_feature (1)..(285): sp|Q085G4|QUEF_SHEFN NADPH-dependent 7-cyano-7-deazagua nine reductase OS=Shewanella frigidimarina (strain NCIM B 400) OX=318167 GN=queF PE=3 SV=1
MTHNHDPYSDAAALKGLTLGQATAYQAEYDASLLQGVPRKLNRDAIQLSGELPFHGTDIWTGYELSWLNAKGKPVVAILEVQLDINSVNLIESKSFKLYLNSFNQTKFDSVEAVQETLSRDLAACAEGEVTVKVIEPKHFNLERIIDLPGTCIDDLDIEVTEYEFNPDHLIGGTDPDKNVAETLNSNLLKSNCLITSQPDWGSVMVRYQGPKIDREKLLRYLISFRQHNEFHEQCVERIFVDLKKYCQCTKLTVYARYTRRGGLDINPYRSDFENPPESNRLARQ

SEQ ID NO: 49680 - protein, 285 aa, Shewanella frigidimarina
  misc_feature (1)..(285): tr|A0A106BWN4|A0A106BWN4_SHEFR NADPH-dependent 7-cyano- 7-deazaguanine reductase OS=Shewanella frigidimarina OX =56812 GN=queF PE=3 SV=1
MTHNHDPYSDAAALKGLTLGQATAYQAEYDASLLQGVPRKLNRDAIELSGELPFHGTDIWTGYELSWLNAKGKPVVAILEVQLDINSVNLIESKSFKLYLNSFNQTKFDSVEAVQETLSRDLAACAEGEVTVKVIEPKHFNLERIIDLPGTCIDDLDIEVTEYEFNPDHLIGGTDPDKNVAETLNSNLLKSNCLITSQPDWGSVMVRYQGPKIDREKLLRYLISFRQHNEFHEQCVERIFVDLKKYCQCTKLTVYARYTRRGGLDINPYRSDFENPPESNRLARQ

SEQ ID NO: 49681 - protein, 290 aa, Shewanella halifaxensis
  misc_feature (1)..(290): tr|B0TPA1|B0TPA1_SHEHH NADPH-dependent 7-cyano-7-deazag uanine reductase OS=Shewanella halifaxensis (strain HAW -EB4) OX=458817 GN=queF PE=3 SV=1
METVLMTQHHDPYSNAPELSELTLGKSTGYQEQYDASLLQGVPRKLNRDAIALTQELPFHGCDIWTGYELSWLNAKGKPMVAIAEFSLSFDSKYLIESKSFKLYLNSYNQTRFDSLQAVQERLTQDLSACADGEVTVKVIEPKQFSHQRIIELPGTCIDDLDIEVDDYRFNPDYLVDSVDNKAIVAETLTSNLLKSNCLITSQPDWGTVMIRYQGPKIDREKLLRYLISFRQHNEFHEQCVERIFVDLKRFCQCSKLTVYARYTRRGGLDINPYRSDFEHPAENQRLARQ

SEQ ID NO: 49682 - protein, 290 aa, Shewanella hanedai
  misc_feature (1)..(290): tr|A0A553JPF2|A0A553JPF2_SHEHA NADPH-dependent 7-cyano- 7-deazaguanine reductase OS=Shewanella hanedai OX=25 GN =queF PE=3 SV=1
MEKPLMTQVHDPYSDAKALSELTLGKATGYQSEYDASLLQGVPRKLNRDAIELIDTLPFHGTDIWTGYELSWLNAKGKPMVAIAEFHLSFDSEHLIESKSFKLYLNSFNQTKFDSIELVQSTLADDLSRCANGEVLVKVIEPKHFTHQRIVELPGTCIDDLDIEIEDYNFNPDYLLDSTDDKSMVAETLNSNLLKSNCLITSQPDWGSVMIRYQGPKIDREKLLRYLISFRQHNEFHEQCIERIFVDLKRFCHCAKLTVYARYTRRGGLDINPYRSDFEQPSESHRLARQ

SEQ ID NO: 49683 - protein, 285 aa, Shewanella livingstonensis
  misc_feature (1)..(285): tr|A0A3G8LVK2|A0A3G8LVK2_9GAMM NADPH-dependent 7-cyano- 7-deazaguanine reductase OS=Shewanella livingstonensis OX=150120 GN=queF PE=3 SV=1
MTHNHDPYSDADALKGLTLGRATAYQAEYDASLLQGVPRKLNRDAIELSGGLPFHGTDIWTGYELSWLNAKGKPIVAILEVQLDINSVNLIESKSFKLYLNSFNQTKFDSVEAVQETLSQDLGICAQGELTVKVIEPKYFNLERIIDLPGTCIDELDIEVDEYAFNPDHLINSTDPDKNVAETLNSNLLKSNCLITSQPDWGSVMIRYQGPKIDREKLLRYLISFRQHNEFHEQCVERIFVDLKKYCQCTKLTVYARYTRRGGLDINPYRSDFENPPESNRLARQ

SEQ ID NO: 49684 - protein, 296 aa, Shewanella loihica
  misc_feature (1)..(296): tr|A3QGC2|A3QGC2_SHELP NADPH-dependent 7-cyano-7-deazag uanine reductase OS=Shewanella loihica (strain ATCC BAA -1088 / PV-4) OX=323850 GN=queF PE=3 SV=1
MCAYFDMEKRLMTQVHDPYRDAPALSKLTLGKSTGYQAQYDASLLQGVPRQLNRDAIALGDTLPFHGADIWTGYELSWLNAKGKPMVAIAEFILDFNSDNLIESKSFKLYLNSFNQTRFDSIEQVQQTLAKDLSACAGGEVVVKIIEPKQFAHQRVVELPGTCIDDLDIEIDSYEFSSDYLIDSTDDKSVVAETLTSNLLKSNCLITSQPDWGSVMIRYQGPKIDREKLLRYLISFRQHNEFHEQCVERIFVDLKRLCHCAKLTVYARYTRRGGLDINPYRSDFENPPENHRLARQ

SEQ ID NO: 49685 - protein, 287 aa, Shewanella mangrovi
  misc_feature (1)..(287): tr|A0A094JBA1|A0A094JBA1_9GAMM NADPH-dependent 7-cyano- 7-deazaguanine reductase OS=Shewanella mangrovi OX=1515 746 GN=queF PE=3 SV=1
MSQNPHSDPYQQAPELAELTLGKSVSYQQHYAPELLQPVPRKLNRDAIALAEPLPFHGTDLWTAYELSWLNHKGKPMVALAEVEIDAFSQNLIESKSFKLYLNSLNQTQFESVEALQHVLSKDLSRCADGQVKVTIIEPKQFSNQRVGELPGHCIDDLDIEVSDYAFSRDWLLDSTDDKQIVAETLNSNLLKSNCLITSQPDWGSVMIRYQGPKINRESLLRYLISFRQHNEFHEQCVERIFTDLKQLCHCTKLTVYARYTRRGGLDINPFRSDFEQLQEKHRLARQ

SEQ ID NO: 49686 - protein, 290 aa, Shewanella marisflavi
  misc_feature (1)..(290): tr|A0A4Y6IZ05|A0A4Y6IZ05_9GAMM NADPH-dependent 7-cyano- 7-deazaguanine reductase OS=Shewanella marisflavi OX=26 0364 GN=queF PE=3 SV=1
MEKRLMTQVHDPYHDAPALSQLTLGKSTGYQANYDASLLQGVPRKLNRDAIALGDTLPFHGSDIWTGYELSWLNAKGKPMVAIAEFILDFNSDNLIESKSFKLYLNSFNQTRFESIEAVQQTLAKDLSACAGGEVVVKIIEPKQFAHQRVVELPGTCIDDLDIEVDDYDFSSDYLIDSTDDKSIVAETLTSNLLKSNCLITSQPDWGSVMIRYQGPKIDREKLLRYLISFRQHNEFHEQCVERIFVDLKRLCHCAKLTVYARYTRRGGLDINPYRSDFENPPENHRLARQ

SEQ ID NO: 49687 - protein, 285 aa, Shewanella morhuae
  misc_feature (1)..(285): tr|A0A1N6TP75|A0A1N6TP75_9GAMM NADPH-dependent 7-cyano- 7-deazaguanine reductase OS=Shewanella morhuae OX=36559 1 GN=queF PE=3 SV=1
MTQNHDPYSDAQALAGLTLGKATDYQAEYDASLLQGVPRSLNRNAIALTETLPFHGADIWTGYELSWLNTKGKPMVAIVEVYLSYESLNLIESKSFKLYLNSFNQTKFDNIDSLQKTLTQDLGQCAQGDVNIKIIEPKNFAIQRIIELPGTCIDDLDIEVSDYTFNPDYLENSTDEKQIVAETLNSNLLKSNCLITSQPDWGSVMIRYQGPKIDREKLLRYLISFRQHNEFHEQCVERIFVDLKRFCHCTKLTVYARYTRRGGLDINPYRSDFEQPGENHRLARQ

SEQ ID NO: 49688 - protein, 286 aa, Shewanella oneidensis
  misc_feature (1)..(286): sp|Q8EGJ4|QUEF_SHEON NADPH-dependent 7-cyano-7-deazagua nine reductase OS=Shewanella oneidensis (strain MR-1) O X=211586 GN=queF PE=3 SV=2
MTQNHDPYSDAKELAGLTLGKATDYQAEYDASLLQGVPRSLNRNAINLTAESLPFHGADIWTAYELSWLNAKGKPMVAIADIQLSHASQNLIESKSFKLYLNSFNQTKFDNLDAVQKTLVKDLSECAQGDVTVKIIEPKSFGIQRVVELPGTCIDDLDIEVSDYDFNPEYLENSTDEKQIVAETLNSNLLKSNCLITSQPDWGSVMIRYQGPKIDREKLLRYLISFRQHNEFHEQCVERIFVDLKHYCHCAKLTVYARYTRRGGLDINPYRSDFEHPGESHRLARQ

SEQ ID NO: 49689 - protein, 286 aa, Shewanella oneidensis
  misc_feature (1)..(286): tr|A0A2W5DQY3|A0A2W5DQY3_SHEOE NADPH-dependent 7-cyano- 7-deazaguanine reductase OS=Shewanella oneidensis OX=70 863 GN=queF PE=3 SV=1
MTQNHDPYSDAKELASLTLGKATDYQAEYDASLLQGVPRSLNRNAINLTAESLPFHGADIWTAYELSWLNAKGKPMVAIADIQLSHASQNLIESKSFKLYLNSFNQTKFDNLDAVQKTLVKDLSECAQGDVNVKIIEPKSFGIQRVVELPGTCIDDLDIEVSDYDFNPDYLESSTDEKQIVAETLNSNLLKSNCLITSQPDWGSVMIRYQGPKIDREKLLRYLISFRQHNEFHEQCVERIFVDLKHYCHCAKLTVYARYTRRGGLDINPYRSDFEHPGESHRLARQ

SEQ ID NO: 49690 - protein, 290 aa, Shewanella pealeana
  misc_feature (1)..(290): tr|A8H6N3|A8H6N3_SHEPA NADPH-dependent 7-cyano-7-deazag uanine reductase OS=Shewanella pealeana (strain ATCC 70 0345 / ANG-SQ1) OX=398579 GN=queF PE=3 SV=1
METVLMTQHHDPYSNAPELSELTLGKSTGYQEQYDASLLQGVPRKLNRDAIGLTQELPFHGCDIWTGYELSWLNAKGKPMVAIAEFSLSFDSKNLIESKSFKLYLNSYNQTRFENAQAVQERLVQDLSACAMGDVTVKVIEPKQFSHQRIVELPGTCIDDLDIEVDDYSFNPDYLVESVDNKAIVAETLTSNLLKSNCLITSQPDWGTVMIRYQGPKIDREKLLRYLISFRQHNEFHEQCVERIFVDLKRFCQCAKLTVYARYTRRGGLDINPYRSDFEHPAENQRLARQ

SEQ ID NO: 49691 - protein, 286 aa, Shewanella piezotolerans
  misc_feature (1)..(286): tr|B8CQA5|B8CQA5_SHEPW NADPH-dependent 7-cyano-7-deazag uanine reductase OS=Shewanella piezotolerans (strain WP 3 / JCM 13877) OX=225849 GN=queF PE=3 SV=1
MMTKHHDPYSDAAELSELTLGKSTGYQEQYDASLLQGVPRKLNRDAIGLNDDLPFHGCDIWTGYELSWLNAKGKPMVAIAEFSLDYQSANLIESKSFKLYLNSFNQTKFDDVQTVQATLSRDLCECAQGDVSVKVIEPKQFSHQRIVELPGTCIDALDIEVDDYSFNPDYLVDSVDDKVMVAETLTSNLLKSNCLITSQPDWGTVMIRYQGPKIDREKLLRYLISFRQHNEFHEQCVERIFVDLKRFCQCAKLTVYARYTRRGGLDINPYRSDFENPADNHRLARQ

SEQ ID NO: 49692 - protein, 285 aa, Shewanella psychrophila
  misc_feature (1)..(285): tr|A0A1S6HP81|A0A1S6HP81_9GAMM NADPH-dependent 7-cyano- 7-deazaguanine reductase OS=Shewanella psychrophila OX= 225848 GN=queF PE=3 SV=1
MTQVHDPYTDAEALSGLTLGKATGYQSEYEASLLQGVPRKLNRDAIELNESLPFHGTDIWTGYELSWLNAKGKPVVAIAEFQLSFDSENLIESKSFKLYLNSFNQTKFDNLEQVQATLTQDLSNCAVGNVSVKVFEPKQFASQRIVELPGTCIDDLDIEVDDYKFNPQYLENSTDEKAVVAETLNSNLLKSNCLITSQPDWGSVMIRYQGPKIDREKLLRYLISFRQHNEFHEQCIERIFVDLKRFCHCAKLTVYARYTRRGGLDINPYRSDFETPPENHRLARQ

SEQ ID NO: 49693 - protein, 296 aa, Shewanella putrefaciens
  misc_feature (1)..(296): tr|A4Y524|A4Y524_SHEPC NADPH-dependent 7-cyano-7-deazag uanine reductase OS=Shewanella putrefaciens (strain CN- 32 / ATCC BAA-453) OX=319224 GN=queF PE=3 SV=1
MCAYFDMETVLMTKNHDPYSDAKALTGLTLGKATDYQAEYDASLLQGVPRSLNRNAINLTEALPFHGADIWTGYELSWLNTKGKPMVAIAEIHLSYQSLNLIESKSFKLYLNSFNQTKFSNIDAVQKTLVQDLSHCAQGDVTVRIIEPRSFGSQRIVELPGTCIDDLDIEVSDYSFNPDYLENSTDDKQIVAETLNSNLLKSNCLITSQPDWGSIMIRYQGPKIDREKLLRYLISFRQHNEFHEQCVERIFVDLKRYCHCAKLTVYARYTRRGGLDINPYRSDFEQPGEGHRLARQ

SEQ ID NO: 49694 - protein, 285 aa, Shewanella putrefaciens; identical to SEQ ID NO: 49667
  misc_feature (1)..(285): tr|A0A448ENP1|A0A448ENP1_SHEPU NADPH-dependent 7-cyano- 7-deazaguanine reductase OS=Shewanella putrefaciens OX= 24 GN=queF PE=3 SV=1

SEQ ID NO: 49695 - protein, 290 aa, Shewanella sediminis
  misc_feature (1)..(290): tr|A8FY60|A8FY60_SHESH NADPH-dependent 7-cyano-7-deazag uanine reductase OS=Shewanella sediminis (strain HAW-EB 3) OX=425104 GN=queF PE=3 SV=1
MENLLMTQVHDPYTGAEALSELTLGKATGYQAEYDASLLQGVPRKLNRDAIGLNETLPFHGTDIWTGYELSWLNAKGKPMVAIAEFYLSFDSQNLIESKSFKLYLNTFNQTKFDSVEQVQSTLADDLSQCAEGEVLVRVLEPKQFSTQRVVELPGTCIDDLDIEVNDYSFNPDYLQDSTDDKAVVAETLNSNLLKSNCLITSQPDWGSVMIRYQGPKIDREKLLRYLISFRQHNEFHEQCIERIFVDLKRFCNCSKLTVYARYTRRGGLDINPYRSDFENPPESHRLARQ

SEQ ID NO: 49696 - protein, 286 aa, Shewanella sp.
  misc_feature (1)..(286): sp|Q0HT42|QUEF_SHESR NADPH-dependent 7-cyano-7-deazagua nine reductase OS=Shewanella sp. (strain MR-7) OX=60481 GN=queF PE=3 SV=1
MTHNHDPYSDAKELAGLTLGKATDYQAEYDASLLQGVPRSLNRNAINLTAESLPFHGADIWTAYELSWLNAKGKPMVAIADIQLSHESQNLIESKSFKLYLNSFNQTKFDNIDAVQKTLVQDLGECAQGQVTVKIIEPKSFGIQRVVELPGTCIDDLDIEVSDYDFNPDYLENSTDDKQIVAETLNSNLLKSNCLITSQPDWGSVMIRYQGPKIDREKLLRYLISFRQHNEFHEQCVERIFVDLKHYCHCTKLTVYARYTRRGGLDINPYRSDFEHPGESHRLARQ

SEQ ID NO: 49697 - protein, 285 aa, Shewanella sp.
  misc_feature (1)..(285): tr|A0A2K9A0W5|A0A2K9A0W5_9GAMM NADPH-dependent 7-cyano- 7-deazaguanine reductase OS=Shewanella sp. Pdp11 OX=205 9264 GN=queF PE=3 SV=1
MTQNHDPYSDAQALVGLTLGKATDYQAEYDASLLQGVPRSLNRNAIALTGTLPFHGADIWTGYELSWLNAKGKPMVAIAEFHLSYESLNLIESKSFKLYLNSFNQTKFDSLDSLQKTLVADLSQCAQGDVSVKIIEPKSFGIQRIIELPGTCIDDLDIEVSDYSFNPDYLENSTDDKQTVAETLNSNLLKSNCLITSQPDWGSVMIRYQGPKIDREKLLRYLISFRQHNEFHEQCVERIFVDLKRFCHCTKLTVYARYTRRGGLDINPYRSDFEQPGESHRLARQ

SEQ ID NO: 49698 - protein, 285 aa, Shewanella violacea
  misc_feature (1)..(285): tr|D4ZHN3|D4ZHN3_SHEVD NADPH-dependent 7-cyano-7-deazag uanine reductase OS=Shewanella violacea (strain JCM 101 79 / CIP 106290 / LMG 19151 / DSS12) OX=637905 GN=queF PE=3 SV=1
MTQVHDPYTDAEALRDLTLGKATGYQAEYDASLLQGVPRKLNRDAIKLNESLPFHGTDIWTGYELSWLNAKGKPVVAIAEFHLSFDSENLIESKSFKLYLNSFNQTKFDNIEQVKTTLTQDLSKCAVGEISVKIFEPKQFASQRIVELPGTCIDDLDIEVDDYNFNPLYLENSTDEKAVVAETLNSNLLKSNCLITSQPDWGSVMIRYQGPKIDREKLLRYLISFRQHNEFHEQCIERIFVDLKRFCNCTKLTVYARYTRRGGLDINPYRSDFENPPESHRLARQ

SEQ ID NO: 49699 - protein, 296 aa, Shewanella woodyi
  misc_feature (1)..(296): tr|B1KNW1|B1KNW1_SHEWM NADPH-dependent 7-cyano-7-deazag uanine reductase OS=Shewanella woodyi (strain ATCC 5190 8 / MS32) OX=392500 GN=queF PE=3 SV=1
MITYFAMEKPLMTQVHDPYSNAQALSELTLGKATGYQSEYDASLLQGVPRKLNRDAIGLSNTLPFHGSDIWTGYELSWLNAKGKPMVAIAEFLLSFDSENLIESKSFKLYLNSFNQTKFENLEQVQTTLATDLSQCAKGEVLVKVIEPKQFIHQRVVELPGTCIDDLDIEVEDYSFNPEYLIDSTDEKAMVAETLNSNLLKSNCLITSQPDWGSVMIRYQGPKIDREKLLRYLISFRQHNEFHEQCIERIFVDLKRFCHCAKLTVYARYTRRGGLDINPYRSDFEHPPESHRLARQ

SEQ ID NO: 49700 - protein, 340 aa, Shewanella xiamenensis
  misc_feature (1)..(340): tr|A0A073L2F4|A0A073L2F4_9GAMM NADPH-dependent 7-cyano- 7-deazaguanine reductase OS=Shewanella xiamenensis OX=3 32186 GN=queF PE=3 SV=1
MAHLAGNIAVIRLKLIGKTDDSFAKIYREQADKTLKHNPISGIMCAYFDMETVLMTQNHDPYSDAKELASLTLGKATDYQAEYDASLLQGVPRSLNRNAINLTAESLPFHGADIWTAYELSWLNAKGKPMVAIADIQLSHASQNLIESKSFKLYLNSFNQTKFDNLDAVQKTLVKDLSECAQGDVNVKIIEPKSFGIQRVVELPGTCIDDLDIEVSDYDFNPDYLENSTDEKQIVAETLNSNLLKSNCLITSQPDWGSVMIRYQGPKIDREKLLRYLISFRQHNEFHEQCVERIFVDLKHYCHCAKLTVYARYTRRGGLDINPYRSDFEHPGESHRLARQ

SEQ ID NO: 49701 - protein, 286 aa, Shewanella xiamenensis
  misc_feature (1)..(286): tr|A0A1E3V132|A0A1E3V132_9GAMM NADPH-dependent 7-cyano- 7-deazaguanine reductase OS=Shewanella xiamenensis OX=3 32186 GN=queF PE=3 SV=1
MTQNHDPYSDAKELASLTLGKATDYQAEYDASLLQGVPRSLNRNAINLTAESLPFHGADIWTAYELSWLNAKGKPMVAIADIQLSHASQNLIESKSFKLYLNSFNQTKFDNLDAVQKTLVKDLSECAQGDVNVKIIEPKSFGIQRVVELPGTCIDDLDIEVSDYDFNPDYLENSTDEKQIVAETLNSNLLKSNCLITSQPDWGSVMIRYQGPKIDREKLLRYLISFRQHNEFHEQCVERIFVDLKHYCHCAKLTVYARYTRRGGLDINPYRSDFEHPGESHRLARQ

SEQ ID NO: 49702 - protein, 282 aa, Shigella boydii; identical to SEQ ID NO: 45963
  misc_feature (1)..(282): sp|B2TZD9|QUEF_SHIB3 NADPH-dependent 7-cyano-7-deazagua nine reductase OS=Shigella boydii serotype 18 (strain C DC 3083-94 / BS512) OX=344609 GN=queF PE=3 SV=1

SEQ ID NO: 49703 - protein, 282 aa, Shigella boydii
  misc_feature (1)..(282): tr|I6D4E2|I6D4E2_SHIBO NADPH-dependent 7-cyano-7-deazag uanine reductase OS=Shigella boydii 965-58 OX=766138 GN =queF PE=3 SV=1
MSSYANHQALAGLTLGKSTDYRDTYDASLLQGVPRNLNRDPLGLKADNLPFHGTDIWTLYELSWLNAKGLPQVAVGHVELDYTSVNLIESKSFKLYLNSFNQTRFNNWDEVRQTLERDLSTCAQGKISVALYRLDELEGQPIGHFNGTCIDDQDITIDNYEFTTDYLENATSGEKVVEETLVSHLLKSNCLITHQPDWGSIQIQYRGRQIDREKLLRYLVSFRHHNEFHEQCVERIFNDLLRFCQPEKLSVYARYTRRGGLDINPWRSNSDFVPSTTRLVRQ

SEQ ID NO: 49704 - protein, 282 aa, Shigella dysenteriae
  misc_feature (1)..(282): sp|Q32CC4|QUEF_SHIDS NADPH-dependent 7-cyano-7-deazagua nine reductase OS=Shigella dysenteriae serotype 1 (stra in Sd197) OX=300267 GN=queF PE=3 SV=1
MSSYANHQALAGLTLGKSTDYRDTYDASLLQGVPRSLNRDPLGLKADNLPFHGADIWTLYELSWLNAKGLPQVAVGHVELDYTSVNLIESKSFKLYLNSFNQTSFNNWDEVLKTLERDLSTCAQGKVSVALYRLDELEGQPIGHFNGTCIDDQDITIDNYEFTTDYLENATCGEKVVEETLVSHLLKSNCLITHQPDWGSIQIQYRGRQIDREKLLRYLVSFRHHNEFHEQCVERIFNDLLRFCQPEKLSVYARYTRRGGLDINPWRSNSDFVPSTTRLVRQ

SEQ ID NO: 49705 - protein, 282 aa, Shigella dysenteriae; identical to SEQ ID NO: 49704
  misc_feature (1)..(282): tr|E2X9F6|E2X9F6_SHIDY NADPH-dependent 7-cyano-7-deazag uanine reductase OS=Shigella dysenteriae 1617 OX=754093 GN=queF PE=3 SV=1

SEQ ID NO: 49706 - protein, 282 aa, Shigella flexneri
  misc_feature (1)..(282): sp|Q0T1R0|QUEF_SHIF8 NADPH-dependent 7-cyano-7-deazagua nine reductase OS=Shigella flexneri serotype 5b (strain 8401) OX=373384 GN=queF PE=3 SV=1
MSSYANHQALAGLTLGKSTDYRDTYDASLLQGVPRSLNRDPLGLKADNLPFHGTDIWTLYELSWLNAKGLPQVAVGHVELDYTSVNLIESKSFKLYLNSFNQTRFNNWDEVRQTLERDLSTCAQGKISVALYRLDELEGQPIGHFNGTCIDDQDITIDNYEFTTDYLENATSGEKVVEETLVSHLLKSNCLITHQPDWGSIQIQYRGRQIDREKLLRYLVSFRHHNEFHEQCVERIFNDLLRFCQPEKLSVYARYTRRGGLDINPWRSNSDFVPSTTRLVRQ

SEQ ID NO: 49707 - protein, 282 aa, Shigella flexneri; identical to SEQ ID NO: 49706
  misc_feature (1)..(282): tr|A0A380AV79|A0A380AV79_SHIFL NADPH-dependent 7-cyano- 7-deazaguanine reductase OS=Shigella flexneri OX=623 GN =queF PE=3 SV=1

SEQ ID NO: 49708 - protein, 282 aa, Shigella sonnei; identical to SEQ ID NO: 45963
  misc_feature (1)..(282): sp|Q3YY62|QUEF_SHISS NADPH-dependent 7-cyano-7-deazagua nine reductase OS=Shigella sonnei (strain Ss046) OX=300 269 GN=queF PE=3 SV=1

SEQ ID NO: 49709 - protein, 282 aa, Shigella sonnei
  misc_feature (1)..(282): tr|A0A236JB34|A0A236JB34_SHISO NADPH-dependent 7-cyano- 7-deazaguanine reductase OS=Shigella sonnei OX=624 GN=q ueF PE=3 SV=1
MSSYANHQALAGLTLGKSTDYRDTYDASLLQGVPRSLNRDPLGLKADNLPFHGTDIWTLYELSWLNAKGLPQVAVGHVELDYTSANLIESKSFKLYLNSFNQTRFNNWDEVRQTLERDLSTCAQGKVSVALYRLDELEGQPIGHFNGTCIDDQDITIDNYEFTTDYLENATSGEKVVEETLVSHLLKSNCLITHQPDWGSIQIQYRGRQIDREKLLRYLVSFRHHNEFHEQCVERIFNDLLRFCQPEKLSVYARYTRRGGLDINPWRSNSDFVPSTTRLVRQ

SEQ ID NO: 49710 - protein, 281 aa, Shigella sp.
  misc_feature (1)..(281): tr|A0A1D3DKM5|A0A1D3DKM5_9ENTR NADPH-dependent 7-cyano- 7-deazaguanine reductase OS=Shigella sp. FC1655 OX=1898 038 GN=queF PE=3 SV=1
MSLYQGDKSLEALSLGKETQYHDQYDAGLLQGVPRSLNRDSLSLTAENLPFHGGDIWTMYELSWLNNRGLPQVAIGHVELDATTENLIESKSFKLYLNSFNQTRFESWDAVEKTLLNDLTTCAKGNVNLTIYPLSHFTSQPIVDFAGECIDEQDIEIDNYQFDTQWLNESTTDTLVEETLVSHLLKSNCLITNQPDWGSVAIQYKGKKINREKLLRYLVSFRQHNEFHEQCVERIFHDIMQLCAPETLTVYARYTRRGGLDINPWRSNCEFVPEINRLARQ

SEQ ID NO: 49711 - protein, 282 aa, Shigella sp.
  misc_feature (1)..(282): tr|A0A1E3MVJ8|A0A1E3MVJ8_9ENTR NADPH-dependent 7-cyano- 7-deazaguanine reductase OS=Shigella sp. FC569 OX=18928 97 GN=queF PE=3 SV=1
MSSYANHQALAGLTLGKSTDYRDTYDASLLQGVPRSLNRDPLGLKADNLPFHGTDIWTLYELSWLNAKGLPQVAVGHVELDYTSVNLIESKSFKLYLNSFNQTRFNNWDEVRQTLERDLSTCAQGKVSVALYRLDELEGQPIGHFNGTCIDDQDITIDNYEFTTDYLENATSGEKVVEETLVSHLLKSNCLITHQPDWGSIQIQYRGRQIDREKLLRYLVSFRHHNEFHEQCVERIFNDLLRFCQPEKLSVYARYTRRGGLDINPWRSNNDFVPSTTRLVRQ

SEQ ID NO: 49712 - protein, 154 aa, Shimia marina
  misc_feature (1)..(154): tr|A0A0N7LS26|A0A0N7LS26_9RHOB NADPH-dependent 7-cyano- 7-deazaguanine reductase OS=Shimia marina OX=321267 GN= queF PE=3 SV=1
MSEDIYSNLKQLGGATVMPTSPEEAELERVENPQADVAYNVRFTAPEFTSLCPMTGQPDFAHLVIDYVPGKWLVESKSLKLFLGSFRNHGAFHEDCTVSIARRLADFLEPQWLRIGGYWYPRGGIPIDVFWQTGAMPESVWIPDQGVPPYRGRG

SEQ ID NO: 49713 - protein, 282 aa, Shimwellia blattae
  misc_feature (1)..(282): tr|I2B5Z6|I2B5Z6_SHIBC NADPH-dependent 7-cyano-7-deazag uanine reductase OS=Shimwellia blattae (strain ATCC 299 07 / DSM 4481 / JCM 1650 / NBRC 105725 / CDC 9005-74) O X=630626 GN=queF PE=3 SV=1
MPSYENHQALSNLTLGKKTAYKDTYDASLLQPVPRSLNRDPLGLRADALPFHGRDIWTLYELSWLNANGLPQVAVGHVELSADSLNLVESKSFKLYLNSFNQTRFPDRDAVCQTLQRDLQHCAGGDVSVALYPLDAIEGQPIGAFAGECIDDQPGLVIDNYTFSAEYLQGAAGTQQVEETLVSHLLKSNCLITHQPDWGSVQIQYRGGQIDREKLLRYLVSFRHHNEFHEQCVERIFNDIMRFCRPEQLSVYARYTRRGGLDINPWRSNTTFTPALARLVRQ

SEQ ID NO: 49714 - protein, 154 aa, Shinella granuli
  misc_feature (1)..(154): tr|A0A4V2RJI3|A0A4V2RJI3_9RHIZ NADPH-dependent 7-cyano- 7-deazaguanine reductase OS=Shinella granuli OX=323621 GN=queF PE=3 SV=1
MSKTDVSGLSQLGQAVDLPAGPETAVLEKVPSNHAGTDFVVRFTAPEFTSLCPMTGQPDFAHIVIDYIPDGWLVESKSLKLYLHSFRNHGAFHEDCTIDIAKRLVGLLEPKWLRIGAYWYPRGGIPIDVFWQTGDAPKGVWIPDQGVQPYRGRG

SEQ ID NO: 49715 - protein, 154 aa, Shinella sp.
  misc_feature (1)..(154): tr|A0A5F0IPM9|A0A5F0IPM9_9RHIZ NADPH-dependent 7-cyano- 7-deazaguanine reductase OS=Shinella sp. MEC089 OX=1967 500 GN=queF PE=3 SV=1
MSKTDVSGLSQLGQKVDLPADPDAAVLERVPSSHAGTDFVVRFTAPEFTSLCPMTGQPDFAHIVIDYIPNGWLVESKSLKLYLHSFRNHGAFHEDCTIDIAKRLVDLLEPKWLRIGAYWYPRGGIPIDVFWQTGDAPQGVWIPEQGVQPYRGRG

SEQ ID NO: 49716 - protein, 154 aa, Shinella sp.; identical to SEQ ID NO: 49715
  misc_feature (1)..(154): tr|A0A4Y8QPK8|A0A4Y8QPK8_9RHIZ NADPH-dependent 7-cyano- 7-deazaguanine reductase OS=Shinella sp. MEC087 OX=1967 501 GN=queF PE=3 SV=1

SEQ ID NO: 49717 - protein, 281 aa, Siccibacter turicensis
  misc_feature (1)..(281): tr|A0A2P8VNL4|A0A2P8VNL4_9ENTR NADPH-dependent 7-cyano- 7-deazaguanine reductase OS=Siccibacter turicensis OX=3 57233 GN=queF PE=3 SV=1
MSSYENHQALQGLTLGKSTDYRDVYDAALLQAVPRSMNRLPLGLHDDALPFHGGDIWTLYELSWLNARGLPQVAVGLVELNATSVNLVESKSFKLYLNSFNQTRFDSWEQVRATLERDLSACAQGAVTVKLMRLDDVEGAPLARFEGECIDDQDIAIDSYAFNADYLSGAAGDEMVDETLVSHLLKSNCLITNQPDWGSVQIRYCGPKIDREKLLRYLVSFRHHNEFHEQCVERIFNDVQRFCQPQALSVYARYTRRGGLDINPWRSNVPFIPATGRLVRQ

SEQ ID NO: 49718 - protein, 153 aa, Siculibacillus lacustris
  misc_feature (1)..(153): tr|A0A4Q9VSS4|A0A4Q9VSS4_9RHIZ NADPH-dependent 7-cyano- 7-deazaguanine reductase OS=Siculibacillus lacustris OX =1549641 GN=queF PE=3 SV=1
MTDFDTTALQLGHAVARPTDPASARLDRVPDPQADTRYMVRFTVPEFTSLCPVTGQPDFAHLVIDYVPDAWLVESKSLKLYLGSFRDHGAFHEDCTVRIGRRLVDLLAPHWLRIGGYWYPRGGIPIDVFWSTGPQPADLWIPDQGVAPYRGRG

SEQ ID NO: 49719 - protein, 139 aa, Sideroxydans lithotrophicus
  misc_feature (1)..(139): tr|D5CRW2|D5CRW2_SIDLE NADPH-dependent 7-cyano-7-deazag uanine reductase OS=Sideroxydans lithotrophicus (strain ES-1) OX=580332 GN=queF PE=3 SV=1
MTTQPTKTLETFPNPQPGRDYHIHMEIPEFTCLCPKTGQPDFATLILDYIADEKCVELKSLKLYIWSFRNEGHFHEDVTNRVLDDLVTATQPRFMRLTAKFYVRGGIFTNVVAEHRKAGWQPVPLVDLSQFQTQSNTRD

SEQ ID NO: 49720 - protein, 139 aa, Sideroxydans sp.
  misc_feature (1)..(139): tr|A0A1G3JFA2|A0A1G3JFA2_9PROT NADPH-dependent 7-cyano- 7-deazaguanine reductase OS=Sideroxydans sp. RIFOXYD2_F ULL_59_7 OX=1802156 GN=queF PE=3 SV=1
MTTKPGKTLETFPNPQPARDYHIHMEIPEFTCLCPKTGQPDFATLILDYIADQQCVELKSLKLYMWSFREEGHFHEDVTNRILDDLVAATQPRFMRLTAKFYVRGGIFTNVVAEHRKQGWQPAPRVELSSFHGQSNMRG

SEQ ID NO: 49721 - protein, 139 aa, Sideroxydans sp.
  misc_feature (1)..(139): tr|A0A1G3IKQ3|A0A1G3IKQ3_9PROT NADPH-dependent 7-cyano- 7-deazaguanine reductase OS=Sideroxydans sp. GWF2_59_14 OX=1802154 GN=queF PE=3 SV=1
MTTQATKTLETFPNPQPKRDYHIHMEIPEFTCLCPKTGQPDFATLILDYIADEQCVELKSLKLYIWSFRNEGHFHEDVTNRVLDDLVAATQPRFMRLTAKFYVRGGIFTNVVAEHRKPGWQPAPLVDLTQFSTQSNTRG

SEQ ID NO: 49722 - protein, 154 aa, Silicibacter sp.; identical to SEQ ID NO: 45905
  misc_feature (1)..(154): tr|C9D361|C9D361_9RHOB NADPH-dependent 7-cyano-7-deazag uanine reductase OS=Silicibacter sp. TrichCH4B OX=64407 6 GN=queF PE=3 SV=1

SEQ ID NO: 49723 - protein, 279 aa, Simiduia agarivorans
  misc_feature (1)..(279): tr|K4KG14|K4KG14_SIMAS NADPH-dependent 7-cyano-7-deazag uanine reductase OS=Simiduia agarivorans (strain DSM 21 679 / JCM 13881 / BCRC 17597 / SA1) OX=1117647 GN=queF PE=3 SV=1
MSGVIENHGPSHLGKSSDYKDSYDASLLDPIPRALARQALELEGDLLPFKGADRWTAYELSWLDDRGKPCVAMAEFEFPCTSEFIVESKSFKLYLNSFNQSRFSSMQTVAKLMEKDLTDACGAPVMVRCLSMKQGLSMGMGHFAAESIDELAVDCDVYQPDAGLLARVENAPTVQEALCSDLLKSNCPVTGQPDWASLYVHYTGPAIDRTSLLRYIVSYRQHRDFHEHCVERIFLDILRRCTPEKLTVYARYTRRGGLDINPWRSNCGEQPEVLRLVRQ

SEQ ID NO: 49724 - protein, 156 aa, Simonsiella muelleri
  misc_feature (1)..(156): tr|V9H5Y3|V9H5Y3_9NEIS NADPH-dependent 7-cyano-7-deazag uanine reductase OS=Simonsiella muelleri ATCC 29453 OX= 641147 GN=queF PE=3 SV=1
MRTESELNGITLLGNQKTEYRSDYAPEVLESFDNKHQGNDYFVKFVCPEFTSLCPMTGQPDFATIIIRYIPDVKMVESKSLKLYLFSFRNHGDFHEDCVNIVMKDLIQLMNPKYIEVFGEFTPRGGIAIHPFANFGRAGTPFEQMARERLFHHDMQ

SEQ ID NO: 49725 - protein, 283 aa, Simplicispira metamorpha
  misc_feature (1)..(283): tr|A0A4R2NEH3|A0A4R2NEH3_9BURK NADPH-dependent 7-cyano- 7-deazaguanine reductase OS=Simplicispira metamorpha OX =80881 GN=queF PE=3 SV=1
MTPHTPEQSQLGKASAYADQYDASLLFPLARAGKRAEIGITAAPAFFGADLWTAFELSWLNLRGKPQVALAHITVPCETPNIIESKSFKLYLNSFNNTRFADAAEVQARIRADVSEAAWRGAAHPATVGVKLLLPDMFDREPVHELDGLNLDRLDVECTQYQPAPELLTAQFNEAPVNEVLVSHLLKSNCLVTGQPDWGSVQIAYSGPQIDQEGLLQYIVSFRNHNEFHEQCVERIFMDIWTRCKPIKLTVYARYTRRGGLDINPLRTSHPQALPRNIRTARQ

SEQ ID NO: 49726 - protein, 281 aa, Simplicispira sp.
  misc_feature (1)..(281): tr|A0A2U1C7E0|A0A2U1C7E0_9BURK NADPH-dependent 7-cyano- 7-deazaguanine reductase OS=Simplicispira sp. 125 OX=21 35643 GN=queF PE=3 SV=1
MSSADQSPLGKASAYIDQYDASLLFPLPRAGKRAEIGITGNPPFMGADLWTAFELSWLNERGKPQVALAHITVPCETPNIIESKSFKLYLNSFNNTRFSGVEAVQARLRADLTEAAWRGAPQSASLGVRVLLPELFDREPVHELDGLNLDRLDLECKHYQPAPQLLRAAFDEAPVSEVLVSHLLKSNCLVTGQPDWGSVRIAYTGPQIEQEGLLQYIVSFRNHNEFHEQCVERIFMDLWTRCKPIKLEVYARYTRRGGLDINPWRTSHPMAPPPNVRTARQ

SEQ ID NO: 49727 - protein, 281 aa, Simplicispira sp.
  misc_feature (1)..(281): tr|A0A398C5A4|A0A398C5A4_9BURK NADPH-dependent 7-cyano- 7-deazaguanine reductase OS=Simplicispira sp. NY-02 OX= 2315688 GN=queF PE=3 SV=1
MNTPEQSPLGKTSARPEHYDPALLFPIARAAKRAEIGVGAQPQFFGADLWTAYELSWLNPRGKPQVALAHLTVPCESPNLIESKSLKLYLGSYANTPFASPQDVAARMRTDLSEAAWRGSALGGSVGVRLLLPEAFDREPIHELDGLNLDRLDLECSRYTPAPDLLHAAFDEAPVSEVLTSNLLKSNCLVTGQPDWGSVRIAYSGPQIDQEGLLQYIVSFRNHNEFHEQCIERIFMDLWARCQPIKLEVYGRYTRRGGLDINPWRTSHPMAIPPNVRTARQ

SEQ ID NO: 49728 - protein, 281 aa, Simplicispira suum
  misc_feature (1)..(281): tr|A0A2S0N1K5|A0A2S0N1K5_9BURK NADPH-dependent 7-cyano- 7-deazaguanine reductase OS=Simplicispira suum OX=21099 15 GN=queF PE=3 SV=1
MNTPEQSPLGKDSATPEHYDPALLFPIARAAKRAEIGVGAQPRFFGADLWTAFELSWLNARGKPQVALAHLTVPCESPNIIESKSLKLYLGSFANTPFASPQDVAAHIRSDLSEAAWAGSERNGSVGVRLLLPELFEREAVQELDGLSLDRLDIECTRYTPAPDLLRAAHDEAPVSEVLTSNLLKSNCLVTGQPDWGSIRIAYSGAQMDQESLLQYLVSFRNHNEFHEQCVERIFMDLWTHCQPVKLEVYARYTRRGGLDINPWRTSHPMAPPPNVRTARQ

SEQ ID NO: 49729 - protein, 118 aa, Singulisphaera acidiphila
  misc_feature (1)..(118): tr|L0DN30|L0DN30_SINAD NADPH-dependent 7-cyano-7-deazag uanine reductase OS=Singulisphaera acidiphila (strain A TCC BAA-1392 / DSM 18658 / VKM B-2454 / MOB10) OX=88629 3 GN=queF PE=3 SV=1
MATLETFPNQFPDREYEIEITCPEFTAVCPKTGQPDFGTIVISYVPGATCIELKSLKLYLFSFRDRGIFYEHSINTMLDDLVGACQPRRMRVVGNFTPRGGISSRITAHYETQSPPKA

SEQ ID NO: 49730 - protein, 118 aa, Singulisphaera sp.
  misc_feature (1)..(118): tr|A0A1N6H4J2|A0A1N6H4J2_9BACT NADPH-dependent 7-cyano- 7-deazaguanine reductase OS=Singulisphaera sp. GP187 OX =1882752 GN=queF PE=3 SV=1
MATLESFPNQFPDREYEIEITCPEFTAVCPITGQPDFGTIIVTYVPAATCIELKSLKLYLFSFRNRGIFYEHSINTMLDDLVAACQPRRMRVVGNFTPRGGISSRITAQYEAQSPSKA

SEQ ID NO: 49731 - protein, 140 aa, Sinimarinibacterium flocculans
  misc_feature (1)..(140): tr|A0A318EHE7|A0A318EHE7_9GAMM NADPH-dependent 7-cyano- 7-deazaguanine reductase OS=Sinimarinibacterium floccul ans OX=985250 GN=queF PE=3 SV=1
MSTQPSKSLETFPNPAPQRDFAIRMRIPEFTCLCPKTGQPDFGTLYLEYVADRLCVELKALKLYVWSFRDEGKFHEAVTNEILDDLVAATQPRFMRLTAVFNVRGGIYTHVSVEHRQPGWSGSLPPPAWHVDPTGAGATP

SEQ ID NO: 49732 - protein, 140 aa, Sinimarinibacterium sp.
  misc_feature (1)..(140): tr|A0A4U0GTK1|A0A4U0GTK1_9GAMM NADPH-dependent 7-cyano- 7-deazaguanine reductase OS=Sinimarinibacterium sp. CAU 1509 OX=2562283 GN=queF PE=3 SV=1
MSTQPTKTLETFPNPAPGRDFAIRMRMPEFTCLCPKTGQPDFGTLYLEYVADKQCIELKSLKLYLWSFRDEGCFHEAVTNQILDDLVAATKPRFMRLTAVFNVRGGIYTHVSVEHRKKAWKGELPPSAWHVDPTGAGFTP

SEQ ID NO: 49733 - protein, 165 aa, Sinobaca qinghaiensis
  misc_feature (1)..(165): tr|A0A419V6V8|A0A419V6V8_9BACL NADPH-dependent 7-cyano- 7-deazaguanine reductase OS=Sinobaca qinghaiensis OX=34 2944 GN=queF PE=3 SV=1
MSERKTGMDDLTLLGNQQQEGQQFEYDPALLESFDNNHPGTDYFVKFNCPEFTTLCPMTGQPDFATLYISYVPDVKMVESKSLKLYLFSYRNHGGFHEDAINTIVNDLVELMDPRYLEIWGKFTPRGGISIDPYVNYGKKGTKFEEMAYHRLMNHDMNPETITNR

SEQ ID NO: 49734 - protein, 140 aa, Sinobacteraceae bacterium
  misc_feature (1)..(140): tr|A0A2T5MHJ7|A0A2T5MHJ7_9GAMM NADPH-dependent 7-cyano- 7-deazaguanine reductase OS=Sinobacteraceae bacterium G T1R17 OX=2029166 GN=queF PE=3 SV=1
MTSKPSKTLETFPNPAPQRDFTIRMRMPEFTCLCPKTGQPDFGTLYLEYVADKSCVELKALKMYLWSFRNEGCFHEAVTNQILDELVKATKPRYMRLTAVFNVRGGIYTHVTAEHTKKGWKGTLPPSAWHVDPTGAGETP

SEQ ID NO: 49735 - protein, 141 aa, Sinobacteraceae bacterium
  misc_feature (1)..(141): tr|A0A522KU31|A0A522KU31_9GAMM NADPH-dependent 7-cyano- 7-deazaguanine reductase OS=Sinobacteraceae bacterium O X=1969813 GN=queF PE=3 SV=1
MSTQPSKSLETFPNPNPARDFLIRMRMPEFTCLCPKTGQPDFATFYLEYIPGELCVELKSLKLYMWSYRNEGAFHEAVTNSILDDLVAATQPKFMRLTADWYVRGGIYTHVTVEHRQPGYAPAFADPSGLPPAKWEGYQNH

SEQ ID NO: 49736 - protein, 276 aa, Sinobacterium caligoides
  misc_feature (1)..(276): tr|A0A3N2DYS4|A0A3N2DYS4_9GAMM NADPH-dependent 7-cyano- 7-deazaguanine reductase OS=Sinobacterium caligoides OX =933926 GN=queF PE=3 SV=1
MSDEYLSEHTQLGKTTENIYTYTPSLLCPIPRAMARKELGFEAETLPFNGSDIWTGYEISWLAESGKPEIAIAEFRIPAMSPNIIESKSFKMYLNSFNLSKFEGWGVVEELMTKDISAAAGAPVQVTLLTPQQMLRAGIESPKGTCIDAHDITLEAYLPEASLLQVSEQQVREDVYSDLFRSNCPVTGQPDWATIAISYSGNQIDHASLLRYLVSFRDQAEFHEQCAERIFRDISEQCAPQELTVFARFLRRGGLDINPWRSNVREAPRFQRLSRQ

SEQ ID NO: 49737 - protein, 154 aa, Sinorhizobium americanum
  misc_feature (1)..(154): tr|A0A1L3LPF2|A0A1L3LPF2_9RHIZ NADPH-dependent 7-cyano- 7-deazaguanine reductase OS=Sinorhizobium americanum OX =194963 GN=queF PE=3 SV=1
MPKTDVSGLSQLGAKVDLPQSPEEAVLERVPSGHEGTDFVVRFTAPEFTSLCPMTGQPDFAHIVIDYVPNGWLVESKSLKLFLHSFRNHGAFHEDCTIDIAKRLVSLLSPKWLRIGAYWYPRGGIPIDVFWQTGNPPERVWLPDQGVPTYRGRG

SEQ ID NO: 49738 - protein, 154 aa, Sinorhizobium americanum; identical to SEQ ID NO: 49737
  misc_feature (1)..(154): tr|A0A1L3L5H2|A0A1L3L5H2_9RHIZ NADPH-dependent 7-cyano- 7-deazaguanine reductase OS=Sinorhizobium americanum CC GM7 OX=1408224 GN=queF PE=3 SV=1

SEQ ID NO: 49739 - protein, 154 aa, Sinorhizobium fredii; identical to SEQ ID NO: 49166
  misc_feature (1)..(154): tr|A0A2U8G3U2|A0A2U8G3U2_RHIFR NADPH-dependent 7-cyano- 7-deazaguanine reductase OS=Sinorhizobium fredii CCBAU 45436 OX=1128331 GN=queF PE=3 SV=1

SEQ ID NO: 49740 - protein, 154 aa, Sinorhizobium fredii
  misc_feature (1)..(154): sp|C3MFQ1|QUEF_SINFN NADPH-dependent 7-cyano-7-deazagua nine reductase OS=Sinorhizobium fredii (strain NBRC 101 917 / NGR234) OX=394 GN=queF PE=3 SV=1
MPKTDVSGLSQLGTKVDLPQSPEEAVLERVPSGHEGTDFVVRFTAPEFTSLCPMTGQPDFAHIVIDYVPDGWLVESKSLKLFLHSFRNHGAFHEDCTVDIAKRLVSLLSPKWLRIGAYWYPRGGIPIDVFWQTGNPPEGVWLPDQGVPTYRGRG

SEQ ID NO: 49741 - protein, 154 aa, Sinorhizobium medicae
  misc_feature (1)..(154): tr|A0A508X0S2|A0A508X0S2_9RHIZ NADPH-dependent 7-cyano- 7-deazaguanine reductase OS=Sinorhizobium medicae OX=11 0321 GN=queF PE=3 SV=1
MTKTDVSGLSQLGTKVDLPQNPEEAVLERVPSGHGGTDFVVRFTAPEFTSLCPMTGQPDFAHLVIDYVPDGWLVESKSLKLFLHSFRNHGAFHEDCTIDIAKRLVSLLSPKWLRIGAYWYPRGGIPIDVFWQTGSPPEGVWLPDQGVPTYRGRG

SEQ ID NO: 49742 - protein, 154 aa, Sinorhizobium medicae; identical to SEQ ID NO: 49741
  misc_feature (1)..(154): sp|A6UBU5|QUEF_SINMW NADPH-dependent 7-cyano-7-deazagua nine reductase OS=Sinorhizobium medicae (strain WSM419) OX=366394 GN=queF PE=3 SV=1

SEQ ID NO: 49743 - protein, 154 aa, Sinorhizobium meliloti
  misc_feature (1)..(154): tr|H0G7M6|H0G7M6_RHIML NADPH-dependent 7-cyano-7-deazag uanine reductase OS=Sinorhizobium meliloti CCNWSX0020 O X=1107881 GN=queF PE=3 SV=1
MTKTDVSALSQLGAKVDLPQSPEEAVLERVPSGHGGTDFVVRFTAPEFTSLCPMTGQPDFAHIVIDYVPDGWLVESKSLKLFLHSFRNHGAFHEDCTIEIAKRLVSLLSPKWLRIGAYWYPRGGIPIDVFWQTGNPPEGVWLPDQGVPTYRGRG

SEQ ID NO: 49744 - protein, 154 aa, Sinorhizobium meliloti; identical to SEQ ID NO: 49187
  misc_feature (1)..(154): tr|A0A0E0UEM6|A0A0E0UEM6_SINMB NADPH-dependent 7-cyano- 7-deazaguanine reductase OS=Sinorhizobium meliloti (str ain BL225C) OX=698936 GN=queF PE=3 SV=1

SEQ ID NO: 49745 - protein, 154 aa, Sinorhizobium saheli
  misc_feature (1)..(154): tr|A0A178YII4|A0A178YII4_SINSA NADPH-dependent 7-cyano- 7-deazaguanine reductase OS=Sinorhizobium saheli OX=368 56 GN=queF PE=3 SV=1
MTKTDLTGLSQLGAKVDLPQSPEEAVLERVPSGHAGTDFVVRFTAPEFTSLCPMTGQPDFAHIVIDYVPDGWLVESKSLKLFLHSFRNHGAFHEDCTIDIAKRLVSLLSPKWLRIGAYWYPRGGIPIDVFWQTGNPPEGVWLPDQGVPTYRGRG

SEQ ID NO: 49746 - protein, 143 aa, Sinorhizobium sp.
  misc_feature (1)..(143): tr|A0A0T6YU64|A0A0T6YU64_9RHIZ NADPH-dependent 7-cyano- 7-deazaguanine reductase OS=Sinorhizobium sp. Sb3 OX=13 58417 GN=queF PE=3 SV=1
MGAKVDLPQSPEEAVLERVPSGNKGKDYLVRFTAPEFTSLCPMTGQPDFAHIVIDYVPDEWLVESKSLKLFLHSFRNHGAFHEDCTIEIAQRLVSLLSPRWLRIGAYWYPRGGIPIDVFWQTGKPPEGLWLPDQGVPTYRGRG

SEQ ID NO: 49747 - protein, 154 aa, Sinorhizobium sp.; identical to SEQ ID NO: 49167
  misc_feature (1)..(154): tr|A0A2A6MHT2|A0A2A6MHT2_9RHIZ NADPH-dependent 7-cyano- 7-deazaguanine reductase OS=Sinorhizobium sp. NG07B OX= 1538174 GN=queF PE=3 SV=1

SEQ ID NO: 49748 - protein, 154 aa, Skermanella aerolata
  misc_feature (1)..(154): tr|A0A512DQC7|A0A512DQC7_9PROT NADPH-dependent 7-cyano- 7-deazaguanine reductase OS=Skermanella aerolata OX=393 310 GN=queF PE=3 SV=1
MSQSIYDGLTQLGGNTAQPASPEEAVLERVPNPHPGTGYLVRFAAPEFTSLCPITGQPDFAHLVIDYVPGDWLVESKSLKLYLTSFRNHGAFHEACTVSIAKRLVDELKPVWLRIGGYWYPRGGIPIDVFYQTGPAPDGVWVPDQGVAPYRGRG

SEQ ID NO: 49749 - protein, 154 aa, Skermanella aerolata; identical to SEQ ID NO: 49748
  misc_feature (1)..(154): tr|A0A0D2WHG7|A0A0D2WHG7_9PROT NADPH-dependent 7-cyano- 7-deazaguanine reductase OS=Skermanella aerolata KACC 1 1604 OX=1385368 GN=queF PE=3 SV=1

SEQ ID NO: 49750 - protein, 154 aa, Skermanella stibiiresistens
  misc_feature (1)..(154): tr|W9GXS9|W9GXS9_9PROT NADPH-dependent 7-cyano-7-deazag uanine reductase OS=Skermanella stibiiresistens SB22 OX =1385369 GN=queF PE=3 SV=1
MSRSIYEGLTQLGGATVQPASPEEAVLERVPNPHPGTGYLVRFAAPEFTSLCPITGQPDFAHLVIDYVPGDWLVESKSLKLYLTSFRDHGAFHEACTVGIAKRLETELKPVWLRIGGYWYPRGGIPIDVFYQTGPVPDGVWVPDQGVAAYRGRG

SEQ ID NO: 49751 - protein, 173 aa, Slackia exigua
  misc_feature (1)..(173): tr|D0WE36|D0WE36_SLAES NADPH-dependent 7-cyano-7-deazag uanine reductase OS=Slackia exigua (strain ATCC 700122 / DSM 15923 / CIP 105133 / JCM 11022 / KCTC 5966 / S-7) OX=649764 GN=queF PE=3 SV=1
MTPTEAAAKTREHEAEGITLLGNQRASYPNDYDPSVLETFENAHQDRDYMVTFRCPEFTTLCPITGQPDFATLYINYIPSVRMVESKSLKLYLFSFRNHGDFHEDVTNIIMNDLAKLMDPKYIEVRGMFYPRGGISIYPFANWANPKFGYQDVAASRMFAQLSDLDRGDDARA

SEQ ID NO: 49752 - protein, 166 aa, Slackia heliotrinireducens
  misc_feature (1)..(166): tr|C7N133|C7N133_SLAHD NADPH-dependent 7-cyano-7-deazag uanine reductase OS=Slackia heliotrinireducens (strain ATCC 29202 / DSM 20476 / NCTC 11029 / RHS 1) OX=471855 GN=queF PE=3 SV=1
MANTDNRTKEGLTLLGNQGTRYSQDYDPTLLETFENKHQDHDYMVTFRCPEFTTLCPITGQPDFATLYINYIPNVRMVESKSLKLYLFSFRNHGDFHEDVCNIIMNDLVKLMEPKYIEVRGMFYPRGGISIYPFANWANPDFGYGDIAASRMFSQLSDLDKGDGAR

SEQ ID NO: 49753 - protein, 173 aa, Slackia sp.
  misc_feature (1)..(173): tr|J6ILX9|J6ILX9_9ACTN NADPH-dependent 7-cyano-7-deazag uanine reductase OS=Slackia sp. CM382 OX=1111137 GN=que F PE=3 SV=1
MTPTEAAAKTREHEAEGITLLGNQHASYPNDYDPSVLETFENAHQDRDYMVTFRCPEFTTLCPITGQPDFATLYINYIPSVRMVESKSLKLYLFSFRNHGDFHEDVTNIIMNDLAKLMDPKYIEVRGMFYPRGGISIYPFANWANPKFGYQDVAVSRMFAQLSDLDRGDGARA

SEQ ID NO: 49754 - protein, 134 aa, Smithella sp.
  misc_feature (1)..(134): tr|A0A1V5DQW6|A0A1V5DQW6_9DELT NADPH-dependent 7-cyano- 7-deazaguanine reductase OS=Smithella sp. PtaU1.Bin162 OX=1811697 GN=queF PE=3 SV=1
MAKDAKKNDLTGLTLLGKTAEPVKKLETFPNHHPGRHYTVTLQTEEFTCVCPMTGQPDFAKIKIQYVPDRKIVESKSLKLYLWSFRNEGVFHEHVTNVILDDLVAALKPHWCKVSAEFSIRGGIGITVEAEYKK

SEQ ID NO: 49755 - protein, 134 aa, Smithella sp.
  misc_feature (1)..(134): tr|A0A348W461|A0A348W461_9DELT NADPH-dependent 7-cyano- 7-deazaguanine reductase OS=Smithella sp. OX=2053614 GN =queF PE=3 SV=1
MPKNTKKNDLAGLTLLGKPARPTRKLETFPNHNDSRDYMVTLQTEEFTCVCPKTGQPDFAKIKIQYIPDKKIIESKSLKLYLWSFRDEGVFHEHVTNIILDDLIAALKPRWCKVSAEFAVRGGIGITVDAEYKK

SEQ ID NO: 49756 - protein, 154 aa, Sneathiella sp.
  misc_feature (1)..(154): tr|A0A2E2QLY3|A0A2E2QLY3_9PROT NADPH-dependent 7-cyano- 7-deazaguanine reductase OS=Sneathiella sp. OX=1964365 GN=queF PE=3 SV=1
MAGTDVSGLTQLGKAVEQPQSPEQAILERVPNGQADVNYLVRFTAPEFTSLCPMTGQPDFAHLVIDYVPDQWLVESKSLKLFLTSFRNHGAFHEDCTVMIGKRIADLLKPRWLRIGGYWYPRGGIPIDVFWQTDAPLADVWLPDQGVATYRGRG

SEQ ID NO: 49757 - protein, 156 aa, Snodgrassella alvi
  misc_feature (1)..(156): tr|X2H8C7|X2H8C7_9NEIS NADPH-dependent 7-cyano-7-deazag uanine reductase OS=Snodgrassella alvi wkB2 OX=1196094 GN=queF PE=3 SV=1
MRAQNNLGTVSLLGNQHTEYRSDYAPELLEAFDNQHPDNDYFVKFICPEFTSLCPKTGQPDFATIYINYLPRLRMVESKSLKLYLFSFRNHGDFHEDCVNIIMKDLIALMQPKYIEVYGEFTPRGGIAIHPYANYGEPDTRYSDMAAQRLLQFQVK

SEQ ID NO: 49758 - protein, 156 aa, Snodgrassella alvi
  misc_feature (1)..(156): tr|A0A066TDT6|A0A066TDT6_9NEIS NADPH-dependent 7-cyano- 7-deazaguanine reductase OS=Snodgrassella alvi OX=11960 83 GN=queF PE=3 SV=1
MRAQNDLGTVSLLGNQHTEYRSDYAPELLEAFDNQHPDNDYFVKFICPEFTSLCPKTGQPDFATIYINYLPHLRMVESKSLKLYLFSFRNHGDFHEDCVNIIMKDLIALMQPKYIEVYGEFTPRGGIAIHPYANYGKADTRYSDMAVQRLLQFQVK

SEQ ID NO: 49759 - protein, 156 aa, Snodgrassella sp.
  misc_feature (1)..(156): tr|A0A1C4C8Q0|A0A1C4C8Q0_9NEIS NADPH-dependent 7-cyano- 7-deazaguanine reductase OS=Snodgrassella sp. R-53583 O X=1798181 GN=queF PE=3 SV=1
MRVQNDLGTVSLLGNQHTEYRSDYAPELLEAFDNQHPNNDYFVKFICPEFTSLCPKTGQPDFATIYINYLPHLRMVESKSLKLYLFSFRNHGDFHEDCVNIIMKDLIALMQPKYIEVYGEFTPRGGIAIHPYANYGKADTRYSDMAVQRLLQFQVK

SEQ ID NO: 49760 - protein, 143 aa, Snowella sp.
  misc_feature (1)..(143): tr|A0A2W7B7X6|A0A2W7B7X6_9CYAN NADPH-dependent 7-cyano- 7-deazaguanine reductase OS=Snowella sp. OX=2164131 GN= queF PE=3 SV=1
MSQVSQSDTILSEKPENTPESIKYGERIIEEGQLITFPNPRPGRRYDVQITLPEFTCKCPFSGYPDFATFYINYCPDEKVVELKALKLYANSFRDRYISHEEVVNVILDDFIAACDPLFVKIRADFNPRGNVHMVVEVEHEKP

SEQ ID NO: 49761 - protein, 281 aa, Sodalis glossinidius
  misc_feature (1)..(281): sp|Q2NRK0|QUEF_SODGM NADPH-dependent 7-cyano-7-deazagua nine reductase OS=Sodalis glossinidius (strain morsitan s) OX=343509 GN=queF PE=3 SV=1
MTNYDQHHALQSLTLGKPTPYRERYDPSLLQAVPRALNRDLLGLQATALPFHGADIWTLYELSWLNDAGIPQVAIGEIALNATSTNLIESKSFKLYLNSLNQTSFPSREAVRVRLAEDLSRCADGEVQVVLRALSDFTSSPLLDFDGECIDDQPIHIDDYTFTNRYLEGAAGGSVVSETLVSHLLKSNCLITHQPDWGSVQIRYRGARIDREALLRYLVSFRQHNEFHEQCVERIFCDVMQFCRPETLTVYARYTRRGGLDINPWRSNTHFSPATGRLARQ

SEQ ID NO: 49762 - protein, 281 aa, Sodalis glossinidius; identical to SEQ ID NO: 49761
  misc_feature (1)..(281): tr|A0A193QM21|A0A193QM21_SODGM NADPH-dependent 7-cyano- 7-deazaguanine reductase OS=Sodalis glossinidius (strai n morsitans) OX=343509 GN=queF PE=3 SV=1

SEQ ID NO: 49763 - protein, 281 aa, Sodalis praecaptivus
  misc_feature (1)..(281): tr|W0HQ63|W0HQ63_9GAMM NADPH-dependent 7-cyano-7-deazag uanine reductase OS=Sodalis praecaptivus OX=1239307 GN= queF PE=3 SV=1
MTHYDQHHALQSLTLGKPTPYRERYDPSLLQAVPRALNRDPLGLQAAALPFHGADIWTLYELSWLNDAGLPQVAIGEVALNATSVNLIESKSFKLYLNSFNQTRFPSREAVRDLLAEDLSRCADGEVAVTLRALDEFTGSPVLGFDGECIDDQPIRIDDYTFSNRWLEGAAGGPWVSETLVSHLLKSNCLITHQPDWGSVQIRYRGARIDREALLRYLVSFRQHNEFHEQCVERIFCDLMQFCRPDTLSVYARYTRRGGLDINPWRSNTHFSPATGRLARQ

SEQ ID NO: 49764 - protein, 196 aa, Sodalis sp.
  misc_feature (1)..(196): tr|A0A1J7CYH4|A0A1J7CYH4_9GAMM NADPH-dependent 7-cyano- 7-deazaguanine reductase QueF (Fragment) OS=Sodalis sp. TME1 OX=1912097 GN=queF PE=4 SV=1
MTHYDQHHALQSLTLGKPTPYRERYDPSLLQAVPRALNRDPLGLQAAALPFHGADIWTLYELSWLNDAGLPQVAIGEVALNATSVNLIESKSFKLYLNSFNQTRFPSREAVRDRLADDLSRCADGEVAVTLRAIDEFTGSPVLGFDGECIDDQPIRIDDYTFSNRWLEGAAGGPWVSETLVSHLLKSNCLITHQPD

SEQ ID NO: 49765 - protein, 287 aa, Sodalis sp.
  misc_feature (1)..(287): tr|A0A4R1NAX9|A0A4R1NAX9_9GAMM NADPH-dependent 7-cyano- 7-deazaguanine reductase OS=Sodalis sp. 159R OX=2529856 GN=queF PE=3 SV=1
MSAYNMSDYENQPALGSLTLGKPTPYSDRYDAALLQGVPRALNREPLGLAPHTLGFHGADIWTLYELSWLNDKGVPQVAIGEMRLDAASRNLIESKSFKLYLNSFNQTRFAHWDQVRDVLIRDLARCAAGDVNVDLFRLGDIAGRCIADFAGECIDEQDILIDDYTFSNEWLRHAADDNAQVSETLVSHLLKSNCLITHQPDWGSVQITYRGPRINREALLRYLVSFRHHNEFHEQCVERIFTDLMHFCHPEQLSVYARYTRRGGLDINPWRSNTPFIPSAGRLARQ

SEQ ID NO: 49766 - protein, 280 aa, Unknown
  misc_feature (1)..(280): tr|A0A151UME6|A0A151UME6_9GAMM NADPH-dependent 7-cyano- 7-deazaguanine reductase OS=Sodalis-like endosymbiont o f Proechinophthirus fluctus OX=1462730 GN=queF PE=3 SV= 1
  misc_feature (160)..(162): Xaa can be any naturally occurring amino acid
MTHYDQHHTLQSLTLGKPTPYCECYDPSLLQAVPRALNRDPLGLQAAALPFHGADIWTLYELSWLNNAGLPQVAIGEIALNANSTNLIESKSFKLYLNSFNQTHFPSREAVRSRLAEDLSHCADGEVAVTLRTLDEFTGSPVLGFDGECIDDQPIRIDDXXXSRWLEGAAGGPSVGETLVSHLLKSNCIITHQPDWGSVQISYRGARLDREALLRYLLSFRQHDEFHEHCVERIFCDLMQFCRPNTLSVYARYTRRGGLDINPWRSNTHFSPATGRLARQ

SEQ ID NO: 49767 - protein, 129 aa, Solemya elarraichensis
  misc_feature (1)..(129): tr|A0A1T2L764|A0A1T2L764_9GAMM NADPH-dependent 7-cyano- 7-deazaguanine reductase OS=Solemya elarraichensis gill symbiont OX=1918949 GN=queF PE=3 SV=1
MSTKPGKELETFDNPNPERDYTIRIRMPEFTCLCPKTGQPDFAELLLEYVPDQLCVELKSLKLYIWAFREQGAFHEAVTNEMLADLVAATNPRFMRLTADFKVRGGIYTLVTVEHRDENWVAPQKVELP

SEQ ID NO: 49768 - protein, 129 aa, Solemya pervernicosa
  misc_feature (1)..(129): tr|A0A1T2L1Y9|A0A1T2L1Y9_9GAMM NADPH-dependent 7-cyano- 7-deazaguanine reductase OS=Solemya pervernicosa gill s ymbiont OX=642797 GN=queF PE=3 SV=1
MPSQPSKELETFDNPMPERDYTIRIDIPEFTCLCPKTGQPDFATIHIAYVADKACIELKSLKMYMWAYREEGAFHEKVTNTMLDDFVAACNPRFMRVTGKFNVRGGIYTTVIAEHRAADWNPPQPVTLP

SEQ ID NO: 49769 - protein, 129 aa, Solemya velesiana
  misc_feature (1)..(129): tr|A0A1T2KVV1|A0A1T2KVV1_9GAMM NADPH-dependent 7-cyano- 7-deazaguanine reductase OS=Solemya velesiana gill symb iont OX=1918948 GN=queF PE=3 SV=1
MPSQPSKTLETFENPQQDRDFTIRIRVPEFTCLCPKTGQPDFAELTLEYIADKLCVELKSLKMYVWSYRDEGAFHEAVTNQILNDLVAVTQPRFMRLTADFNVRGGIYTTVVAEHRAEGWEPAPAVNLP

SEQ ID NO: 49770 - protein, 129 aa, Solemya velum
  misc_feature (1)..(129): tr|A0A0B0HF40|A0A0B0HF40_SOVGS NADPH-dependent 7-cyano- 7-deazaguanine reductase OS=Solemya velum gill symbiont OX=2340 GN=queF PE=3 SV=1
MSTKPSKELETFDNPNPERDYTIRIRMPEFTCLCPKTGQPDFAELLLEYVPDQLCVELKSLKLYIWAFREQGAFHEAVTNEMLADLVAATNPRFMRLTADFKVRGGIYTVVTAEHRDENWVAPQKVELP

SEQ ID NO: 49771 - protein, 166 aa, Solibacillus sp.
  misc_feature (1)..(166): tr|A0A2D1SYS2|A0A2D1SYS2_9BACL NADPH-dependent 7-cyano- 7-deazaguanine reductase OS=Solibacillus sp. R5-41 OX=2 048654 GN=queF PE=3 SV=1
MTGRKPTEGLNDLTLLGNQNTQYATDYAPEVLESVESLHSNRDYFVKFNCPEFTSLCPITGQPDFATIYISYIPEKKLVESKSLKLYLFSFRNHGDFHEDCVNIIMNDLIKLLDPRYIEVWGKFTPRGGISIDPWCNYGRPETKYEEIANYRLMNHDLNPEKIDNR

SEQ ID NO: 49772 - protein, 136 aa, Solibacter usitatus
  misc_feature (1)..(136): tr|Q01UV4|Q01UV4_SOLUE NADPH-dependent 7-cyano-7-deazag uanine reductase OS=Solibacter usitatus (strain Ellin60 76) OX=234267 GN=queF PE=3 SV=1
MKRGYTDDHARGGIDAPLPEIETWPNQYADYEIEIINPEFTSVCPKTGLPDFGKVVLRYVPDKLCLELKSYKMYMLAYRDLGIFQENVVNRILQDVVKAAKPVSATVIGDFTPRGGLGTLVTASWSRARRKPRGKR

SEQ ID NO: 49773 - protein, 278 aa, Solimicrobium silvestre
  misc_feature (1)..(278): tr|A0A2S9H1Q4|A0A2S9H1Q4_9BURK NADPH-dependent 7-cyano- 7-deazaguanine reductase OS=Solimicrobium silvestre OX= 2099400 GN=queF PE=3 SV=1
MQSNTPENSTLGKTAAYVTQYDASLLFPIPRAQKRAEIGLTSTLPFFGLDIWNAYEISWLNLRGKPQIVIATFMVPADSPNIIESKSFKLYLNSFNQTRLADTDALLALLKQDISAGFGASVQIKLTLPAEFSHQRFAELDGLLLDRLDIEVENYHPDVTLLSCDLNASPVEETLVSHLLKSNCLVTGQPDWGSVQIHYVGAPIDQAGLLKYLIGFRNHNEFHEQCVERIFTDILSGCKPQKLAVYARYTRRGGLDINPWRSNFSSNQLPSNLRNARQ

SEQ ID NO: 49774 - protein, 141 aa, Solimonas aquatica
  misc_feature (1)..(141): tr|A0A1H9I226|A0A1H9I226_9GAMM NADPH-dependent 7-cyano- 7-deazaguanine reductase OS=Solimonas aquatica OX=48970 3 GN=queF PE=3 SV=1
MSTQPSKNLETFPNPNPDRDYVIRMRMPEFTCLCPKTGQPDFATLYLEYVPEALCVELKSLKLYLWSFRNEGAFHEAVTNRILGDLAGLISPRFMRLTADWYVRGGIYTHVVSEHRAPGWQPKFDPPVVLPPARWEGFQGH

SEQ ID NO: 49775 - protein, 140 aa, Solimonas fluminis
  misc_feature (1)..(140): tr|A0A2S5TDA9|A0A2S5TDA9_9GAMM NADPH-dependent 7-cyano- 7-deazaguanine reductase OS=Solimonas fluminis OX=20865 71 GN=queF PE=3 SV=1
MPSLPSKTLETFPNPAPQRDFTIRMRIPEFTCLCPKTGQPDFGTLYLEYVADKACVELKALKMYIWSFRDEGCFHEAVTNQILDDLVKATKPRYMRLTAVFNVRGGIYTHVTAEHRKKGWNGSLPPPAWHVDPTGAGQTP

SEQ ID NO: 49776 - protein, 140 aa, Solimonas sp.
  misc_feature (1)..(140): tr|A0A346N0Y0|A0A346N0Y0_9GAMM NADPH-dependent 7-cyano- 7-deazaguanine reductase OS=Solimonas sp. K1W22B-7 OX=2 303331 GN=queF PE=3 SV=1
MPSLPSKTLETFPNPAPQRDFTIRMRIPEFTCLCPKTGQPDFGTLYLEYVADKACVELKALKMYIWSFRDEGCFHEAVTNQILDDLVKATKPRFMRLTAVFNVRGGIYTHVTAEHRKKGWNGSLPPSAWHVDPTGAGQTP

SEQ ID NO: 49777 - protein, 144 aa, Spartobacteria bacterium
  misc_feature (1)..(144): tr|A0A2A2XV80|A0A2A2XV80_9BACT NADPH-dependent 7-cyano- 7-deazaguanine reductase OS=Spartobacteria bacterium AM D-G4 OX=1982325 GN=queF PE=3 SV=1
MSKKSVNEKPSKSLRLLGSASSLPQVPSVEILETFPNSHPARGYVVRVDTEDFSSLCPVTGQPDYAEIVIEYVPAARCVETKSLKYYLASFRNTPSFNEQIVNRILDDLVAVCAPESMTVCGAFAARGGLALTVTATHTAKKRK

SEQ ID NO: 49778 - protein, 127 aa, Spartobacteria bacterium
  misc_feature (1)..(127): tr|A0A3C0R478|A0A3C0R478_9BACT NADPH-dependent 7-cyano- 7-deazaguanine reductase OS=Spartobacteria bacterium OX =2052183 GN=queF PE=3 SV=1
MPASPAEARLETFPNPARRNYRIHFETDDFTSLCPVTGQADFATIDIDYVPDRLCVESKSLKFYLASYRNERAFNEAVTNRILDDFVRACAPREAIVTAQFSARGGIALTVRAEYAHESAKAPRDGR

SEQ ID NO: 49779 - protein, 118 aa, Sphaerobacter thermophilus
  misc_feature (1)..(118): tr|D1C5F2|D1C5F2_SPHTD NADPH-dependent 7-cyano-7-deazag uanine reductase OS=Sphaerobacter thermophilus (strain DSM 20745 / S 6022) OX=479434 GN=queF PE=3 SV=1
MPTQPSKNLETVPNPKPERDYEIEISTPEFTCVCPVTGQPDFATITIRYVPDQKIVELKSLKLYLWSYRNEGAFHEKVTNQILDDLVAAVDPRRATVIGDFNIRGGLHTVVKAEYTRE

SEQ ID NO: 49780 - protein, 138 aa, Sphaerospermopsis kisseleviana
  misc_feature (1)..(138): tr|A0A1Z4UQF2|A0A1Z4UQF2_9CYAN NADPH-dependent 7-cyano- 7-deazaguanine reductase OS=Sphaerospermopsis kisselevi ana NIES-73 OX=1973480 GN=queF PE=3 SV=1
MSNSLSETVPPSKPEMKYGEREIEEGKLITFPNPRIGREYNIDITLPEFTCKCPFSGYPDFATIYISYVPDEKVVELKALKLYINSYRDRYISHEETANQILDDVVAACDPLKMTVKADFTPRGNVHTVVEVKHKKRK

SEQ ID NO: 49781 - protein, 138 aa, Sphaerospermopsis reniformis; identical to SEQ ID NO: 49780
  misc_feature (1)..(138): tr|A0A479ZZN6|A0A479ZZN6_9CYAN NADPH-dependent 7-cyano- 7-deazaguanine reductase OS=Sphaerospermopsis reniformi s OX=531300 GN=queF PE=3 SV=1

SEQ ID NO: 49782 - protein, 297 aa, Sphaerotilus hippei
  misc_feature (1)..(297): tr|A0A318HB42|A0A318HB42_9BURK NADPH-dependent 7-cyano- 7-deazaguanine reductase OS=Sphaerotilus hippei OX=7444 06 GN=queF PE=3 SV=1
MTTSPDTTPARVAPVAPAQAAPAEDASASPLGQVAAYRDQYDPSLLFPITRDTKRAELGLGGTLPFLGCDLWTAYELSWLNPRGKPQIALATITVPCESPAIIESKSFKLYLNSFNMSRFESADVVRDRLVADLSAACGLRVGVRLVLPEQFEAQRVIELEGTSLDRLDLDCDQYEPDPGLLGVDTSQADTEETLHSRLLKSNCLVTGQPDWGSVQIRYSGAPIDHAGLLRYLVSFRNHNEFHEQCVERIYTDIMARCHPVRLMVYARYTRRGGLDINPWRSSHPEMVPANVRTARQ

SEQ ID NO: 49783 - protein, 292 aa, Sphaerotilus natans
  misc_feature (1)..(292): tr|A0A059KL50|A0A059KL50_9BURK NADPH-dependent 7-cyano- 7-deazaguanine reductase OS=Sphaerotilus natans subsp. natans DSM 6575 OX=1286631 GN=queF PE=3 SV=1
MSDTPSSPSPARDPSGSLLGKTASYRATYAPELLYPISRTPKREEIGLTAERIAAGRLPFMGADLWTAYELSWLTPRGKPQVAIATFTVPCDSPCIIESKSFKLYLNSFNMTRVESPEVLREMLVRDLSAAAGARVGVRLVLPEDFDAQPIHELSGVLLDRMDIDCGHYGPPSPELLTAAFDEQPVTETLTSHLLKSNCLVTGQPDWGSVQISYTGPQIDQEGLLRYLISFREHDEFHEQCVERIFTDLLERCQPVRLQVYARYTRRGGLDISPWRTSHPATLPANVRTARQ

SEQ ID NO: 49784 - protein, 292 aa, Sphaerotilus natans
  misc_feature (1)..(292): tr|A0A5C1PXJ6|A0A5C1PXJ6_9BURK NADPH-dependent 7-cyano- 7-deazaguanine reductase OS=Sphaerotilus natans subsp. sulfidivorans OX=639200 GN=queF PE=3 SV=1
MSDTPSSPSPARDPSGSLLGKTASYRATYAPELLYPISRTPKREEIGLSAERIAAGRLPFMGADLWTAYELSWLTPRGKPQVAIATITVPCDSPCIIESKSFKLYLNSFNMTRVESPERLREMLVHDLSAAAGARVGVRLVLPEAFDAQPIHELSGVLLDRMDIDCDRYGPPAPELLTAALDEQPVTETLTSHLLKSNCLVTGQPDWGSVQISYTGPQIDQEGLLRYLISFREHDEFHEQCVERIFTDILERCQPVRLQVYARYTRRGGLDISPWRTSHPATLPANVRTARQ

SEQ ID NO: 49785 - protein, 153 aa, Sphingobium algicola
  misc_feature (1)..(153): tr|A0A5J5H4L4|A0A5J5H4L4_9SPHN NADPH-dependent 7-cyano- 7-deazaguanine reductase QueF OS=Sphingobium algicola O X=2048546 GN=queF PE=4 SV=1
MTDLSTTPLHLGQTSALPASPEQAVLDYVPNPRPGKPYLVRFTAPEFTSLCPVTGQPDFAHLVIDYAPAETIVESKSLKLFLGSFRNHAAFHEDCTVGIGLRLFDEMKPIWLRIGGYWYPRGGIPIDVFWQSDVPPAGLWLPAQDVPGYRGRG

SEQ ID NO: 49786 - protein, 152 aa, Sphingobium algorifonticola
  misc_feature (1)..(152): tr|A0A437JCC9|A0A437JCC9_9SPHN NADPH-dependent 7-cyano- 7-deazaguanine reductase OS=Sphingobium algorifonticola OX=2008318 GN=queF PE=3 SV=1
MTLPQPPLHLGQTSALPATPQAAVLDYVPNPRAGALYLVRFAVPEFTSLCPVTGQPDFAHLVIDYAPGATIVESKSLKLFLGSFRNHAAFHEDCTVGIGQRLFDEMAPQWLRIGGYWYPRGGIPIDVFWQSGAPPAGLWLPSQDVPGYRGRG

SEQ ID NO: 49787 - protein, 153 aa, Sphingobium amiense
  misc_feature (1)..(153): tr|A0A494WDN9|A0A494WDN9_9SPHN NADPH-dependent 7-cyano- 7-deazaguanine reductase OS=Sphingobium amiense OX=1357 19 GN=queF PE=3 SV=1
MTDLSKPPLHLGQTSALPASPEAAVLDYVPNPRPGKPYLVRFTAPEFTSLCPVTGQPDFAHLVIDYAPGETIVESKSLKLFLGAFRNHAAFHEDCTVGIGERLFAEMNPVWLRIGGYWYPRGGIPIDVFWQSGEPPAGLWLPPQDVPGYRGRG

SEQ ID NO: 49788 - protein, 152 aa, Sphingobium baderi
  misc_feature (1)..(152): tr|T0HV31|T0HV31_9SPHN NADPH-dependent 7-cyano-7-deazag uanine reductase OS=Sphingobium baderi LL03 OX=1114964 GN=queF PE=3 SV=1
MTDTPHPIHLGRTSALPQRPEEAVLDYVPNPRPGKPYLVRFTAPEFTSLCPVTGQPDFAHLVIDYAPAATIVESKSLKLFLGAFRNHAAFHEDCTVGIGERLFTEMKPLWLRIGGYWYPRGGIPIDVFWQSGEPPAGMWLPPQDVPGYRGRG

SEQ ID NO: 49789 - protein, 152 aa, Sphingobium baderi
  misc_feature (1)..(152): tr|A0A0S3F1R1|A0A0S3F1R1_9SPHN NADPH-dependent 7-cyano- 7-deazaguanine reductase OS=Sphingobium baderi OX=13320 80 GN=queF PE=3 SV=1
MTDTPQPIHLGQTSALPQRPEEAVLDYVPNPRPGKPYLVRFTAPEFTSLCPVTGQPDFAHLVIDYAPAATIVESKSLKLFLGAFRNHAAFHEDCTVGIGERLFTEMKPLWLRIGGYWYPRGGIPIDVFWQSGDPPAGMWLPPQDVPGYRGRG

SEQ ID NO: 49790 - protein, 164 aa, Sphingobium barthaii
  misc_feature (1)..(164): tr|A0A4R6FH53|A0A4R6FH53_9SPHN NADPH-dependent 7-cyano- 7-deazaguanine reductase OS=Sphingobium barthaii OX=105 4037 GN=queF PE=3 SV=1
MTSAVQWRRWPAMTDMPTPLHLGRTSALPARPEEAVLDYVPNPRPGKPYLVRFTAPEFTSLCPVTGQPDFAHLVIDYAPAATIVESKSLKLFLSAFRNHAAFHEDCTVGIGERLFAEMNPIWLRIGGYWYPRGGIPIDVFWQSGEPPAGLWLPPQDVPGYRGRG

SEQ ID NO: 49791 - protein, 162 aa, Sphingobium chinhatense
  misc_feature (1)..(162): tr|W1KNX0|W1KNX0_9SPHN NADPH-dependent 7-cyano-7-deazag uanine reductase OS=Sphingobium chinhatense IP26 OX=134 6790 GN=queF PE=3 SV=1
MACNGVDGLPMTDMPSPIHLGQTSALPTRPEEAVLDYVPNPRPGKPYLVRFAVPEFTSLCPVTGQPDFAHLVIDYAPAATIVESKSLKLFLGSFRNHAAFHEDCTVGIGERLFAEMNPFWLRIGGYWYPRGGIPIDVFWQSSEPPAGLWLPPQDVPGYRGRG

SEQ ID NO: 49792 - protein, 152 aa, Sphingobium chlorophenolicum
  misc_feature (1)..(152): tr|A0A081RDT6|A0A081RDT6_SPHCR NADPH-dependent 7-cyano- 7-deazaguanine reductase OS=Sphingobium chlorophenolicu m OX=46429 GN=queF PE=3 SV=1
MTDMPTPIHLGQTSALPTRPEEAVLDYVPNPRPGKPYLVRFAAPEFTSLCPVTGQPDFAHLVIDYAPAATIVESKSLKLFLGSFRNHAAFHEDCTVGIGERLFAEMNPVWLRIGGYWYPRGGIPIDVFWQSGEPPAGLWLPPQDVPGYRGRG

SEQ ID NO: 49793 - protein, 162 aa, Sphingobium chlorophenolicum
  misc_feature (1)..(162): tr|F6EYS7|F6EYS7_SPHCR NADPH-dependent 7-cyano-7-deazag uanine reductase OS=Sphingobium chlorophenolicum L-1 OX =690566 GN=queF PE=3 SV=1
MPCNGVDGLPMTDMPTPIHLGQTSALPTRPEEAVLDYVPNPRPGKPYLVRFAAPEFTSLCPVTGQPDFAHLVIDYAPSATIVESKSLKLFLGSFRNHAAFHEDCTVGIGERLFAEMNPVWLRIGGYWYPRGGIPIDVFWQSGEPPAGLWLPPQDVPGYRGRG

SEQ ID NO: 49794 - protein, 152 aa, Sphingobium chungbukense
  misc_feature (1)..(152): tr|A0A0M3B036|A0A0M3B036_9SPHN NADPH-dependent 7-cyano- 7-deazaguanine reductase OS=Sphingobium chungbukense OX =56193 GN=queF PE=3 SV=1
MTDTPIPLHLGQTSALPSRPEDAVLDYVPNPRPGKPYLVRFTAPEFTSLCPVTGQPDFAHLVIDYAPAATIVESKSLKLFLGSFRNHAAFHEDCTVGIGERLFAEMNPVWLRIGGYWYPRGGIPIDVFWQSGEPPAGLWLPAQDVPGYRGRG

SEQ ID NO: 49795 - protein, 152 aa, Sphingobium cloacae
  misc_feature (1)..(152): tr|A0A1E1F688|A0A1E1F688_9SPHN NADPH-dependent 7-cyano- 7-deazaguanine reductase OS=Sphingobium cloacae OX=1201 07 GN=queF PE=3 SV=1
MTDMPPPIHLGQTSALPQRPEEAVLDYVPNPRPGKPYLVRFTAPEFTSLCPVTGQPDFAHLVIDYAPAATIVESKSLKLFLGAFRNHAAFHEDCTVGIGERLFTEMEPLWLRIGGYWYPRGGIPIDVFWQSGDPPAGLWLPPQDVPGYRGRG

SEQ ID NO: 49796 - protein, 153 aa, Sphingobium cupriresistens
  misc_feature (1)..(153): tr|A0A4Q4JRG0|A0A4Q4JRG0_9SPHN NADPH-dependent 7-cyano- 7-deazaguanine reductase OS=Sphingobium cupriresistens OX=1132417 GN=queF PE=3 SV=1
MTDLPTAPLHLGQSSALPASPEAAVLDYVPNPRPGKPYLVRFTAPEFTSLCPVTGQPDFAHLVIDYAPGATIVESKSLKLFLGAFRNHAAFHEDCTVGIGERLFAEMDPVWLRIGGYWYPRGGIPIDVFWQSGEPPAGLWLPAQDVPGYRGRG

SEQ ID NO: 49797 - protein, 153 aa, Sphingobium czechense; identical to SEQ ID NO: 49796
  misc_feature (1)..(153): tr|A0A0J7XSM2|A0A0J7XSM2_9SPHN NADPH-dependent 7-cyano- 7-deazaguanine reductase OS=Sphingobium czechense LL01 OX=1420583 GN=queF PE=3 SV=1

SEQ ID NO: 49798 - protein, 152 aa, Sphingobium faniae
  misc_feature (1)..(152): tr|A0A1G4SZ90|A0A1G4SZ90_9SPHN NADPH-dependent 7-cyano- 7-deazaguanine reductase OS=Sphingobium faniae OX=57044 6 GN=queF PE=3 SV=1
MTDTSPPIHLGQASALPRRPEEAVLDYVPNPRPGKPYLVRFTAPEFTSLCPVTGQPDFAHLVIDYAPAATIVESKSLKLFLGSFRNHAAFHEDCTVGIAERLFTEMQPLWLRIGGYWYPRGGIPIDVFWQSDDPPAGLWLPSQDVPGYRGRG

SEQ ID NO: 49799 - protein, 154 aa, Sphingobium francense
  misc_feature (1)..(154): tr|A0A4Q4J7Q6|A0A4Q4J7Q6_9SPHN NADPH-dependent 7-cyano- 7-deazaguanine reductase OS=Sphingobium francense OX=33 2057 GN=queF PE=3 SV=1
MPTPLQPSPIHLGQTSALPARPEDAVLDYVPNPRPGKPYLVRFTAPEFTSLCPVTGQPDFAHLVIDYAPAATIVESKSLKLFLGAFRNHAAFHEDCTVGIGERLFAEMNPVWLRIGGYWYPRGGIPIDVFWQSGEPPAGLWLPPQDVPGYRGRG

SEQ ID NO: 49800 - protein, 152 aa, Sphingobium fuliginis
  misc_feature (1)..(152): tr|A0A4Q4J137|A0A4Q4J137_SPHSA NADPH-dependent 7-cyano- 7-deazaguanine reductase OS=Sphingobium fuliginis (stra in ATCC 27551) OX=336203 GN=queF PE=3 SV=1
MTDMPTPLHLGQASALPARPEDAVLDYVPNPRPGNPYLVRFTAPEFTSLCPVTGQPDFAHLVIDYAPAATIVESKSLKLFLGSFRNHAAFHEDCTVGIGERLFAEMNPIWLRIGGYWYPRGGIPIDVFWQSGEPPAGLWLPSQDVPGYRGRG

SEQ ID NO: 49801 - protein, 152 aa, Sphingobium fuliginis
  misc_feature (1)..(152): tr|A0A5B8CM63|A0A5B8CM63_SPHSA NADPH-dependent 7-cyano- 7-deazaguanine reductase OS=Sphingobium fuliginis ATCC 27551 OX=1208342 GN=queF PE=3 SV=1
MTDMPTPLHLGQASALPARPEDAVLDYVPNPRPGKPYLVRFTAPEFTSLCPVTGQPDFAHLVIDYAPAATIVESKSLKLFLGSFRNHAAFHEDCTVGIGERLFAEMNPIWLRIGGYWYPRGGIPIDVFWQSGEPPAGLWLPSQDVPGYRGRG

SEQ ID NO: 49802 - protein, 172 aa, Sphingobium herbicidovorans
  misc_feature (1)..(172): tr|A0A086PA18|A0A086PA18_SPHHM NADPH-dependent 7-cyano- 7-deazaguanine reductase OS=Sphingobium herbicidovorans (strain ATCC 700291 / DSM 11019 / NBRC 16415 / MH) OX= 1219045 GN=queF PE=3 SV=1
MGGAAVTLGVQSRRWPVMTDTPEPVKPIHLGQSSALPASPEDAVLDYVPNPRPGKPYLVRFTAPEFTSLCPVTGQPDFAHLVIDYAPAATIVESKSLKLFLGAFRNHAAFHEDCTVGIGERLFAEMQPLWLRIGGYWYPRGGIPIDVFWQSGEPPAGLWLPAQDVPGYRGRG

SEQ ID NO: 49803 - protein, 153 aa, Sphingobium hydrophobicum
  misc_feature (1)..(153): tr|A0A249MSB2|A0A249MSB2_9SPHN NADPH-dependent 7-cyano- 7-deazaguanine reductase OS=Sphingobium hydrophobicum O X=1673076 GN=queF PE=3 SV=1
MTDPALTPLHLGQTSALPARPEEAVLDYVPNPRPGRNYLVRFAAPEFTSLCPVTGQPDFAHLVIDYAPGDTIVESKSLKLFLGSFRNHAAFHEDCTVGIGERLFTEMKPVWLRIGGYWYPRGGIPIDVFWQSGAPPQDLWLPAQDVPGYRGRG

SEQ ID NO: 49804 - protein, 154 aa, Sphingobium indicum; identical to SEQ ID NO: 49799
  misc_feature (1)..(154): tr|A0A1L5BPS8|A0A1L5BPS8_SPHIB NADPH-dependent 7-cyano- 7-deazaguanine reductase OS=Sphingobium indicum (strain DSM 16412 / CCM 7286 / MTCC 6364 / B90A) OX=861109 GN= queF PE=3 SV=1

SEQ ID NO: 49805 - protein, 157 aa, Sphingobium japonicum
  misc_feature (1)..(157): tr|D4YYU4|D4YYU4_SPHJU NADPH-dependent 7-cyano-7-deazag uanine reductase OS=Sphingobium japonicum (strain DSM 1 6413 / CCM 7287 / MTCC 6362 / UT26 / NBRC 101211 / UT26 S) OX=452662 GN=ykvM PE=3 SV=1
MTDMPTPLQPSPIHLGQTSALPARPEDAVLDYVPNPRPGKPYLVRFTAPEFTSLCPVTGQPDFAHLVIDYAPAATIVESKSLKLFLGAFRNHAAFHEDCTVGIGERLFAEMNPIWLRIGGYWYPRGGIPIDVFWQSGEPPAGLWLPPQDVPGYRGRG

SEQ ID NO: 49806 - protein, 153 aa, Sphingobium japonicum
  misc_feature (1)..(153): tr|N1MSF8|N1MSF8_9SPHN NADPH-dependent 7-cyano-7-deazag uanine reductase OS=Sphingobium japonicum BiD32 OX=1301 087 GN=queF PE=3 SV=1
MTDPAMTPLHLGQTSALPTRPEEAVLDYVPNPRPGRTYLVRFAVPEFTSLCPVTGQPDFAHLVIDYAPGDTIVESKSLKLFLGSFRNHAAFHEDCTVGIGERLFTEMKPVWLRIGGYWYPRGGIPIDVFWQSGAPPQDLWLPSQDVPGYRGRG

SEQ ID NO: 49807 - protein, 153 aa, Sphingobium lactosutens
  misc_feature (1)..(153): tr|T0HN69|T0HN69_9SPHN NADPH-dependent 7-cyano-7-deazag uanine reductase OS=Sphingobium lactosutens DS20 OX=133 1060 GN=queF PE=3 SV=1
MTDLPTTPIHLGQTSALPASPQDAVLDYVPNPRPGRPYLVRFTAPEFTSLCPVTGQPDFAHLVIDYAPGDTIVESKSLKLFLGAFRNHAGFHEDCTVGIGERLFAEMRPVWLRIGGYWYPRGGIPIDVFWQSGEPPAGMWLPPQDVPGYRGRG

SEQ ID NO: 49808 - protein, 153 aa, Sphingobium limneticum
  misc_feature (1)..(153): tr|A0A5J5HIL6|A0A5J5HIL6_9SPHN NADPH-dependent 7-cyano- 7-deazaguanine reductase QueF OS=Sphingobium limneticum OX=1007511 GN=queF PE=4 SV=1
MTDLSTTPLHLGQTSALPASPEQAVLDYVPNPRPGKPYLVRFTAPEFTSLCPVTGQPDFAHLVIDYAPADTIVESKSLKLFLGSFRNHAAFHEDCTVGIGQRLFDEMKPIWLRIGGYWYPRGGIPIDVFWQSDVPPAGLWLPAQDVPGYRGRG

SEQ ID NO: 49809 - protein, 153 aa, Sphingobium paulinellae; identical to SEQ ID NO: 49785
  misc_feature (1)..(153): tr|A0A5J5HZY1|A0A5J5HZY1_9SPHN NADPH-dependent 7-cyano- 7-deazaguanine reductase QueF OS=Sphingobium paulinella e OX=2048545 GN=queF PE=4 SV=1

SEQ ID NO: 49810 - protein, 129 aa, Sphingobium quisquiliarum
  misc_feature (1)..(129): tr|T0HNL3|T0HNL3_9SPHN NADPH-dependent 7-cyano-7-deazag uanine reductase OS=Sphingobium quisquiliarum P25 OX=13 29909 GN=queF PE=3 SV=1
MLDYVLNPRPGKPYLVRFTAPEFTSLCPVTGQPDFAHLVIDYAPAATIVESKSLKLFLGSFRNHAAFHEDCTVGIGERLFAEMQPLWLRIGGYWYPRGGIPIDVFWQSGEPPAGLWLPPQDVPGYRGRG

SEQ ID NO: 49811 - protein, 157 aa, Sphingobium sp.
  misc_feature (1)..(157): tr|A0A196M9L8|A0A196M9L8_9SPHN NADPH-dependent 7-cyano- 7-deazaguanine reductase OS=Sphingobium sp. TCM1 OX=453 246 GN=queF PE=3 SV=1
MTDLPTQPPHLTLHLGQTSALPARPEDAVLDYVPNPRPGKPYLVRFTAPEFTSLCPVTGQPDFAHLVIDYAPGATIVESKSLKLFLGAFRNHAAFHEDCTVGIGERLFEEMQPLWLRIGGYWYPRGGIPIDVFWQSGEPPAGLWLPPQDVPGYRGRG

SEQ ID NO: 49812 - protein, 152 aa, Sphingobium sp.; identical to SEQ ID NO: 49801
  misc_feature (1)..(152): tr|A0A197BYZ5|A0A197BYZ5_9SPHN NADPH-dependent 7-cyano- 7-deazaguanine reductase OS=Sphingobium sp. 20006FA OX= 2056888 GN=queF PE=3 SV=1

SEQ ID NO: 49813 - protein, 152 aa, Sphingobium ummariense
  misc_feature (1)..(152): tr|T0K7M0|T0K7M0_9SPHN NADPH-dependent 7-cyano-7-deazag uanine reductase OS=Sphingobium ummariense RL-3 OX=1346 791 GN=queF PE=3 SV=1
MTDIPQPLHLGRASALPQRPEDAVLDYVPNPRPGKPYLVRFTAPEFTSLCPVTGQPDFAHLVIDYAPAATIVESKSLKLFLGAFRNHAAFHEDCTVGIGERLFDEMQPHWLRIGGYWYPRGGIPIDVFWQSGEPPAGLWLPPQDVPGYRGRG

SEQ ID NO: 49814 - protein, 164 aa, Sphingobium wenxiniae
  misc_feature (1)..(164): tr|A0A562KCW6|A0A562KCW6_SPHWJ NADPH-dependent 7-cyano- 7-deazaguanine reductase OS=Sphingobium wenxiniae (stra in DSM 21828 / JZ-1) OX=595605 GN=queF PE=3 SV=1
MTLCVQSRRWAAMTDTPHPIHLGRTSALPQRPEEAVLDYVPNPRPGKPYLVRFTAPEFTSLCPVTGQPDFAHLVIDYAPAATIVESKSLKLFLGAFRNHAAFHEDCTVGIGERLFTEMKPLWLRIGGYWYPRGGIPIDVFWQSGEPPAGMWLPPQDVPGYRGRG

SEQ ID NO: 49815 - protein, 153 aa, Sphingobium xenophagum
  misc_feature (1)..(153): tr|A0A401IXH5|A0A401IXH5_SPHXE NADPH-dependent 7-cyano- 7-deazaguanine reductase OS=Sphingobium xenophagum OX=1 21428 GN=queF PE=3 SV=1
MTDPALTPLHLGQTSALPARPEEAVLDYVPNPRPGRNYLVRFAAPEFTSLCPVTGQPDFAHLVIDYAPGDTIVESKSLKLFLSSFRNHAAFHEDCTVGIGERLFTEMKPVWLRIGGYWYPRGGIPIDVFWQSGAPPQDLWLPAQDVPGYRGRG

SEQ ID NO: 49816 - protein, 150 aa, Sphingobium yanoikuyae
  misc_feature (1)..(150): tr|K9DCI9|K9DCI9_SPHYA NADPH-dependent 7-cyano-7-deazag uanine reductase OS=Sphingobium yanoikuyae ATCC 51230 O X=883163 GN=queF PE=3 SV=1
MTDTPLHLGRASTLPQRPEDAVLDYVPNPRPGKPYLVRFTAPEFTSLCPVTGQPDFAHLVIDYAPGATIVESKALKLFLGSFRNHAGFHEDCTVGIGERLFTEMQPIWLRIGGYWYPRGGIPIDVFWQSGEPPAGLWLPPQDVPGYRGRG

SEQ ID NO: 49817 - protein, 150 aa, Sphingobium yanoikuyae; identical to SEQ ID NO: 49816
  misc_feature (1)..(150): tr|A0A085KBT2|A0A085KBT2_SPHYA NADPH-dependent 7-cyano- 7-deazaguanine reductase OS=Sphingobium yanoikuyae OX=1 3690 GN=queF PE=3 SV=1

SEQ ID NO: 49818 - protein, 152 aa, Sphingomonadaceae bacterium
  misc_feature (1)..(152): tr|A0A257DI80|A0A257DI80_9SPHN NADPH-dependent 7-cyano- 7-deazaguanine reductase OS=Sphingomonadaceae bacterium PASS1 OX=2015579 GN=queF PE=3 SV=1
MTDELKPMYLGAQSALPQTPEEAELDYVPNPRPDTLYLARFAVPEFTSLCPVTAQPDFAHLVIDYAPDKSIVESKSLKLFLGSFRNHAAFHEDCTVGIGQRLFSEMKPHWLRIGGYWYPRGGIPIDVFWQSGEPPKGLWLPDQGVAPYRGRG

SEQ ID NO: 49819 - protein, 152 aa, Sphingomonadaceae bacterium
  misc_feature (1)..(152): tr|A0A2D6KP45|A0A2D6KP45_9SPHN NADPH-dependent 7-cyano- 7-deazaguanine reductase OS=Sphingomonadaceae bacterium OX=1930536 GN=queF PE=3 SV=1
MSDTPAPKFLGANTALPASPEEAELDYVPNPRAGQLYMVRFAAPEFTSLCPVTGQPDFAHLVIDYAPGETIVESKSLKLFLGSFRNHCGFHEDVTVGIGQRLFDEMQPQWLRIGGYWYPRGGIPIDVFWQSGAPPAALWLPDQGVSSYRGRG

SEQ ID NO: 49820 - protein, 149 aa, Sphingomonadales bacterium
  misc_feature (1)..(149): tr|A0A258JB69|A0A258JB69_9SPHN NADPH-dependent 7-cyano- 7-deazaguanine reductase OS=Sphingomonadales bacterium 32-65-25 OX=1970594 GN=queF PE=3 SV=1
MVDVLHLGQSSALPASPEAAVLDYPPNPRPGAIFLVRFTCPEFTSLCPVTGQPDFAHIVIDYVPHETIVESKALKLFLGAFRNHAGFHEDVTVGIGQRLVAEMKPKWLRIGGYWYPRGGIPIDVFWQSGPVPDGLWLPDQGVPTYRGRG

SEQ ID NO: 49821 - protein, 152 aa, Sphingomonadales bacterium
  misc_feature (1)..(152): tr|A0A1G3JSQ8|A0A1G3JSQ8_9SPHN NADPH-dependent 7-cyano- 7-deazaguanine reductase OS=Sphingomonadales bacterium RIFCSPHIGHO2_01_FULL_65_20 OX=1802169 GN=queF PE=3 SV=1
MTDQPQTRFLGKDSPMPTSPEEAVLDYVPNPRPGRPYLVRFTAPEFTSLCPVTGQPDFAHLVIDYAPDKVMVESKSLKLFLGSFRNHQAFHEDCTVGIAERLFEEMQPHWLRIGGYWYPRGGIPIDVFWQSGEPPAGLWLPPQDVPGYRGRG

SEQ ID NO: 49822 - protein, 148 aa, Sphingomonas adhaesiva
  misc_feature (1)..(148): tr|A0A2A4I790|A0A2A4I790_9SPHN NADPH-dependent 7-cyano- 7-deazaguanine reductase OS=Sphingomonas adhaesiva OX=2 8212 GN=queF PE=3 SV=1
MTPKFLGQASTLPASPEEAALDYVPNPRPGTAYLVRFVQPEFTSLCPVTGQPDFAHLVIDYVPGDTIVESKSLKLFLGSFRNHAAFHEDCTVGIGDRLFREMAPRWLRIGGYWYPRGGMPIDVFWQSGPPPEGVWLPDQGVAPYRGRG

SEQ ID NO: 49823 - protein, 152 aa, Sphingomonas aerolata
  misc_feature (1)..(152): tr|A0A2T4YPE2|A0A2T4YPE2_9SPHN NADPH-dependent 7-cyano- 7-deazaguanine reductase OS=Sphingomonas aerolata OX=18 5951 GN=queF PE=3 SV=1
MTAPTNPLYLGQNSALPASPEEAVLDYVPNPRVGRTYLVRFAVPEFTSLCPVTGQPDFAHLVIDYVPGETIVESKSLKLFLGSFRNHAGFHEDCTVGIGERLFDEMKPVWLRIGGYWYPRGGIPIDVFWQSSAPPADLWLPDQGVAPYRGRG

SEQ ID NO: 49824 - protein, 148 aa, Sphingomonas aquatilis
  misc_feature (1)..(148): tr|A0A511Q6Y6|A0A511Q6Y6_9SPHN NADPH-dependent 7-cyano- 7-deazaguanine reductase OS=Sphingomonas aquatilis NBRC 16722 OX=1219039 GN=queF PE=3 SV=1
MTPMHLGQTSQLPASPEEAVLDYVPNPRLGTTYLVRFAVPEFTSLCPVTGQPDFAHLVLDYVPGDTIVESKSLKLFLGSFRNHAAFHEDCTVGIGRRLFDEMKPQWLRIGGYWYPRGGIPIDVFWQSSAPPADLWLPDQGVASYRGRG

SEQ ID NO: 49825 - protein, 158 aa, Sphingomonas aurantiaca
  misc_feature (1)..(158): tr|A0A2T5GTH4|A0A2T5GTH4_9SPHN NADPH-dependent 7-cyano- 7-deazaguanine reductase OS=Sphingomonas aurantiaca OX= 185949 GN=queF PE=3 SV=1
MTASQNPHNPQNPLHLGQNSALPASPEEAVLDYVPNPRPGRTYLVRFAAPEFTSLCPVTGQPDFAHLVIDYVPGETIVESKSLKLFLSSFRNHAGFHEDCTVGIGERLFDEMKPVWLRIGGYWYPRGGIPIDVFWQSSAPPQDLWLPDQGVASYRGRG

SEQ ID NO: 49826 - protein, 148 aa, Sphingomonas bacterium
  misc_feature (1)..(148): tr|A0A3D0WB85|A0A3D0WB85_9SPHN NADPH-dependent 7-cyano- 7-deazaguanine reductase OS=Sphingomonas bacterium OX=1 895847 GN=queF PE=3 SV=1
MTPKHLGQTSALPASPDEAVLDYVPNPRPGSLYCVRFAAPEFTSLCPVTAQPDFAHLVIDYAPAETIVESKSLKLFLGSFRNHAAFHEDCTVGIGERLFREMSPRWLRIGGYWYPRGGIPIDVFWQSGPSPEGLWVPDQGVAGYRGRG

SEQ ID NO: 49827 - protein, 151 aa, Sphingomonas carotinifaciens
  misc_feature (1)..(151): tr|A0A1G7FNY2|A0A1G7FNY2_9SPHN NADPH-dependent 7-cyano- 7-deazaguanine reductase OS=Sphingomonas carotinifacien s OX=1166323 GN=queF PE=3 SV=1
MASMNPMHLGQTSTLPASPDEAVLDYVPNPRPGRTYLVRFAAPEFTSLCPVTGQPDFAHLVIDYVPGETIVESKSLKLFLGSFRNHAGFHEDCTVGIGERLFNEMKPVWLRIGGYWYPRGGIPIDVFWQSAAPPAALWLPDQGVSGYRGRG

SEQ ID NO: 49828 - protein, 148 aa, Sphingomonas changbaiensis
  misc_feature (1)..(148): tr|A0A0E9MS70|A0A0E9MS70_9SPHN NADPH-dependent 7-cyano- 7-deazaguanine reductase OS=Sphingomonas changbaiensis NBRC 104936 OX=1219043 GN=queF PE=3 SV=1
MNITHLGQQSSLPARPEDAVLDYVPNPRPGRPYLVRFTAPEFTSLCPVTGQPDFAHLVIDYAPQATIVESKSLKLFLSSFRNHAAFHEDCTVGIGERLFAEMQPHWLRIGGYWYPRGGIPIDVFWQSGHPPAGLWLPSQDVPGYRGRG

SEQ ID NO: 49829 - protein, 148 aa, Sphingomonas desiccabilis
  misc_feature (1)..(148): tr|A0A4Q2ISC9|A0A4Q2ISC9_9SPHN NADPH-dependent 7-cyano- 7-deazaguanine reductase OS=Sphingomonas desiccabilis O X=429134 GN=queF PE=3 SV=1
MTPKHLGQSSGLPASPEQAELDYVPNPREGSRYCVRFTVPEFTSLCPVTGQPDFAHLVLDYVPDATIVESKSLKLFLGSFRNHAAFHEDCTVGIGERLFAEMKPLWLRIGGYWYPRGGIPIDVFWQSGEPPAGVWIPSQDVPGYRGRG

SEQ ID NO: 49830 - protein, 147 aa, Sphingomonas dokdonensis
  misc_feature (1)..(147): tr|A0A245ZMW5|A0A245ZMW5_9SPHN NADPH-dependent 7-cyano- 7-deazaguanine reductase OS=Sphingomonas dokdonensis OX =344880 GN=queF PE=3 SV=1
MTLHLGQNSPLPASPEEAVLDYVPNPRPGRQYLVRFVSPEFTSLCPVTGQPDFAHLVIDYVPGDTIVESKSLKLFLGSFRNHAAFHEDCTVGIGERLAEEMKPEWLRIGGYWYPRGGIPIDVFWQTGAPPADLWLPDQGVPSYRGRG

SEQ ID NO: 49831 - protein, 150 aa, Sphingomonas edaphi
  misc_feature (1)..(150): tr|A0A418Q2V1|A0A418Q2V1_9SPHN NADPH-dependent 7-cyano- 7-deazaguanine reductase OS=Sphingomonas edaphi OX=2315 689 GN=queF PE=3 SV=1
MNLTPKHLGQTSALPTSPDKAELDYVPNPRGGELYLVRFAATEFTSLCPVTGQPDFAHLVIDYAPGDTIVESKSLKLFLGAFRNHAAFHEDCTVGIGKRLFDEMKPTWLRIGGYWYPRGGIPIDVFWQSGEPPKGLWLPDQGVAPYRGRG

SEQ ID NO: 49832 - protein, 151 aa, Sphingomonas elodea
  misc_feature (1)..(151): tr|A0A495EYP3|A0A495EYP3_SPHEL NADPH-dependent 7-cyano- 7-deazaguanine reductase OS=Sphingomonas elodea OX=1798 78 GN=queF PE=3 SV=1
MAAMDAKHLGKQSALPASPEEAELDYVPNPRAGTRYLVRFAAPEFTSLCPITGAPDFAHLVIDYVPGEKIVESKSLKLFLGSFRNHGAFHEDCTVGIGERLFREMQPLWLRIGGYWYPRGGIPIDVFWQSGKPPEDVWIPDQGVPGYRGRG

SEQ ID NO: 49833 - protein, 148 aa, Sphingomonas endophytica
  misc_feature (1)..(148): tr|A0A147I6D9|A0A147I6D9_9SPHN NADPH-dependent 7-cyano- 7-deazaguanine reductase OS=Sphingomonas endophytica OX =869719 GN=queF PE=3 SV=1
MTPMHLGQTSTLPTSPEEAVLDYVPNPRAGTIYLVRFTQPEFTSLCPVTGQPDFAHLVIDYAPAETIVESKSLKLFLGSFRNHAAFHEDCTVGIGERLFREMHPQWLRIGGYWYPRGGMPIDVFWQSGAAPAGLWLPDQGVAPYRGRG

SEQ ID NO: 49834 - protein, 152 aa, Sphingomonas faeni
  misc_feature (1)..(152): tr|A0A2T5U371|A0A2T5U371_9SPHN NADPH-dependent 7-cyano- 7-deazaguanine reductase OS=Sphingomonas faeni OX=18595 0 GN=queF PE=3 SV=1
MTAPQNPLHLGQNSALPASPEEAVLDYVPNPRPGRTYLVRFAAPEFTSLCPVTGQPDFAHLVIDYVPGETIVESKSLKLFLSSFRNHAGFHEDCTVGIGERLFDEMKPVWLRIGGYWYPRGGIPIDVFWQSSAPPHDLWLPDQGVAPYRGRG

SEQ ID NO: 49835 - protein, 148 aa, Sphingomonas fennica
  misc_feature (1)..(148): tr|A0A2T4HT89|A0A2T4HT89_9SPHN NADPH-dependent 7-cyano- 7-deazaguanine reductase OS=Sphingomonas fennica OX=114 404 GN=queF PE=3 SV=1
MNPIHLGQASALPASPEEAVLDYVPNPRVGSLYMVRFAAPEFTSLCPVTGQPDFAHLVIDYAPGETIVESKSLKLFLGSFRNHRAFHEDCTVGIGQRLFDEMKPEWLRIGGYWYPRGGIPIDVFWQSGPPPAGLWLPDQGVAPYRGRG

SEQ ID NO: 49836 - protein, 148 aa, Sphingomonas gei
  misc_feature (1)..(148): tr|A0A4S1XBD5|A0A4S1XBD5_9SPHN NADPH-dependent 7-cyano- 7-deazaguanine reductase OS=Sphingomonas gei OX=1395960 GN=queF PE=3 SV=1
MEPKHLGQTSALPATPEEAVLDYVANPRPGSRYMIRFAAPEFTSLCPITGQPDFAHLVIDYVPGDTIVESKSLKLFLGSFRNHGAFHEDCTVGIGERLFEEMKPKWLRIGGYWYPRGGIPIDIFWQSGLAPSGVWIPPQDVPGYRGRG

SEQ ID NO: 49837 - protein, 148 aa, Sphingomonas ginsenosidimutans
  misc_feature (1)..(148): tr|A0A2A4HXP1|A0A2A4HXP1_9SPHN NADPH-dependent 7-cyano- 7-deazaguanine reductase OS=Sphingomonas ginsenosidimut ans OX=862134 GN=queF PE=3 SV=1
MTPKFLGQASTLPASPEEAALDYVPNPRPGTHYLVRFVQPEFTSLCPVTGQPDFAHLVIDYVPGDTIVESKSLKLFLGSFRNHAAFHEDCTVGIGDRLFREMAPRWLRIGGYWYPRGGMPIDVFWQSGPPPEGVWLPDQGVAPYRGRG

SEQ ID NO: 49838 - protein, 148 aa, Sphingomonas ginsenosidivorax
  misc_feature (1)..(148): tr|A0A5C6UHH2|A0A5C6UHH2_9SPHN NADPH-dependent 7-cyano- 7-deazaguanine reductase OS=Sphingomonas ginsenosidivor ax OX=862135 GN=queF PE=3 SV=1
MTPTHLGQTSTLPATPEEAILDYVPNPRRGQTYLVRFAVPEFTSLCPVTGQPDFAHLVIDYVPGETIVESKSLKLFLGSFRNHAAFHEDCTVGIGMRLFDEMEPAWLRIGGYWYPRGGIPIDVFWQSSAPPAGLWLPDQGVSAYRGRG

SEQ ID NO: 49839 - protein, 148 aa, Sphingomonas glacialis
  misc_feature (1)..(148): tr|A0A502FKY3|A0A502FKY3_9SPHN NADPH-dependent 7-cyano- 7-deazaguanine reductase OS=Sphingomonas glacialis OX=6 58225 GN=queF PE=3 SV=1
MTPTHLGQTSTLPASPEEAVLDYVPNPRPGRLYLVRFAVPEFTSLCPVTAQPDFAHLVIDYAPAATIVESKSLKLFLGSFRNHQAFHEDCTVGIGERLFTEMQPAWLRIGGYWYPRGGIPIDVFWQSGAPPEGLWLPSQDVPGYRGRG

SEQ ID NO: 49840 - protein, 148 aa, Sphingomonas guangdongensis
  misc_feature (1)..(148): tr|A0A285QI70|A0A285QI70_9SPHN NADPH-dependent 7-cyano- 7-deazaguanine reductase OS=Sphingomonas guangdongensis OX=1141890 GN=queF PE=3 SV=1
MTPLHLGQASSLPASPEEAVLDYVPNPRSGTRYLVRFAVPEFTSLCPVTGQPDFAHLVIDYVPAATIVESKSLKLFLGAFRNHAAFHEDCTVGIGERLTAEMQPHWLRIGGYWYPRGGIPIDVFWQSGPPPADVWVPDQGVASYRGRG

SEQ ID NO: 49841 - protein, 148 aa, Sphingomonas haloaromaticamans
  misc_feature (1)..(148): tr|A0A1S1HKB4|A0A1S1HKB4_9SPHN NADPH-dependent 7-cyano- 7-deazaguanine reductase OS=Sphingomonas haloaromaticam ans OX=653954 GN=queF PE=3 SV=1
MNPIHLGQASALPASPEEAVLDYVPNPRVGSLYLVRFAAPEFTSLCPVTGQPDFAHLVIDYAPGETIVESKSLKLFLGSFRNHRAFHEDCTVGIGQRLFDEMKPEWLRIGGYWYPRGGIPIDVFWQSGPPPAGLWLPDQGVAPYRGRG

SEQ ID NO: 49842 - protein, 147 aa, Sphingomonas hengshuiensis
  misc_feature (1)..(147): tr|A0A2W4ZHQ3|A0A2W4ZHQ3_9SPHN NADPH-dependent 7-cyano- 7-deazaguanine reductase OS=Sphingomonas hengshuiensis OX=1609977 GN=queF PE=3 SV=1
MDPKFLGQASPLPATPEAAELDYVPNPRTSPYLVRFTAPEFTSLCPVTGQPDFAHLVIDYVPGATIVESKSLKLFLGSFRNHAAFHEDCTVGIAERLVAEMQPAWLRIGGYWYPRGGIPIDVFWQSGEPPRTVWIPDQGVPGYRGRG

SEQ ID NO: 49843 - protein, 148 aa, Sphingomonas hengshuiensis
  misc_feature (1)..(148): tr|A0A2W5BPE0|A0A2W5BPE0_9SPHN NADPH-dependent 7-cyano- 7-deazaguanine reductase OS=Sphingomonas hengshuiensis OX=1609977 GN=queF PE=3 SV=1
MTPKYLGQASPLPTSPDAAILDYVPNPRAGQRYLVRFAAPEFTSLCPVTAQPDFAHLVIDYVPGATIVESKSLKLFLGSFRNHQSFHEDCTVGIGMRLSEEMQPVWLRIGGYWYPRGGIPIDVFWQSGPPPEGVWIPAQDVPPYRGRG

SEQ ID NO: 49844 - protein, 150 aa, Sphingomonas histidinilytica
  misc_feature (1)..(150): tr|A0A1T5AUU7|A0A1T5AUU7_9SPHN NADPH-dependent 7-cyano- 7-deazaguanine reductase OS=Sphingomonas histidinilytic a OX=439228 GN=queF PE=3 SV=1
MSASTLHLGKTSTLPASPEQAVLDYVPNPRPGTLYLIRFAAPEFTSLCPVTGQPDFAHLVIDYAPGETIVESKSLKLFLASFRNHAGFHEDCTVGIGQRLAEEMRPVWLRIGGYWYPRGGIPIDVFWQSGPAPEGLWVPDQGVPGYRGRG

SEQ ID NO: 49845 - protein, 175 aa, Sphingomonas indica
  misc_feature (1)..(175): tr|A0A1X7FZ99|A0A1X7FZ99_9SPHN NADPH-dependent 7-cyano- 7-deazaguanine reductase OS=Sphingomonas indica OX=9419 07 GN=queF PE=3 SV=1
MVRNGAASAAFAGMASGPRANALSDAAMSITHLGQTSSLPASPDAATLDYVPNPRTGRAYLVRFTAPEFTSLCPVTGQPDFAHIVIDYAPGETIVESKSLKLFLGSFRNHAGFHEDVTVGIAERLVQEMAPQWLRIGGYWYPRGGIPIDVFWQSGEPPVGLWVPPQDVPGYRGRG

SEQ ID NO: 49846 - protein, 151 aa, Sphingomonas jatrophae
  misc_feature (1)..(151): tr|A0A1I6LCN8|A0A1I6LCN8_9SPHN NADPH-dependent 7-cyano- 7-deazaguanine reductase OS=Sphingomonas jatrophae OX=1 166337 GN=queF PE=3 SV=1
MAAMEPLHLGRSTPLPASPHEAVLDYVPNPRAGTLYLVRFAAPEFTSLCPVTGQPDFAHLVIDYAPGETIVESKSLKLFLGSFRNHCGFHEDVTVGIGQRLFDEMKPRWLRIGGYWYPRGGIPIDVFWQSDAPPAGLWVPDQGVAGYRGRG

SEQ ID NO: 49847 - protein, 147 aa, Sphingomonas jeddahensis
  misc_feature (1)..(147): tr|A0A1V2EU64|A0A1V2EU64_9SPHN NADPH-dependent 7-cyano- 7-deazaguanine reductase OS=Sphingomonas jeddahensis OX =1915074 GN=queF PE=3 SV=1
MTLHLGKTSPLPTTPEEAVLDYVPNPRIGRNYLVRFVSPEFTSLCPVTGQPDFAHIVIDYVPGETIVESKSLKLFLGSFRNHAAFHEDCTVGIGERLVAEMKPLWLRIGGYWYPRGGIPIDVFWQTGAPPADLWVPDQGVPSYRGRG

SEQ ID NO: 49848 - protein, 151 aa, Sphingomonas koreensis
  misc_feature (1)..(151): tr|A0A1L6J936|A0A1L6J936_9SPHN NADPH-dependent 7-cyano- 7-deazaguanine reductase OS=Sphingomonas koreensis OX=9 3064 GN=queF PE=3 SV=1
MARMNPKHLGQQSALPDSPEEAVLDYVPNPRTGTDYLVRFAAPEFTSLCPITGAPDFAHLVIDYVPGETIVESKSLKLFLGSFRNHGAFHEDCTVGIGQRLFDEMKPKWLRIGGYWYPRGGIPIDVFWQSGPAPDGVWIPAQDVPGYRGRG

SEQ ID NO: 49849 - protein, 148 aa, Sphingomonas koreensis
  misc_feature (1)..(148): tr|A0A430C3D2|A0A430C3D2_9SPHN NADPH-dependent 7-cyano- 7-deazaguanine reductase OS=Sphingomonas koreensis OX=9 3064 GN=queF PE=3 SV=1
MNPKHLGQQSALPASPEEAVLDYVPNPRTGIDYLVRFAAPEFTSLCPITGAPDFAHLVIDYVPGETIVESKSLKLFLGSFRNHGAFHEDCTVGIGQRLFDEMKPKWLRIGGYWYPRGGIPIDVFWQSGPAPDGVWIPAQEVPGYRGRG

SEQ ID NO: 49850 - protein, 148 aa, Sphingomonas laterariae
  misc_feature (1)..(148): tr|A0A239JLN1|A0A239JLN1_9SPHN NADPH-dependent 7-cyano- 7-deazaguanine reductase OS=Sphingomonas laterariae OX= 861865 GN=queF PE=3 SV=1
MNPIHLGQASVQPNSPEEAVLDYVPNPRVGSLYLVRFAAPEFTSLCPVTGQPDFAHLVIDYAPAETIVESKSLKLFLSSFRNHRAFHEDCTVGIGQRLFDEMKPQWLRIGGYWYPRGGMPIDVFWQSGPAPAGLWVPDQGVASYRGRG

SEQ ID NO: 49851 - protein, 148 aa, Sphingomonas melonis
  misc_feature (1)..(148): tr|A0A175Y0S2|A0A175Y0S2_9SPHN NADPH-dependent 7-cyano- 7-deazaguanine reductase OS=Sphingomonas melonis TY OX= 621456 GN=queF PE=3 SV=1
MTPMHLGQTSQLPASPEEAVLDYVPNPRLGTTYLVRFAVPEFTSLCPVTGQPDFAHLVLDYVPGDTIVESKSLKLFLGSFRNHAAFHEDCTVGIGQRLFDEMKPQWLRIGGYWYPRGGIPIDVFWQSSAPPADLWLPDQGVASYRGRG

SEQ ID NO: 49852 - protein, 148 aa, Sphingomonas melonis
  misc_feature (1)..(148): tr|A0A0D1MF00|A0A0D1MF00_9SPHN NADPH-dependent 7-cyano- 7-deazaguanine reductase OS=Sphingomonas melonis OX=152 682 GN=queF PE=3 SV=1
MTPMHLGQTSQLPASPEEAVLDYVPNPRLGTTYLVRFAVPEFTSLCPVTGQPDFAHLVLDYVPGDTIVESKSLKLFLGSFRNHAAFHEDCTVGIGQRLFDEMKPQWLRIGGYWYPRGGIPIDVFWQSSAPPADLWLPDQGVAPYRGRG

SEQ ID NO: 49853 - protein, 147 aa, Sphingomonas mucosissima
  misc_feature (1)..(147): tr|A0A245ZLD9|A0A245ZLD9_9SPHN NADPH-dependent 7-cyano- 7-deazaguanine reductase OS=Sphingomonas mucosissima OX =370959 GN=queF PE=3 SV=1
MTLHLGKNSPLPVSPDEAVLDYVPNPRPGRQYLVRFVSPEFTSLCPVTGQPDFAHLVIDYVPGETIVESKSLKLFLGSFRNHAAFHEDCTVGIGERLAHEMQPVWLRIGGYWYPRGGIPIDVFWQTGPAPADVWVPDQGVPSYRGRG

SEQ ID NO: 49854 - protein, 148 aa, Sphingomonas naasensis
  misc_feature (1)..(148): tr|A0A4S1WH69|A0A4S1WH69_9SPHN NADPH-dependent 7-cyano- 7-deazaguanine reductase OS=Sphingomonas naasensis OX=1 344951 GN=queF PE=3 SV=1
MEPKHLGQASSLPATPEEAELDYVPNPRPGSRYMIRFAAPEFTSLCPITGQPDFAHLVIDYVPGETIVESKSLKLFLGSFRNHGAFHEDCTVGIGERLFGEMKPEWLRIGGYWYPRGGIPIDVFWQSGEPPAGVWIPSQEVPGYRGRG

SEQ ID NO: 49855 - protein, 147 aa, Sphingomonas olei
  misc_feature (1)..(147): tr|A0A4S4GGI6|A0A4S4GGI6_9SPHN NADPH-dependent 7-cyano- 7-deazaguanine reductase OS=Sphingomonas olei OX=188678 7 GN=queF PE=3 SV=1
MTLHLGKATPLPQAPEEAVLDYVPNPRPGRNYLIRFVAPEFTSLCPVTAQPDFAHLVIDYVPGETIVESKSLKLFLGSFRNHAAFHEDCTVGIGERLVAEMNPVWLRIGGYWYPRGGIPIDVFWQTAAPPAGLWVPDQGVPSYRGRG

SEQ ID NO: 49856 - protein, 148 aa, Sphingomonas oleivorans
  misc_feature (1)..(148): tr|A0A2T5FXJ5|A0A2T5FXJ5_9SPHN NADPH-dependent 7-cyano- 7-deazaguanine reductase OS=Sphingomonas oleivorans OX= 1735121 GN=queF PE=3 SV=1
MSPIHLGQTSALPQTPEAAILDYVPNPRPGRPYLVRFTAPEFTSLCPVTGQPDFAHLVIDYAPGETIVESKSLKLFLGSFRNHAAFHEDCTVGIGERLTSEMKPLWLRIGGYWYPRGGIPIDVFWQSGPVPEGLWLPDQGVPSYRGRG

SEQ ID NO: 49857 - protein, 148 aa, Sphingomonas oligophenolica
  misc_feature (1)..(148): tr|A0A502CG95|A0A502CG95_9SPHN NADPH-dependent 7-cyano- 7-deazaguanine reductase OS=Sphingomonas oligophenolica OX=301154 GN=queF PE=3 SV=1
MTPKFLGQSAPLPASPDEATLDYVPNPRIGTTYLVRFAVPEFTSLCPVTGQPDFAHLVIDYVPGETIVESKSLKLFLGSFRNHCAFHEDCTVGIGQRLAAEMMPAWLRIGGYWYPRGGIPIDVFWQSGAPPEDLWLPDQGVTPYRGRG

SEQ ID NO: 49858 - protein, 148 aa, Sphingomonas panacis
  misc_feature (1)..(148): tr|A0A1B3Z9L7|A0A1B3Z9L7_9SPHN NADPH-dependent 7-cyano- 7-deazaguanine reductase OS=Sphingomonas panacis OX=156 0345 GN=queF PE=3 SV=1
MTPMHLGQTSALPSSPEDAVLDYVPNPRRGRPYLVRFTAPEFTSLCPVTAQPDFAHLVIDYAPGETIVESKSLKLFLGAFRNHQAFHEDCTVGIGERLFAEMRPLWLRIGGYWYPRGGMPIDVFWQSGTPPEGLWLPSQDVPGYRGRG

SEQ ID NO: 49859 - protein, 149 aa, Sphingomonas parapaucimobilis
  misc_feature (1)..(149): tr|A0A0A1W9B5|A0A0A1W9B5_9SPHN NADPH-dependent 7-cyano- 7-deazaguanine reductase OS=Sphingomonas parapaucimobil is NBRC 15100 OX=1219049 GN=queF PE=3 SV=1
MAFMKHLGQTSALPASPEEAVLDYVPNPRPGRTYLVRFAAPEFTSLCPVTGQPDFAHLVIDYVPGETIVESKSLKLFLGSFRNHAGFHEDCTVGIGERLFDEMKPVWLRIGGYWYPRGGIPIDVFWQSSAPPADLWLPDQGVAGYRGRG

SEQ ID NO: 49860 - protein, 167 aa, Sphingomonas paucimobilis
  misc_feature (1)..(167): tr|A0A031JE61|A0A031JE61_SPHPI NADPH-dependent 7-cyano- 7-deazaguanine reductase OS=Sphingomonas paucimobilis O X=13689 GN=queF PE=3 SV=1
MTLCVQWRRWPDMTDTPNLSKPIHLGQTSALPTTPEEAVLDYVPNPRPGKPYLVRFTAPEFTSLCPVTGQPDFAHLVIDYAPAATIVESKSLKLFLGSFRNHAAFHEDCTVGIGERLFAEMQPLWLRIGGYWYPRGGIPIDVFWQSGEPPVGLWLPPQDVPGYRGRG

SEQ ID NO: 49861 - protein, 146 aa, Sphingomonas paucimobilis
  misc_feature (1)..(146): tr|A0A411LJ83|A0A411LJ83_SPHPI NADPH-dependent 7-cyano- 7-deazaguanine reductase OS=Sphingomonas paucimobilis O X=13689 GN=queF PE=3 SV=1
MKHLGQTSALPASPEEAVLDYVPNPRPGRTYLIRFAAPEFTSLCPVTGQPDFAHLVIDYVPGETIVESKSLKLFLGSFRNHAGFHEDCTVGIGERLFEEMKPVWLRIGGYWYPRGGIPIDVFWQSSAPPADLWLPDQGVAGYRGRG

SEQ ID NO: 49862 - protein, 148 aa, Sphingomonas pokkalii
  misc_feature (1)..(148): tr|A0A2U0SIP6|A0A2U0SIP6_9SPHN NADPH-dependent 7-cyano- 7-deazaguanine reductase OS=Sphingomonas pokkalii OX=21 75090 GN=queF PE=3 SV=1
MDAKHLGKQSALPATPEEAELDYVPNPRAGTRYLVRFAAPEFTSLCPITGAPDFAHLVIDYVPGERIVESKSLKLFLGSFRNHGAFHEDCTVGIGERLFREMAPLWLRIGGYWYPRGGIPIDVFWQSGKPPEDVWIPDHGVPGYRGRG

SEQ ID NO: 49863 - protein, 148 aa, Sphingomonas rubra
  misc_feature (1)..(148): tr|A0A1I5U1S0|A0A1I5U1S0_9SPHN NADPH-dependent 7-cyano- 7-deazaguanine reductase OS=Sphingomonas rubra OX=63443 0 GN=queF PE=3 SV=1
MTPKFLGQTAPLPASPQEAVLDYVPNPRAGSTYLVRFAAPEFTSLCPVTGQPDFAHLVIDYAPGDTIVESKSLKLFLGSFRNHAAFHEDCTVGIGERLHAEMAPRWLRIGGYWYPRGGIPIDVFWQSGPPPADLWVPDQGVAPYRGRG

SEQ ID NO: 49864 - protein, 149 aa, Sphingomonas sanguinis
  misc_feature (1)..(149): tr|A0A147J8M8|A0A147J8M8_9SPHN NADPH-dependent 7-cyano- 7-deazaguanine reductase OS=Sphingomonas sanguinis OX=3 3051 GN=queF PE=3 SV=1
MAFMKHLGQTSALPASPEEAVLDYVPNPRPGRTYLIRFAAPEFTSLCPVTGQPDFAHLVIDYVPGETIVESKSLKLFLGSFRNHAGFHEDCTVGIGERLFEEMKPVWLRIGGYWYPRGGIPIDVFWQSSTPPADLWLPDQGVAGYRGRG

SEQ ID NO: 49865 - protein, 149 aa, Sphingomonas sanguinis
  misc_feature (1)..(149): tr|A0A147J3B6|A0A147J3B6_9SPHN NADPH-dependent 7-cyano- 7-deazaguanine reductase OS=Sphingomonas sanguinis OX=3 3051 GN=queF PE=3 SV=1
MAFMKHLGQTSALPASPEEAVLDYVPNPRPGRTYLIRFAAPEFTSLCPVTGQPDFAHLVIDYVPGETIVESKSLKLFLGSFRNHAGFHEDCTVGIGERLFEEMKPVWLRIGGYWYPRGGIPIDVFWQSSAPPADLWLPDQGVAGYRGRG

SEQ ID NO: 49866 - protein, 148 aa, Sphingomonas sanxanigenens
  misc_feature (1)..(148): tr|W0A3T6|W0A3T6_9SPHN NADPH-dependent 7-cyano-7-deazag uanine reductase OS=Sphingomonas sanxanigenens DSM 1964 5 = NX02 OX=1123269 GN=queF PE=3 SV=1
MQTTHLGQTSMLPHSPEAATLDYVPNPRPGRPYLVRFTAPEFTSLCPVTGQPDFAHLVIDYAPAETIVESKSLKLFLGAFRNHAAFHEDCTVGIGERLFTEMKPVWLRIGGYWYPRGGIPIDVFWQSGAPPQGMWLPPQDVPGYRGRG

SEQ ID NO: 49867 - protein, 148 aa, Sphingomonas sanxanigenens
  misc_feature (1)..(148): tr|A0A2W5A547|A0A2W5A547_9SPHN NADPH-dependent 7-cyano- 7-deazaguanine reductase OS=Sphingomonas sanxanigenens OX=397260 GN=queF PE=3 SV=1
MTITHLGQQSPLPASPEQAVLDYVPNPRPGRPYLVRFTAPEFTSLCPVTGQPDFAHLMIDYAPAETIVESKSLKLFLGSFRNHAAFHEDCTVGIGERLFAEMKPVWLRIGGYWYPRGGIPIDVFWQSGEPPAGLWLPPQDVPNYRGRG

SEQ ID NO: 49868 - protein, 149 aa, Sphingomonas sp.; identical to SEQ ID NO: 49859
  misc_feature (1)..(149): tr|A0A1R1YW96|A0A1R1YW96_9SPHN NADPH-dependent 7-cyano- 7-deazaguanine reductase OS=Sphingomonas sp. Sph1(2015) OX=1628084 GN=queF PE=3 SV=1

SEQ ID NO: 49869 - protein, 148 aa, Sphingomonas sp.; identical to SEQ ID NO: 49829
  misc_feature (1)..(148): tr|A0A430DI41|A0A430DI41_9SPHN NADPH-dependent 7-cyano- 7-deazaguanine reductase OS=Sphingomonas sp. ABOLF OX=1 985879 GN=queF PE=3 SV=1

SEQ ID NO: 49870 - protein, 148 aa, Sphingomonas spermidinifaciens
  misc_feature (1)..(148): tr|A0A2A4B4S0|A0A2A4B4S0_9SPHN NADPH-dependent 7-cyano- 7-deazaguanine reductase OS=Sphingomonas spermidinifaci ens OX=1141889 GN=queF PE=3 SV=1
MTPKHLGQTSALPASPDEAVLDYVPNPRPGSLYCVRFAAPEFTSLCPVTAQPDFAHLVIDYAPAETIVESKSLKLFLGSFRNHAAFHEDCTVGIGERLVAEMKPQWLRIGGYWYPRGGIPIDVFWQSGLAPEGLWVPDQGVAGYRGRG

SEQ ID NO: 49871 - protein, 152 aa, Sphingomonas taxi
  misc_feature (1)..(152): tr|A0A2W4YTQ7|A0A2W4YTQ7_9SPHN NADPH-dependent 7-cyano- 7-deazaguanine reductase OS=Sphingomonas taxi OX=154985 8 GN=queF PE=3 SV=1
MTAPANPLHLGQNSALPASPEEAVLDYVPNPRPGRTYLVRFAAPEFTSLCPVTGQPDFAHLVIDYVPGETIVESKSLKLFLSSFRNHAGFHEDCTVGIGERLFDEMKPVWLRIGGYWYPRGGIPIDVFWQSSAPPQDLWLPDQGVASYRGRG

SEQ ID NO: 49872 - protein, 148 aa, Sphingomonas taxi
  misc_feature (1)..(148): tr|A0A097EFS3|A0A097EFS3_9SPHN NADPH-dependent 7-cyano- 7-deazaguanine reductase OS=Sphingomonas taxi OX=154985 8 GN=queF PE=3 SV=1
MTPMHLGQASQLPASPDEAVLDYVPNPRAGTTYLVRFAVPEFTSLCPVTGQPDFAHLVIDYAPGETIVESKSLKLFLGSFRNHAGFHEDCTVGIGQRLFDEMKPQWLRIGGYWYPRGGIPIDVFWQSGPPPADLWLPDQGVQPYRGRG

SEQ ID NO: 49873 - protein, 151 aa, Sphingomonas trueperi; identical to SEQ ID NO: 49832
  misc_feature (1)..(151): tr|A0A543LU59|A0A543LU59_9SPHN NADPH-dependent 7-cyano- 7-deazaguanine reductase OS=Sphingomonas trueperi OX=53 317 GN=queF PE=3 SV=1

SEQ ID NO: 49874 - protein, 148 aa, Sphingomonas turrisvirgatae
  misc_feature (1)..(148): tr|A0A1E3LWH2|A0A1E3LWH2_9SPHN NADPH-dependent 7-cyano- 7-deazaguanine reductase OS=Sphingomonas turrisvirgatae OX=1888892 GN=queF PE=3 SV=1
MTPMHLGQQSALPTSPEAASLDYVPNPRAGTDYLVRFAAPEFTSLCPITGAPDFAHLVIDYVPGETIVESKSLKLFLGSFRNHGAFHEDCTVGIGQRLFDEMRPKWLRIGGYWYPRGGIPIDVFWQSGEPPAGVWIPAQDVPGYRGRG

SEQ ID NO: 49875 - protein, 150 aa, Sphingomonas wittichii
  misc_feature (1)..(150): tr|A0A1X9UBI8|A0A1X9UBI8_SPHSD NADPH-dependent 7-cyano- 7-deazaguanine reductase OS=Sphingomonas wittichii (str ain DC-6 / KACC 16600) OX=1283312 GN=queF PE=3 SV=1
MSASTLHLGKTSTLPASPEQAVLDYVPNPRPGTLYLVRFAAPEFTSLCPVTGQPDFAHLVIDYAPGETIVESKSLKLFLASFRNHAGFHEDCTVGIGQRLAEEMKPVWLRIGGYWYPRGGIPIDVFWQSGPAPEGLWVPDQGVPGYRGRG

SEQ ID NO: 49876 - protein, 150 aa, Sphingomonas wittichii; identical to SEQ ID NO: 49875
  misc_feature (1)..(150): tr|A5VCV3|A5VCV3_SPHWW NADPH-dependent 7-cyano-7-deazag uanine reductase OS=Sphingomonas wittichii (strain RW1 / DSM 6014 / JCM 10273) OX=392499 GN=queF PE=3 SV=1

SEQ ID NO: 49877 - protein, 149 aa, Sphingomonas yabuuchiae
  misc_feature (1)..(149): tr|A0A147ITI6|A0A147ITI6_9SPHN NADPH-dependent 7-cyano- 7-deazaguanine reductase OS=Sphingomonas yabuuchiae OX= 172044 GN=queF PE=3 SV=1
MALMKHLGQTSALPASPEEAVLDYVPNPRPGRTYLIRFAAPEFTSLCPVTGQPDFAHLVIDYVPGETIVESKSLKLFLGSFRNHAGFHEDCTVGIGERLFEEMKPVWLRIGGYWYPRGGIPIDVFWQSSAPPADLWLPDQGVAGYRGRG

SEQ ID NO: 49878 - protein, 156 aa, Sphingopyxis alaskensis
  misc_feature (1)..(156): tr|Q1GNK5|Q1GNK5_SPHAL NADPH-dependent 7-cyano-7-deazag uanine reductase OS=Sphingopyxis alaskensis (strain DSM 13593 / LMG 18877 / RB2256) OX=317655 GN=queF PE=3 SV= 1
MTDSTPTPLVPKHLGQSSELPASPEAAVLDYVPNPRAGELYLVRFAAPEFTSLCPVTGQPDFAHLVIDYAPGETIVESKSLKLFLGSFRNHAGFHEDCTVGIGRRLFDEMQPQWLRIGGYWYPRGGIPIDVFWQSGPPPAGLWLPDQGVAPYRGRG

SEQ ID NO: 49879 - protein, 156 aa, Sphingopyxis bauzanensis
  misc_feature (1)..(156): tr|A0A246K1P7|A0A246K1P7_9SPHN NADPH-dependent 7-cyano- 7-deazaguanine reductase OS=Sphingopyxis bauzanensis OX =651663 GN=queF PE=3 SV=1
MSDSSHPPLAPKHLGQSSDLPAAPEAAVLDYVPNPRAGELYLVRFAAPEFTSLCPVTGQPDFAHLVIDYAPGETIVESKSLKLFLGSFRNHAGFHEDCTVGIGRRLFDEMQPQWLRIGGYWYPRGGIPIDVFWQSGAPPADLWLPDQGVAPYRGRG

SEQ ID NO: 49880 - protein, 129 aa, Sphingopyxis flava
  misc_feature (1)..(129): tr|A0A1T5ASV7|A0A1T5ASV7_9SPHN NADPH-dependent 7-cyano- 7-deazaguanine reductase OS=Sphingopyxis flava OX=15072 87 GN=queF PE=3 SV=1
MLDYVPNPRRGELYLVRFAAPEFTSLCPVTGQPDFAHLVVDYAPGETIVESKSLKLFLGSFRNHAGFHEDCTVGIGRRLFDEMRPQWLRIGGYWYPRGGIPIDVFWQSGPPPAGLWLPDQGVAPYRGRG

SEQ ID NO: 49881 - protein, 156 aa, Sphingopyxis fribergensis
  misc_feature (1)..(156): tr|A0A0A7PCZ1|A0A0A7PCZ1_9SPHN NADPH-dependent 7-cyano- 7-deazaguanine reductase OS=Sphingopyxis fribergensis O X=1515612 GN=queF PE=3 SV=1
MTDSSPTPLAPKHLGQSSELPAAPEAAVLDYVPNPRAGELYLVRFVAPEFTSLCPVTGQPDFAHLVIDYAPGETIVESKSLKLFLGSFRNHAGFHEDCTVGIGRRLFDEMQPRWLRIGGYWYPRGGIPIDVFWQSGAPPAGLWLPDQGVAPYRGRG

SEQ ID NO: 49882 - protein, 156 aa, Sphingopyxis granuli
  misc_feature (1)..(156): tr|A0A0X8R6I0|A0A0X8R6I0_9SPHN NADPH-dependent 7-cyano- 7-deazaguanine reductase OS=Sphingopyxis granuli OX=267 128 GN=queF PE=3 SV=1
MTDSSHPPLAPKHLGQPSQLPAAPEAAVLDYVPNPRSGELYLVRFAAPEFTSLCPVTGQPDFAHLVIDYAPGETIVESKSLKLFLASFRNHAGFHEDCTVGIGRRLFDEMRPRWLRIGGYWYPRGGIPIDVFWQSGPPPEGLWLPDQGVAPYRGRG

SEQ ID NO: 49883 - protein, 156 aa, Sphingopyxis indica
  misc_feature (1)..(156): tr|A0A239K0U0|A0A239K0U0_9SPHN NADPH-dependent 7-cyano- 7-deazaguanine reductase OS=Sphingopyxis indica OX=4366 63 GN=queF PE=3 SV=1
MSDSSHPPLAPKHLGQTSELPASPELAALDYVPNPRAGELYLVRFAAPEFTSLCPVTGQPDFAHLVIDYAPGKTIVESKSLKLFLGSFRNHAGFHEDCTVGIGRRLFDEMQPQWLRIGGYWYPRGGIPIDVFWQSGPPPAGLWLPDQGVAPYRGRG

SEQ ID NO: 49884 - protein, 156 aa, Sphingopyxis lindanitolerans
  misc_feature (1)..(156): tr|A0A2S8B823|A0A2S8B823_9SPHN NADPH-dependent 7-cyano- 7-deazaguanine reductase OS=Sphingopyxis lindanitoleran s OX=2054227 GN=queF PE=3 SV=1
MSDSSHPPLRPKHLGQPSELPASPEAAILDYVANPRVGDLYLVRFAAPEFTSLCPVTGQPDFAHLVIDYAPGETIVESKSLKLFLGAFRNHAGFHEDCTVGIGRRLFDEMRPKWLRIGGYWYPRGGIPIDVFWQSGAPPEGLWLPDQGVAPYRGRG

SEQ ID NO: 49885 - protein, 156 aa, Sphingopyxis macrogoltabida
  misc_feature (1)..(156): tr|A0A2W5MRE9|A0A2W5MRE9_SPHMC NADPH-dependent 7-cyano- 7-deazaguanine reductase OS=Sphingopyxis macrogoltabida OX=33050 GN=queF PE=3 SV=1
MRDSSHPPLAPKHLGQSSDLPASPEAATLDYVPNPRAGELYLVRFAAPEFTSLCPVTGQPDFAHLVIDYAPRDTIVESKSLKLFLGSFRNHAGFHEDCTVGIGRRLFDEMRPRWLRIGGYWYPRGGIPIDVFWQSGAPPEGLWLPDQGVAPYRGRG

SEQ ID NO: 49886 - protein, 156 aa, Sphingopyxis macrogoltabida
  misc_feature (1)..(156): tr|A0A0N7GRU1|A0A0N7GRU1_SPHMC NADPH-dependent 7-cyano- 7-deazaguanine reductase OS=Sphingopyxis macrogoltabida OX=33050 GN=queF PE=3 SV=1
MSDSSHPPLAPKHLGRSSDLPASPEAATLDYVPNPRADELYLVRFAAPEFTSLCPVTGQPDFAHIVIDYAPGETIVESKSLKLFLGSFRNHAGFHEDCTVGIGRRLVDEMRPKWLRIGGYWYPRGGIPIDVFWQSGPPPAGLWLPDQGVAPYRGRG

SEQ ID NO: 49887 - protein, 156 aa, Sphingopyxis sp.
  misc_feature (1)..(156): tr|A0A270BBN8|A0A270BBN8_9SPHN NADPH-dependent 7-cyano- 7-deazaguanine reductase OS=Sphingopyxis sp. GW247-27LB OX=2012632 GN=queF PE=3 SV=1
MSDSSHPPLAPKHLGQSSELPASPEAAVLDYVPNPRGGELYLVRFAAPEFTSLCPVTGQPDFAHLVIDYAPGETIVESKSLKLFLSSFRNHAGFHEDCTVGIGRRLFDEMQPRWLRIGGYWYPRGGIPIDVFWQSGPPPADLWLPDQGVAAYRGRG

SEQ ID NO: 49888 - protein, 156 aa, Sphingopyxis sp.; identical to SEQ ID NO: 49882
  misc_feature (1)..(156): tr|A0A2L0VSD4|A0A2L0VSD4_9SPHN NADPH-dependent 7-cyano- 7-deazaguanine reductase OS=Sphingopyxis sp. MG OX=1866 325 GN=queF PE=3 SV=1

SEQ ID NO: 49889 - protein, 129 aa, Sphingopyxis terrae
  misc_feature (1)..(129): tr|A0A142VZB4|A0A142VZB4_9SPHN NADPH-dependent 7-cyano- 7-deazaguanine reductase OS=Sphingopyxis terrae subsp. terrae NBRC 15098 OX=1219058 GN=queF PE=3 SV=1
MLDYVPNPRAGELYLVRFAAPEFTSLCPVTGQPDFAHLVIDYAPGETIVESKSLKLFLGSFRNHAGFHEDCTVGIGRRLFDEMQPQWLRIGGYWYPRGGIPIDVFWQSGPPPLGLWLPDQGVAPYRGRG

SEQ ID NO: 49890 - protein, 156 aa, Sphingopyxis terrae
  misc_feature (1)..(156): tr|A0A1Y6G112|A0A1Y6G112_9SPHN NADPH-dependent 7-cyano- 7-deazaguanine reductase OS=Sphingopyxis terrae subsp. ummariensis OX=429001 GN=queF PE=3 SV=1
MSDSSHTPLQPKHLGQSSELPASPEAALLDYVPNPRVGELYLVRFAAPEFTSLCPVTGQPDFAHLVIDYAPGETIVESKSLKLFLGSFRNHAGFHEDCTVGIGRRLFDEMQPQWLRIGGYWYPRGGIPIDVFWQSGPPPQGLWLPDQGVAPYRGRG

SEQ ID NO: 49891 - protein, 156 aa, Sphingopyxis witflariensis
  misc_feature (1)..(156): tr|A0A246JNI8|A0A246JNI8_9SPHN NADPH-dependent 7-cyano- 7-deazaguanine reductase OS=Sphingopyxis witflariensis OX=173675 GN=queF PE=3 SV=1
MSDSSHPPLAPKHLGRSSDLPASPEAAVLDYVPNPRASELYLVRFAAPEFTSLCPVTGQPDFAHLVIDYAPGETIVESKSLKLFLASFRNHAGFHEDCTVGIGRRLFDEMQPRWLRIGGYWYPRGGIPIDVFWQSGAPPEALWLPDQGVASYRGRG

SEQ ID NO: 49892 - protein, 152 aa, Sphingorhabdus contaminans
  misc_feature (1)..(152): tr|A0A553WBK6|A0A553WBK6_9SPHN NADPH-dependent 7-cyano- 7-deazaguanine reductase OS=Sphingorhabdus contaminans OX=1343899 GN=queF PE=3 SV=1
MTEQPKTAFLGQQSTMPSSPENAKLDYVPNPRPGMLYMARFAVPEFTSLCPVTGQPDFAHLVIDYAPDQTIVESKSLKLFLGSFRNHAAFHEDCTVGIGQRLFEEMKPHWLRIGGYWYPRGGIPIDVFWQSGEPPKGLWMPDQGVAPYRGRG

SEQ ID NO: 49893 - protein, 159 aa, Sphingorhabdus marina
  misc_feature (1)..(159): tr|A0A1N6CY34|A0A1N6CY34_9SPHN NADPH-dependent 7-cyano- 7-deazaguanine reductase OS=Sphingorhabdus marina DSM 2 2363 OX=1123272 GN=queF PE=3 SV=1
MTCMTEDDSASPAPRFLGQDSPLPASPEEAVLDYVPNPRAGELYLTRFAAPEFTSLCPVTAQPDFAHLVIDYAPDKTIVESKSLKLFLGSFRNHAAFHEDCTVGIGQRLFDEMQPKWLRIGGYWYPRGGIPIDVFWQSGEPPAGLWIPDQGVAPYRGRG

SEQ ID NO: 49894 - protein, 152 aa, Sphingorhabdus sp.
  misc_feature (1)..(152): tr|A0A2D5DG12|A0A2D5DG12_9SPHN NADPH-dependent 7-cyano- 7-deazaguanine reductase OS=Sphingorhabdus sp. OX=19024 08 GN=queF PE=3 SV=1
  misc_feature (109)..(109): Xaa can be any naturally occurring amino acid
  misc_feature (118)..(118): Xaa can be any naturally occurring amino acid
MAENSKPRFLGQDSPLPSSPDEAELDYVPNPRAGQLYCVRFTAPEFTSLCPVTGQPDFAHLVIDYAPGKTIVESKSLKLFLGSFRNHCAFHEDCTVGIGVRLFEEMQPXWLRIGGYWXPRGGIPIDVFWQSGEAPGGLWVPDTGVASYRGRG

SEQ ID NO: 49895 - protein, 148 aa, Sphingorhabdus sp.
  misc_feature (1)..(148): tr|A0A5C6UQE5|A0A5C6UQE5_9SPHN NADPH-dependent 7-cyano- 7-deazaguanine reductase OS=Sphingorhabdus sp. D-2Q-5-6 OX=2601267 GN=queF PE=3 SV=1
MTPKHLGQASGLPASPDAAELDYVPNPRPDALYLVRFAAPEFTSLCPVTGQPDFAHLVIDYAPGETIVESKSLKLFLGSFRNHAAFHEDCTVGIGQRLFDEMRPQWLRIGGYWYPRGGIPIDVFWQSGKPPEGLWLPGQGVAPYRGRG

SEQ ID NO: 49896 - protein, 152 aa, Sphingorhabdus wooponensis
  misc_feature (1)..(152): tr|A0A426RQS0|A0A426RQS0_9SPHN NADPH-dependent 7-cyano- 7-deazaguanine reductase OS=Sphingorhabdus wooponensis OX=940136 GN=queF PE=3 SV=1
MTDILKPKFLGAQSALPQTPEEAQLDYVPNPRPGTLYLARFAVPEFTSLCPVTAQPDFAHLVIDYAPDATIVESKSLKLFLGSFRNHAAFHEDCTVGIGQRLFSEMKPHWLRIGGYWYPRGGIPIDVFWQSGEPPKGLWIPDQGVQPYRGRG

SEQ ID NO: 49897 - protein, 148 aa, Sphingosinicella ginsenosidimutans
  misc_feature (1)..(148): tr|A0A5C6TRJ5|A0A5C6TRJ5_9SPHN NADPH-dependent 7-cyano- 7-deazaguanine reductase OS=Sphingosinicella ginsenosid imutans OX=1176539 GN=queF PE=3 SV=1
MSLTHLGQPSALPASPEAARLDYVPNPRPGALYLVRFAAPEFTSLCPVTGQPDFAHLVIDYAPGETIVESKSLKLFLAAFRNHGAFHEDVTVGIGQRLAAEMKPLWLRIGGYWYPRGGIPIDVFWQTGDAPAGLWVPDQGVASYRGRG

SEQ ID NO: 49898 - protein, 158 aa, Sphingosinicella microcystinivorans
  misc_feature (1)..(158): tr|A0A495RVZ5|A0A495RVZ5_SPHMI NADPH-dependent 7-cyano- 7-deazaguanine reductase OS=Sphingosinicella microcysti nivorans OX=335406 GN=queF PE=3 SV=1
MAYGRSNAKPMETTHLGKVSALPASPEAAKLDYVPNPRPESRYLVRFAAPEFTSLCPVTGQPDFAHLVIDYVPAARIVESKSLKLFLGSFRNHAAFHEDCTVGIGERLFREMAPHWLRIGGYWYPRGGIPIDVFWQSGAPPADVWVPDQGVAPYRGRG

SEQ ID NO: 49899 - protein, 148 aa, Sphingosinicella sp.
  misc_feature (1)..(148): tr|A0A2P7QYY5|A0A2P7QYY5_9SPHN NADPH-dependent 7-cyano- 7-deazaguanine reductase OS=Sphingosinicella sp. GL-C-1 8 OX=2116704 GN=queF PE=3 SV=1
MDLTHLGQTSALPTSPEDARLDYVPNPRLGRLYLVRFTAPEFTSLCPVTGQPDFAHIVLDYCPGETIVESKSLKLFLHSFRNHCGFHEDVTVGIAERLVEEMRPTWLRIGGYWYPRGGIPIDVFWQTGAPPDGLWVPDQGVASYRGRG

SEQ ID NO: 49900 - protein, 148 aa, Sphingosinicella sp.
  misc_feature (1)..(148): tr|A0A4P6FI71|A0A4P6FI71_9SPHN NADPH-dependent 7-cyano- 7-deazaguanine reductase OS=Sphingosinicella sp. BN1400 58 OX=1892855 GN=queF PE=3 SV=1
MDLTHLGQSSPLPSSPEEARLDYVPNPRLGRLYLVRFTAPEFTSLCPVTGQPDFAHIMIDYCPGETIVESKSLKLFLHSFRNHCGFHEDVTVGIAERLVEEMQPRWLRIGAYWYPRGGIPIDVFWQTGAPPEGLWVPDQGVTSYRGRG

SEQ ID NO: 49901 - protein, 154 aa, Spiribacter aquaticus
  misc_feature (1)..(154): tr|A0A557RF83|A0A557RF83_9GAMM NADPH-dependent 7-cyano- 7-deazaguanine reductase OS=Spiribacter aquaticus OX=19 35996 GN=queF PE=3 SV=1
MSEDPTAGLSQLGSQSPIPTNPEEAVLERVPNPQSDVHYLARFTAPEFTSLCPMTGQPDFAHLVIDYVPGQWLIESKSLKLFLFAFRNHGAFHEDCTVTIARRLADLLEPVWLRIGGYWYPRGGMPIDVFYQTGQPPVDVWIPEQGVAGYRGRG

SEQ ID NO: 49902 - protein, 155 aa, Spiribacter salinus
  misc_feature (1)..(155): tr|R4VKQ1|R4VKQ1_9GAMM NADPH-dependent 7-cyano-7-deazag uanine reductase OS=Spiribacter salinus M19-40 OX=12602 51 GN=queF PE=3 SV=1
MTTDHSHAGLTQLGQDTTLPNSPEEATLERVPNPQAGFGYVARFTAPEFTSICPMTGQPDFAQLVIDYVPGDWLVESKSLKLFLFSFRNHGAFHEDCTMTVARRLVDLLEPHWLRIGGYWYPRGGIPIDVFYQTGEPPADVWIPEQGVAPYRGRG

SEQ ID NO: 49903 - protein, 129 aa, Spiribacter sp.
  misc_feature (1)..(129): tr|A0A2U2N2P3|A0A2U2N2P3_9GAMM NADPH-dependent 7-cyano- 7-deazaguanine reductase OS=Spiribacter sp. E85 OX=2182 432 GN=queF PE=3 SV=1
MTTQPSRALETFPNPAPERDYTIHFSIPEFTCLCPKTGQPDFATLEIDYVPEAHCVELKSLKLYIWSFRDQGAFHEAVTHHILGDLVAATAPRFMRVRGVFNVRGGIYTTVVAEHRAPGWEPPVPVTLP

SEQ ID NO: 49904 - protein, 159 aa, Spirochaeta africana
  misc_feature (1)..(159): tr|H1NB75|H1NB75_SPIAZ NADPH-dependent 7-cyano-7-deazag uanine reductase OS=Spirochaeta africana (strain ATCC 7 00263 / DSM 8902 / Z-7692) OX=889378 GN=queF PE=3 SV=1
MRDDLQNLGLGGKTTYPVEYDPTVLESFENRHQHRDYFVKFNCPEFTSLCPITNQPDFATIYLQYIPDKRMVESKSLKLYLFSFRNSGEFHEDCVNRILDDLVALLEPRYLEVWGKFTPRGGISIDPYANYGQPDTAWQDFAAQRLLMHDLYPEKIDNR

SEQ ID NO: 49905 - protein, 133 aa, Spirochaetaceae bacterium
  misc_feature (1)..(133): tr|A0A3D5WXH6|A0A3D5WXH6_9SPIO NADPH-dependent 7-cyano- 7-deazaguanine reductase OS=Spirochaetaceae bacterium O X=1898206 GN=queF PE=3 SV=1
MAEYKFDILGKKVSEPMRKLETFPTPEHVKKVVLDCDEVTSLCPVTGQPDWETVRIEFEPDKFCIESKSLKLYLWSFREEGAFCESLSARIAQDIFDVCKPRWVKVTVAQKARGGIAITAESRIPDLEQGAGA

SEQ ID NO: 49906 - protein, 130 aa, Spirochaetaceae bacterium
  misc_feature (1)..(130): tr|A0A1W9VMH0|A0A1W9VMH0_9SPIO NADPH-dependent 7-cyano- 7-deazaguanine reductase OS=Spirochaetaceae bacterium 4 572_7 OX=1972456 GN=queF PE=3 SV=1
MKYGEKEIREFDVQKDLEIWPNEHEKEYLIKVTLPEFMGLCPRSGYPDFATIYIEYTPDKFVVELKAIKLYINSFMFRYISHENSANEIYDVIWEKIKPKNLKLIADFKPRGNVHTVIEIDSSKMSKREK

SEQ ID NO: 49907 - protein, 136 aa, Spirochaetae bacterium
  misc_feature (1)..(136): tr|A0A2N1TKQ9|A0A2N1TKQ9_9SPIR NADPH-dependent 7-cyano- 7-deazaguanine reductase OS=Spirochaetae bacterium HGW- Spirochaetae-1 OX=2013832 GN=queF PE=3 SV=1
MPAAEGQIFEFTGPENIKTDFLETIEYEGNPQLITYETDEFSAVCPFSGLPDIARVTIEYIPGKKIVELKSLKYYFISFRNVGIYQEAATDRIYRDLYKCLKPVSLKIKTVYNIRGGILATCVMDSETAEKSGSGK

SEQ ID NO: 49908 - protein, 135 aa, Spirochaetae bacterium
  misc_feature (1)..(135): tr|A0A2N1RSB3|A0A2N1RSB3_9SPIR NADPH-dependent 7-cyano- 7-deazaguanine reductase OS=Spirochaetae bacterium HGW- Spirochaetae-5 OX=2013837 GN=queF PE=3 SV=1
MPSAEGKTFTFDDQSHIDPELLESIEYTGNPQRIKYETGEFSAVCPFSGLPDIAVVEIEYIPAGKIIELKSLKYYFTSYRNVGIYQEAATDKIYKDIWKCIEPSFLSIKTVYNVRGGILATCIMDSDIIKKNESK

SEQ ID NO: 49909 - protein, 119 aa, Spirochaetales bacterium
  misc_feature (1)..(119): tr|A0A2E9KV21|A0A2E9KV21_9SPIR NADPH-dependent 7-cyano- 7-deazaguanine reductase OS=Spirochaetales bacterium OX =2026792 GN=queF PE=3 SV=1
MSKLKTFINKVKNKDYTIDITCAEFTSLCPKTGQPDFAVITISYVPDKLCVELKSFKLYMFSYRNIGEFHEHVTNKILDDFVKACKPKYASITGDFNIRGGIKTVVQAEYKKKIKRKKL

SEQ ID NO: 49910 - protein, 137 aa, Spirochaetes bacterium
  misc_feature (1)..(137): tr|A0A1G3PFJ7|A0A1G3PFJ7_9SPIR NADPH-dependent 7-cyano- 7-deazaguanine reductase OS=Spirochaetes bacterium GWF1 _49_6 OX=1802189 GN=queF PE=3 SV=1
MPTNRESADYSGLQNEIPGLKIDPPLEVIENVYRDRDYWVEYFTDEFTSICPKTGLPDFASLSIQYIPGDYLVEEKALKMYLNGYRNLGIFQENATNKILDDFVAAVKPRYVNVNAEWNKRGGIGTKVEAEWGSPRD

SEQ ID NO: 49911 - protein, 136 aa, Spirochaetes bacterium
  misc_feature (1)..(136): tr|A0A1V5WA53|A0A1V5WA53_9SPIR NADPH-dependent 7-cyano- 7-deazaguanine reductase OS=Spirochaetes bacterium ADur b.Bin218 OX=1852906 GN=queF PE=3 SV=1
MPVAEGRIFEFEDESSIRTDFLEAIEYEGLPQKIKYETDEFSAVCPFSGLPDIAHVEIDYIPNKKIVELKSLKYYFMSFRNVGIYQEQATDRIYRDLHNLLNPEFLSVKTIYNIRGGILATCIMDSETVNKNRIVP

SEQ ID NO: 49912 - protein, 133 aa, Spirochaetia bacterium
  misc_feature (1)..(133): tr|A0A352VWL0|A0A352VWL0_9SPIR NADPH-dependent 7-cyano- 7-deazaguanine reductase OS=Spirochaetia bacterium OX=2 053615 GN=queF PE=3 SV=1
MPETSGRYAGIRFDCEKYHAIKKDLLDTFAYEHSGKNITVTVSSDEFSAVCPWSGLPDYGKITVEYIPGQLILELKSFKYYLCTFRQVGIFQEHAINIIFDDLQNLLKPVFLKIVLSYNTRGGIDTVVTRQAP

SEQ ID NO: 49913 - protein, 273 aa, Spirochaetia bacterium
  misc_feature (1)..(273): tr|A0A354G7M8|A0A354G7M8_9SPIR NADPH-dependent 7-cyano- 7-deazaguanine reductase QueF OS=Spirochaetia bacterium OX=2053615 GN=DC057_18970 PE=4 SV=1
MKSNPLGNKTEYKPYYDKSLLFPIKRDVNRANAQIDSTVFTGYDIWNCYELSYLNRNGVPQVRKCRIVYPSDSVCIVESKSLKLYLGSFIMTQFDGDESVQKIIQTDLQEILLSSFVKVELFDYIATGVIYPIPSNQLLDNLDVVCDVYTVDSSLLSCKKHEESAVYSHWTNLLKTNCPITGQPDWATVQIEYKGVFEVIPQSLLKYIISYREHGDYHETCCEKIFTDLFTILNPEYLFVKCFFTRRGGIDINPCRFYGIGSDGIFNEKHWRQ

SEQ ID NO: 49914 - protein, 273 aa, Spongiibacter sp.
  misc_feature (1)..(273): tr|A0A2E5TMI1|A0A2E5TMI1_9GAMM NADPH-dependent 7-cyano- 7-deazaguanine reductase OS=Spongiibacter sp. OX=202486 0 GN=queF PE=3 SV=1
MSLHGPLGSQVEYPEQYSPDVLHPIPRLDGRSRLNVQGDLPFAGVDIWNAYEMSWLNERGKPLVACGEFHFPADSPNIIESKSFKLYLNSFNQGRWASTDAVQKTLQNDLSAACGAPVTVVLHRPEAWPGGLGIDAMRGQCLDEQDIEMRDYQPDAALLACHDDRQLAQSYYSHLLRSRCPVTGQPDWASVHICCDGPKLDEAALLRYLVSFRQQNDFHEQCVEQIFCDIWRQCQPESLTVYARYLRRGGLDINPWRSSDPSAKPLNSREFRQ

SEQ ID NO: 49915 - protein, 273 aa, Spongiibacter sp.
  misc_feature (1)..(273): tr|A0A2D7WGC0|A0A2D7WGC0_9GAMM NADPH-dependent 7-cyano- 7-deazaguanine reductase OS=Spongiibacter sp. OX=202486 0 GN=queF PE=3 SV=1
MGIHGPLGAQVDYPEHYDPSVLHPIARSEGRQRLGIDGATHFYGVDVWNAFELSWLDHRGKPHVAVGEFHFPAASPFIVESKSFKLYLNSFNQTAFDSEQAVLSALTEDLSQACGAEVKVILHRPEHWDKTLCPESMEGQCLDSLDIDISDYQPSAQLLRCDDGEVVDQQYYSHLLRSRCPVTGQPDWASVSIRCRGPKIDEASLLRYLVSFRQQNDFHEQCVEQIFCDIQRACHTETLTVFARYLRRGGLDINPWRGSSEPAEPLNPRAFRQ

SEQ ID NO: 49916 - protein, 280 aa, Spongiibacteraceae bacterium
  misc_feature (1)..(280): tr|A0A2E7IPQ7|A0A2E7IPQ7_9GAMM NADPH-dependent 7-cyano- 7-deazaguanine reductase OS=Spongiibacteraceae bacteriu m OX=2026793 GN=queF PE=3 SV=1
MTDKTDYSALPLGKSVDYPELYDPSQLQPISRANGRRHLAINLPDMQGSDHWNAYEVSWLDTNGKPQVACAQVVFPASSPNMVESKSFKLYLNSFNQSRFDSAELVCSTLRADLSAVAGAGVTVELLLPEQWHSALLTVPPTGLNLDKFDVSGVASEPEAGLLVSERGSDANLSERATYYSNLFRSRCPVTGQPDWATVEVELTGRQPEPASLLAYLLSYRSNDEFHEQCVERMFADIYQTLRPERLSVYARYTRRGGLDINPLRSTHLDYKPFHRLTRQ

SEQ ID NO: 49917 - protein, 272 aa, Spongiibacteraceae bacterium
  misc_feature (1)..(272): tr|A0A2E2K2Z1|A0A2E2K2Z1_9GAMM NADPH-dependent 7-cyano- 7-deazaguanine reductase OS=Spongiibacteraceae bacteriu m OX=2026793 GN=queF PE=3 SV=1
MSDYRDLPLGKQTDYPDQYDPGQLCPIPRAKGRSLLAAPTLSMQGSDLWNAYEVSWLDASGKPQVACGQFVFPASSPNMVESKSFKLYLNSLNQTRFENPEALAAILEKDLSQVAQAEVAAELLLPDRWSSRFAVAEPEGESLDELPLLQVANEPRVELLQATGERGEKHYFSNLFRSCCPVTGQPDWATVEIALAGELPDASSLLTYLTSFRQNNEFHEQCVERIFSDLSQRFELETLTVFARYTRRGGLDINPLRSSDSSAQPFQRLARQ

SEQ ID NO: 49918 - protein, 165 aa, Sporanaerobacter sp.
  misc_feature (1)..(165): tr|A0A410QGY8|A0A410QGY8_9FIRM NADPH-dependent 7-cyano- 7-deazaguanine reductase OS=Sporanaerobacter sp. JN28 O X=2507161 GN=queF PE=3 SV=1
MSERSEKELKDIKLLGNQGIKYKYDYDPSVLETFENKHQGNDYFVKFNCPEFTSVCPKTGQPDFATIYISYVPGKLMVESKSLKLYFFSFRNHGDFHEDCINMIMKDLINLLDPKYIEVWGKFTPRGGISIDPYCNYGRKGTKWEEVAEKRLFYHDMYPEKVDNR

SEQ ID NO: 49919 - protein, 165 aa, Sporanaerobacter sp.; identical to SEQ ID NO: 49918
  misc_feature (1)..(165): tr|A0A1G4FP43|A0A1G4FP43_9FIRM NADPH-dependent 7-cyano- 7-deazaguanine reductase OS=Sporanaerobacter sp. PP17-6 a OX=1891289 GN=queF PE=3 SV=1

SEQ ID NO: 49920 - protein, 161 aa, Sporobacter termitidis
  misc_feature (1)..(161): tr|A0A1M5VFK0|A0A1M5VFK0_9FIRM NADPH-dependent 7-cyano- 7-deazaguanine reductase OS=Sporobacter termitidis DSM 10068 OX=1123282 GN=queF PE=3 SV=1
MTRENEGLKNLGGKNVQYVFDYDPGLLERFENKHPDNDYFVKLNCPEFTSLCPITGQPDFAAVYISYVPDRYLVESKSLKLYLFSFRNHGDFHEDCMNIVMKDLIGLLDPKYIEVRGKFLPRGGISIDPYCNYGKAGTVWLGTARKRLLMHDMYPEKIDNR

SEQ ID NO: 49921 - protein, 147 aa, Sporolactobacillus inulinus
  misc_feature (1)..(147): tr|A0A4Y1ZAV6|A0A4Y1ZAV6_9BACL NADPH-dependent 7-cyano- 7-deazaguanine reductase OS=Sporolactobacillus inulinus OX=2078 GN=queF PE=3 SV=1
MDRSKEDLTLLGNKGTKYSFDYDPGLLESFQNAHPDRDYFVKFNFPEFTSLCPITHQPDFATLHISYVPAVRMVESKSLKLYLFSFRNHGDFHEDCMNKIADDLIHLMDPKYLEVWGKFTHAAASALIRMSTMASRARAGNRSPLSG

SEQ ID NO: 49922 - protein, 167 aa, Sporolactobacillus inulinus
  misc_feature (1)..(167): tr|A0A0U1QQ24|A0A0U1QQ24_9BACL NADPH-dependent 7-cyano- 7-deazaguanine reductase OS=Sporolactobacillus inulinus CASD OX=1069536 GN=queF PE=3 SV=1
MKGADTMDRSKEDLTLLGNKGTKYSFDYDPGLLESFQNAHPDRDYFVKFNFPEFTSLCPITHQPDFATLHISYVPAVRMVESKSLKLYLFSFRNHGDFHEDCMNKIADDLIHLMDPKYLEVWGKFTPRGGISIDPYVNYGKPGTRWEQVAFERLSRHDMYPEKIDNR

SEQ ID NO: 49923 - protein, 162 aa, Sporolactobacillus laevolacticus
  misc_feature (1)..(162): tr|V6IY96|V6IY96_9BACL NADPH-dependent 7-cyano-7-deazag uanine reductase OS=Sporolactobacillus laevolacticus DS M 442 OX=1395513 GN=queF PE=3 SV=1
MTERKKEGLTLLGNKGTNYIFDYDPELLETFQNAHPNRDYFVKFNFPEFTSLCPITHQPDFATLHISYVPAERMVESKSLKLYLFSYRNHGDFHEDCVNKIADDLIRLMDPKYLEVWGKFLPRGGISIDPYVNYGKKGTRWEEVAFDRLSKHDLYPEKIDNR

SEQ ID NO: 49924 - protein, 162 aa, Sporolactobacillus nakayamae
  misc_feature (1)..(162): tr|A0A1I2QBP3|A0A1I2QBP3_9BACL NADPH-dependent 7-cyano- 7-deazaguanine reductase OS=Sporolactobacillus nakayama e OX=269670 GN=queF PE=3 SV=1
MSDRKNEGLTLLGNKGTTYTFDYDPNLLETFQNQHPERDYFVKFNFPEFTSLCPITHQPDFATLHISYVPAERMVESKSLKLYLFSFRNHGDFHEDCVNNIANDLIQLMDPKYLEVWGKFLPRGGISIDPYVNYGKKGTRWEQVAFDRLSKHDLYPEPIDNR

SEQ ID NO: 49925 - protein, 162 aa, Sporolactobacillus shoreae
  misc_feature (1)..(162): tr|A0A4Z0GRU8|A0A4Z0GRU8_9BACL NADPH-dependent 7-cyano- 7-deazaguanine reductase OS=Sporolactobacillus shoreae OX=1465501 GN=queF PE=3 SV=1
MNDRKKEGLTLLGNKGTQYVFDYDPTLLETFQNAHPDRDYFVKFNFPEFTSLCPITHQPDFATLHISYVPDVRMVESKSLKLYLFSFRNHGDFHEDCVNKIADDLIQLMDPKYLEVWGKFLPRGGISIDPYVNYGKKETRWEEVAFDRLSRHDLYPEKIDNR

SEQ ID NO: 49926 - protein, 162 aa, Sporolactobacillus sp.
  misc_feature (1)..(162): tr|A0A4Q4IP39|A0A4Q4IP39_9BACL NADPH-dependent 7-cyano- 7-deazaguanine reductase OS=Sporolactobacillus sp. THM7 -4 OX=2511170 GN=queF PE=3 SV=1
MTDRKQEGLTQLGNKGTKYIFDYDPGLLETFQNVHKDRDYFVKFNFPEFTSLCPITHQPDFATLHISYVPAERMVESKSLKLYLFSFRNHGDFHEDCINKIADDLIRLMDPKYLEVWGKFLPRGGISIDPYVNYGKEGTAWEKVAFERLTRHDMYPEKIDNR

SEQ ID NO: 49927 - protein, 162 aa, Sporolactobacillus sp.
  misc_feature (1)..(162): tr|A0A4Q4J7Y2|A0A4Q4J7Y2_9BACL NADPH-dependent 7-cyano- 7-deazaguanine reductase OS=Sporolactobacillus sp. THM7 -7 OX=2511172 GN=queF PE=3 SV=1
MTDRKKEGLALLGNKGTKYVFDYDPGVLETFKNAHPDRDYFVKFNFPEFTSLCPITHQPDFATLHISYVPAERMVESKSLKLYLFSFRNHGDFHEDCINKIADDLIKLMDPKYLEVWGKFLPRGGISIDPYVNYGKKGTMWEKVAFDRLTRHDLYPEKIDNR

SEQ ID NO: 49928 - protein, 161 aa, Sporolactobacillus terrae
  misc_feature (1)..(161): tr|A0A410D5S7|A0A410D5S7_9BACL NADPH-dependent 7-cyano- 7-deazaguanine reductase OS=Sporolactobacillus terrae O X=269673 GN=queF PE=3 SV=1
MDRSKEDLTLLGNKGTKYSFDYDPGLLETFQNAHPDRDYFVKFNFPEFTSLCPITHQPDFATLHISYVPAVRMVESKSLKLYLFSFRNHGDFHEDCMNKIADDLIHLMDPKYLEVWGKFTPRGGISIDPYVNYGKPGTRWEQVAFERLSRHDMYPEKIDNR

SEQ ID NO: 49929 - protein, 165 aa, Sporolituus thermophilus
  misc_feature (1)..(165): tr|A0A1G7IRM8|A0A1G7IRM8_9FIRM NADPH-dependent 7-cyano- 7-deazaguanine reductase OS=Sporolituus thermophilus DS M 23256 OX=1123285 GN=queF PE=3 SV=1
MAGRNERELSGVTLLGSQETTYKYQYDPSILEAFVNKHPENDYFVKFNCPEFTSICPKTGQPDFATIYISYVPDKLLVESKSLKLYLMSFRNHGDFHEDCVNIIMKDLIRLLDPKYIEVWGKFTPRGGISIDPYCNYGKPGTKWEQVAEKRLFYHDMYPEKVDNR

SEQ ID NO: 49930 - protein, 165 aa, Sporosarcina globispora
  misc_feature (1)..(165): tr|A0A0M0GK52|A0A0M0GK52_SPOGL NADPH-dependent 7-cyano- 7-deazaguanine reductase OS=Sporosarcina globispora OX= 1459 GN=queF PE=3 SV=1
MSGRRDEELTDITLLGNQGTKYLFEYSPEILEAFDNKHPNRDYFVKFNCPEFTSLCPKTGQPDFATIYISYIPDQKMVESKSLKLYLFSFRNHGDFHEDCMNIIMNDLIQLMDPRYIEVWGKFTPRGGISIDPYCNYGKPGTKYEKMADYRLMNHDLYPETIDNR

SEQ ID NO: 49931 - protein, 162 aa, Sporosarcina luteola
  misc_feature (1)..(162): tr|A0A511Z700|A0A511Z700_9BACL NADPH-dependent 7-cyano- 7-deazaguanine reductase OS=Sporosarcina luteola OX=582 850 GN=queF PE=3 SV=1
MKQSDTKDLTLLGNQNTEYKADYCPEVLETFENQHQENNYFVKFNIPEFTSLCPMTGQPDFAAIYISYIPDVRMVESKSLKLYMFSFRNHGAYHEDCVNLIMNDLIDLMDPRYIEVWAKFTPRGGISIDPYCNYGKPGTMFEQMAVNRLMQHDMYPENINNR

SEQ ID NO: 49932 - protein, 157 aa, Sporosarcina newyorkensis
  misc_feature (1)..(157): tr|F9DVV1|F9DVV1_9BACL NADPH-dependent 7-cyano-7-deazag uanine reductase OS=Sporosarcina newyorkensis 2681 OX=1 027292 GN=queF PE=3 SV=1
MHDLTLLGNQNTVYDYSYNPNLLESIDNLHQGRDYFVKFNCPEFTSLCPQTGQPDFATIYISFIPDRKLVESKSLKLYLFSFRNHGDFHEDCVNSIMMDLVNLLEPRYIEVWGKFTPRGGLSIDPYCNYGKPGSKFEQMAEQRLFQHDLYPEKVDNR

SEQ ID NO: 49933 - protein, 165 aa, Sporosarcina newyorkensis
  misc_feature (1)..(165): tr|A0A1T4XPE8|A0A1T4XPE8_9BACL NADPH-dependent 7-cyano- 7-deazaguanine reductase OS=Sporosarcina newyorkensis O X=759851 GN=queF PE=3 SV=1
MAGRDESTLHDLTLLGNQNTVYDYSYNPNLLESIDNLHQGRDYFVKFNCPEFTSLCPQTGQPDFATIYISFIPDRKLVESKSLKLYLFSFRNHGDFHEDCVNSIMMDLVNLLEPRYIEVWGKFTPRGGLSIDPYCNYGKPGTKFEQMAEQRLFQHDLYPEKVDNR

SEQ ID NO: 49934 - protein, 162 aa, Sporosarcina pasteurii
  misc_feature (1)..(162): tr|A0A380C3Y3|A0A380C3Y3_SPOPA NADPH-dependent 7-cyano- 7-deazaguanine reductase OS=Sporosarcina pasteurii OX=1 474 GN=queF PE=3 SV=1
MRKSDTKDLTLLGNQETTYNYEYDPDILETFNNQHTENDYFVKFNIPEFTSLCPMTGQPDFATIYISYMPDIKMVESKSLKLYIGSFRNHDGFHEDCANTIMKDLIKLMDPKYIEVWAKFTPRGGISIDPYCNYGKPGTIYEDMARERMFKHDMYPETVDNR

SEQ ID NO: 49935 - protein, 165 aa, Sporosarcina psychrophila
  misc_feature (1)..(165): tr|A0A127VX08|A0A127VX08_SPOPS NADPH-dependent 7-cyano- 7-deazaguanine reductase OS=Sporosarcina psychrophila O X=1476 GN=queF PE=3 SV=1
MAGRDEATLTDLTLLGNQNTKYVYEYNPDVLEAVDNMHVDRDYFVKFNCPEFTSLCPMTGQPDFATMYISFVPDKKLVESKALKLYLFSFRNHGDFHEDCVNIIMNDIIKLIEPRYIEVWGKFTPRGGLSIDPYCNYGKPETKYVQMAEHRMMNHDMYPEKVDNR

SEQ ID NO: 49936 - protein, 162 aa, Sporosarcina sp.
  misc_feature (1)..(162): tr|A0A2G5XHL6|A0A2G5XHL6_9BACL NADPH-dependent 7-cyano- 7-deazaguanine reductase OS=Sporosarcina sp. P19 OX=204 8258 GN=queF PE=3 SV=1
MPVNGENNLTLLGNQHTKYNYEYDPHVLETFENQHQSNDYFVKFNIPEFTSLCPITGQPDFATIYISYIPDVKMVESKSLKLYMFSFRNHPGFHEDCANLIMKDLIKLMEPRYIEVWAKFTPRGGISIDPYCNYGKPGTYFEQMAKERLFQHDIYPEKIDNR

SEQ ID NO: 49937 - protein, 165 aa, Sporosarcina sp.
  misc_feature (1)..(165): tr|A0A5B0DE71|A0A5B0DE71_9BACL NADPH-dependent 7-cyano- 7-deazaguanine reductase OS=Sporosarcina sp. ANT_H38 OX =2597358 GN=queF PE=3 SV=1
MAGRDEATLTDLTLLGNQNTKYLYEYNPDVLEAVDNMHVDRDYFVKFNCPEFTSLCPMTGQPDFATMYISFMPDKKLVESKALKLYLFSFRNHGDFHEDCVNIIMNDLIKLIEPRYIEVWGKFTPRGGLSIDPYCNYGKPATKYEQMAEHRMMNHDMYPEKIDNR

SEQ ID NO: 49938 - protein, 148 aa, Stakelama pacifica
  misc_feature (1)..(148): tr|A0A4R6FWX4|A0A4R6FWX4_9SPHN NADPH-dependent 7-cyano- 7-deazaguanine reductase OS=Stakelama pacifica OX=51772 0 GN=queF PE=3 SV=1
MTPKHLGQTSPLPASPEAAELDYVPNPRPGKPYLVRFTAPEFTSLCPVTGQPDFAHLVIDYAPNESIVESKSLKLFLGAFRNHAAFHEDCTVGIGERLFTEMAPHWLRIGGYWYPRGGIPIDVFWQSGPPPAGMWLPDQDVPGYRGRG

SEQ ID NO: 49939 - protein, 141 aa, Stanieria cyanosphaera
  misc_feature (1)..(141): tr|K9XTG2|K9XTG2_STAC7 NADPH-dependent 7-cyano-7-deazag uanine reductase OS=Stanieria cyanosphaera (strain ATCC 29371 / PCC 7437) OX=111780 GN=queF PE=3 SV=1
MTQSTASNVKYGERQIAEGELITFPNPRIGRTYEVNITLPEFTCKCPFSGYPDFATIYIAYCPNEKVVELKALKLYINSYRDRYISHEEVINQILDDFVAACDPLKLTIKGDFNPRGNVHTVIEVNHCKDGSSENPSQRKS

SEQ ID NO: 49940 - protein, 137 aa, Stanieria sp.
  misc_feature (1)..(137): tr|A0A140K0I3|A0A140K0I3_9CYAN NADPH-dependent 7-cyano- 7-deazaguanine reductase OS=Stanieria sp. NIES-3757 OX= 1807358 GN=queF PE=3 SV=1
MTQSTASNVKYGERNIAEGELITFPNPRIGRTYEVNITLPEFTCKCPFSGYPDFATIYITYCPNEKVVELKALKLYINSYRDRYISHEEVINQILDDFVAACDPLKATIKGDFNPRGNVHTVIEVNHYKDERSEIPS

SEQ ID NO: 49941 - protein, 166 aa, Staphylococcus agnetis
  misc_feature (1)..(166): tr|A0A085UCA4|A0A085UCA4_9STAP NADPH-dependent 7-cyano- 7-deazaguanine reductase OS=Staphylococcus agnetis OX=9 85762 GN=queF PE=3 SV=1
MTEGRSKDELQDITLLGNQNNKYEFDYRPDVLESFDNKHQGRDYFVKFNCPEFTSLCPITGQPDFATIYISYIPNVKMVESKSLKLYLFSFRNHGDFHEDCMNIIMNDLIDLMDPHYIEVWGKFTPRGGISIDPYTNYGRPNSKYEKMAEHRLMNHDMYPENIDNR

SEQ ID NO: 49942 - protein, 166 aa, Staphylococcus argensis
  misc_feature (1)..(166): tr|A0A2K4FDH7|A0A2K4FDH7_9STAP NADPH-dependent 7-cyano- 7-deazaguanine reductase OS=Staphylococcus argensis OX= 1607738 GN=queF PE=3 SV=1
MAQGRNQEELEDITLLGNQNNQYDFDYRPDVLETFDNKHQGRDYFVKFNCPEFTSLCPITGQPDFATIYISYIPDVKMVESKSLKLYLFSFRNHGDFHEDCMNIIMNDLIDLMDPHYIEVWGKFTPRGGISIDPYTNYGRPNTKYERMAEHRLMNHDLYPEKVDNR

SEQ ID NO: 49943 - protein, 166 aa, Staphylococcus argenteus
  misc_feature (1)..(166): tr|A0A380BR87|A0A380BR87_9STAP NADPH-dependent 7-cyano- 7-deazaguanine reductase OS=Staphylococcus argenteus OX =985002 GN=queF PE=3 SV=1
MAQGRQQDELQDITLLGNQDNTYNFDYRPDVLESFDNKHQGRDYFVKFNCPEFTSLCPITGQPDFATIYISYIPNIKMVESKSLKLYLFSFRNHGDFHEDCMNIIMNDLIELMDPHYIEVWGKFTPRGGISIDPYTNYGRPNSKYEKMAEHRLMNHDLYPEKIDNR

SEQ ID NO: 49944 - protein, 166 aa, Staphylococcus arlettae
  misc_feature (1)..(166): tr|A0A380CN04|A0A380CN04_9STAP NADPH-dependent 7-cyano- 7-deazaguanine reductase OS=Staphylococcus arlettae OX= 29378 GN=queF PE=3 SV=1
MTEGRKSDELQDITLLGNQNNKYDFDYRPDVLESFDNKHPGRDYFVKFNCPEFTSLCPITGQPDFATIYISYIPNIKMVESKSLKLYLFSFRNHGDFHEDCMNIIMNDLIDLMDPHYIEVWGKFTPRGGISIDPYTNYGRPDTKYATMAEHRLMNHDLYPEKIDNR

SEQ ID NO: 49945 - protein, 166 aa, Staphylococcus arlettae
  misc_feature (1)..(166): tr|A0A5F0TNL9|A0A5F0TNL9_9STAP NADPH-dependent 7-cyano- 7-deazaguanine reductase OS=Staphylococcus arlettae OX= 29378 GN=queF PE=3 SV=1
MTEGRKSDELQYITLLGNQNNKYDFDYRPDVLESFDNKHPGRDYFVKFNCPEFTSLCPITGQPDFATIYISYIPNIKMVESKSLKLYLFSFRNHGDFHEDCMNIIMNDLIDLMDPHYIEVWGKFTPRGGISIDPYTNYGRPDTKYATMAEHRLMNHDLYPEKIDNR

SEQ ID NO: 49946 - protein, 166 aa, Staphylococcus aureus
  misc_feature (1)..(166): tr|A0A033V0R7|A0A033V0R7_STAAU NADPH-dependent 7-cyano- 7-deazaguanine reductase OS=Staphylococcus aureus C0673 OX=1413510 GN=queF PE=3 SV=1
MSEGRNKDELKDITLLGNQNNQYHDQYKPEVLEVFDNKHQGRDYFVKFNCPEFTSLCPITGQPDFATIYISYIPNVKMVESKSLKLYLFSFRNHGDFHEDCMNVIMNDLIELMDPHYIEVLGKFTPRGGISIDPYTNYGRPGSKYEKMAEYRMMNHDLYPENIDNR

SEQ ID NO: 49947 - protein, 166 aa, Staphylococcus aureus
  misc_feature (1)..(166): sp|Q6GIR3|QUEF_STAAR NADPH-dependent 7-cyano-7-deazagua nine reductase OS=Staphylococcus aureus (strain MRSA252 ) OX=282458 GN=queF PE=3 SV=1
MAHGRQQDELQDITLLGNQDNTYNFDYRPDVLESFDNKHQGRDYFVKFNCPEFTSLCPITGQPDFATIYISYIPNVKMVESKSLKLYLFSFRNHGDFHEDCMNIIMNDLIELMDPHYIEVWGKFTPRGGISIDPYTNYGRPNSKYEQMAEHRLMNHDLYPEKIDNR

SEQ ID NO: 49948 - protein, 166 aa, Staphylococcus auricularis
  misc_feature (1)..(166): tr|A0A2K4C5N4|A0A2K4C5N4_9STAP NADPH-dependent 7-cyano- 7-deazaguanine reductase OS=Staphylococcus auricularis OX=29379 GN=queF PE=3 SV=1
MAEGRKKEELEDITLLGNQNNQYDFDYRPDVLETFENKHQGRDYFVKFNCPEFTSLCPITGQPDFATIYISYIPNIKMVESKSLKLYLFSFRNHGDFHEDCMNIIMNDLIDLMDPHYIEVWGKFTPRGGISIDPYTNYGRPDTKYEKMAEYRLMQHDLYPEHVDNR

SEQ ID NO: 49949 - protein, 166 aa, Staphylococcus capitis
  misc_feature (1)..(166): tr|A0A0U1E8A1|A0A0U1E8A1_STACP NADPH-dependent 7-cyano- 7-deazaguanine reductase OS=Staphylococcus capitis OX=2 9388 GN=queF PE=3 SV=1
MAQGRQKNELQDITLLGNQNNTYDFNYRPDVLETFDNKHQGRDYFVKFNCPEFTSLCPITGQPDFATIYISYIPNVKMVESKSLKLYLFSFRNHGDFHEDCMNIIMNDLIELMDPHYIEVWGKFTPRGGISIDPYTNYGRPNSKYEKMAEHRLMNHDMYPEKIDNR

SEQ ID NO: 49950 - protein, 166 aa, Staphylococcus capitis
  misc_feature (1)..(166): tr|A0A4Q9WIG7|A0A4Q9WIG7_STACP NADPH-dependent 7-cyano- 7-deazaguanine reductase OS=Staphylococcus capitis OX=2 9388 GN=queF PE=3 SV=1
MAQGRQKDELQDITLLGNQNNTYDFNYRPDVLETFDNKHQGRDYFVKFNCPEFTSLCPITGQPDFATIYISYIPNVKMVESKSLKLYLFSFRNHGDFHEDCMNIIMNDLIELMDPHYIEVWGKFTPRGGISIDPYTNYGRPNSKYEKMAEHRLMNHDMYPEKIDNR

SEQ ID NO: 49951 - protein, 166 aa, Staphylococcus caprae
  misc_feature (1)..(166): tr|C5QQ97|C5QQ97_9STAP NADPH-dependent 7-cyano-7-deazag uanine reductase OS=Staphylococcus caprae M23864:W1 OX= 525378 GN=queF PE=3 SV=1
MEQGRQKDELQDITLLGNQNNTYDFDYRPDVLETFDNKHQGRDYFVKFNCPEFTSLCPITGQPDFATIYISYIPNIKMVESKSLKLYLFSFRNHGDFHEDCMNIIMNDLIELMDPHYIEVWGKFTPRGGISIDPYTNYGRPNSKYEKMAEHRLMNHDMYPEKIDNR

SEQ ID NO: 49952 - protein, 167 aa, Staphylococcus carnosus
  misc_feature (1)..(167): tr|A0A380F9S0|A0A380F9S0_STACA NADPH-dependent 7-cyano- 7-deazaguanine reductase OS=Staphylococcus carnosus sub sp. utilis OX=147449 GN=queF PE=3 SV=1
MSNEGRKKEELEDITLLGNQNNTYNFDYRPDVLETFENKHQGRDYFVKFNCPEFTSLCPITGQPDFATIYISYIPNIKMVESKSLKLYLFSFRNHGDFHEDCMNIIMNDLIDLMDPHYIEVWGKFTPRGGISIDPYTNYGRPDSKYEQMAEYRMMNHDLYPETIDNR

SEQ ID NO: 49953 - protein, 167 aa, Staphylococcus carnosus; identical to SEQ ID NO: 49952
  misc_feature (1)..(167): tr|B9DK26|B9DK26_STACT NADPH-dependent 7-cyano-7-deazag uanine reductase OS=Staphylococcus carnosus (strain TM3 00) OX=396513 GN=queF PE=3 SV=1

SEQ ID NO: 49954 - protein, 166 aa, Staphylococcus chromogenes
  misc_feature (1)..(166): tr|A0A2T4M0M3|A0A2T4M0M3_STACR NADPH-dependent 7-cyano- 7-deazaguanine reductase OS=Staphylococcus chromogenes OX=46126 GN=queF PE=3 SV=1
MTEGRSKEELQDITLLGNQNNKYEFDYRPDVLETFDNKHQGRDYFVKFNCPEFTSLCPITGQPDFATIYISYIPNIKMVESKSLKLYLFSFRNHGDFHEDCMNIIMNDLIDLMDPHYIEVWGKFTPRGGISIDPYTNYGRPNTKYEAMAEHRLMNHDMYPEKIDNR

SEQ ID NO: 49955 - protein, 166 aa, Staphylococcus cohnii; identical to SEQ ID NO: 44471
  misc_feature (1)..(166): tr|A0A2T4LTI8|A0A2T4LTI8_9STAP NADPH-dependent 7-cyano- 7-deazaguanine reductase OS=Staphylococcus cohnii OX=29 382 GN=queF PE=3 SV=1

SEQ ID NO: 49956 - protein, 166 aa, Staphylococcus cohnii; identical to SEQ ID NO: 44471
  misc_feature (1)..(166): tr|A0A0M2P3Z0|A0A0M2P3Z0_STACC NADPH-dependent 7-cyano- 7-deazaguanine reductase OS=Staphylococcus cohnii subsp . cohnii OX=74704 GN=queF PE=3 SV=1

SEQ ID NO: 49957 - protein, 167 aa, Staphylococcus condimenti
  misc_feature (1)..(167): tr|A0A143PAC8|A0A143PAC8_9STAP NADPH-dependent 7-cyano- 7-deazaguanine reductase OS=Staphylococcus condimenti O X=70255 GN=queF PE=3 SV=1
MSNEGRKKEELEDITLLGNQNNTYNFDYRPDVLETFDNKHQGRDYFVKFNCPEFTSLCPITGQPDFATIYISYIPNVKMVESKSLKLYLFSFRNHGDFHEDCMNIIMNDLIDLMDPHYIEVWGKFTPRGGISIDPYTNYGRPDSKYEQMAEYRMMNHDLYPETIDNR

SEQ ID NO: 49958 - protein, 166 aa, Staphylococcus delphini
  misc_feature (1)..(166): tr|A0A447Z0M3|A0A447Z0M3_9STAP NADPH-dependent 7-cyano- 7-deazaguanine reductase OS=Staphylococcus delphini OX= 53344 GN=queF PE=3 SV=1
MTEGRTKDELQDITLLGNQNNTYNFDYRPDVLETFDNKHQNRDYFVKFNCPEFTSLCPITGQPDFATIYISYIPNVKMVESKSLKLYLFSFRNHGDFHEDCMNIIMNDLIALMDPHYIEVWGKFTPRGGISIDPYTNYGRPNSKYETMAEHRLMNHDMYPEKIDNR

SEQ ID NO: 49959 - protein, 166 aa, Staphylococcus delphini
  misc_feature (1)..(166): tr|A0A2A4HCP6|A0A2A4HCP6_9STAP NADPH-dependent 7-cyano- 7-deazaguanine reductase OS=Staphylococcus delphini OX= 53344 GN=queF PE=3 SV=1
MTEGRTKDELQDITLLGNQNNTYNFDYRPDVLETFVNKHQNRDYFVKFNCPEFTSLCPITGQPDFATIYISYIPNVKMVESKSLKLYLFSFRNHGDFHEDCMNIIMNDLIELMDPHYIEVWGKFTPRGGISIDPYTNYGRPNSKYETMAEHRLMNHDMYPEKIDNR

SEQ ID NO: 49960 - protein, 166 aa, Staphylococcus devriesei
  misc_feature (1)..(166): tr|A0A2K4DUU2|A0A2K4DUU2_9STAP NADPH-dependent 7-cyano- 7-deazaguanine reductase OS=Staphylococcus devriesei OX =586733 GN=queF PE=3 SV=1
MTQGRQKEDLQDITLLGNQNNKYEFDYTPEVLETFENKHQGRDYFVKFNCPEFTSLCPITGQPDFATIYISYIPNIKMVESKSLKLYLFSFRNHGDFHEDCMNIIMNDLIQLMDPHYIEVWGKFTPRGGISIDPYTNYGRPNSKYEKMAEHRLMNHDMYPEKIDNR

SEQ ID NO: 49961 - protein, 166 aa, Staphylococcus devriesei
  misc_feature (1)..(166): tr|A0A2T4KBU0|A0A2T4KBU0_9STAP NADPH-dependent 7-cyano- 7-deazaguanine reductase OS=Staphylococcus devriesei OX =586733 GN=queF PE=3 SV=1
MTQGRQKEDLQDITLLGNQNNKYEFDYTPEVLETFENKHQGRDYFVKFNCPEFTSLCPITGQPDFATIYISYIPNVKMVESKSLKLYLFSFRNHGDFHEDCMNIIMNDLIQLMDPHYIEVWGKFTPRGGISIDPYTNYGRPDSKYEKMAEHRLMNHDMYPEKIDNR

SEQ ID NO: 49962 - protein, 166 aa, Staphylococcus edaphicus
  misc_feature (1)..(166): tr|A0A2C6WHU3|A0A2C6WHU3_9STAP NADPH-dependent 7-cyano- 7-deazaguanine reductase OS=Staphylococcus edaphicus OX =1955013 GN=queF PE=3 SV=1
MSEGRNKQELEDVTLLGNQNNKYDFDYRPDVLESFDNKHQGRDYFVKFNCPEFTSLCPITGQPDFATIYISYIPNIKMVESKSLKLYLFSFRNHGDFHEDCMNIIMNDLIELMDPHYIEVWGKFTPRGGISIDPYTNYGRPNSKYEKMAEHRLMNHDLYPEKIDNR

SEQ ID NO: 49963 - protein, 166 aa, Staphylococcus epidermidis
  misc_feature (1)..(166): tr|D4FNG2|D4FNG2_STAEP NADPH-dependent 7-cyano-7-deazag uanine reductase OS=Staphylococcus epidermidis M23864:W 2(grey) OX=525375 GN=queF PE=3 SV=1
MTQGRQKDELKDITLLGNQNNTYEFDYRPEVLETFDNKHQGRDYFVKFNCPEFTSLCPITGQPDFATIYISYIPNIKMVESKSLKLYLFSFRNHGDFHEDCMNIIMNDLINLMDPHYIEVWGKFTPRGGISIDPYTNYGRPDTKYEKMAEHRLMNHDMYPEKIDNR

SEQ ID NO: 49964 - protein, 166 aa, Staphylococcus epidermidis; identical to SEQ ID NO: 49963
  misc_feature (1)..(166): sp|Q8CTG5|QUEF_STAES NADPH-dependent 7-cyano-7-deazagua nine reductase OS=Staphylococcus epidermidis (strain AT CC 12228) OX=176280 GN=queF PE=3 SV=1

SEQ ID NO: 49965 - protein, 166 aa, Staphylococcus equorum
  misc_feature (1)..(166): tr|A0A3S0NJB1|A0A3S0NJB1_9STAP NADPH-dependent 7-cyano- 7-deazaguanine reductase OS=Staphylococcus equorum subs p. equorum OX=29383 GN=queF PE=3 SV=1
MTQGRQKGELNDISLLGNQNNQYDFDYRPNILETFDNKHQGHDYFVKFNCPEFTSLCPITGQPDFATIYISYIPNIKMIESKSLKLYLFSFRNHGDFHEDCMNIIMNDLINLMNPHYIEVWGKFTPRGGISIDPYTNYGRPGSKYEKMAEHRLMNHDMYPENIDNR

SEQ ID NO: 49966 - protein, 166 aa, Staphylococcus equorum
  misc_feature (1)..(166): tr|A0A1E5TIP3|A0A1E5TIP3_9STAP NADPH-dependent 7-cyano- 7-deazaguanine reductase OS=Staphylococcus equorum OX=2 46432 GN=queF PE=3 SV=1
MTEGRNKEELEDITLLGNQNNKYDFDYRPDVLESFDNKHPGRDYFVKFNCPEFTSLCPITGQPDFATIYISYIPNIKMVESKSLKLYLFSFRNHGDFHEDCMNIIMNDLIDLMDPHYIEVWGKFTPRGGISIDPYTNYGRPDSKYEKMAEHRLMNHDLYPEKIDNR

SEQ ID NO: 49967 - protein, 166 aa, Staphylococcus felis
  misc_feature (1)..(166): tr|A0A2P1MJP6|A0A2P1MJP6_9STAP NADPH-dependent 7-cyano- 7-deazaguanine reductase OS=Staphylococcus felis OX=461 27 GN=queF PE=3 SV=1
MAEGRSKEELQDITLLGNQNNTYNFDYRPDVLETFDNKHQGRDYFVKFNCPEFTSLCPITGQPDFATIYISYIPNIKMVESKSLKLYLFSFRNHGDFHEDCMNIIMNDLIDLMDPHYIEVWGKFTPRGGISIDPYTNYGRPDTKYEKIAEHRLMNHDLYPEKIDNR

SEQ ID NO: 49968 - protein, 166 aa, Staphylococcus fleurettii
  misc_feature (1)..(166): tr|A0A380FUL6|A0A380FUL6_9STAP NADPH-dependent 7-cyano- 7-deazaguanine reductase OS=Staphylococcus fleurettii O X=150056 GN=queF PE=3 SV=1
MSEGRNKEELKDITLLGNQNNQYHDQYKPEVLEVFDNKHQGRDYFVKFNCPEFTSLCPITGQPDFATIYISYIPNVKMVESKSLKLYLFSFRNHGDFHEDCMNVIMNDLIELMDPHYIEVLGKFTPRGGISIDPYTNYGRPDSKYEKMAEYRMMNHDLYPENIDNR

SEQ ID NO: 49969 - protein, 166 aa, Staphylococcus fleurettii
  misc_feature (1)..(166): tr|A0A431Z658|A0A431Z658_9STAP NADPH-dependent 7-cyano- 7-deazaguanine reductase OS=Staphylococcus fleurettii O X=150056 GN=queF PE=3 SV=1
MPKGRSKEELKDITLLGNQNNTYDFDYRPDVLETFDNKHQGRDYFVKFNCPEFTSLCPITGQPDFATIYISYIPNVKMVESKSLKLYLFSFRNHGDFHEDCMNIIMNDLIELMDPHYIEVWGKFTPRGGISIDPYTNYGRPDTKYEKMADYRMMNHDLYPETIDNR

SEQ ID NO: 49970 - protein, 162 aa, Staphylococcus gallinarum
  misc_feature (1)..(162): tr|A0A380FCM4|A0A380FCM4_STAGA NADPH-dependent 7-cyano- 7-deazaguanine reductase OS=Staphylococcus gallinarum O X=1293 GN=queF PE=3 SV=1
MAEGRNKDELQDITLLGNQNNQYDFDYRPDVLESFDNKHQGRDYFVKFNCPEFTSLCPITGQPDFATIYISYIPNIKMVESKSLKLYLFSFRNHGDFHEDCMNIIMNDLIELMDPHYIEVWGKFTPRGGISIDPYTNYGRPNSKYEKMAEHRLMNHDLYPEK

SEQ ID NO: 49971 - protein, 166 aa, Staphylococcus gallinarum
  misc_feature (1)..(166): tr|A0A2T4SWC4|A0A2T4SWC4_STAGA NADPH-dependent 7-cyano- 7-deazaguanine reductase OS=Staphylococcus gallinarum O X=1293 GN=queF PE=3 SV=1
MAEGRNKDELQDITLLGNQNNQYDFDYRPDVLESFDNKHQGRDYFVKFNCPEFTSLCPITGQPDFATIYISYIPNVKMVESKSLKLYLFSFRNHGDFHEDCMNIIMNDLIELMDPHYIEVWGKFTPRGGISIDPYTNYGRPNSKYEKMAEHRLMNHDLYPEKIDNR

SEQ ID NO: 49972 - protein, 166 aa, Staphylococcus haemolyticus
  misc_feature (1)..(166): tr|A0A2A1K5D1|A0A2A1K5D1_STAHA NADPH-dependent 7-cyano- 7-deazaguanine reductase OS=Staphylococcus haemolyticus OX=1283 GN=queF PE=3 SV=1
MTQGRQKEELQDITLLGNQNNKYEFDYTPEVLETFDNKHQGRDYFVKFNCPEFTSLCPITGQPDFATIYISYIPNIKMVESKSLKLYLFSFRNHGDFHEDCMNIIMNDLIDLMDPHYIEVWGKFTPRGGISIDPYTNYGRPNSKYEKMAEHRLMNHDLYPEKIDNR

SEQ ID NO: 49973 - protein, 166 aa, Staphylococcus haemolyticus; identical to SEQ ID NO: 49972
  misc_feature (1)..(166): sp|Q4L4F1|QUEF_STAHJ NADPH-dependent 7-cyano-7-deazagua nine reductase OS=Staphylococcus haemolyticus (strain J CSC1435) OX=279808 GN=queF PE=3 SV=1

SEQ ID NO: 49974 - protein, 166 aa, Staphylococcus hominis
  misc_feature (1)..(166): tr|A0A1L8Y4P7|A0A1L8Y4P7_STAHO NADPH-dependent 7-cyano- 7-deazaguanine reductase OS=Staphylococcus hominis OX=1 290 GN=queF PE=3 SV=1
MTQGRNKEELQDITLLGNQNNKYEFDYTPQVLETFDNKHQGRDYFVKFNCPEFTSLCPITGQPDFATIYISYIPNIKMVESKSLKLYLFSFRNHGDFHEDCMNIIMNDLIDLMDPHYIEVWGKFTPRGGISIDPYTNYGRPNSKYEKMAEHRLMNHDMYPEKIDNR

SEQ ID NO: 49975 - protein, 166 aa, Staphylococcus hyicus
  misc_feature (1)..(166): tr|A0A0A8HSR3|A0A0A8HSR3_STAHY NADPH-dependent 7-cyano- 7-deazaguanine reductase OS=Staphylococcus hyicus OX=12 84 GN=queF PE=3 SV=1
MTEGRSKDELQDITLLGNQNNNYEFDYRPDVLESFDNKHQGRDYFVKFNCPEFTSLCPITGQPDFASIYISYIPNVKMVESKSLKLYLFSFRNHGDFHEDCMNIIMNDLIELMDPHYIEVWGKFTPRGGISIDPYTNYGRPNSKYEKMAEHRLMNHDMYPENIDNR

SEQ ID NO: 49976 - protein, 166 aa, Staphylococcus hyicus
  misc_feature (1)..(166): tr|A0A4U9ZNJ9|A0A4U9ZNJ9_STAHY NADPH-dependent 7-cyano- 7-deazaguanine reductase OS=Staphylococcus hyicus OX=12 84 GN=queF PE=3 SV=1
MAHGRQQDELQDITLLGNQNNTYNFDYRPDVLESFDNKHQGRDYFVKFNCPEFTSLCPITGQPDFATIYISYIPNVKMVESKSLKLYLFSFRNHGDFHEDCMNIIMNDLIELMDPHYIEVWGKFTPRGGISIDPYTNYGRPNSKYEKMAEHRLMNHDLYPEKIDNR

SEQ ID NO: 49977 - protein, 166 aa, Staphylococcus intermedius
  misc_feature (1)..(166): tr|A0A380GB51|A0A380GB51_STAIN NADPH-dependent 7-cyano- 7-deazaguanine reductase OS=Staphylococcus intermedius NCTC 11048 OX=1141106 GN=queF PE=3 SV=1
MAEGRSKDELQDITLLGNQNNTYNFDYRPDVLETFDNKHQNRDYFVKFNCPEFTSLCPITGQPDFATIYISYIPNIKMVESKSLKLYLFSFRNHGDFHEDCMNIIMNDLIDLMDPHYIEVWGKFTPRGGISIDPYTNYGRPNSKYEKMAEHRLMNHDMYPEKIDNR

SEQ ID NO: 49978 - protein, 166 aa, Staphylococcus kloosii
  misc_feature (1)..(166): tr|A0A512QFJ2|A0A512QFJ2_9STAP NADPH-dependent 7-cyano- 7-deazaguanine reductase OS=Staphylococcus kloosii OX=2 9384 GN=queF PE=3 SV=1
MAQGRNNEELQDITLLGNQNNKYDFDYTPEVLESFDNKHQGRDYFVKFNCPEFTSLCPITGQPDFATIYISYIPNIKMVESKSLKLYLFSFRNHGDFHEDCMNIIMNDLIDLMDPHYIEVWGKFTPRGGISIDPYTNYGRPNSKYEQMAEHRLMNHDLYPEKIDNR

SEQ ID NO: 49979 - protein, 166 aa, Staphylococcus kloosii
  misc_feature (1)..(166): tr|A0A151A6P9|A0A151A6P9_9STAP NADPH-dependent 7-cyano- 7-deazaguanine reductase OS=Staphylococcus kloosii OX=2 9384 GN=queF PE=3 SV=1
MAQGRNNEELQDITLLGNQYNKYDFDYTPEVLESFDNKHQGRDYFVKFNCPEFTSLCPITGQPDFATIYISYIPNIKMVESKSLKLYLFSFRNHGDFHEDCMNIIMNDLIDLMDPHYIEVWGKFTPRGGISIDPYTNYGRPNSKYEQMAEHRLMNHDLYPEKIDNR

SEQ ID NO: 49980 - protein, 166 aa, Staphylococcus lentus
  misc_feature (1)..(166): tr|A0A178NZZ7|A0A178NZZ7_STALE NADPH-dependent 7-cyano- 7-deazaguanine reductase OS=Staphylococcus lentus OX=42 858 GN=queF PE=3 SV=1
MSEGRKKEDLKDITLLGNQNNQYYDQYNPEVLEVFDNKHQGRDYFVKFNCPEFTSLCPITGQPDFAAIYISYIPNVKMVESKSLKLYLFSFRNHGDFHEDCMNVIMNDLIELMDPHYIEVLGKFTPRGGISIDPYTNYGRPGTKYEEMAEYRMMNHDLYPENIDNR

SEQ ID NO: 49981 - protein, 166 aa, Staphylococcus lentus
  misc_feature (1)..(166): tr|A0A4Y9KE95|A0A4Y9KE95_STALE NADPH-dependent 7-cyano- 7-deazaguanine reductase OS=Staphylococcus lentus OX=42 858 GN=queF PE=3 SV=1
MSEGRKKEDLKDITLLGNQNNQYYDQYNPEVLEVFDNKHQGRDYFVKFNCPEFTSLCPITGQPDFAAIYISYIPNVKMVESKSLKLYLFSFRNHGDFHEDCMNVIMNDLIELMDPHYIEVLGKFTPRGGISIDPYTNYGRLGTKYEEMAEYRMMNHDLYPENIDNR

SEQ ID NO: 49982 - protein, 166 aa, Staphylococcus lugdunensis
  misc_feature (1)..(166): tr|A0A292DHM0|A0A292DHM0_STALU NADPH-dependent 7-cyano- 7-deazaguanine reductase OS=Staphylococcus lugdunensis OX=28035 GN=queF PE=3 SV=1
MTQGRQEEEMKDITLLGNQNNNYQFDYRPDVLETFVNKHQGRDYFVKFNCPEFTSLCPITGQPDFATIYISYIPNVKMVESKSLKLYLFSFRNHGDFHEDCMNIIMNDLIELMDPHYIEVWGKFTPRGGISIDPYTNYGRPDTKYARMAEHRLMNHDMYPEKIDNR

SEQ ID NO: 49983 - protein, 166 aa, Staphylococcus lugdunensis
  misc_feature (1)..(166): tr|A0A133Q1G5|A0A133Q1G5_STALU NADPH-dependent 7-cyano- 7-deazaguanine reductase OS=Staphylococcus lugdunensis OX=28035 GN=queF PE=3 SV=1
MTQGRQEEEMKDITLLGNQNNHYQFDYRPDVLETFVNKHQGRDYFVKFNCPEFTSLCPITGQPDFATIYISYIPNVKMVESKSLKLYLFSFRNHGDFHEDCMNIIMNDLIELMDPHYIEVWGKFTPRGGISIDPYTNYGRPDTKYARMAEHRLMNHDMYPEKIDNR

SEQ ID NO: 49984 - protein, 166 aa, Staphylococcus lutrae
  misc_feature (1)..(166): tr|A0A1W6BMT9|A0A1W6BMT9_9STAP NADPH-dependent 7-cyano- 7-deazaguanine reductase OS=Staphylococcus lutrae OX=15 5085 GN=queF PE=3 SV=1
MTEGRSKSELQDITLLGNQDNTYHFDYRPDILETFENKHQNRDYFVKFNCPEFTSLCPITGQPDFATIYISYIPNVKMVESKSLKLYLFSFRNHGDFHEDCMNIIMNDLIELMDPHYIEVWGKFTPRGGISIDPYTNYGRPNSKYEKMAEYRLMNHDMYPEKIDNR

SEQ ID NO: 49985 - protein, 164 aa, Staphylococcus massiliensis
  misc_feature (1)..(164): tr|K9AMC8|K9AMC8_9STAP NADPH-dependent 7-cyano-7-deazag uanine reductase OS=Staphylococcus massiliensis S46 OX= 1229783 GN=queF PE=3 SV=1
MSREKHELDDLTLLGNKNNTYHFDYDPKLLESFDNKHPNRDYFVKFNCPEFTSLCPITGQPDFATIYISYIPNIKMVESKSLKLYLFSFRNHGDFHEDCMNIIMNDLIDLMDPHYIEVWGKFTPRGGISIDPYTNYGKPGTKYEKMAEHRLMNHDLYPEKIDNR

SEQ ID NO: 49986 - protein, 166 aa, Staphylococcus microti
  misc_feature (1)..(166): tr|A0A0D6XSU3|A0A0D6XSU3_9STAP NADPH-dependent 7-cyano- 7-deazaguanine reductase OS=Staphylococcus microti OX=5 69857 GN=queF PE=3 SV=1
MSEGRSKEDLQDITLLGNQNNTYNFDYRPDVLESFDNKHQGRDYFVKFNCPEFTSLCPITGQPDFATIYISYIPNVKMVESKSLKLYLFSFRNHGDFHEDCMNIIMNDLIELMDPHYIEVWGKFTPRGGISIDPYTNYGRPNSKYEKMAEYRMMNHDLYPENIDNR

SEQ ID NO: 49987 - protein, 166 aa, Staphylococcus muscae
  misc_feature (1)..(166): tr|A0A240BWC6|A0A240BWC6_9STAP NADPH-dependent 7-cyano- 7-deazaguanine reductase OS=Staphylococcus muscae OX=12 94 GN=queF PE=3 SV=1
MSEGRSKEDLQDITLLGNQNNTYNFDYRPDVLESFDNKHQGRDYFVKFNCPEFTSLCPITGQPDFATIYISYIPNVKMVESKSLKLYLFSFRNHGDFHEDCMNIIMNDLIDLMDPHYIEVWGKFTPRGGISIDPYTNYGRPNSKYEKMAEYRMMNHDLYPETIDNR

SEQ ID NO: 49988 - protein, 72 aa, Staphylococcus nepalensis
  misc_feature (1)..(72): tr|A0A2T4S6V2|A0A2T4S6V2_9STAP NADPH-dependent 7-cyano- 7-deazaguanine reductase QueF (Fragment) OS=Staphylococ cus nepalensis OX=214473 GN=BUZ61_14075 PE=3 SV=1
MSQQGRSKEDLEDLTLLGNQNNQYDFNYRPDVLESFDNKHQGRDYFVKFNCPEFTSLCPITGQPDFATIYIS

SEQ ID NO: 49989 - protein, 166 aa, Staphylococcus nepalensis; identical to SEQ ID NO: 45359
  misc_feature (1)..(166): tr|A0A291JMN2|A0A291JMN2_9STAP NADPH-dependent 7-cyano- 7-deazaguanine reductase OS=Staphylococcus nepalensis O X=214473 GN=queF PE=3 SV=1

SEQ ID NO: 49990 - protein, 166 aa, Staphylococcus pasteuri; identical to SEQ ID NO: 49968
  misc_feature (1)..(166): tr|A0A3S0MYN7|A0A3S0MYN7_9STAP NADPH-dependent 7-cyano- 7-deazaguanine reductase OS=Staphylococcus pasteuri OX= 45972 GN=queF PE=3 SV=1

SEQ ID NO: 49991 - protein, 166 aa, Staphylococcus pasteuri
  misc_feature (1)..(166): tr|A0A0M2NU18|A0A0M2NU18_9STAP NADPH-dependent 7-cyano- 7-deazaguanine reductase OS=Staphylococcus pasteuri OX= 45972 GN=queF PE=3 SV=1
MAQGRQKDELQDITLLGNQNNTYDFDYRPDVLETFENKHQGRDYFVKFNCPEFTSLCPITGQPDFATIYISYIPNIKMVESKSLKLYLFSFRNHGDFHEDCMNIIMNDLIDLMDPHYIEVWGKFTPRGGISIDPYTNYGRPNSKYEQMAEHRMMNHDMYPENVDNR

SEQ ID NO: 49992 - protein, 166 aa, Staphylococcus petrasii
  misc_feature (1)..(166): tr|A0A5F1B2H5|A0A5F1B2H5_9STAP NADPH-dependent 7-cyano- 7-deazaguanine reductase OS=Staphylococcus petrasii sub sp. petrasii OX=1276937 GN=queF PE=3 SV=1
MTKGRQKDELQDITLLGNQNNKYEFDYTPEVLETFDNKHQGRDYFVKFNCPEFTSLCPITGQPDFATIYISYIPNVKMVESKSLKLYLFSFRNHGDFHEDCMNIIMNDLIDLMDPHYIEVWGKFTPRGGISIDPYTNYGRPNSKYEKMAEHRLMNHDMYPEKVDNR

SEQ ID NO: 49993 - protein, 166 aa, Staphylococcus petrasii; identical to SEQ ID NO: 49992
  misc_feature (1)..(166): tr|A0A380G298|A0A380G298_9STAP NADPH-dependent 7-cyano- 7-deazaguanine reductase OS=Staphylococcus petrasii sub sp. jettensis OX=1077965 GN=queF PE=3 SV=1

SEQ ID NO: 49994 - protein, 166 aa, Staphylococcus pettenkoferi
  misc_feature (1)..(166): tr|A0A1Z3U360|A0A1Z3U360_9STAP NADPH-dependent 7-cyano- 7-deazaguanine reductase OS=Staphylococcus pettenkoferi OX=170573 GN=queF PE=3 SV=1
MAQGRNQEELEDITLLGNQNNQYDFDYRPDVLETFDNKHQGRDYFVKFNCPEFTSLCPITGQPDFATIYISYIPDVKMVESKSLKLYLFSFRNHGDFHEDCMNIIMNDLIDLMDPHYIEVWGKFTPRGGISIDPYTNYGRPNTKYERIAEHRLMNHDLYPEKVDNR

SEQ ID NO: 49995 - protein, 167 aa, Staphylococcus piscifermentans
  misc_feature (1)..(167): tr|A0A239UDF6|A0A239UDF6_9STAP NADPH-dependent 7-cyano- 7-deazaguanine reductase OS=Staphylococcus pisciferment ans OX=70258 GN=queF PE=3 SV=1
MSNEGRKKEELEDITLLGNQNNTYHFDYRPDVLETFDNKHQGRDYFVKFNCPEFTSLCPITGQPDFATIYISYIPNIKMVESKSLKLYLFSFRNHGDFHEDCMNIIMNDLIELMDPHYIEVWGKFTPRGGISIDPYTNYGRPDSKYEQMAEYRMMNHDLYPENIDNR

SEQ ID NO: 49996 - protein, 166 aa, Staphylococcus piscifermentans
  misc_feature (1)..(166): tr|A0A431Z3P4|A0A431Z3P4_9STAP NADPH-dependent 7-cyano- 7-deazaguanine reductase OS=Staphylococcus pisciferment ans OX=70258 GN=queF PE=3 SV=1
MTEGRNKEELEDITLLGNQNNKYDFDYRPDVLESFDNKHPGRDYFVKFNCPEFTSLCPITGQPDFATIYVSYIPNIKMVESKSLKLYLFSFRNHGDFHEDCMNIIMNDLIDLMDPHYIEVWGKFTPRGGISIDPYTNYGRPDSKYEKMAEHRLMNHDLYPEKIDNR

SEQ ID NO: 49997 - protein, 166 aa, Staphylococcus pseudintermedius
  misc_feature (1)..(166): tr|A0A161WK85|A0A161WK85_STAPS NADPH-dependent 7-cyano- 7-deazaguanine reductase OS=Staphylococcus pseudinterme dius OX=283734 GN=queF PE=3 SV=1
MTEGRSKDELQDITLLGNQNNTYNFDYRPDVLETFDNKHQNRDYFVKFNCPEFTSLCPITGQPDFATIYISYIPNVKMVESKSLKLYLFSFRNHGDFHEDCMNIIMNDLIELMDPHYIEVWGKFTPRGGISIDPYTNYGRPNSKYEKMAEHRLMNHDMYPEKIDNR

SEQ ID NO: 49998 - protein, 166 aa, Staphylococcus rostri
  misc_feature (1)..(166): tr|A0A2K3YSS9|A0A2K3YSS9_9STAP NADPH-dependent 7-cyano- 7-deazaguanine reductase OS=Staphylococcus rostri OX=52 2262 GN=queF PE=3 SV=1
MSEGRSKEDLQDITLLGNQNNTYNFDYRPDVLETFDNKHQGRDYFVKFNCPEFTSLCPITGQPDFATIYISYIPNVKMVESKSLKLYLFSFRNHGDFHEDCMNIIMNDLIELMDPHYIEVWGKFTPRGGISIDPYTNYGRPDSKYEKMAEYRMMNHDLYPETIDNR

SEQ ID NO: 49999 - protein, 166 aa, Staphylococcus saccharolyticus; identical to SEQ ID NO: 49965
  misc_feature (1)..(166): tr|A0A380H6V8|A0A380H6V8_9STAP NADPH-dependent 7-cyano- 7-deazaguanine reductase OS=Staphylococcus saccharolyti cus OX=33028 GN=queF PE=3 SV=1

SEQ ID NO: 50000 - protein, 166 aa, Staphylococcus saccharolyticus
  misc_feature (1)..(166): tr|A0A4Q8MZP8|A0A4Q8MZP8_9STAP NADPH-dependent 7-cyano- 7-deazaguanine reductase OS=Staphylococcus saccharolyti cus OX=33028 GN=queF PE=3 SV=1
MTQGRQKDKLNDISLLGNQNNQYDFDYSPDILETFDNKHQGHDYFVKFNCPEFTSLCPITGQPDFATIYISYIPNIKMVESKSLKLYLFSFRNHGDFHEDCMNIIMNDLINLMNPHYIEVWGKFTPRGGISIDPYTNYGRPGSKYEKMAEHRLMNHDMYPENIDNR

SEQ ID NO: 50001 - protein, 166 aa, Staphylococcus saprophyticus
  misc_feature (1)..(166): tr|A0A380H771|A0A380H771_STASA NADPH-dependent 7-cyano- 7-deazaguanine reductase OS=Staphylococcus saprophyticu s OX=29385 GN=queF PE=3 SV=1
MTQGRNKEELQDITLLGNQNNKYEFDYTPQVLETFDNKHQGRDYFVKFNCPEFTSLCPITGQPDFATIYISYIPNIKMVESKSLKLYLFSFRNHGDFHEDCMNIIMNDLIDLMDPHYIEVWGKFTPRGGISIDPYTNYGRPNSKYEKMVEHRLMNHDMYPEKIDNR

SEQ ID NO: 50002 - protein, 166 aa, Staphylococcus saprophyticus
  misc_feature (1)..(166): sp|Q49VS6|QUEF_STAS1 NADPH-dependent 7-cyano-7-deazagua nine reductase OS=Staphylococcus saprophyticus subsp. s aprophyticus (strain ATCC 15305 / DSM 20229 / NCIMB 871 1 / NCTC 7292 / S-41) OX=342451 GN=queF PE=3 SV=
MTEGRNKEELEDITLLGNQNNKYDFDYRPDVLESFDNKHQGRDYFVKFNCPEFTSLCPITGQPDFATIYISYIPNIKMVESKSLKLYLFSFRNHGDFHEDCMNIIMNDLIELMDPHYIEVWGKFTPRGGISIDPYTNYGRPDSKYEKMAEHRLMNHDLYPEKIDNR

SEQ ID NO: 50003 - protein, 166 aa, Staphylococcus schleiferi; identical to SEQ ID NO: 49946
  misc_feature (1)..(166): tr|A0A3S0K9K6|A0A3S0K9K6_9STAP NADPH-dependent 7-cyano- 7-deazaguanine reductase OS=Staphylococcus schleiferi s ubsp. schleiferi OX=74707 GN=queF PE=3 SV=1

SEQ ID NO: 50004 - protein, 166 aa, Staphylococcus schleiferi
  misc_feature (1)..(166): tr|A0A0K1AEW2|A0A0K1AEW2_9STAP NADPH-dependent 7-cyano- 7-deazaguanine reductase OS=Staphylococcus schleiferi O X=1295 GN=queF PE=3 SV=1
MPKGRSKEELKDITLLGNQNNTYDFDYRPDVLETFDNKHQGRDYFVKFNCPEFTSLCPITGQPDFATIYISYIPNVKMVESKSLKLYLFSFRNHGDFHEDCMNIIMNDLIELMDPHYIEVWGKFTPRGGISIDPYTNYGRPETKYEKMADYRMMNHDLYPETVDNR

SEQ ID NO: 50005 - protein, 166 aa, Staphylococcus schweitzeri
  misc_feature (1)..(166): tr|A0A2K4AJW3|A0A2K4AJW3_9STAP NADPH-dependent 7-cyano- 7-deazaguanine reductase OS=Staphylococcus schweitzeri OX=1654388 GN=queF PE=3 SV=1
MAQGRQQDELQDITLLGNQDNTYNFDYRPDVLESFDNKHQGRDYFVKFNCPEFTSLCPITGQPDFATIYISYIPNVKMVESKSLKLYLFSFRNHGDFHEDCMNIIMNDLIKLMDPHYIEVWGKFTPRGGISIDPYTNYGRPNSKYEKMAEHRLMNHDLYPEKIDNR

SEQ ID NO: 50006 - protein, 52 aa, Staphylococcus sciuri
  misc_feature (1)..(52): tr|A0A2T4RP22|A0A2T4RP22_STASC NADPH-dependent 7-cyano- 7-deazaguanine reductase QueF (Fragment) OS=Staphylococ cus sciuri OX=1296 GN=BUZ90_15185 PE=4 SV=1
MAHGRQQDELQDITLLGNQDNTYNFDYRPDVLESFDNKHQGRDYFVKFNCPE

SEQ ID NO: 50007 - protein, 166 aa, Staphylococcus sciuri
  misc_feature (1)..(166): tr|A0A418JAD8|A0A418JAD8_STASC NADPH-dependent 7-cyano- 7-deazaguanine reductase OS=Staphylococcus sciuri OX=12 96 GN=queF PE=3 SV=1
MSEGRNKDDLKDITLLGNQNNQYYDQYKPEVLEVFDNKHQGRDYFVKFNCPEFTSLCPITGQPDFATIYISYIPNVKMVESKSLKLYLFSFRNHGDFHEDCMNVIMNDLIELMDPHYIEVLGKFTPRGGISIDPYTNYGRPDSKYEKMAEYRMMNHDLYPENIDNR

SEQ ID NO: 50008 - protein, 166 aa, Staphylococcus simiae
  misc_feature (1)..(166): tr|G5JIQ8|G5JIQ8_9STAP NADPH-dependent 7-cyano-7-deazag uanine reductase OS=Staphylococcus simiae CCM 7213 = CC UG 51256 OX=911238 GN=queF PE=3 SV=1
MTQGRQQDELQDITLLGNQNNQYHFDYRPDVLESFDNKHQGRDYFVKFNCPEFTSLCPITGQPDFATIYISYIPNIKMVESKSLKLYLFSFRNHGDFHEDCMNIIMNDLIELMDPHYIEVWGKFTPRGGISIDPYTNYGRPNTKYETMAEHRLMNHDLYPEKIDNR

SEQ ID NO: 50009 - protein, 167 aa, Staphylococcus simulans
  misc_feature (1)..(167): tr|A0A418J389|A0A418J389_STASI NADPH-dependent 7-cyano- 7-deazaguanine reductase OS=Staphylococcus simulans OX= 1286 GN=queF PE=3 SV=1
MSQQGRSKEDLEDLTLLGNQNNQYDFNYHPDVLESFDNKHQGRDYFVKFNCPEFTSLCPITGQPDFATIYISYIPNIKMVESKSLKLYLFSFRNHGDFHEDCMNIIMNDLIELMDPHYIEVWGKFTPRGGISIDPYTNYGRPDSKYEKMAEYRMMNHDLYPETIDNR

SEQ ID NO: 50010 - protein, 167 aa, Staphylococcus simulans
  misc_feature (1)..(167): tr|A0A2T4R129|A0A2T4R129_STASI NADPH-dependent 7-cyano- 7-deazaguanine reductase OS=Staphylococcus simulans OX= 1286 GN=queF PE=3 SV=1
MSQQGRSKEDLEDLTLLGNQNNQYDFNYRPDVLESFDNKHQGRDYFVKFNCPEFTSLCPITGQPDFATIYISYIPNVKMVESKSLKLYLFSFRNHGDFHEDCMNIIMNDLIELMDPHYIEVWGNFTPRGGISIDPYTNYGRPDSKYEKMAEYRMMNHDLYPEKIDNR

SEQ ID NO: 50011 - protein, 166 aa, Staphylococcus sp.
  misc_feature (1)..(166): tr|A0A1J4HDF1|A0A1J4HDF1_9STAP NADPH-dependent 7-cyano- 7-deazaguanine reductase OS=Staphylococcus sp. HMSC34G0 4 OX=1608860 GN=queF PE=3 SV=1
MTQGRQKDELKDITLLGNQNNTYEFDYRPEVLETFDNKHQGRDYFVKFNCPEFTSLCPITGQPDFATIYISYIPNIKMVESKSLKLYLFSFRNHGDFHEDCMNIIMNDLINLMDPHYIEVWGKFTPRGGISIDPYTNYGRPNTKYEKIAEHRLMNHDMYPEKIDNR

SEQ ID NO: 50012 - protein, 166 aa, Staphylococcus sp.
  misc_feature (1)..(166): tr|A0A2J6P2U6|A0A2J6P2U6_9STAP NADPH-dependent 7-cyano- 7-deazaguanine reductase OS=Staphylococcus sp. UMB0328 OX=2029110 GN=queF PE=3 SV=1
MAQGRQNDELQDITLLGNQNNTYNFDYRPDVLETFDNKHQGRDYFVKFNCPEFTSLCPITGQPDFATIYISYIPNIKMVESKSLKLYLFSFRNHGDFHEDCMNIIMNDLIDLMDPHYIEVWGKFTPRGGISIDPYTNYGRPNSKYEKMAEHRMMNHDMYPENIDNR

SEQ ID NO: 50013 - protein, 166 aa, Staphylococcus stepanovicii
  misc_feature (1)..(166): tr|A0A240A0F6|A0A240A0F6_9STAP NADPH-dependent 7-cyano- 7-deazaguanine reductase OS=Staphylococcus stepanovicii OX=643214 GN=queF PE=3 SV=1
MSEGRNKEELKDITLLGNQNNTYHDQYTPEVLEVFDNKHQGRDYFVKFNCPEFTSLCPITGQPDFATIYISYIPNIKMVESKSLKLYLFSFRNHGDFHEDCMNVIMNDLIELMDPHYIEVLGKFTPRGGISIDPYTNYGRPDSKYEKMAEYRMMNHDLYPENVDNR

SEQ ID NO: 50014 - protein, 166 aa, Staphylococcus succinus
  misc_feature (1)..(166): tr|A0A2T4Q4T6|A0A2T4Q4T6_9STAP NADPH-dependent 7-cyano- 7-deazaguanine reductase OS=Staphylococcus succinus OX= 61015 GN=queF PE=3 SV=1
MSEGRNKTQLEDITLLGNQNNKYEFDYTPNVLESFDNKHQGRDYFVKFNCPEFTSLCPITGQPDFATIYISYIPNIKMVESKSLKLYLFSFRNHGDFHEDCMNIIMNDLIDLMDPHYIEVWGKFTPRGGISIDPYTNYGRPDSKYEKMAEHRLMNHDLYPEKIDNR

SEQ ID NO: 50015 - protein, 166 aa, Staphylococcus vitulinus
  misc_feature (1)..(166): tr|A0A2T4PVX0|A0A2T4PVX0_9STAP NADPH-dependent 7-cyano- 7-deazaguanine reductase OS=Staphylococcus vitulinus OX =71237 GN=queF PE=3 SV=1
MSEGRNKEELKDITLLGNQNNQYHDQYTPEVLEVFDNKHQGRDYFVKFNCPEFTSLCPITGQPDFATIYISYIPNVKMVESKSLKLYLFSFRNHGDFHEDCMNVIMNDLIELMDPHYIEVLGKFTPRGGISIDPYTNYGRPDSKYEKMAEYRMMNHDLYPENIDNR

SEQ ID NO: 50016 - protein, 165 aa, Staphylococcus warneri
  misc_feature (1)..(165): tr|A0A2V3ZC36|A0A2V3ZC36_STAWA NADPH-dependent 7-cyano- 7-deazaguanine reductase OS=Staphylococcus warneri OX=1 292 GN=queF PE=3 SV=1
MTGRQKEEMEDVTLLGNQNNTYAFDYDPSVLETFENKHQDKDYFVKFNCPEFTSLCPITQQPDFATVYISYIPDVKMVESKALKLYLFSFRNHGDFHEDCMNIILKDLIELMDPKYIEVWGKFMPRGGISIDPYTNYGKAGTKYEKMAEQRLLQHDIYPEHVDNR

SEQ ID NO: 50017 - protein, 166 aa, Staphylococcus warneri; identical to SEQ ID NO: 50012
  misc_feature (1)..(166): tr|A0A364UQY6|A0A364UQY6_STAWA NADPH-dependent 7-cyano- 7-deazaguanine reductase OS=Staphylococcus warneri OX=1 292 GN=queF PE=3 SV=1

SEQ ID NO: 50018 - protein, 166 aa, Staphylococcus xylosus
  misc_feature (1)..(166): tr|A0A418IG93|A0A418IG93_STAXY NADPH-dependent 7-cyano- 7-deazaguanine reductase OS=Staphylococcus xylosus OX=1 288 GN=queF PE=3 SV=1
MSEGRNKENLQDITLLGSQNNKYEFDYDPSVLESFDNKHPGRDYFVKFNCPEFTSLCPITGQPDFATIYISYIPNIKMVESKSLKLYLFSFRNHGDFHEDCMNIIMNDLIQLMDPHYIEVWGKFTPRGGISIDPYTNYGRPDSKYEKMAEHRLMNHDLYPEKIDNR

SEQ ID NO: 50019 - protein, 166 aa, Staphylococcus xylosus
  misc_feature (1)..(166): tr|A0A2T4P6A8|A0A2T4P6A8_STAXY NADPH-dependent 7-cyano- 7-deazaguanine reductase OS=Staphylococcus xylosus OX=1 288 GN=queF PE=3 SV=1
MSEGRNTEDLQDITLLGNQNNKYEFDYDPAVLESFDNKHPGRDYFVKFNCPEFTSLCPITGQPDFATIYISYIPNVKMVESKSLKLYLFSFRNHGDFHEDCMNIIMNDLIELMDPHYIEVWGKFTPRGGISIDPYTNYGRPDSKYEKMAEHRLMNHDLYPEKIDNR

SEQ ID NO: 50020 - protein, 155 aa, Stappia indica
  misc_feature (1)..(155): tr|A0A285TPF3|A0A285TPF3_9RHOB NADPH-dependent 7-cyano- 7-deazaguanine reductase OS=Stappia indica OX=538381 GN =queF PE=3 SV=1
MSDKDIYSGLTQLGSATQIPASPKDAVLERVPNPQPDVRYAVRFTAPEFTSLCPMTGQPDFAHLVIDYLPSGWLVESKSLKLYLTSFRNHGAFHEDCTVSIGRRLVDLLAPDWLRIGGYWYPRGGIPIDVFYQTGPAPADVWIPDQGVPPYRGRG

SEQ ID NO: 50021 - protein, 155 aa, Stappia sp.
  misc_feature (1)..(155): tr|A0A5D0WBT0|A0A5D0WBT0_9RHOB NADPH-dependent 7-cyano- 7-deazaguanine reductase OS=Stappia sp. BW2 OX=2592622 GN=queF PE=3 SV=1
MSDKSIYENLTQLGSSTELPDDPDKAVLEKVPNPQAGTGYMVRFVAPEFTSLCPITGAPDFAHLVIDYVPRDFLVESKSLKLFLGSFRNHGAFHEDCTVSIGKRLVDLLDPQWLRIGGYWYPRGGIPIDVFYQTGPAPEGVWIPEQGVAPYRGRG

SEQ ID NO: 50022 - protein, 155 aa, Stappia sp.
  misc_feature (1)..(155): tr|A0A420A939|A0A420A939_9RHOB NADPH-dependent 7-cyano- 7-deazaguanine reductase OS=Stappia sp. ARW1T OX=213561 5 GN=queF PE=3 SV=1
MSDKDIYSGLTQLGSATEIPASPKDAVLERVPNPQPDVRYAVRFTAPEFTSLCPMTGQPDFAHLVIDYLPSGWLVESKSLKLYLTSFRNHGAFHEDCTVSIGRRLVDLLAPDWLRIGGYWYPRGGIPIDVFYQTGPAPADVWIPDQGVPPYRGRG

SEQ ID NO: 50023 - protein, 153 aa, Starkeya novella
  misc_feature (1)..(153): tr|D6ZYJ3|D6ZYJ3_STAND NADPH-dependent 7-cyano-7-deazag uanine reductase OS=Starkeya novella (strain ATCC 8093 / DSM 506 / CCM 1077 / IAM 12100 / NBRC 12443 / NCIB 91 13) OX=639283 GN=queF PE=3 SV=1
MNDATESPLQLGRATQWPASPEEAVLDRVPNPQADTLYVARFTAPEFTSLCPVTGQPDFAHLVIDYVPKDWLVESKSLKLYLASFRNHGAFHEDCTVAVGRRLYDLLEPHWLRIGGYWYPRGGIPIDVFWQSGAPPADIWLPNQGVPPYRGRG

SEQ ID NO: 50024 - protein, 172 aa, Starkeya novella
  misc_feature (1)..(172): tr|A0A2W5K4A3|A0A2W5K4A3_STANO NADPH-dependent 7-cyano- 7-deazaguanine reductase OS=Starkeya novella OX=921 GN= queF PE=3 SV=1
MRTPPERSRFSPRCAKSRQFSGELMSDLQLGKQTPLPASPEEAALDRVPNPHPDVDYVARFAAPEFTSLCPVTGQPDFAHLVIDYVPGEWLVESKSLKLYLGSFRNHGAFHEDCTVAIAKRLVAELAPKWLRIGGYWYPRGGIPIDVFFETGERPAGLWVPDQGVPPYRGRG

SEQ ID NO: 50025 - protein, 153 aa, Starkeya sp.
  misc_feature (1)..(153): tr|A0A556PAS6|A0A556PAS6_9RHIZ NADPH-dependent 7-cyano- 7-deazaguanine reductase OS=Starkeya sp. 3C OX=2597768 GN=queF PE=3 SV=1
MTNPQEGPLQLGRPTTMPASPEEAVLDRVPNPQADTLYVARFTAPEFTSLCPVTGQPDFAHLVIDYVPNDWLVESKSLKLYLASFRNHGAFHEDCTVAVGRRIHDLLQPHWLRIGGYWYPRGGIPIDVFWQSGAPPKEVWLPDQGVPPYRGRG

SEQ ID NO: 50026 - protein, 150 aa, Stella humosa
  misc_feature (1)..(150): tr|A0A3N1ME50|A0A3N1ME50_9PROT NADPH-dependent 7-cyano- 7-deazaguanine reductase OS=Stella humosa OX=94 GN=queF PE=3 SV=1
MTEQLTQLGQMTALPASPEAARLERVGNPHADLGYCVRFTAPEFTSLCPITGQPDFAHLVIDYIPGDWIVESKSLKLYLGSFRNHGAFHEGCTLDIARRLVAEIAPRWLRIGGYWYPRGGMPIDVFYQTGSAPEGVWIPPQDVAPYRGRG

SEQ ID NO: 50027 - protein, 270 aa, Stenotrophomonas acidaminiphila
  misc_feature (1)..(270): tr|A0A2L0SIB9|A0A2L0SIB9_9GAMM NADPH-dependent 7-cyano- 7-deazaguanine reductase OS=Stenotrophomonas acidaminip hila OX=128780 GN=queF PE=3 SV=1
MNTPHDSSLGREVAYPSQYDPGLLFPIPRATARAAIGLDATLPFVGQDRWHVYELGWLDRRGKPCVATATLWVPAASPHLVESKSLKLYLNSLNAARFDSADEVRARIAADLSACAGAAVTVEFGLPPVADAEGHSIDGLDLDIDHYGPPQAGFLHADTGEAVAETLVSALLKSNCPVTGQPDWASISIRYAGPRIDRGGLLRYLVSYRDHAEFHEQCVERIFLDLMHHCGCHSLDVEARYTRRGGLDINPRRSTPDLAAGHRPLRDPRQ

SEQ ID NO: 50028 - protein, 270 aa, Stenotrophomonas acidaminiphila
  misc_feature (1)..(270): tr|A0A0R0E6F4|A0A0R0E6F4_9GAMM NADPH-dependent 7-cyano- 7-deazaguanine reductase OS=Stenotrophomonas acidaminip hila OX=128780 GN=queF PE=3 SV=1
MNNPHDSSLGREVAYPSQYDPGLLFPIPRATARAEIGLAAALPFVGQDRWHVYELGWLDMRGKPCVATATLWVPAASPNLVESKSLKLYLNSLNAARFASAADVRARIAADLSACAGAGVTVEFGLPPVADAEGESIDGLELDIDHYGPPQAGFLHADGGEAVAETLVSALLKSNCPVTGQPDWASVSIRYAGPRIDRGGLLRYLASYRDHAEFHEQCVERIFLDLVRHCGCHSLDVEARYTRRGGLDINPRRSTADFAAGHRPFRDPRQ

SEQ ID NO: 50029 - protein, 269 aa, Stenotrophomonas daejeonensis
  misc_feature (1)..(269): tr|A0A0R0E1M3|A0A0R0E1M3_9GAMM NADPH-dependent 7-cyano- 7-deazaguanine reductase OS=Stenotrophomonas daejeonens is OX=659018 GN=queF PE=3 SV=1
MNTPQDSSLGREVAYPSQYDPGLLFPIPRAAARAEIGIDGGLPFAGDDRWHAYELGWLDGRGKPCVGTATLHVPCDSPNLIESKSLKLYLNSLNATRFDSADAAWARIAADLSACAGATVRVEPGLPPVAGAGGESIDALEVDIDCYGPPDAGFLVADADTPVTEMLVSELLKSNCPVTGQPDWASVGIRYHGPRIDRAGLLRYLVSYRDHAEFHEQCVERIFLDLSRHCRCHWLEVEARYTRRGGLDINPRRTTLGQPANAAFRDARQ

SEQ ID NO: 50030 - protein, 271 aa, Stenotrophomonas ginsengisoli
  misc_feature (1)..(271): tr|A0A0R0DLA6|A0A0R0DLA6_9GAMM NADPH-dependent 7-cyano- 7-deazaguanine reductase OS=Stenotrophomonas ginsengiso li OX=336566 GN=queF PE=3 SV=1
MNTPSDSSLGREVRYPDQYDAALLFPIPRLAARSEIGIDEAALPFVGHDRWHAYELSWLDAGGLPQVTVATFQVPCTSPNLIESKSFKLYLNSLNGKVFASPQQVQACLERDLGQCAGAPVTVSFQLPPLVQGGAAQSIDGQQLQIDCYGPPQADYLAADTANVVEEVLTSALLKSNCPVTGQPDWASVDIAYRGPAIDRTGLLRYLVSFRNHAEFHEQCVERIFADLSARCAPQWLSVHARYTRRGGLDINPVRCSPGAALPAASRDLRQ

SEQ ID NO: 50031 - protein, 271 aa, Stenotrophomonas humi
  misc_feature (1)..(271): tr|A0A0R0C7C0|A0A0R0C7C0_9GAMM NADPH-dependent 7-cyano- 7-deazaguanine reductase OS=Stenotrophomonas humi OX=40 5444 GN=queF PE=3 SV=1
MNTPQDSSLGREVDYPRQYDASLLFPIPRAAARAEIGLSGDALPFEGEDRWHAYEVGWLDARGKPCVETATLWVPGSSPNLVESKSLKLYLNSLNSARFNRAEAVRERIATDLSACAGADVRVEFGLPAFANAPGETIDHLDVDIDCYGPPREAYLTANADEVVSETLTSALLKSNCPVTGQPDWASVSIRYHGPRIDREGLLRYLISYRDHAEFHEQCVERIFLEVMRRCAPAWLDVEARYTRRGGLDINPRRFTPGHAGPMAAIRDLRQ

SEQ ID NO: 50032 - protein, 271 aa, Stenotrophomonas koreensis
  misc_feature (1)..(271): tr|A0A0R0C302|A0A0R0C302_9GAMM NADPH-dependent 7-cyano- 7-deazaguanine reductase OS=Stenotrophomonas koreensis OX=266128 GN=queF PE=3 SV=1
MNTPSDSSLGREVRYPDQYDPGLLFAIPRRAAREQIGIDEAALPFAGHDRWHAYELSWLDAGGLPQVAVATFCVPCTSPNLIESKSFKLYLNSLNGRRFDTAEQLRACLVQDLSACAGATVSVDFELPPMVAASAAQSIDQQSLVIDCYGPPQSGYLRADTATVVEEVLTSALLKSNCPVTGQPDWASVDIAYRGPAIDRAGLLRYLVSFRNHAEFHEQCVERIFADIQARCLPEWLSVHARYTRRGGLDINPVRVSAGAPLPAPSRDLRQ

SEQ ID NO: 50033 - protein, 272 aa, Stenotrophomonas lactitubi
  misc_feature (1)..(272): tr|A0A2M9R0Q6|A0A2M9R0Q6_9GAMM NADPH-dependent 7-cyano- 7-deazaguanine reductase OS=Stenotrophomonas lactitubi OX=2045214 GN=queF PE=3 SV=1
MNTPQDSSLGREVSYPSQYDPGLLFPIPRVGARAEIGLDEAALPFVGHDRWHAFELSWLDPRGKPQVAVATVQVPCTSPRLIESKSFKLYLNSLNSTRLDSVEALRERLVADLSACAGAPVQVTFGLPALRESPLGELIDGLDVDIDCYGPPQADYLSANADALVEETLVSALLKSNCPVTGQPDWATVSLRYRGPQIDRAGLLRYLVSYREHAEFHEQCVERIFSEVSARCRPQWLEVEARYTRRGGLDINPWRASHGIAAPAATYRELRQ

SEQ ID NO: 50034 - protein, 272 aa, Stenotrophomonas maltophilia
  misc_feature (1)..(272): sp|B2FJS1|QUEF_STRMK NADPH-dependent 7-cyano-7-deazagua nine reductase OS=Stenotrophomonas maltophilia (strain K279a) OX=522373 GN=queF PE=3 SV=1
MNTPQDSSLGREVSYPSQYDPGLLFPIPRSGARAEIGLDDAALPFVGHDRWHAFELSWLDPRGKPQVAVATVQVPCTSPRLIESKSFKLYLNSLNSTRIDSAEALRARIVADLSDCAGAPVQVEFGLPGLRETPLGESIDGLELEIDCYGPPQADFLSANAGEVVEETLVSALLKSNCPVTGQPDWATVSLRYRGPKIDRAGLLRYLVSYREHAEFHEQCVERIFSEVSARCQPQWLEVEARYTRRGGLDINPWRASPGIAAPAATYRELRQ

SEQ ID NO: 50035 - protein, 272 aa, Stenotrophomonas maltophilia
  misc_feature (1)..(272): tr|A0A4T1DGB3|A0A4T1DGB3_STEMA NADPH-dependent 7-cyano- 7-deazaguanine reductase OS=Stenotrophomonas maltophili a OX=40324 GN=queF PE=3 SV=1
MNTPQDSSLGREVSYPSQYDPGLLFPIPRSGARAEIGLDDAALPFVGHDRWHAFELSWLDPRGKPQVAVATVQVPCTSPRLVESKSFKLYLNSLNSTRIDSAEALRERLVTDLSACAGAPVQVRFGLPELREAPLGESIDGLDVEIDCYGPPQADFLVADAGEVVEETLVSALLKSNCPVTGQPDWATVSLRYRGPKIDRAGLLRYLISYREHAEFHEQCVERIFSEVSARCQPQWLEVEARYTRRGGLDINPWRASPGIAAPAATYRELRQ

SEQ ID NO: 50036 - protein, 271 aa, Stenotrophomonas panacihumi
  misc_feature (1)..(271): tr|A0A0Q9ZZP0|A0A0Q9ZZP0_9GAMM NADPH-dependent 7-cyano- 7-deazaguanine reductase OS=Stenotrophomonas panacihumi OX=676599 GN=queF PE=3 SV=1
MNTPADSSLGREVAYPTRYDPSLLFPIPRLPSRESIGIDPAALPFVGLDRWHAYEIGWLDAQGKPCVATATLHVPSDSPNLVESKSLKLYLNSLNSTRFNSPAAVRECIATDLSARAGAPVSVEFGLPPVLDDAAEHSIDGLDVSIDDYGPPNASHLRTRPGEAVEETLASALLKSNCPVTGQPDWANVTLRYRGAPIDVEGLLRYLVSYRDHAEFHEQCVERIFHDVSRCCQPQWLVVEARYTRRGGLDINPWRATPGAPAPVARRDARQ

SEQ ID NO: 50037 - protein, 272 aa, Stenotrophomonas pavanii; identical to SEQ ID NO: 44455
  misc_feature (1)..(272): tr|A0A246L463|A0A246L463_9GAMM NADPH-dependent 7-cyano- 7-deazaguanine reductase OS=Stenotrophomonas pavanii OX =487698 GN=queF PE=3 SV=1

SEQ ID NO: 50038 - protein, 272 aa, Stenotrophomonas pictorum
  misc_feature (1)..(272): tr|A0A0R0AHY1|A0A0R0AHY1_9GAMM NADPH-dependent 7-cyano- 7-deazaguanine reductase OS=Stenotrophomonas pictorum J CM 9942 OX=1236960 GN=queF PE=3 SV=1
MNTPENSSLGREVDYPTRYDASLLFPIPRAAARGQIGLHGPALPFIGEDRWHVYELGWLDARGKPCVATATLWVPATSPNLIESKSLKLYLNSLNSARFNSAESLRERITTDLSSCAGADVRVEFGLPPVAEAPGQSVDHLDVAIDRYGPPDESLLLADAECIVEETLTSALLKSNCPVTGQPDWASLSIRYRGPRIDREGLLRYLVSYRDHAEFHEQCVERIFLGLMHRCAPQALHVEARYTRRGGLDINPRRTSAGDGLSAENAFRDARQ

SEQ ID NO: 50039 - protein, 272 aa, Stenotrophomonas rhizophila
  misc_feature (1)..(272): tr|A0A1B2N8S3|A0A1B2N8S3_9GAMM NADPH-dependent 7-cyano- 7-deazaguanine reductase OS=Stenotrophomonas rhizophila OX=216778 GN=queF PE=3 SV=1
MNTPQDSSLGREVAYPSQYDPALLFPIPRRAAREELGVDEANLPFVGHDRWQAYELSWLDRRGKPRVAVATISVPCTSPNLIESKSFKLYLNSLNSTRFDDDEQARQRIAGDLSACAGAVVNVVFGVPLLVEAAEGESLDELDVAIERYGPPAPEYLSANAGQVVTETLSSALLKSNCPVTGQPDWASVSVRYRGPRIDREGLLRYLVSYREHAEFHEQCVERIFNELTLRCQPEWLEVEARYTRRGGLDINPWRASAGIEQPARTVRDLRQ

SEQ ID NO: 50040 - protein, 272 aa, Stenotrophomonas rhizophila
  misc_feature (1)..(272): tr|A0A4U3GIE4|A0A4U3GIE4_9GAMM NADPH-dependent 7-cyano- 7-deazaguanine reductase OS=Stenotrophomonas rhizophila OX=216778 GN=queF PE=3 SV=1
MNTPQDSSLGREVAYPSQYDSALLFPIPRRGAREEIGLDEAALPFVGHDRWQAYELSWLDRRGKPRVAVATVSVPCTSPNLIESKSFKLYLNSLNSTRFDDDEAARLRITADLSGCAGAVVTVRFGVPMLVEEAEGESLDELDVAIERYGPPAPEFLSADPAQVVTETLSSALLKSNCPVTGQPDWASVSIRYHGPQIDREGLLKYLVSYREHAEFHEQCVERIFSEITQRCAPQWLEVEARYTRRGGLDINPWRASPGIELPARTVRDLRQ

SEQ ID NO: 50041 - protein, 271 aa, Stenotrophomonas sp.
  misc_feature (1)..(271): tr|A0A4V2X3G3|A0A4V2X3G3_9GAMM NADPH-dependent 7-cyano- 7-deazaguanine reductase OS=Stenotrophomonas sp. ATCM1_ 4 OX=2259330 GN=queF PE=3 SV=1
MNTPQDSSLGREVGYPRQYDASLLFPIPRAGARSEIGLGGGDLPFHGEDRWHAYELGWLDARGKPCVETLTLWVPATSPNLIESKSLKLYLNSLNNARFNRPEAVRERIATDLSACAGADVRVEFGLPAFAGADGESVDHVDVDIDCYGPPDAGFLLADAGSVVEETLTSALLKSNCPVTGQPDWASVSIRYRGPRIDRKGLLRYLVSYRDHAEFHEQCVERIFLDLQRRCGPASLEVEARYTRRGGLDINPRRASPDRTAATAPIRDLRQ

SEQ ID NO: 50042 - protein, 272 aa, Stenotrophomonas sp.
  misc_feature (1)..(272): tr|A0A3S7JWE3|A0A3S7JWE3_9GAMM NADPH-dependent 7-cyano- 7-deazaguanine reductase OS=Stenotrophomonas sp. ZAC14D 2_NAIMI4_6 OX=2072406 GN=queF PE=3 SV=1
MNTPQDSSLGREVSYPSQYDPGLLFPIPRTGARSEIGLDDAALPFVGHDRWHAFELSWLDPRGKPQVAVATVQVPCTSPRLIESKSFKLYLNSLNSTRIDSAEALRERLVADLSACAGAPVQVEFGLPELREAPLGESIDGLEVEIDCYGPPQANYLAADAGNVVEETLVSALLKSNCPVTGQPDWATVSLRYRGPKIDRAGLLRYLVSYREHAEFHEQCVERIFSEVSARCQPQWLEVEARYTRRGGLDINPWRASPGIAAPAATYRELRQ

SEQ ID NO: 50043 - protein, 269 aa, Stenotrophomonas terrae
  misc_feature (1)..(269): tr|A0A0R0CEM6|A0A0R0CEM6_9GAMM NADPH-dependent 7-cyano- 7-deazaguanine reductase OS=Stenotrophomonas terrae OX= 405446 GN=queF PE=3 SV=1
MNTPENSSLGREVDYPRHYDASLLFPIPRAAARAEIGLGGELPFVGEDRWHIYELGWLDARGKPCVDTATLYVPATSPNLIESKSLKLYLNSLNGARFNRAEAVRERIATDLSACAGADVRVEFGLPPVAQAAGENIDHLDVAIDSYGPPNAALLLADSRAVVSETLVSALLKSNCPVTGQPDWASVSIRYQGPRIDREGLLRYLVSYRDHAEFHEQCVERIFLELSQRCQPTALEVEARYTRRGGLDINPRRASPGLAASAPIRDLRQ

SEQ ID NO: 50044 - protein, 166 aa, Steroidobacter denitrificans
  misc_feature (1)..(166): tr|A0A127FCB6|A0A127FCB6_STEDE NADPH-dependent 7-cyano- 7-deazaguanine reductase OS=Steroidobacter denitrifican s OX=465721 GN=queF PE=3 SV=1
MAAKGRKPRPADPDRTRTTIPAQLGRSVPWPASPDEAELERVPNPHPTKLYLARFTAPEFTSLCPVTGQPDFAHLVIDYVPRSWLVESKSLKLYLGSFRNHGTFHEDCTIAVAVRLAGFLRPRWLRIGGYWYPRGGIPIDVFWQTGRPPADLWIPEQGVPAYRGRG

SEQ ID NO: 50045 - protein, 120 aa, Stigmatella aurantiaca
  misc_feature (1)..(120): tr|A0A1H7ZQD1|A0A1H7ZQD1_STIAU NADPH-dependent 7-cyano- 7-deazaguanine reductase OS=Stigmatella aurantiaca OX=4 1 GN=queF PE=3 SV=1
MPSEPTKELQTFPNPAADRDYEIAFDVPEFTCLCPMTGQPDFATFKIRYVPDELCVELKSLKLYMWSYRNEGAFHEKVTNTIADDIIRAIKPRKLTVVGDFFVRGGIGTIVTVTHEKKKA

SEQ ID NO: 50046 - protein, 120 aa, Stigmatella aurantiaca
  misc_feature (1)..(120): tr|Q090N9|Q090N9_STIAD NADPH-dependent 7-cyano-7-deazag uanine reductase OS=Stigmatella aurantiaca (strain DW4/ 3-1) OX=378806 GN=queF PE=3 SV=1
MPSEPSKDLQTFPNPASERDYEIAFDVPEFTCLCPMTGQPDFAHFKIRYVPDELCVELKSLKFYMWSYRNEGAFHEKVTNTIADDIIRAIKPRKLTVVGDFFVRGGIGTVVTVTHEKKKG

SEQ ID NO: 50047 - protein, 120 aa, Stigmatella erecta; identical to SEQ ID NO: 50045
  misc_feature (1)..(120): tr|A0A1I0KMY4|A0A1I0KMY4_9DELT NADPH-dependent 7-cyano- 7-deazaguanine reductase OS=Stigmatella erecta OX=83460 GN=queF PE=3 SV=1

SEQ ID NO: 50048 - protein, 163 aa, Streptococcus australis
  misc_feature (1)..(163): tr|A0A4V0BXX4|A0A4V0BXX4_9STRE NADPH-dependent 7-cyano- 7-deazaguanine reductase OS=Streptococcus australis OX= 113107 GN=queF PE=3 SV=1
MSQQEEMKNLSLLGNKETNYIFDYQPEVLESFDNRHVENDYFIKFNCPEFTSLCPITAQPDFATIYISYIPDKLCVESKSLKLYLFSYRNHGDFHENCINTIGKDLVNLLDPRYLEVWGKFTPRGGISIDPYYNYGRPGTKYEGLAEQRLFQHDLYPEKIDNR

SEQ ID NO: 50049 - protein, 164 aa, Streptococcus criceti
  misc_feature (1)..(164): tr|G5JPD5|G5JPD5_STRCG NADPH-dependent 7-cyano-7-deazag uanine reductase OS=Streptococcus criceti HS-6 OX=87344 9 GN=queF PE=3 SV=1
MANNSKEMKDLTLLGNQQVPYVFDYDPSILESFQNRHQDNDYFIKFNCPEFTSLCPITGQPDFATIYLSYIPDELCVESKSLKLYLFSYRNHGDFHENCINTIGKDLIDLLKPRYLEVWGKFTPRGGISIDPYFNYGRPGTKYEEMANYRLMNHDLYPETIDNR

SEQ ID NO: 50050 - protein, 164 aa, Streptococcus downei
  misc_feature (1)..(164): tr|A0A380JET7|A0A380JET7_STRDO NADPH-dependent 7-cyano- 7-deazaguanine reductase OS=Streptococcus downei MFe28 OX=764290 GN=queF PE=3 SV=1
MTQNDQDMKDLTLLGNQQIPYVFDYDPSILESFQNRHQDNDFFIKFNCPEFTSLCPITGQPDFATIYISYIPDQLCVESKSLKLYLFSYRNHGDFHENCINTIGKDLVDLLKPRYLEVWGKFTPRGGISIDPYYNYGRPDTKYQEMANYRLMNHDLYPETINNR

SEQ ID NO: 50051 - protein, 276 aa, Streptococcus dysgalactiae
  misc_feature (1)..(276): tr|A0A4U9YD83|A0A4U9YD83_STREQ 7-cyano-7-deazaguanine r eductase OS=Streptococcus dysgalactiae subsp. equisimil is OX=119602 GN=queF PE=3 SV=1
MHHPAEHSPLGKTSEYVSRYTPSLLFPIARAAKWAELGLSAATLPYRGVDIWNCYELSWLTPAGKPVVAIGEFSIPADSPNIIESKSFKLYLNSLNQSSFDSRDALRAVLEKDLSVAAGAAVGVRLRSLDEVAEEGVGRLPGRCIDELEIAVDGYERPRPELLRCDAGRFVEEQLYSHLLKSNCPVTGQPDWGTLVVDYRGPALDPASLLAYLVSFRQHQDFHEQCVERIFLDLRRLLQPQALTVYARYVRRGGLDINPYRSLVDVAPDNRRLVRQ

SEQ ID NO: 50052 - protein, 166 aa, Streptococcus dysgalactiae
  misc_feature (1)..(166): tr|A0A4V0BWB8|A0A4V0BWB8_STREQ NADPH-dependent 7-cyano- 7-deazaguanine reductase OS=Streptococcus dysgalactiae subsp. equisimilis OX=119602 GN=queF PE=3 SV=1
MAHGRQQDELQDITLLGNQDNTYNFDYRPDVLESFDNKHQGRDYFVKFNCPEFTSLCPITGQPDFATIYISYIPNVKMVESKSLKLYLFSFRNHGDFHEDCMNIIMNDLIELMDPHYIEVWGKFTPRGGISIDPYTNYGRPNSKYEKMAEHRLMNHDLYPEKIDNR

SEQ ID NO: 50053 - protein, 163 aa, Streptococcus equinus
  misc_feature (1)..(163): tr|A0A239R8Z1|A0A239R8Z1_STREI NADPH-dependent 7-cyano- 7-deazaguanine reductase OS=Streptococcus equinus OX=13 35 GN=queF PE=3 SV=1
MTRTDEMKDLTLLGNQNTKYTYEYDPSILESFDNRHVENDYFIKFNCPEFTSLCPITGQPDFATIYLSYIPDKLCVESKSLKLYLFSYRNHGDFHENCINTIGKDLIELLNPRYLEVWGKFTPRGGLSIDPYFNYGKPGTKYEKMAEHRLMNHDLYPEKIDNR

SEQ ID NO: 50054 - protein, 163 aa, Streptococcus equinus
  misc_feature (1)..(163): tr|A0A091CB51|A0A091CB51_STREI NADPH-dependent 7-cyano- 7-deazaguanine reductase OS=Streptococcus equinus JB1 O X=1294274 GN=queF PE=3 SV=1
MTRTDEMKDLTLLGNQNTKYKYDYDPSILESFDNRHIDNDYFIKFNCPEFTSLCPITGQPDFATIYLSYIPDKLCVESKSLKLYLFSYRNHGDFHENCINTIGKDLIDLLQPRYLEVWGKFTPRGGLSIDPYFNYGKPGTKYEKMADYRLMNHDLYPENIDNR

SEQ ID NO: 50055 - protein, 163 aa, Streptococcus gallolyticus
  misc_feature (1)..(163): tr|A0A3E2SG19|A0A3E2SG19_9STRE NADPH-dependent 7-cyano- 7-deazaguanine reductase OS=Streptococcus gallolyticus OX=315405 GN=queF PE=3 SV=1
MTRTDEMKDLTLLGNQKTTYTYDYDPSILESFDNRHVDNDYFIKFNCPEFTSLCPITGQPDFATIYISYIPDKLCVESKSLKLYLFSYRNHGDFHENCINTIGKDLVDLLQPRFLEVWGKFTPRGGLSIDPYFNYGEPNTKYEKMADYRLINHDLYPENIDNR

SEQ ID NO: 50056 - protein, 163 aa, Streptococcus gallolyticus
  misc_feature (1)..(163): tr|A0A0E1XF90|A0A0E1XF90_STRGY NADPH-dependent 7-cyano- 7-deazaguanine reductase OS=Streptococcus gallolyticus subsp. gallolyticus TX20005 OX=545774 GN=queF PE=3 SV=1
MTRTDEMKDLTLLGNQKTTYTYDYDPSILESFDNRHVDNDYFIKFNCPEFTSLCPITGQPDFATIYISYIPDKLCVESKSLKLYLFSYRNHGDFHENCINTIGKDLIDLLQPRYLEVWGKFTPRGGLSIDPYFNYGKPNTKYEKMADYRLMNHDLYPETIDNR

SEQ ID NO: 50057 - protein, 163 aa, Streptococcus halitosis; identical to SEQ ID NO: 50048
  misc_feature (1)..(163): tr|A0A3R8LT03|A0A3R8LT03_9STRE NADPH-dependent 7-cyano- 7-deazaguanine reductase OS=Streptococcus halitosis OX= 2172545 GN=queF PE=3 SV=1

SEQ ID NO: 50058 - protein, 163 aa, Streptococcus henryi
  misc_feature (1)..(163): tr|A0A1G6B4P6|A0A1G6B4P6_9STRE NADPH-dependent 7-cyano- 7-deazaguanine reductase OS=Streptococcus henryi OX=439 219 GN=queF PE=3 SV=1
MRQANEMGTISALGNQGTKYPTDYAPEVLEIFPNKHPENDYFVKFNCPEFTSLCPMTGQPDFATIYISYIPDELMVESKSLKLYLFSFRNHGDFHEDCMNIIMKDLIKLMKPRYIEVWGKFTPRGGISIDPYCNYGRPDTKWEKFAWDRLCQHDLYPEKVDNR

SEQ ID NO: 50059 - protein, 58 aa, Streptococcus infantarius
  misc_feature (1)..(58): tr|A0A380KMW0|A0A380KMW0_9STRE 7-cyano-7-deazaguanine r eductase OS=Streptococcus infantarius OX=102684 GN=queF PE=4 SV=1
MIDLLQPRYLEVWGKFTPRGGLSIDPYFNYGKPGTKYEKMADYRLMNHDLYPENIDNR

SEQ ID NO: 50060 - protein, 163 aa, Streptococcus infantis
  misc_feature (1)..(163): tr|F9PFQ9|F9PFQ9_9STRE NADPH-dependent 7-cyano-7-deazag uanine reductase OS=Streptococcus infantis X OX=997830 GN=queF PE=3 SV=1
MSQQEEMKNLSLLGNKETNYIFEYQPEVLESFDNRHVENDYFIKFNCPEFTSLCPITAQPDFATIYISYIPDKLCVESKSLKLYLFSYRNHGDFHENCINTIGKDLVNLLDPRYLEVWGKFTPRGGISIDPYYNYGRPGTKYEGLAEQRLFQHDLYPEKIDNR

SEQ ID NO: 50061 - protein, 163 aa, Streptococcus infantis; identical to SEQ ID NO: 50060
  misc_feature (1)..(163): tr|E8K2R1|E8K2R1_9STRE NADPH-dependent 7-cyano-7-deazag uanine reductase OS=Streptococcus infantis ATCC 700779 OX=889204 GN=queF PE=3 SV=1

SEQ ID NO: 50062 - protein, 163 aa, Streptococcus lutetiensis
  misc_feature (1)..(163): tr|S5QXJ8|S5QXJ8_9STRE NADPH-dependent 7-cyano-7-deazag uanine reductase OS=Streptococcus lutetiensis 033 OX=10 76934 GN=queF PE=3 SV=1
MTRTDEIKNLTLLGNQNTKYKYDYDPSILESFDNRHVDNGYSIKFNCPEFTSLCPITGQPDFATIYLSYIPDKLCVESKSLKLYLFSYRNHGDFHENCINTIGKDLIDLLQPRYLKVWGKFTPRGGLSIDPYFNYGKPGTKYEKMADYRLMNHDLYPGTIDNR

SEQ ID NO: 50063 - protein, 163 aa, Streptococcus lutetiensis
  misc_feature (1)..(163): tr|A0A2X3VXK2|A0A2X3VXK2_9STRE NADPH-dependent 7-cyano- 7-deazaguanine reductase OS=Streptococcus lutetiensis O X=150055 GN=queF PE=3 SV=1
MTRTDEMKNLTLLGNQNTKYKYDYDPSILESFDNRHVDNGYFIKFNCPEFTSLCPITGQPDFATIYLSYIPDKLCVESKSLKLYLFSYRNHGDFHENCINTIGKDLIDLLQPRYLKVWGKFTPRGGLSIDPYFNYGKPGTKYEKMADYRLMNHDLYPGTIDNR

SEQ ID NO: 50064 - protein, 163 aa, Streptococcus macedonicus
  misc_feature (1)..(163): tr|A0A2G3NYA0|A0A2G3NYA0_STRMC NADPH-dependent 7-cyano- 7-deazaguanine reductase OS=Streptococcus macedonicus O X=59310 GN=queF PE=3 SV=1
MTRTDEMKDLTLLGNQKTTYTYEYDPSILESFDNRHVDNDYFIKFNCPEFTSLCPITGQPDFATIYISYIPDKLCVESKSLKLYLFSYRNHGDFHENCINTIGKDLIDLLQPRYLEVWGKFTPRGGLSIDPYFNYGKPNTKYEKMADYRLMNHDLYPEIIDNR

SEQ ID NO: 50065 - protein, 163 aa, Streptococcus macedonicus
  misc_feature (1)..(163): tr|A0A1C3SNZ3|A0A1C3SNZ3_STRMC NADPH-dependent 7-cyano- 7-deazaguanine reductase OS=Streptococcus macedonicus O X=59310 GN=queF PE=3 SV=1
MTRTDEMKDLTLLGNQKTTYTYEYDPSILESFDNRHVDNDYFIKFNCPEFTSLCPITGQPDFATIYISYIPDKLCVESKSLKLYLFSYRNHGDFHENCINTIGKDLIDLLQPRYLEVWGKFTPRGGLSIDPYFNYGKPNTKYEKMADYRLMNHDLYPETIDNR

SEQ ID NO: 50066 - protein, 163 aa, Streptococcus mitis
  misc_feature (1)..(163): tr|A0A1X1L5X3|A0A1X1L5X3_STRMT NADPH-dependent 7-cyano- 7-deazaguanine reductase OS=Streptococcus mitis OX=2803 7 GN=queF PE=3 SV=1
MSQQEEMKNLSLLGNKETNYIFEYQPEVLESFDNRHVENDYFIKFNCPEFTSLCPITAQPDFATIYISYIPDKLCVESKSLKLYLFSYRNHGDFHENCINTIGKDLVNLLNPRYLEVWGKFTPRGGISIDPYYNYGKPGTKYEGLAEQRLFQHDLYPEKIDNR

SEQ ID NO: 50067 - protein, 163 aa, Streptococcus mitis
  misc_feature (1)..(163): tr|A0A3R9QQW6|A0A3R9QQW6_STRMT NADPH-dependent 7-cyano- 7-deazaguanine reductase OS=Streptococcus mitis OX=2803 7 GN=queF PE=3 SV=1
MSQQEEMKNLSLLGNKETNYIFEYQPEVLESFDNRHVENDYFIKFNCPEFTSLCPITAQPDFATIYISYIPDKLCVESKSLKLYLFSYRNHGDFHENCINTIGKDLVNLLDPRYLEIWGKFTPRGGISIDPYYNYGRPGTKYEGLAEQRLFQHDLYPEKIDNR

SEQ ID NO: 50068 - protein, 162 aa, Streptococcus mutans
  misc_feature (1)..(162): tr|A0A0E2EXV9|A0A0E2EXV9_STRMG NADPH-dependent 7-cyano- 7-deazaguanine reductase OS=Streptococcus mutans SM6 OX =857119 GN=queF PE=3 SV=1
MSQEEIKDLTLLGNQKTNYNFDYDPNILEAFDNRHQDNDYFIKFNCPEFTSLCPITGQPDFATIYLSYIPDKKCVESKSLKLYLFSYRNHGDFHENCINTIGKDLVDLLQPRYLEVWGKFTPRGGISIDPYYNYGRPNTKYEEMAAYRLMNHDLYPETIDNR

SEQ ID NO: 50069 - protein, 162 aa, Streptococcus mutans
  misc_feature (1)..(162): sp|Q8DUL0|QUEF_STRMU NADPH-dependent 7-cyano-7-deazagua nine reductase OS=Streptococcus mutans serotype c (stra in ATCC 700610 / UA159) OX=210007 GN=queF PE=3 SV=1
MSQEEIKDLTLLGNQKTNYNFDYDLNILEAFDNRHQDNDYFIKFNCPEFTSLCPITGQPDFATIYLSYIPDKKCVESKSLKLYLFSYRNHGDFHENCINTIGKDLVDLLQPRYLEVWGKFTPRGGISIDPYYNYGRPNTKYEEMAAYRLMNHDLYPETIDNR

SEQ ID NO: 50070 - protein, 163 aa, Streptococcus oralis
  misc_feature (1)..(163): tr|A0A428I7U0|A0A428I7U0_STROR NADPH-dependent 7-cyano- 7-deazaguanine reductase OS=Streptococcus oralis OX=130 3 GN=queF PE=3 SV=1
MSQQEEMKNLSLLGNKETNYIFDYQPEVLESFDNRHVENDYFIKFNCPEFTSLCPITAQPDFATIYISYIPDKLCVESKSLKLYLFSYRNHGDFHENCINTIGKDLVNLLDPRYLEVWGKFTPRGGISIDPYYNYGKPGTKYEGLAEQRLFQHDLYPEKIDNR

SEQ ID NO: 50071 - protein, 163 aa, Streptococcus oralis
  misc_feature (1)..(163): tr|D4FUE0|D4FUE0_STROR NADPH-dependent 7-cyano-7-deazag uanine reductase OS=Streptococcus oralis ATCC 35037 OX= 655813 GN=queF PE=3 SV=1
MSQQEEMKNLSLLGNKETNYIFDYQPEVLESFDNRHVENDYFIKFNCPEFTSLCPITAQPDFATIYISYIPDKLCIESKSLKLYLFSYRNHGDFHENCINTIGKDLVNLLDPRYLEVWGKFTPRGGISIDPYYNYGRPGTKYEGLAEQRLFQHDLYPEKIDNR

SEQ ID NO: 50072 - protein, 230 aa, Streptococcus parauberis
  misc_feature (1)..(230): tr|A0A2I8AJ33|A0A2I8AJ33_9STRE PreQ(1) synthase OS=Stre ptococcus parauberis OX=1348 GN=queF PE=4 SV=1
MRTVNEMSKLTGISVRTLHYYDAIGLLNPTYVGANGYRYYDEACLSRLQTILLYRELEFPLKKINEILDSPAFVRDEALLEQIKLLENKRLHLKKLILHATAIHGGKNMSEFDVYDQEVKERWGDSEAFQEYQSKAGKINHEQVAEQMQVIFAEFGHLQNEAFDSPLVQGQVKKLKDYITANFYTCTNEILAGLGQMYTVDDLFKTNIDQMGGQGTAAFASQAIIYYTNQ

SEQ ID NO: 50073 - protein, 163 aa, Streptococcus pasteurianus; identical to SEQ ID NO: 50055
  misc_feature (1)..(163): tr|F5X765|F5X765_STRPX NADPH-dependent 7-cyano-7-deazag uanine reductase OS=Streptococcus pasteurianus (strain ATCC 43144 / JCM 5346 / CDC 1723-81) OX=981540 GN=queF PE=3 SV=1

SEQ ID NO: 50074 - protein, 163 aa, Streptococcus pasteurianus
  misc_feature (1)..(163): tr|A0A564SNC9|A0A564SNC9_9STRE NADPH-dependent 7-cyano- 7-deazaguanine reductase OS=Streptococcus pasteurianus OX=197614 GN=queF PE=3 SV=1
MTRTDEMKDLTLLGNQKTTYTYDYDPSILESFDNRHVDNDYFIKFNCPEFTSLCLITGQPDFATIYISYIPDKLCVESKSLKLYLFSYRNHGDFHENCINTIGKDLVDLLQPRFLEVWGKFTPRGGLSIDPYFNYGEPNTKYEKMADYRLINHDLYPENIDNR

SEQ ID NO: 50075 - protein, 163 aa, Streptococcus peroris
  misc_feature (1)..(163): tr|E8KDG6|E8KDG6_9STRE NADPH-dependent 7-cyano-7-deazag uanine reductase OS=Streptococcus peroris ATCC 700780 O X=888746 GN=queF PE=3 SV=1
MSQQEEMKNLTLLGNKETNYHFDYQPEVLESFANRHVDNDYFIKFNCPEFTSLCPITAQPDFATIYISYIPDKLCVESKSLKLYLFSYRNHGDFHENCINTIGKDLVKLLDPRYLEVWGKFTPRGGISIDPYYNYGKAGTKYEGLAEQRLFQHDLYPEKIDNR

SEQ ID NO: 50076 - protein, 177 aa, Streptococcus pneumoniae
  misc_feature (1)..(177): tr|A0A0T8VTM3|A0A0T8VTM3_STREE NADPH-dependent 7-cyano- 7-deazaguanine reductase OS=Streptococcus pneumoniae OX =1313 GN=queF_2 PE=3 SV=1
MKHQSALVVFSGGQDSTTCLFWAMQHYETVEAVTFAYSQRHHLEIQITREIAKEQGIRHHILDMSLLGQITAQPDFATIHISYIPDKLCVESKSLKLYLFSYRNHGDFHENCINTIGKDLVNLLDPRYLEVWGKFTPRGGISIDPYYNYGKQGTKYEGLAEQRLFQHDLYPEKIDNR

SEQ ID NO: 50077 - protein, 154 aa, Streptococcus pneumoniae; identical to SEQ ID NO: 42622
  misc_feature (1)..(154): sp|Q97P67|QUEF_STRPN Putative NADPH-dependent 7-cyano-7 -deazaguanine reductase OS=Streptococcus pneumoniae ser otype 4 (strain ATCC BAA-334 / TIGR4) OX=170187 GN=queF PE=3 SV=1

SEQ ID NO: 50078 - protein, 163 aa, Streptococcus pseudopneumoniae
  misc_feature (1)..(163): tr|V8IIE2|V8IIE2_9STRE NADPH-dependent 7-cyano-7-deazag uanine reductase OS=Streptococcus pseudopneumoniae 5247 OX=1415761 GN=queF PE=3 SV=1
MSQQEEMKNLSLLGNKETNYIFEYQPEILESFDNRHVENDYFIKFNCPEFTSLCPITAQPDFATIYISYIPDKLCVESKSLKLYLFSYRNHGDFHENCINTIGKDLVNLLDPRYLEVWGKFTPRGGISIDPYYNYGKPGTKYEGLAEQRLFQHDLYPEKIDNR

SEQ ID NO: 50079 - protein, 163 aa, Streptococcus pseudopneumoniae
  misc_feature (1)..(163): tr|A0A1S9ZND4|A0A1S9ZND4_9STRE NADPH-dependent 7-cyano- 7-deazaguanine reductase OS=Streptococcus pseudopneumon iae OX=257758 GN=queF PE=3 SV=1
MSQQEEMKNLSLLGNKETNYIFEYQPEVLESFDNRHVENDYFIKFNCPEFTSLCPITAQPDFATIYISYIPDKLCVESKSLKLYLFSYRNHGDFHENCINTIGKDLVNLLDPRYLEVWGKFTPRGGISIDPYYNYGKPGTKYEGLAEQRLFQHDLYPEKIDNR

SEQ ID NO: 50080 - protein, 162 aa, Streptococcus ratti
  misc_feature (1)..(162): tr|J3AJ53|J3AJ53_STRRT NADPH-dependent 7-cyano-7-deazag uanine reductase OS=Streptococcus ratti FA-1 = DSM 2056 4 OX=699248 GN=queF PE=3 SV=1
MSQEEMKDLTLLGKQKTTYDFDYDPHILEAFDNRHQDNDYFIKFNCPEFTSLCPITGQPDFATIYLSYIPDKKCVESKSLKLYLFSYRNHGDFHENCINTIGKDLVELLQPRYLEVWGKFTPRGGISIDPYYNYGRPNTKYEEMATYRLMNHDIYPETIDNR

SEQ ID NO: 50081 - protein, 162 aa, Streptococcus ratti; identical to SEQ ID NO: 50080
  misc_feature (1)..(162): tr|A0A5J6NMU8|A0A5J6NMU8_STRRT NADPH-dependent 7-cyano- 7-deazaguanine reductase QueF OS=Streptococcus ratti OX =1341 GN=queF PE=4 SV=1

SEQ ID NO: 50082 - protein, 187 aa, Streptococcus salivarius
  misc_feature (1)..(187): tr|A0A1C7C8N8|A0A1C7C8N8_STRSL NADPH-dependent 7-cyano- 7-deazaguanine reductase OS=Streptococcus salivarius OX =1304 GN=queF PE=3 SV=1
MSVVSRKDERTSYNHQNYTRKGRKMSQQEEMKNLTLLGNKETPYIFEYSPQVLESFDNRHTDNDYFIKFNCPEFTSLCPITGQPDFASIYISYIPDQLCVESKSLKLYLFSYRNHGDFHENCINTIGKDLVELLNPRYLEVWGKFTPRGGISIDPYFNYGRPETKYEKMAEQRLFNHDLYPENIDNR

SEQ ID NO: 50083 - protein, 163 aa, Streptococcus salivarius
  misc_feature (1)..(163): tr|A0A3S4P155|A0A3S4P155_STRSL NADPH-dependent 7-cyano- 7-deazaguanine reductase OS=Streptococcus salivarius OX =1304 GN=queF PE=3 SV=1
MSQQEEMKNLTLLGNKETPYIFEYSPQVLESFDNRHTDNDYFIKFNCPEFTSLCPITGQPDFASIYISYIPDQLCVESKSLKLYLFSYRNHGDFHENCINTIGKDLVKLLNPRYLEVWGKFTPRGGISIDPYYNYGRPETKYEKMAEQRLFNHDLYPENIDNR

SEQ ID NO: 50084 - protein, 164 aa, Streptococcus sobrinus
  misc_feature (1)..(164): tr|U2KAY1|U2KAY1_9STRE NADPH-dependent 7-cyano-7-deazag uanine reductase OS=Streptococcus sobrinus W1703 OX=122 7275 GN=queF PE=3 SV=1
MTEKSQEMKDLTLLGNQQVPYVFDYDSSILESFQNRHQGNDYFIKFNCPEFTSLCPITGQPDFATIYISYIPDQLCVESKSLKLYLFSYRNHGDFHENCINTIGKDLVDLLKPRYLEVWGKFTPRGGISIDPYYNYGRPDSKYQEMANYRLLNHDLYPETIDNR

SEQ ID NO: 50085 - protein, 163 aa, Streptococcus sp.; identical to SEQ ID NO: 50070
  misc_feature (1)..(163): tr|A0A1E9GA47|A0A1E9GA47_9STRE NADPH-dependent 7-cyano- 7-deazaguanine reductase OS=Streptococcus sp. HMSC076C0 8 OX=1739270 GN=queF PE=3 SV=1

SEQ ID NO: 50086 - protein, 163 aa, Streptococcus sp.
  misc_feature (1)..(163): tr|A0A1E9AW10|A0A1E9AW10_9STRE NADPH-dependent 7-cyano- 7-deazaguanine reductase OS=Streptococcus sp. HMSC056C0 1 OX=1739299 GN=queF PE=3 SV=1
MSQQEEMKNLSLLGNKETTYIFDYQPEVLESFDNRHVENDYFIKFNCPEFTSLCPITAQPDFATIYISYIPDKLCVESKSLKLYLFSYRNHGDFHENCINTIGKDLVNLLDPRYLEVWGKFTPRGGISIDPYYNYGRPGTKYEDLAEQRLFQHDLYPEKIDNR

SEQ ID NO: 50087 - protein, 163 aa, Streptococcus thermophilus
  misc_feature (1)..(163): tr|G6ENK3|G6ENK3_STRTR NADPH-dependent 7-cyano-7-deazag uanine reductase OS=Streptococcus thermophilus CNCM I-1 630 OX=1042404 GN=queF PE=3 SV=1
MSQQEEMKNLTLLGSKETPYIFEYSPQVLESFDNRHADNDYFIKFNCPEFTSLCPITGQPDFASIYISYIPDQLCVESKSLKLYLFSYRNHGDFHENCINTIGKDLVELLNPRYLEVWGKFTPRGGISIDPYYNYGRPKTKYENMAEQRLFNHDLYPENIDNR

SEQ ID NO: 50088 - protein, 163 aa, Streptococcus thermophilus; identical to SEQ ID NO: 50087
  misc_feature (1)..(163): sp|Q5M061|QUEF_STRT1 NADPH-dependent 7-cyano-7-deazagua nine reductase OS=Streptococcus thermophilus (strain CN RZ 1066) OX=299768 GN=queF PE=3 SV=2

SEQ ID NO: 50089 - protein, 162 aa, Streptococcus troglodytae
  misc_feature (1)..(162): tr|A0A1L7LJR1|A0A1L7LJR1_9STRE NADPH-dependent 7-cyano- 7-deazaguanine reductase OS=Streptococcus troglodytae O X=1111760 GN=queF PE=3 SV=1
MSQEEIKDLTLLGNQKTNYNFDYDPNILEAFDNRHQDNDYFIKFNCPEFTSLCPITGQPDFATIYLSYIPDKKCVESKSLKLYLFSYRNHGDFHENCINTIGKDLVDLLQPRYLEVWGKFTPRGGISIDPYYNYGHPNTKYEEMAAYRLMNHDLYPETINNR

SEQ ID NO: 50090 - protein, 163 aa, Streptococcus vestibularis
  misc_feature (1)..(163): tr|E3CQ05|E3CQ05_STRVE NADPH-dependent 7-cyano-7-deazag uanine reductase OS=Streptococcus vestibularis F0396 OX =904306 GN=queF PE=3 SV=1
MSQQEEMKNLTLLGNKETPYIFEYSPQVLEPFDNRHTDNDYFIKFNCPEFTSLCPITGQPDFASIYISYIPDQLCVESKSLKLYLFSYRNHGDFHENCINTIGKDLVELLNPRYLEVWGKFTPRGGISIDPYYNYGRPETKYEKMAEQRLFNHDLYPENIDNR

SEQ ID NO: 50091 - protein, 163 aa, Streptococcus vestibularis
  misc_feature (1)..(163): tr|A0A3E4XGZ8|A0A3E4XGZ8_STRVE NADPH-dependent 7-cyano- 7-deazaguanine reductase OS=Streptococcus vestibularis OX=1343 GN=queF PE=3 SV=1
MSQQEEMKNLTLLGNKETPYIFEYSPQVLESFDNRHTDNDYFIKFNCPEFTSLCPITGQPDFASIYISYIPDQLCVESKSLKLYLFSYRNHGDFHENCINTIGKDLVELLNPRYLEVWGKFTPRGGISIDPYYNYGRPETKYEKMAEQRLFNHDLYPENIDNR

SEQ ID NO: 50092 - protein, 135 aa, Streptomyces griseocarneus
  misc_feature (1)..(135): tr|A0A3L8II08|A0A3L8II08_9ACTN 7-cyano-7-deazaguanine r eductase OS=Streptomyces griseocarneus OX=51201 GN=CTZ2 7_33275 PE=4 SV=1
MNAPRYLGQSVGHAISADDLDTVPVPPNVGRVTYRTTELSALCPVTGQPDIYDATISYQPNGRSLESKALKHYLWGFRDKGAYCETLAATLADDLTAVLGVPVTVELRQQIRGGLVLSATATATATATATASQGV

SEQ ID NO: 50093 - protein, 141 aa, Streptomyces wuyuanensis
  misc_feature (1)..(141): tr|A0A1H0DJW0|A0A1H0DJW0_9ACTN 7-cyano-7-deazaguanine r eductase OS=Streptomyces wuyuanensis OX=1196353 GN=SAMN 05444921_13437 PE=4 SV=1
MEEDQSVSTMTDGLTFLGRPVYGPIRADDIETIPSASGISEITFSSTELTAVCPLTGQPDIYSIRISYRPRDRAIEHKSLKLYLVGYRDRGIFAEHLAAEIARDLASVVDVAVRVQVTQQPRGGLRLEVDAEGTPGPTSRS

SEQ ID NO: 50094 - protein, 270 aa, Succinatimonas hippei
  misc_feature (1)..(270): tr|E8LJG6|E8LJG6_SUCHY NADPH-dependent 7-cyano-7-deazag uanine reductase OS=Succinatimonas hippei (strain DSM 2 2608 / JCM 16073 / KCTC 15190 / YIT 12066) OX=762983 GN =HMPREF9444_00845 PE=3 SV=1
MQKNELLLGKATSYLEEYDPTVLQPIGRNLGRAQLKSNVSLGYDLWRLYEITYLNRQGIPQIAVGTIKVPATSPYIVESKSLKLYIGSFTQTKFSNKEEVTAIIAHDLSKVLETNVEVKLFALNENNECFNIQMLSGTSIDQEPIEKPVYEPDPKLLVPSNGHYVIETLRSDLLRTLCPVTGQPDHASIMIRYEGEQIDKKALLSYIVSYRRHRGFHEQCCEQIFNDIKQNLRPVKLCVMACFTRRGGIDINPIRNEFSEDIIPVRTIRQ

SEQ ID NO: 50095 - protein, 287 aa, Succinatimonas sp.
  misc_feature (1)..(287): tr|R5EF07|R5EF07_9GAMM Putative queuine synthase OS=Suc cinatimonas sp. CAG:777 OX=1262974 GN=BN779_00380 PE=4 SV=1
MDNNESKAPEVSSGMSNLVLGKNTTYDNEYAPSRLQRIERQLGRSHIERLQKFVGYDIWRLYEMTYLNLNGLPKVCMGIMRVPADSKYIVESKSLKLYELSFTMTKFKDLKEVESVFEHDLSTLLESNVKVSLFELDNEEFSIRAVKGTCLEELDCCKDLSFKGYEYSPSLLTFDKEEKTIKKTYYTNLFRSLCPVTSQPDHAVVRIDYEGKKPDLKGLLSYLVTLRNHQGFHEQCVELIYSDLMYYLKPSKLTVSAYFTRRGGIDINPVRSSAKLNCSESVRTIRQ

SEQ ID NO: 50096 - protein, 165 aa, Succiniclasticum ruminis
  misc_feature (1)..(165): tr|A0A1I1ZJA6|A0A1I1ZJA6_9FIRM NADPH-dependent 7-cyano- 7-deazaguanine reductase OS=Succiniclasticum ruminis DS M 9236 OX=1123323 GN=queF PE=3 SV=1
MTAGRTKKDLQGVKLLGNKTAYRDDYAPEVLECFSNKHPENDYFVKFNCPEFTSLCPKTGQPDFATIYISYVPDQKLVESKSLKLYLFSFRNHGDFHEDCVNIIMKDLIRLLDPKYIEVWGKFLPRGGLSIDPYANYGKKGTDWEKTAHQRLHFHDMQPEMVNNR

SEQ ID NO: 50097 - protein, 165 aa, Succiniclasticum ruminis
  misc_feature (1)..(165): tr|A0A1G6NZZ1|A0A1G6NZZ1_9FIRM NADPH-dependent 7-cyano- 7-deazaguanine reductase OS=Succiniclasticum ruminis OX =40841 GN=queF PE=3 SV=1
MAAGRTEKDLQGVSLLGNKTKYRDDYAPDVLECFPNKHPENDYFVKFNCPEFTSLCPKTGQPDFATIYISYVPDQKLVESKSLKLYLFSFRNHGDFHEDCVNIIMKDLIGLLDPKYIEVWGKFLPRGGLSIDPYANYGKKGTDWEKTAHHRLHYHDMNPETVQNR

SEQ ID NO: 50098 - protein, 275 aa, Succinivibrio dextrinosolvens
  misc_feature (1)..(275): tr|A0A1T4V0V7|A0A1T4V0V7_9GAMM 7-cyano-7-deazaguanine r eductase OS=Succinivibrio dextrinosolvens DSM 3072 OX=1 123324 GN=SAMN02745213_00484 PE=4 SV=1
MENSPLVLGKNTTYDNEYAPSRLHRIERALGRSAIKHLKSFNGMDIWRLYEMTYLNLNGLPEVCMGIMKVPASSRYIVESKSLKLYELSFTMTKFESLKDVETVFARDLSRLLECEVEVKLFEVKNKEFAFESPKGICLEEQDFAKSMSFKSYEYSPKVLTLAEGKKTVSKIYYTNLFRSLCPVTSQPDHATVMIEYKGLAPNEESLLNYLVSLRNHQGFHEQCVELIYSDIMHALEPSELTVSAFFTRRGGIDINPVRTNLKDQKFTSVRFIRQ

SEQ ID NO: 50099 - protein, 281 aa, Succinivibrio sp.
  misc_feature (1)..(281): tr|A0A3C1W1H2|A0A3C1W1H2_9GAMM NADPH-dependent 7-cyano- 7-deazaguanine reductase QueF OS=Succinivibrio sp. OX=2 053619 GN=DCQ86_05595 PE=4 SV=1
MYFWRFIVDTTNLVLGKSTTYQEEYSPSLLQRIERQLGRSAIKNLKSFEGFDVWHLYELTYLNLNGLPCVCMGCMIVPAKSKYIVESKSLKLYTMSFTMTRFKDLSFVQKVFERDLSKLLECKVEVKLYPLHSKDFAIHTIKGTCLEELRCCKDLNFKNFEYSPEVLAFDDKKEISKTYYTNLFRSLCPVTAQPDYASLMICYEGRKLKEESLLTYLVSLRHHQGFHEQCVELIYSDLVSYLNPKKLTVAAFFTRRGGIDINPVRTNQKSLSPLMLRTIRQ

SEQ ID NO: 50100 - protein, 298 aa, Succinivibrio sp.
  misc_feature (1)..(298): tr|A0A316SJE6|A0A316SJE6_9GAMM NADPH-dependent 7-cyano- 7-deazaguanine reductase QueF OS=Succinivibrio sp. OX=2 053619 GN=DBY31_03700 PE=4 SV=1
MHLRLQIRRFIMDNNESKAPEVSSGMSNLVLGKNTTYDNEYAPSRLQRIERQLGRSHIERLQKFVGYDIWRLYEMTYLNLNGLPKVCMGIMRVPADSKYIVESKSLKLYELSFTMTKFKDLKEVESVFEHDLSTLLESNVKVSLFELDNEEFSTRAVKGTCLEELDCCKDLSFKGYEYSPSLLTFDKEEKTIKKTYYTNLFRSLCPVTSQPDHAVIRIDYEGKKPDLKGLLSYLVTLRNHQGFHEQCVELIYSDLMYYLKPSKLTVSAYFTRRGGIDINPVRSSAKLNSSESVRTIRQ

SEQ ID NO: 50101 - protein, 270 aa, Succinivibrionaceae bacterium
  misc_feature (1)..(270): tr|A0A3C0C9Z9|A0A3C0C9Z9_9GAMM PreQ(1) synthase OS=Succ inivibrionaceae bacterium OX=2053620 GN=DCL74_01755 PE= 4 SV=1
MPAGKLSLGANSTTYFDEYNPSVLRPIERSLGRAVLKRKSFNGFDLWHLYEITFLNKLGIPKVCCGTIKIDAKSQYIVESKSLKLYLLSFTMTKFKDLAEVCAVITSDLERELKIRPEVKLWDLEYCPFIPQKNDGVLIDTETPPRIVYSCDDTLLVPSAEGMTVRETLRSNILRTLCPVTSQPDHAEVTISYAGKKIDHAGLFAYLISLRSHQGFHEQCCELIFSDIMERLHPEELTVCCSFTRRGGIDITPIRSTLSKVCEIPRTLRQ

SEQ ID NO: 50102 - protein, 282 aa, Succinivibrionaceae bacterium
  misc_feature (1)..(282): tr|A0A348YMW1|A0A348YMW1_9GAMM NADPH-dependent 7-cyano- 7-deazaguanine reductase QueF OS=Succinivibrionaceae ba cterium OX=2053620 GN=DCR21_06025 PE=4 SV=1
MHKNFILDAGTVMGHKNNLVLGKSSIYYNEYNPKVLHPIERMIGRAPLKLKNFSGYDLWRLYEITYLNAFGTPCVATGEIIVPADSTYIIESKSLKLYIGSFTMTKMKNLKQLEDVIRADLSKELECEIQVNLFQVEDCPFSIVKLPGELIDNEERLPMQNLAYNPDILSADKSLVVRETLRSNILRTLCPVTGQPDHASIQISYEGNRIDRQNLFAYLASLRTHQGFHEQCVELIFSDIKTTLNPVHLQVTACFTRRGGIDINPVRTDFDSAEKPVRLIRQ

SEQ ID NO: 50103 - protein, 153 aa, Sulfitobacter brevis
  misc_feature (1)..(153): tr|A0A1I1ULB6|A0A1I1ULB6_9RHOB NADPH-dependent 7-cyano- 7-deazaguanine reductase OS=Sulfitobacter brevis OX=743 48 GN=queF PE=3 SV=1
METIYSNLTQLGGATELPASPETAVLERVANPQADVDYCVRFTAPEFTSLCPMTGQPDFAHLVIDYVPDAYLVESKSLKLFLGAFRNHGAFHEDCTVSIARRLVDFLGPRWLRIGGYWYPRGGIPIDVFWQTGAMPQGVWIPDQGVPPYRGRG

SEQ ID NO: 50104 - protein, 166 aa, Sulfitobacter donghicola; identical to SEQ ID NO: 50012
  misc_feature (1)..(166): tr|A0A410XXC7|A0A410XXC7_9RHOB NADPH-dependent 7-cyano- 7-deazaguanine reductase OS=Sulfitobacter donghicola OX =421000 GN=queF PE=3 SV=1

SEQ ID NO: 50105 - protein, 153 aa, Sulfitobacter guttiformis
  misc_feature (1)..(153): tr|A0A420DJK0|A0A420DJK0_9RHOB NADPH-dependent 7-cyano- 7-deazaguanine reductase OS=Sulfitobacter guttiformis O X=74349 GN=queF PE=3 SV=1
METIYSDLKQLGAETDLPKSPEDAVLERVSNPQADVAYCVRFTAPEFTSLCPMTGQPDFAHLVLDYVPAEFLVESKSLKLFLGSFRNHGAFHEDCTISIARRLVDFLNPQWLRIGGYWYPRGGIPIDVFWQTGAMPEGVWIPDQGVPPYRGRG

SEQ ID NO: 50106 - protein, 154 aa, Sulfitobacter indolifex
  misc_feature (1)..(154): tr|A9E8K0|A9E8K0_9RHOB NADPH-dependent 7-cyano-7-deazag uanine reductase OS=Sulfitobacter indolifex HEL-45 OX=3 91624 GN=queF PE=3 SV=1
MSDDIYSNLKQLGGETRIPASPEEAELERVPNPQADVAYNVRFTAPEFTSLCPMTGQPDFAHLVIDYVPGPWLVESKSLKLFLTSFRNHGAFHEDCTISIARRLADFLDPQWLRIGGYWYPRGGIPIDVFWQTGPLPEGVWIPDQGVPPYRGRG

SEQ ID NO: 50107 - protein, 153 aa, Sulfitobacter litoralis
  misc_feature (1)..(153): tr|A0A1H0LHU2|A0A1H0LHU2_9RHOB NADPH-dependent 7-cyano- 7-deazaguanine reductase OS=Sulfitobacter litoralis OX= 335975 GN=queF PE=3 SV=1
METIYSDLQQLGGKTELPASPEEAMLEKVSNPQADVDYCVRFTAPEFTSLCPMTGQPDFAHLVIDYVPDQYLVESKSLKLYLGAFRNHGAFHEDCTVSIGRRLVGLLSPRWLRIGGYWYPRGGIPIDVFWQTGETPKNVWIPDQGVPPYRGRG

SEQ ID NO: 50108 - protein, 153 aa, Sulfitobacter pontiacus
  misc_feature (1)..(153): tr|A0A1H2T6N5|A0A1H2T6N5_9RHOB NADPH-dependent 7-cyano- 7-deazaguanine reductase OS=Sulfitobacter pontiacus OX= 60137 GN=queF PE=3 SV=1
METIYSDLQQLGGKTELPASPEEAMLEKVANPQADVDYCVRFTAPEFTSLCPMTGQPDFAHLVIDYVPDQYLVESKSLKLYLGAFRNHGAFHEDCTVSIGRRLVELLSPRWLRIGGYWYPRGGIPIDVFWQTGETPNSVWIPDQGVPPYRGRG

SEQ ID NO: 50109 - protein, 153 aa, Sulfitobacter pseudonitzschiae
  misc_feature (1)..(153): tr|A0A073J3D1|A0A073J3D1_9RHOB NADPH-dependent 7-cyano- 7-deazaguanine reductase OS=Sulfitobacter pseudonitzsch iae OX=1402135 GN=queF PE=3 SV=1
METIYSDLKQLGGKTELPETPEQAVLERVANPQADVSYCVRFTAPEFTSLCPMTGQPDFAHIVIDYVPDQWLVESKSLKLFLGAFRNHGAFHEDCTVSIARRLVELLSPRWLRIGGYWYPRGGIPIDVFWQTGAMPADVWIPDQGVPPYRGRG

SEQ ID NO: 50110 - protein, 153 aa, Sulfitobacter sp.
  misc_feature (1)..(153): tr|A0A085BV96|A0A085BV96_9RHOB NADPH-dependent 7-cyano- 7-deazaguanine reductase OS=Sulfitobacter sp. CB2047 OX =1525218 GN=queF PE=3 SV=1
METIYSDLQQLGGKTELPASPEEAMLEKVANPQADVDYCVRFTAPEFTSLCPMTGQPDFAHLVIDYVPDQYLVESKSLKLYLGAFRNHGAFHEDCTVSIGRRLVELLSPRWLRIGGYWYPRGGIPIDVFWQTGETPKSVWIPDQGVPPYRGRG

SEQ ID NO: 50111 - protein, 153 aa, Sulfitobacter sp.
  misc_feature (1)..(153): tr|A0A345R173|A0A345R173_9RHOB NADPH-dependent 7-cyano- 7-deazaguanine reductase OS=Sulfitobacter sp. SK025 OX= 1389011 GN=queF PE=3 SV=1
METIYSDLQQLGGKTELPASPEEAMLEKVANPQADVDYCVRFTAPEFTSLCPMTGQPDFAHLVIDYVPDHYLVESKSLKLYLGAFRNHGAFHEDCTVSIGRRLVELLSPRWLRIGGYWYPRGGIPIDVFWQTGETPKSVWIPDQGVPPYRGRG

SEQ ID NO: 50112 - protein, 139 aa, Sulfuricella denitrificans
  misc_feature (1)..(139): tr|S6B4E9|S6B4E9_SULDS NADPH-dependent 7-cyano-7-deazag uanine reductase OS=Sulfuricella denitrificans (strain DSM 22764 / NBRC 105220 / skB26) OX=1163617 GN=queF PE= 3 SV=1
MSSQPSKSLETFENPNPERDFHIHMEIPEFTCLCPKTGQPDFATLYLDYIADQKCVELKSLKMYIWSFRNEGAFHEAVTNSILNDLVTATQPRFMRLTAKFYVRGGIFTNVVAEHRKPGWEPQPRVDLTAFEANSNTRG

SEQ ID NO: 50113 - protein, 139 aa, Sulfuricella sp.
  misc_feature (1)..(139): tr|A0A0E9ME58|A0A0E9ME58_9PROT NADPH-dependent 7-cyano- 7-deazaguanine reductase OS=Sulfuricella sp. T08 OX=163 2857 GN=queF PE=3 SV=1
MASQPSKILETFDNPNPERDFHIHMEIPEFTCLCPKTGQPDFATLYLDYIADQKCVELKSLKMYIWSFRNEGAFHEAVTNSILNDLVAATQPRFMRLTAKFYVRGGIFTNVVAEHRKPGWEPQPRVDLTAFKANSNTRG

SEQ ID NO: 50114 - protein, 129 aa, Sulfuricurvum kujiense
  misc_feature (1)..(129): tr|A0A2D3WBA6|A0A2D3WBA6_9HELI NADPH-dependent 7-cyano- 7-deazaguanine reductase OS=Sulfuricurvum kujiense OX=1 48813 GN=queF PE=3 SV=1
MKYGEQIVENFNIEKDFEIWPNQHERDYVIKVTLPEFTCLCPRSGYPDFATIYVEYTPDKWVAELKAIKLYINSFRNRHISHENSANEIYSTFETKIAPKRLKVVADYYPRGNVHTVVEIDSEKMVEEK

SEQ ID NO: 50115 - protein, 129 aa, Sulfuricurvum kujiense
  misc_feature (1)..(129): tr|E4TW57|E4TW57_SULKY NADPH-dependent 7-cyano-7-deazag uanine reductase OS=Sulfuricurvum kujiense (strain ATCC BAA-921 / DSM 16994 / JCM 11577 / YK-1) OX=709032 GN=q ueF PE=3 SV=1
MKYGEQIVENFDVEKDFEIWPNQHERDYVIKVTLPEFTCLCPRSGYPDFATIYVEYTPDKWVAELKAIKLYINSFRNRHISHENSANEIYSVFEQKIAPKRLKVVADYYPRGNVHTVVEIDSEKMVKEK

SEQ ID NO: 50116 - protein, 129 aa, Sulfuricurvum sp.
  misc_feature (1)..(129): tr|A0A4R4G5I5|A0A4R4G5I5_9HELI NADPH-dependent 7-cyano- 7-deazaguanine reductase OS=Sulfuricurvum sp. IAE1 OX=2 546102 GN=queF PE=3 SV=1
MKYGEQIVENFDVEKDFEIWPNQHERDYVIKVTLPEFTCLCPRSGYPDFATIYVEYTPDKWVAELKAIKLYINSFRNRHISHENSANEIYSVFEQKIAPKRLKVVADFYPRGNVHTVVEIDSEKIVKEK

SEQ ID NO: 50117 - protein, 129 aa, Sulfuricurvum sp.; identical to SEQ ID NO: 44987
  misc_feature (1)..(129): tr|A0A259CLS4|A0A259CLS4_9HELI NADPH-dependent 7-cyano- 7-deazaguanine reductase OS=Sulfuricurvum sp. 17-40-25 OX=1970439 GN=queF PE=3 SV=1

SEQ ID NO: 50118 - protein, 276 aa, Sulfuriferula multivorans
  misc_feature (1)..(276): tr|A0A401JEQ4|A0A401JEQ4_9PROT NADPH-dependent 7-cyano- 7-deazaguanine reductase OS=Sulfuriferula multivorans O X=1559896 GN=queF PE=3 SV=1
MNTPEQSLLGKPACYQAEYDPSLLFPIPRQDKRSEIGIRGTLPFFGADIWNAYEVSWLNLRGKPQVAIATFIIPAESPNIVESKSFKLYLNSYNQTRLDDTDTLLARLKADVSAAVGASVQVRLTLPDAFGNMAFAELEGLSLDRLDIEVDSYAPNPALLRASKDAEPVEEKLVSNLLKSNCLVTGQPDWGSVQIHYVGAPIDQAGLLQYLIGFRTHNEFHEQCVERIFMDVLRQCKPLKLAVYARYTRRGGLDINPWRSNISGSQLPLNLRCARQ

SEQ ID NO: 50119 - protein, 276 aa, Sulfuriferula plumbiphila
  misc_feature (1)..(276): tr|A0A512L7E4|A0A512L7E4_9PROT NADPH-dependent 7-cyano- 7-deazaguanine reductase OS=Sulfuriferula plumbiphila O X=171865 GN=queF PE=3 SV=1
MNTPEQSLLGKPACYQAEYDPSLLFPIPRQDKRNAIGISGTLPFFGADIWNAYEVSWLNLRGKPQVAIATFIIPADSPNIVESKSFKLYLNSYNQTRLADTEALLARLKVDVSTAVGAAVQVRLTLPDAFGSVAFAELKGLSLDRLDIEVDSYAPNPALLRATQGAGPVEETLVSNLLKSNCLVTGQPDWGSVQIHYIGAPIDQAGLLQYLIGFRTHNEFHEQCVERIFMDVLRQCKPLKLTVYARYTRRGGLDINPWRSNISGSPLPPNLRCARQ

SEQ ID NO: 50120 - protein, 278 aa, Sulfuriferula sp.
  misc_feature (1)..(278): tr|A0A1Y0GAY2|A0A1Y0GAY2_9PROT NADPH-dependent 7-cyano- 7-deazaguanine reductase OS=Sulfuriferula sp. AH1 OX=19 85873 GN=queF PE=3 SV=1
MTDASLTGTVLGKPACYQTEYDPGLLFPIPRQNKRDEICLGGALPFMGADIWNGYELSWLNMRGKPQIAIATFVVPADSPNIIESKSFKLYLNSFNQTHLQSHEELLARLRADLSQAAGAPVQVRLILPEDFAGLSMGELEGELLDRLDIGVDSYTPNPELLTAQADAETVEQKLVSHLLKSNCLVTGQPDWASVQIHYVGAPIDEAGLLRYLIGFRTHNEFHEQCVERIFVDILRMCKPIKLSVYARYTRRGGLDINPWRTNFSTGGMPPNLRHARQ

SEQ ID NO: 50121 - protein, 123 aa, Sulfurihydrogenibium azorense
  misc_feature (1)..(123): tr|C1DTW2|C1DTW2_SULAA NADPH-dependent 7-cyano-7-deazag uanine reductase OS=Sulfurihydrogenibium azorense (stra in Az-Fu1 / DSM 15241 / OCM 825) OX=204536 GN=queF PE=3 SV=1
MKYGEKEILESKLEPWPNPYPDRNYTIEITFPEFSCLCPRSGYPDYATIKITYIPDQYIVELKSLKLYLNKYRNQYISHEEATNKIYEDLYNLLKPRKLQVIGDWNPRGNVKTIIKVSSEDNP

SEQ ID NO: 50122 - protein, 123 aa, Sulfurihydrogenibium sp.
  misc_feature (1)..(123): tr|B2V950|B2V950_SULSY NADPH-dependent 7-cyano-7-deazag uanine reductase OS=Sulfurihydrogenibium sp. (strain YO 3AOP1) OX=436114 GN=queF PE=3 SV=1
MKYGEKEILEAKLEPWPNPYPERNYTIDITFPEFSCLCPRSGYPDYATIKIIYIPDQYIVELKSLKLYLNKYRNQYISHEEATNKIYEDLYNLLKPRKLEVIGDWNPRGNVKTIIKVSSEDNK

SEQ ID NO: 50123 - protein, 123 aa, Sulfurihydrogenibium sp.
  misc_feature (1)..(123): tr|A0A2J6W2G9|A0A2J6W2G9_9AQUI NADPH-dependent 7-cyano- 7-deazaguanine reductase OS=Sulfurihydrogenibium sp. OX =2053621 GN=queF PE=3 SV=1
MKYGEKEILESKLEPWPNPYPDRNYTIDITFPEFSCLCPRSGYPDYATIKIIYIPDQYIVELKSLKLYLNKYRNQYISHEEATNKIYEDLYNLLKPRKLEVIGDWNPRGNVKTIIRVSSEDNR

SEQ ID NO: 50124 - protein, 123 aa, Sulfurihydrogenibium yellowstonense
  misc_feature (1)..(123): tr|C4FKD6|C4FKD6_9AQUI NADPH-dependent 7-cyano-7-deazag uanine reductase OS=Sulfurihydrogenibium yellowstonense SS-5 OX=432331 GN=queF PE=3 SV=1
MKYGEKEILEANLEPWPNPYPERNYTIDITFPEFSCLCPRSGYPDYATIKITYIPDQYIVELKSLKLYLNKYRNQYISHEEATNKIYEDLYNLLKPRKLEVIGDWNPRGNVKTIIKVSSEDNK

SEQ ID NO: 50125 - protein, 165 aa, Sulfurimonas autotrophica
  misc_feature (1)..(165): tr|E0UU67|E0UU67_SULAO NADPH-dependent 7-cyano-7-deazag uanine reductase OS=Sulfurimonas autotrophica (strain A TCC BAA-671 / DSM 16294 / JCM 11897 / OK10) OX=563040 G N=queF PE=3 SV=1
MDEKEYKAKRAKEVAQLGAGETEYKYEYAPELLEIFENVHPEMDYWVTLNADEFTSLCPKTNQPDFGTIIINYIPDVKMVESKSLKLYLFSFINSGEFHEDVVNKIGKDLVALMQPKYLEVIGLFYPRGNISIHPTFSYAKDEEKYKEIEKYRFLNRNLNPQRVE

SEQ ID NO: 50126 - protein, 119 aa, Sulfurimonas autotrophica
  misc_feature (1)..(119): tr|E0UU68|E0UU68_SULAO Uncharacterized protein OS=Sulfu rimonas autotrophica (strain ATCC BAA-671 / DSM 16294 / JCM 11897 / OK10) OX=563040 GN=Saut_1396 PE=4 SV=1
MKLTPLHVKENTTIQYMSHELLFLAQSGQPYRGTIYINFTSTGETFDLRDFKKYLTSLRDKKYNAEDIVYEIYETITKSIQTENLGVIVDLTARGGIQQRLCYGAEFDALQKENIFQVR

SEQ ID NO: 50127 - protein, 125 aa, Sulfurimonas denitrificans
  misc_feature (1)..(125): sp|Q30UP6|QUEF_SULDN NADPH-dependent 7-cyano-7-deazagua nine reductase OS=Sulfurimonas denitrificans (strain AT CC 33889 / DSM 1251) OX=326298 GN=queF PE=3 SV=1
MKYGEKIVSEFDVEKDLEIWPNEHKRDYLIKMTLPEFSCLCPRSGYPDYATIYLEYTPNERVVELKAIKLYINSFRDRHISHENSANEIYTVLERKLKPKYMKIVADYNPRGNVHTVIEIDSSKL

SEQ ID NO: 50128 - protein, 125 aa, Sulfurimonas gotlandica
  misc_feature (1)..(125): tr|B6BGZ1|B6BGZ1_SULGG NADPH-dependent 7-cyano-7-deazag uanine reductase OS=Sulfurimonas gotlandica (strain DSM 19862 / JCM 16533 / GD1) OX=929558 GN=queF PE=3 SV=1
MKYGEKIVNEFDIEKDLEIWPNQHKRNYLIKMTLPEFSCLCPRSGYPDYATIYLEYTPDEWVVELKAMKLYINSFRDKHVSHENSANEIYETLENKIKPKYMKIVADYNPRGNVHTVIEIDSSKL

SEQ ID NO: 50129 - protein, 126 aa, Sulfurimonas hongkongensis
  misc_feature (1)..(126): tr|T0JQ41|T0JQ41_9HELI NADPH-dependent 7-cyano-7-deazag uanine reductase OS=Sulfurimonas hongkongensis OX=11721 90 GN=queF PE=3 SV=1
MKYGEKIVNEFDIEKDLEIWPNQYKRDYLIKMTLPEFSCLCPRSGYPDYATIYLEYTPDEFVIELKAMKLYINSFRDRHISHENSANEIYEALENKIKPKYMKIVADYNPRGNVHTVIEIDSSKIK

SEQ ID NO: 50130 - protein, 128 aa, Sulfurimonas sp.; identical to SEQ ID NO: 46427
  misc_feature (1)..(128): tr|A0A2M7D4L4|A0A2M7D4L4_9HELI NADPH-dependent 7-cyano- 7-deazaguanine reductase OS=Sulfurimonas sp. CG02_land_ 8_20_14_3_00_36_67 OX=1975545 GN=queF PE=3 SV=1

SEQ ID NO: 50131 - protein, 128 aa, Sulfurimonas sp.
  misc_feature (1)..(128): tr|A0A2G2AQ96|A0A2G2AQ96_9HELI NADPH-dependent 7-cyano- 7-deazaguanine reductase OS=Sulfurimonas sp. OX=2022749 GN=queF PE=3 SV=1
MSTSKYGEKILNEFDVEKDLEIWPNAHKRNYLIKMTLPEFSCLCPRSGYPDYATIYLEYTPNEWVVELKAMKLYINSFRDKHISHENSANEIYEILDAKLKPKYMKVIADYNPRGNVHTVIEIDSSKL

SEQ ID NO: 50132 - protein, 139 aa, Sulfurirhabdus autotrophica
  misc_feature (1)..(139): tr|A0A4R3YG17|A0A4R3YG17_9PROT NADPH-dependent 7-cyano- 7-deazaguanine reductase OS=Sulfurirhabdus autotrophica OX=1706046 GN=queF PE=3 SV=1
MPSQPSQSLETFDNPNPERDFHIHMEIPEFTCLCPKTGQPDFATLYLDYIPDKHCVELKSLKLYIWGYRNEGAFHEAVTNRILDDLAKVTKPRFMRLTAKFFVRGGIFTNVVAEYRKKGWEPKPLVDLTRFDSQSNTRG

SEQ ID NO: 50133 - protein, 139 aa, Sulfurisoma sediminicola
  misc_feature (1)..(139): tr|A0A497XER4|A0A497XER4_9PROT NADPH-dependent 7-cyano- 7-deazaguanine reductase OS=Sulfurisoma sediminicola OX =1381557 GN=queF PE=3 SV=1
MPSQPAKVLETFPNPAPHRDYQIHMEVPEFTCLCPKTGQPDFAVLTLDYVPDRLCVELKSLKLYVWSFREEGHFHEDVTNRILDDLAKAVKPRFMRLTARFFVRGGIFTNVVAEHRKKGWKPTPRVDLAEFAAQSNFRG

SEQ ID NO: 50134 - protein, 143 aa, Sulfuritalea hydrogenivorans
  misc_feature (1)..(143): tr|W0SFI7|W0SFI7_9PROT NADPH-dependent 7-cyano-7-deazag uanine reductase OS=Sulfuritalea hydrogenivorans sk43H OX=1223802 GN=queF PE=3 SV=1
MPKPAIPTRAKSLETFANPASHRDYQIHMEIPEFTCLCPKTGQPDFAVLTLDYIADRLCVELKSLKLYIWSFREEGHFHEDVTNRILDDLVKATRPRFMRLTARFYVRGGIFTNVVAEHRKKGWKPAAKVELAEFPAQSNTRG

SEQ ID NO: 50135 - protein, 139 aa, Sulfuritortus calidifontis
  misc_feature (1)..(139): tr|A0A4R3JT82|A0A4R3JT82_9PROT NADPH-dependent 7-cyano- 7-deazaguanine reductase OS=Sulfuritortus calidifontis OX=1914471 GN=queF PE=3 SV=1
MPSQPTKDLETFENPTPTRDFQIHIEIPEFTCLCPKTGQPDFATLFLDYIPDQKCVELKSLKLYIWSFRNEGHFHEAVTNRILDDLVRATEPRFMRLTAKFYVRGGIFTNVVAEHRKAGWQPQPRVELAEFAPQSNTRG

SEQ ID NO: 50136 - protein, 273 aa, Sulfurivirga caldicuralii
  misc_feature (1)..(273): tr|A0A1N6H9G5|A0A1N6H9G5_9GAMM NADPH-dependent 7-cyano- 7-deazaguanine reductase OS=Sulfurivirga caldicuralii O X=364032 GN=queF PE=3 SV=1
MTDPYAQLPLGKPTAYCSQYDPTLLCPLPRQAKRDELGIQAEALPFVGVDVWTGYELSWLNAQGKPQVAVGRFSFDAASPMLVESKSFKLYLNSFNNTVFASEEAVRDTLARDLSEASGAPVQVALYDVEAAPPCAPAPEGMRLDDLDIACSDYDLAPQHLRSGGETLAETLYSHLLKSNCLVTGQPDWGTVVIHYRGPRIDHAGLLRYIVSFRNHWEFHEQCVERIFVDILRHCQPQELLVYARYLRRGGLDINPYRSTHPFEPDTSRLLRQ

SEQ ID NO: 50137 - protein, 131 aa, Sulfurospirillum barnesii
  misc_feature (1)..(131): tr|I3XTR7|I3XTR7_SULBS NADPH-dependent 7-cyano-7-deazag uanine reductase OS=Sulfurospirillum barnesii (strain A TCC 700032 / DSM 10660 / SES-3) OX=760154 GN=queF PE=3 SV=1
MKYGEQIIKEFDVEKDLEIWPNQHKKNYVIKLILPEFCCLCPRSGYPDFATIYIDYIPNELVVELKAIKLYINSFMNRNISHENSANEIYDLLDSKLKPKWLKVVADFNPRGNVHTVIEIDSKLVRNETSC

SEQ ID NO: 50138 - protein, 131 aa, Sulfurospirillum cavolei
  misc_feature (1)..(131): tr|A0A2D3WKP9|A0A2D3WKP9_9PROT NADPH-dependent 7-cyano- 7-deazaguanine reductase OS=Sulfurospirillum cavolei OX =366522 GN=queF PE=3 SV=1
MKYGEKIIKEFDVEKDLEIWPNQHKKNYVIKLTLPEFCCLCPRSGYPDFATIYIDYIPNEWVVELKAIKLYINSFMNRNISHENSANEIYDLLDTKLKPKWLKVVADFNPRGNVHTVIEIDSKVVRNESTC

SEQ ID NO: 50139 - protein, 131 aa, Sulfurospirillum deleyianum
  misc_feature (1)..(131): tr|D1B0Q1|D1B0Q1_SULD5 NADPH-dependent 7-cyano-7-deazag uanine reductase OS=Sulfurospirillum deleyianum (strain ATCC 51133 / DSM 6946 / 5175) OX=525898 GN=queF PE=3 S V=1
MKYGEKIITEFDVEKDLEIWPNQHKKNYVIKLTLPEFCCLCPRSGYPDFATIYIDYIPNELVVELKAIKLYINSFMNRNISHENSANEIYDLLDKKLKPKWLKVVADFNPRGNVHTVIEIDSKLVRNETSC

SEQ ID NO: 50140 - protein, 131 aa, Sulfurospirillum halorespirans
  misc_feature (1)..(131): tr|A0A1D7TFQ0|A0A1D7TFQ0_9PROT NADPH-dependent 7-cyano- 7-deazaguanine reductase OS=Sulfurospirillum halorespir ans DSM 13726 OX=1193502 GN=queF PE=3 SV=1
MKYGEQIIKEFDVEKDLEIWPNQHKKNYVIKLTLPEFCCLCPRSGYPDFATIYIDYIPNGFVVELKAIKLYINSFMNRNISHENSANEIYDLLDSKLKPKWLKVVADFNPRGNVHTVIEIDSKQVRNESIC

SEQ ID NO: 50141 - protein, 131 aa, Sulfurospirillum multivorans
  misc_feature (1)..(131): tr|A0A5B9TML9|A0A5B9TML9_SULMU NADPH-dependent 7-cyano- 7-deazaguanine reductase OS=Sulfurospirillum multivoran s OX=66821 GN=queF PE=3 SV=1
MKYGEQIIKEFDVEKDLEIWPNQHQKNYVIKLTLPEFCCLCPRSGYPDFATIYIDYIPNGFVVELKAIKLYINSFMNRNISHENSANEIYDLLDSKLKPKWLKVVADFNPRGNVHTVIEIDSKQVRNESAC

SEQ ID NO: 50142 - protein, 127 aa, Sulfurospirillum sp.
  misc_feature (1)..(127): tr|A0A2D3VZN1|A0A2D3VZN1_9PROT NADPH-dependent 7-cyano- 7-deazaguanine reductase OS=Sulfurospirillum sp. UBA121 82 OX=2015905 GN=queF PE=3 SV=1
MKYGEKEIKEFDIDRDLEIWPNKHKKNYVIKITLPEFCCLCPRSGYPDFATIYIEYIPNELVVELKAIKLYINSFMNRSISHENSANEIYDVLSTKLKPKWLKVVADFNPRGNVHTVIEIDSKLIEK

SEQ ID NO: 50143 - protein, 131 aa, Sulfurospirillum sp.
  misc_feature (1)..(131): tr|A0A290HRB3|A0A290HRB3_9PROT NADPH-dependent 7-cyano- 7-deazaguanine reductase OS=Sulfurospirillum sp. JPD-1 OX=220622 GN=queF PE=3 SV=1
MKYGEQIIKEFDVEKDLEIWPNQHKKNYVIKLTLPEFCCLCPRSGYPDFATIYIDYTPDELVVELKAIKLYINSFMNRNISHENSANEIYDLLDRKLKPKWLKVVADFNPRGNVHTVIEIDSKQVRNESSC

SEQ ID NO: 50144 - protein, 125 aa, Sulfurovum lithotrophicum; identical to SEQ ID NO: 45539
  misc_feature (1)..(125): tr|A0A2T4CQD4|A0A2T4CQD4_9PROT NADPH-dependent 7-cyano- 7-deazaguanine reductase OS=Sulfurovum lithotrophicum O X=206403 GN=queF PE=3 SV=1

SEQ ID NO: 50145 - protein, 125 aa, Sulfurovum riftiae
  misc_feature (1)..(125): tr|A0A151CH97|A0A151CH97_9PROT NADPH-dependent 7-cyano- 7-deazaguanine reductase OS=Sulfurovum riftiae OX=16301 36 GN=queF PE=3 SV=1
MKYGEKEIQEFDINAKENFWPNEHEKNYTINIELPEFMCLCPRSGYPDFATMKLSYVPDRTVIELKALKLYINSFMHRHISHENSANEIFDALYSRLQPRSMKLIADFNPRGNVHTVIEIDSEKF

SEQ ID NO: 50146 - protein, 131 aa, Sulfurovum sp.
  misc_feature (1)..(131): tr|A0A0C2ZQ45|A0A0C2ZQ45_9PROT NADPH-dependent 7-cyano- 7-deazaguanine reductase OS=Sulfurovum sp. FS06-10 OX=1 539064 GN=queF PE=3 SV=1
MKYGEKIIKEFDVEKDLEIWPNQHKKNYVIKLTLPEFCCLCPRSGYPDFATIYIDYIPGELVVELKAIKLYINSFMNRNISHENSANEIYDLLDSKLKPKWLKVVADFNPRGNVHTVIEIDSKMVRNESPC

SEQ ID NO: 50147 - protein, 131 aa, Sulfurovum sp.
  misc_feature (1)..(131): tr|A0A0C2ZSJ8|A0A0C2ZSJ8_9PROT NADPH-dependent 7-cyano- 7-deazaguanine reductase OS=Sulfurovum sp. FS06-10 OX=1 539064 GN=queF PE=3 SV=1
MKYGEQIIKAFDVEKDLEIWPNQHKKNYVIKLTLPEFCCLCPRSGYPDFATIYIDYIPNELVVELKAIKLYINSFMNRNISHENSANEIYDLLDTKLKPKWLKVVADFNPRGNVHTVIEIDSKLVRNETSC

SEQ ID NO: 50148 - protein, 156 aa, Sunxiuqinia elliptica
  misc_feature (1)..(156): tr|A0A1I2KIB1|A0A1I2KIB1_9BACT NADPH-dependent 7-cyano- 7-deazaguanine reductase OS=Sunxiuqinia elliptica OX=65 5355 GN=queF PE=3 SV=1
MDDLKHLGGTTDYQFNYDPNLLEAFDNKHPENDYWVKFNTPEFTSLCPITGQPDFATLYISYLPNQKMVESKSLKLYLFSFRNHGDFHEDCINIIMKDLIKLMDPRYIEVWGKFLPRGGISIDPYANYGKPGTKYEELAWHRMQNHDLNPEKVDNR

SEQ ID NO: 50149 - protein, 156 aa, Sunxiuqinia elliptica
  misc_feature (1)..(156): tr|A0A4R6H5X7|A0A4R6H5X7_9BACT NADPH-dependent 7-cyano- 7-deazaguanine reductase OS=Sunxiuqinia elliptica OX=65 5355 GN=queF PE=3 SV=1
MDDLKHLGGTTDYQFNYDPNLLEAFDNKHPENDYWVKFNTPEFTSLCPITGQPDFATLYISYLPNQKMVESKSLKLYLFSFRNHGDFHEDCINIIMKDLIKLMDPKYIEVWGKFLPRGGISIDPYANYGKPGTKYEELAWHRMQNHDLNPEKVDNR

SEQ ID NO: 50150 - protein, 281 aa, Superficieibacter electus
  misc_feature (1)..(281): tr|A0A2P5GTC3|A0A2P5GTC3_9ENTR NADPH-dependent 7-cyano- 7-deazaguanine reductase OS=Superficieibacter electus O X=2022662 GN=queF PE=3 SV=1
MSSYENHQALSGLTLGKTTSYRDIYDASLLQGVPRSLNRDPLGLHADSLPFHGADIWTLYEISWLNAKGLPQVAVGQVELDYASVNLVESKSFKLYLNSFNQTRFASRDDVHATLERDLSACAQGSVRVTLYSLDELEGQPIARFNGVCIDQQDIEIDNYQFDADSLSGAARGSVVEESLVSHLLKSNCLITHQPDWGSVQIQYRGPAIDREKLLRYLVSFRHHNEFHEQCVERIFNDIQRFCQPETLSVYARYTRRGGLDINPWRSNTDFKPATGRLVRQ

SEQ ID NO: 50151 - protein, 279 aa, Sutterella megalosphaeroides
  misc_feature (1)..(279): tr|A0A2Z6ICQ6|A0A2Z6ICQ6_9BURK NADPH-dependent 7-cyano- 7-deazaguanine reductase OS=Sutterella megalosphaeroide s OX=2494234 GN=queF PE=3 SV=1
MTHTPVLMPEPEGTLLGKSTVYSSSYDPALLQPIPRALGRNAVGKSDFRGTDVWGLYEVTWLNEHGMPQVAVGELLVPATTPCIVESKSLKLYVGSFTQTRFSSIEAVAETMSKDISAAAGGPCVMTLRDLADWEGAVERMPGLLLEAEILDLAPVDYEVNPTLLEVVEGEVAEETLSSNLLRSLCPVTGQPDHASLTIRYKGPKIAHRSLLAYIVSYREHRGFHEQCVEQIYTDLSRLADFEFLEVYACFTRRGGIDISPFRSSRDDHPAHVIRAQRQ

SEQ ID NO: 50152 - protein, 293 aa, Sutterella parvirubra
  misc_feature (1)..(293): tr|H3KFN1|H3KFN1_9BURK Putative queuine synthase OS=Sut terella parvirubra YIT 11816 OX=762967 GN=HMPREF9440_01 550 PE=4 SV=1
MTDTAKTSKSPVLMPEPQHTMLGQATTYHDTYDATLLTPIPRKFGRDAIGRHDFQGHDYWHLFEVTWLSPNGLPQVAAGLMTVPATTECIVESKSLKLYVGSFTQSVFPSKEAVEARMTEDLVKLLGEGVRMELTLLSDWQGDAMLPTPLPGIRLEALPEMKDATFDAFEVDPNLLAVAEDAGGEIVEEVFSTELFRSCCPVTGQPDHAGVVIRMKGPKADRAGLLKYLVSYRCHRGFHEQCVEQIFTDLSNVFSPEILEVHALFTRRGGIDISPFRSNVRSTPDTVLRSPRQ

SEQ ID NO: 50153 - protein, 273 aa, Sutterella sp.
  misc_feature (1)..(273): tr|A0A5B7ZHK0|A0A5B7ZHK0_9BURK NADPH-dependent 7-cyano- 7-deazaguanine reductase QueF OS=Sutterella sp. KGMB031 19 OX=2584944 GN=queF PE=4 SV=1
MPEPKGTKLGQATTYAEHYSPELLQPIPRALGRDAIGDHDFQGADIWRLYEFSWLDHRGLPHAAEVELTVPASTPSIIESKSLKLYAMSFAMTKLADAAEAEAILTRDLSEAAGGAVQVKVNPLRTWETRVAPMPGDNLEEMLPETKADAYEVAPDLLQRDSGADEREVFWSTNIFRSLCPVTGQPDFASVSIHLAGEAVDPASLLRYLASYRQHRGFHEQCVEQIFHDLRSRFELRILEVQAAFTRRGGIDINPFRSSVREQPLNSPRELRQ

SEQ ID NO: 50154 - protein, 141 aa, Sutterella sp.
  misc_feature (1)..(141): tr|R7C2X3|R7C2X3_9BURK NADPH-dependent 7-cyano-7-deazag uanine reductase OS=Sutterella sp. CAG:397 OX=1262976 G N=queF PE=3 SV=1
MSTTASRALETFDNPNPARDYLVHIEIPEFTCLCPLTGQPDFATLVLDYIPDQKNLELKALKLYMWSFRNEGHFHEDVTNRILNDFVEKTDPRFMRLEARWWVRGGIYTTVRAEHRKPGWEPQPTVDLPHFADNNPMRTIG

SEQ ID NO: 50155 - protein, 285 aa, Sutterella wadsworthensis
  misc_feature (1)..(285): tr|S3CI10|S3CI10_9BURK Queuine synthase OS=Sutterella w adsworthensis HGA0223 OX=1203554 GN=HMPREF1476_00889 PE =4 SV=1
MAVLMPEPQGTALGLTTVYADQYDPKLLFPISRNIGRDAIGDHDFIGTDIWRMYEFSWLNANGLPQAAEVDVFVPASSPSIIESKSLKLYQGSFAQTRFAGGAEQVAAILKRDLSNAAGAPVEVAVNTLDTWTPTIDDLPGELLEEAFPDVSITDFEVNPELLEKAPAAIDTDVKGNIRAAVWRTNLFRSLCPVTGQPDYASVSIALTGEAVDPRSLLKYLVSYRAHRGFHEQCVEQIFHDLRSRFTFTALEVQACFTRRGGIDINPYRSMSSKMPEFVIREGRQ

SEQ ID NO: 50156 - protein, 274 aa, Sutterella wadsworthensis
  misc_feature (1)..(274): tr|K1JL52|K1JL52_9BURK NADPH-dependent 7-cyano-7-deazag uanine reductase OS=Sutterella wadsworthensis 2_1_59BFA A OX=742823 GN=HMPREF9465_01430 PE=3 SV=1
MSACAPAGTLLGQTTEYVDTYRPDLLTPIPRSLGRDAIGVHDFRGTDVWRLYEITWINERGLPVAAAGEIRVPATSPCIVESKSLKLYIGSLTQTKIASVEEAARLIARDVSACVGAPVEVLIDDLARWEMPVTRVPGIVLEAECGDLECSVYEPDASLLKAASDEVVEETLSSNLLRSRCPVTSQPDHASIVISYRGRRIDRRALLAYIVSFRRHQGFHEQCCEQIHADIMRVLAPEALSVNCCFTRRGGIDISPFRSTVADLPDPVIRTPRQ

SEQ ID NO: 50157 - protein, 139 aa, Sutterellaceae bacterium; identical to SEQ ID NO: 46975
  misc_feature (1)..(139): tr|A0A2D6RUI0|A0A2D6RUI0_9BURK NADPH-dependent 7-cyano- 7-deazaguanine reductase OS=Sutterellaceae bacterium OX =2026794 GN=queF PE=3 SV=1

SEQ ID NO: 50158 - protein, 139 aa, Sutterellaceae bacterium; identical to SEQ ID NO: 48656
  misc_feature (1)..(139): tr|A0A3D4GC53|A0A3D4GC53_9BURK NADPH-dependent 7-cyano- 7-deazaguanine reductase OS=Sutterellaceae bacterium OX =2026794 GN=queF PE=3 SV=1

SEQ ID NO: 50159 - protein, 156 aa, Suttonella indologenes
  misc_feature (1)..(156): tr|A0A380MUN6|A0A380MUN6_9GAMM NADPH-dependent 7-cyano- 7-deazaguanine reductase OS=Suttonella indologenes OX=1 3276 GN=queF PE=3 SV=1
MRNEQELAELSLLGNQGTHYPAQYSPDILEAFPNKHGDNDYFVRFICPEFTSLCPMTGQPDFAIIHIAYIPNQRMVESKSLKLYLFSFRNHGDFHEDCVNIIMKDLITLMQPKYIEVFGEFTPRGGIAIHPYANYGQADSPYAAMARERLFQHGRR

SEQ ID NO: 50160 - protein, 156 aa, Swaminathania salitolerans
  misc_feature (1)..(156): tr|A0A511BQL2|A0A511BQL2_9PROT NADPH-dependent 7-cyano- 7-deazaguanine reductase OS=Swaminathania salitolerans OX=182838 GN=queF PE=3 SV=1
MTTSENDLAGLSQLGRHTVQPDNPETATLEKVPSPHRGRDYVVRFTAPEFTSLCPVTGQPDFAHIVIDYIPDEWIVESKSLKLYLTSFRNHGAFHEDCSVSIATRLVEVLNPKWLRIGAYWYPRGGIPIDVFWQTGNAPEGVWIPAQDVPGYRGRG

SEQ ID NO: 50161 - protein, 163 aa, Swingsia samuiensis
  misc_feature (1)..(163): tr|A0A4Y6UGG9|A0A4Y6UGG9_9PROT NADPH-dependent 7-cyano- 7-deazaguanine reductase OS=Swingsia samuiensis OX=1293 412 GN=queF PE=3 SV=1
MPNHTTPTGPSAPGTEALSQLGRNTAAANSPEEAQLERVPSPHQGRKYVVRFTAPEFTSLCPVTGQPDFAHIVIDYIPSQWIVESKSLKLFLTSFRNHGAFHEDCSVTIAERLIELLDPEWLRIGAYWYPRGGIPIDVFWQTGEPPAGVWLPPQDVPGYRGRG

SEQ ID NO: 50162 - protein, 164 aa, Swingsia sp.
  misc_feature (1)..(164): tr|A0A4Y6U8B3|A0A4Y6U8B3_9PROT NADPH-dependent 7-cyano- 7-deazaguanine reductase OS=Swingsia sp. F3b2 OX=255836 1 GN=queF PE=3 SV=1
MQHEPSAPTHSSQSKAGSLTQLGAKAALPAHPDEAVLERVPAPHQGKRYMVRFTAPEFTSLCPVTGQPDFAHLVIDYVPRQWIVESKSLKLYLGSFRNHGAFHEDCTVGIGVKLAELLEPEWLRIGGYWYPRGGMPIDVFWQSGPKPEDLWIPNQDVPPYRGRG

SEQ ID NO: 50163 - protein, 60 aa, Synechococcales bacterium
  misc_feature (1)..(60): tr|A0A3D5HZ92|A0A3D5HZ92_9CYAN NADPH-dependent 7-cyano- 7-deazaguanine reductase QueF (Fragment) OS=Synechococc ales bacterium UBA12195 OX=2055798 GN=DGR08_02470 PE=4 SV=1
MAEAELICFDNPRQGRPYDVAISLPEFTCKCPFSGYPDFAVLRLIYQPGPRVVELKAIKL

SEQ ID NO: 50164 - protein, 151 aa, Synechococcales bacterium
  misc_feature (1)..(151): tr|A0A354AY37|A0A354AY37_9CYAN NADPH-dependent 7-cyano- 7-deazaguanine reductase OS=Synechococcales bacterium U BA10510 OX=2055795 GN=queF PE=3 SV=1
MAIEQIAESASVSPSAANHQAEATRTPLYGERAIADAQLICFDNPRPGRAYEVSIELPEFTCLCPFSGYPDFAVLRLLYQPGPRVLELKAIKLYVNSYRNRAISHEEVANRILDDLVAAANPQWIELVADFSRRGNVHTVVRVSQGTRLPC

SEQ ID NO: 50165 - protein, 150 aa, Synechococcus elongatus
  misc_feature (1)..(150): tr|A0A3G6X149|A0A3G6X149_SYNEL NADPH-dependent 7-cyano- 7-deazaguanine reductase OS=Synechococcus elongatus PCC 11801 OX=2219813 GN=queF PE=3 SV=1
MTETLTQLGQQVGLPASPEVAVLETFENPHPDRQYLVRFVAPEFTSLCPLTGQPDFAHLVLDYVPDQRLVESKSLKLFLGSFRNHGAFHENCTLTIAKRLEEAMNPTWLRLGGYWYPRGGLPIDVFYQSGEPPAGVWVPDQGVAPYRGRG

SEQ ID NO: 50166 - protein, 174 aa, Synechococcus elongatus
  misc_feature (1)..(174): sp|Q8GJN6|QUEF_SYNE7 NADPH-dependent 7-cyano-7-deazagua nine reductase OS=Synechococcus elongatus (strain PCC 7 942) OX=1140 GN=queF PE=3 SV=1
MGREGWSRVLSATGENRERSLQKFMTETLTQLGQMVGLPASPEVAVLETFDNPHPDRQYLVRFVAPEFTSLCPLTGQPDFAHLVLDYVPDQRLVESKSLKLFLGSFRNHGAFHENCTLTIAKRLEEAMNPTWLRLGGYWYPRGGLPIDVFYQSGEPPAGVWVPEQGVAPYRGRG

SEQ ID NO: 50167 - protein, 162 aa, Synechococcus lacustris
  misc_feature (1)..(162): tr|A0A2P7EG77|A0A2P7EG77_9SYNE NADPH-dependent 7-cyano- 7-deazaguanine reductase OS=Synechococcus lacustris OX= 2116544 GN=queF PE=3 SV=1
  misc_feature (22)..(22): Xaa can be any naturally occurring amino acid
MAADPFQEPPAHFCVAIVTVNXFPPIHFYFVTVPSTQSPAYGERNIAAAELICFDNPQQQRPYNIAISLPEFTCKCPFSGYPDFAKLQLNYQPGPRVLELKALKLYVNSWRDCTISHEEVVNRILDDFVAAAAPIWMELVADFNPRGNVHTVITVHHGVEQH

SEQ ID NO: 50168 - protein, 128 aa, Synechococcus lividus
  misc_feature (1)..(128): tr|A0A2D2Q4H9|A0A2D2Q4H9_SYNLI NADPH-dependent 7-cyano- 7-deazaguanine reductase OS=Synechococcus lividus PCC 6 715 OX=1917166 GN=queF PE=3 SV=1
MQETAMKYGERAIEEGQLITFPNPRPGRHYTIEITLPEFTCKCPFSGYPDFATLYVSYSPHEKVVELKAIKLYINSYRDRYISHEEAVNQVLDDLVAACDPLYMQIKGDFAPRGNVHTVITVEHRRSA

SEQ ID NO: 50169 - protein, 143 aa, Synechococcus sp.
  misc_feature (1)..(143): tr|A0A076H3T6|A0A076H3T6_9SYNE NADPH-dependent 7-cyano- 7-deazaguanine reductase OS=Synechococcus sp. KORDI-100 OX=1280380 GN=queF PE=3 SV=1
MFPSELVTAASAADRTLTPHYGERAIAQAELICFENPRPGRPYEVSIELPEFTCKCPFSGYPDFAVLRLVYQPGPRVVELKAIKLYVNSFRDRSISHEEVTNRILDDLVAATDPVWMQLEADFNPRGNVHTIVRVSHGTRQPC

SEQ ID NO: 50170 - protein, 137 aa, Synechococcus sp.
  misc_feature (1)..(137): sp|Q3AZN8|QUEF_SYNS9 NADPH-dependent 7-cyano-7-deazagua nine reductase OS=Synechococcus sp. (strain CC9902) OX= 316279 GN=queF PE=3 SV=1
MTGAASQQQTETPLYGERAIDEAELICFDNPRPGRAYEVSIELPEFTCKCPFSGYPDFAVLRLIYQPGPRVVELKAIKLYVNSYRDRSISHEEVSNRIVDDLVAACDPVWLQLEADFNPRGNVHTVVRVSHGTRQPC

SEQ ID NO: 50171 - protein, 137 aa, Synechocystis sp.
  misc_feature (1)..(137): tr|A0A068MSS9|A0A068MSS9_SYNY4 NADPH-dependent 7-cyano- 7-deazaguanine reductase OS=Synechocystis sp. (strain P CC 6714) OX=1147 GN=queF PE=3 SV=1
MADTAITTSDNIEKYGEREIRDAQLITFPNPRPGRRYDVHITLPEFTCKCPFSGYPDFATLYLTYCPDQKVVELKSIKLYINSYRDRHIPHEEVTNQILDDFVAVANPLYARLKADFNPRGNVHTVIEVEYHQEKDS

SEQ ID NO: 50172 - protein, 137 aa, Synechocystis sp.
  misc_feature (1)..(137): sp|Q55978|QUEF_SYNY3 NADPH-dependent 7-cyano-7-deazagua nine reductase OS=Synechocystis sp. (strain PCC 6803 / Kazusa) OX=1111708 GN=queF PE=3 SV=1
MTETTITTSDNVEKYGEREIRDAQLITFPNPRPGRRYDVHITLPEFTCKCPFSGYPDFATLYLTYCPDQKVVELKSIKLYINSYRDRHIPHEEVTNQILDDFVAVANPLYARLKADFNPRGNVHTVIEVEYHQEKAS

SEQ ID NO: 50173 - protein, 135 aa, Syntrophaceae bacterium
  misc_feature (1)..(135): tr|A0A1J5IIJ2|A0A1J5IIJ2_9DELT NADPH-dependent 7-cyano- 7-deazaguanine reductase OS=Syntrophaceae bacterium CG2 _30_58_14 OX=1805378 GN=queF PE=3 SV=1
MTEKSDLEGLTLLGRGEEKPAKRLETFPNHHPDRDYVVTLRTEEFTCVCPATGQPDFARLTLQYIPDRKIVESKSLKLYLWSFRNRGVFHEHAANAILDDLVKALAPRWCKVTADFAVRGGISISVEAEHGKRNG

SEQ ID NO: 50174 - protein, 264 aa, Syntrophaceae bacterium
  misc_feature (1)..(264): tr|A0A1V4XJ75|A0A1V4XJ75_9DELT NADPH-dependent 7-cyano- 7-deazaguanine reductase OS=Syntrophaceae bacterium Pta B.Bin038 OX=1811716 GN=queF PE=3 SV=1
MKIIPYKDTYDPGLLQPVPRAPHRRELGIAESLPFTGVDLWTAYELSWLDPSGRPRVAMATFVVDARSPNLVESKSFKLYLNSFNQTELASPESLRQRLIADIGNACGMPVDVELKLPGAFGDERIEELDGELLDDIDAEIRDYRPNPALLRTGRSETDETLVSNLLKTNCPLTGQPDWASIQVRYRGPRIDRAGLLRYLVSFRRHGGFHEQCVEHIFMDILGRCAPERLTVYARYTRRGGLDINPFRTNCGEKPPRNVRTARQ

SEQ ID NO: 50175 - protein, 133 aa, Syntrophaceticus schinkii
  misc_feature (1)..(133): tr|A0A0B7MRZ0|A0A0B7MRZ0_9FIRM NADPH-dependent 7-cyano- 7-deazaguanine reductase OS=Syntrophaceticus schinkii O X=499207 GN=queF PE=3 SV=1
MNQEKEKDLMRWDMDTYEAIATEVLEAIPFEYPGSDTEVAYVYPEFTSVCPWTGLPDFGELTISYIPREKLVELKSLKYYLNSFRNVGILQEHVVSRVKEDLVQLLNPVSLTVKADFRPRGGIGTQVQADFRS

SEQ ID NO: 50176 - protein, 155 aa, Syntrophobacter fumaroxidans
  misc_feature (1)..(155): sp|A0LJR4|QUEF_SYNFM NADPH-dependent 7-cyano-7-deazagua nine reductase OS=Syntrophobacter fumaroxidans (strain DSM 10017 / MPOB) OX=335543 GN=queF PE=3 SV=1
MPIDGYSSLTQLGRQAGVPANPDEAVIETFANPHPGTNYTVRLTAPELTTICPITGQPDFATLIVDYVPRDRLVESKSFKLFLGSFRNLGTFHEDCTAYIHKRLSDALDAAFLRVVGLWNARGGITIDCVVQTGELPSNCALLPLGRTDYRTGRI

SEQ ID NO: 50177 - protein, 154 aa, Syntrophobacter sp.
  misc_feature (1)..(154): tr|A0A2U3KZB9|A0A2U3KZB9_9DELT NADPH-dependent 7-cyano- 7-deazaguanine reductase OS=Syntrophobacter sp. SbD1 OX =2043167 GN=queF PE=3 SV=1
MLRDAGGLTQLGKKAKIPKTPETAILETFKNANPETVYVVRLSAPEFTTMCPITGQPDFATIVVDYVPADLLVESKSLKLFLGSFRNHGAFHEDCTVYIHNRLKEAMSPKFIRVTGIWNARGGIAIDVMVESGIMPPSCTLLPMGKTDYRGGRE

SEQ ID NO: 50178 - protein, 131 aa, Syntrophobacteraceae bacterium
  misc_feature (1)..(131): tr|A0A2G9XNT0|A0A2G9XNT0_9DELT NADPH-dependent 7-cyano- 7-deazaguanine reductase OS=Syntrophobacteraceae bacter ium CG23_combo_of_CG06-09_8_20_14_all_50_8 OX=1974096 G N=queF PE=3 SV=1
MTSASDLDGLTLLGKEAQPGRILEAFPNHHPERDYTVTLMTGEFTCLCPLTGQPDFARITIRYIPDKSIVESKSLKLYLASFRNEGAFHEHVTNAILDDLVKTIAPRWCKVSAEFAVRGGIAITVDAEYKK

SEQ ID NO: 50179 - protein, 156 aa, Syntrophobacteraceae bacterium
  misc_feature (1)..(156): tr|A0A1J5IP40|A0A1J5IP40_9DELT NADPH-dependent 7-cyano- 7-deazaguanine reductase OS=Syntrophobacteraceae bacter ium CG2_30_61_12 OX=1805379 GN=queF PE=3 SV=1
MLNEPNAEHFTQLGKPAVIPTSPAEAVLETFANPHQDRDYVVRLSAPEFTSVCPITGQPDFAVLIVDYVPNQRLVESKSFKFFLMSYRNHGAFHEDCTVSIHKRLEQAMTPKYLRVVGLWYARGGITIDVTIESGSLPVNCWLLPLGKSSYRGGRE

SEQ ID NO: 50180 - protein, 75 aa, Syntrophobacterales bacterium
  misc_feature (1)..(75): tr|A0A2M7BM95|A0A2M7BM95_9DELT NADPH-dependent 7-cyano- 7-deazaguanine reductase QueF (Fragment) OS=Syntrophoba cterales bacterium CG03_land_8_20_14_0_80_58_14 OX=1974 100 GN=COS57_02665 PE=4 SV=1
MPKMTEKSDLEGLTLLGRGEEKPAKRLETFPNHHPDRDYVVTLRTEEFTCVCPATGQPDFARLTLQYIPDRKIVE

SEQ ID NO: 50181 - protein, 123 aa, Syntrophobacterales bacterium
  misc_feature (1)..(123): tr|A0A2M8GAA7|A0A2M8GAA7_9DELT NADPH-dependent 7-cyano- 7-deazaguanine reductase OS=Syntrophobacterales bacteri um CG_4_8_14_3_um_filter_49_14 OX=1974097 GN=queF PE=3 SV=1
MEFEFLGKNVGDPVRRLETFEKPANVSIITMKSDEVTSLCPVTGQPDWETVKIEYAPDKLCVESKSLKLYLWSFREEGCFCESLADTIANDFYAVCKPFWCKVTVIQKPRGGIEITSVAELKR

SEQ ID NO: 50182 - protein, 156 aa, Syntrophobotulus glycolicus
  misc_feature (1)..(156): tr|F0SYI8|F0SYI8_SYNGF NADPH-dependent 7-cyano-7-deazag uanine reductase OS=Syntrophobotulus glycolicus (strain DSM 8271 / FlGlyR) OX=645991 GN=queF PE=3 SV=1
MRDKNTEGLTRLGSDHQYVFAYSSEILEAFENKHPDTDYFVRFNCPEFTSLCPITGQPDFAVIYIHYVPEQKLVESKSLKMYLFSFRDHGDFHEDVVNVIRKDLTALLDPKYLEVIGEFAPRGGISIYPFANYGKPETKWVEFAEKRFFEYSLYRK

SEQ ID NO: 50183 - protein, 145 aa, Syntrophorhabdus aromaticivorans
  misc_feature (1)..(145): tr|A0A351U2M2|A0A351U2M2_9DELT NADPH-dependent 7-cyano- 7-deazaguanine reductase OS=Syntrophorhabdus aromaticiv orans OX=328301 GN=queF PE=3 SV=1
MKNAVKTYKDIDKAILKAIPNPTGGAYEIKIKVPELTFLGVQEQPDFAVLYITFYPKKKIIELKSLKQYVYQFRDITVSYERLINVIFDHLMEVYEPDRIRLVMICNPRGGISSRLTIDSDWGVRGGEEKFKDWMGLEDTWGVSM

SEQ ID NO: 50184 - protein, 147 aa, Syntrophorhabdus sp.
  misc_feature (1)..(147): tr|A0A1V5CGY6|A0A1V5CGY6_9DELT NADPH-dependent 7-cyano- 7-deazaguanine reductase OS=Syntrophorhabdus sp. PtaU1. Bin002 OX=1811702 GN=queF_2 PE=3 SV=1
MTTLKKIKTFQDIDKSILKSLPNPTGEAYEIKIKIPELTFLGVSEQPDFAVAYVTFYPAKKIIELKSLKLYVYQLRDVTVSYERLINVLYDHLMEIYEPDRLRIVMVFNPRGGISSKLTVDSDWGARGGKEKYRDWVGLADTWSVAM

SEQ ID NO: 50185 - protein, 145 aa, Syntrophorhabdus sp.
  misc_feature (1)..(145): tr|A0A1V5D7H7|A0A1V5D7H7_9DELT NADPH-dependent 7-cyano- 7-deazaguanine reductase OS=Syntrophorhabdus sp. PtaU1. Bin153 OX=1811705 GN=queF PE=4 SV=1
MKNVSKTYKDIDKAILKAIPNPTGGAYEIKIKVPELTFLGVHEQPDFAALYITFYPKKKVIELKSLKQYVYQLRDVTVSYERLINVIFDHLMETYEPERIRIVMICNPRGGISSRLTIDSDWGVRGGEEKFKDWMGLEDMWGVSM

SEQ ID NO: 50186 - protein, 140 aa, Syntrophus aciditrophicus
  misc_feature (1)..(140): sp|Q2LTJ0|QUEF_SYNAS NADPH-dependent 7-cyano-7-deazagua nine reductase OS=Syntrophus aciditrophicus (strain SB) OX=56780 GN=queF PE=3 SV=1
MQKSTPPEDLSRLTLLGREAKPSRKLETFPNRHPDRDYIVTMETAEFTCVCPMTGQPDFADLHISYIPDASILESKSLKLYLWSYRNEGIFHEHVTNVILEDVVAALSPRWCKVTANFGVRGGISITVEAEYKKPGWSKP

SEQ ID NO: 50187 - protein, 140 aa, Syntrophus gentianae
  misc_feature (1)..(140): tr|A0A1H7XBZ1|A0A1H7XBZ1_9DELT NADPH-dependent 7-cyano- 7-deazaguanine reductase OS=Syntrophus gentianae OX=437 75 GN=queF PE=3 SV=1
MQNSTQPEDLSKLTLLGREAKPSKKLETFPNRHPGRNYVVTLETTEFTCVCPMTGQPDFADLKIQYIPDASILESKSLKLYLWSYRNEGIFHEHVTNVILEDLVAALSPRWCKVTANFGVRGGISISVEAEYSKPGTSQP

SEQ ID NO: 50188 - protein, 132 aa, Syntrophus sp.
  misc_feature (1)..(132): tr|A0A3C0KVM5|A0A3C0KVM5_9DELT NADPH-dependent 7-cyano- 7-deazaguanine reductase OS=Syntrophus sp. (in: Bacteri a) OX=48412 GN=queF PE=3 SV=1
MENFHYLGKKVNAPSKQLDTFPKPVNVQTVKFESNELTSVCPVTHQPDFNTVTIEFAPDKLCIESKSLKLYLWSFREEPIFAEGLANTISEDIFTAVQPFWCRITLVQNIRGGMQLSVVAEKKAVAFLREID

SEQ ID NO: 50189 - protein, 140 aa, Syntrophus sp.
  misc_feature (1)..(140): tr|A0A1V4Y3U1|A0A1V4Y3U1_9DELT NADPH-dependent 7-cyano- 7-deazaguanine reductase OS=Syntrophus sp. PtaB.Bin138 OX=1811711 GN=queF PE=3 SV=1
MQNSTQQEDLSRLTLLGREAKPSKSLETFPNRHPDRDYVVTMETYEFTCVCPMTGQPDFAHLQIRYIPDASILESKSLKLYLWSYRNEGIFHEHVTNVILEDLIAVLSPRWCKVTAHFGVRGGISITVEAEYTKPGTAQP

SEQ ID NO: 50190 - protein, 353 aa, Tahibacter aquaticus
  misc_feature (1)..(353): tr|A0A4R6Z7P4|A0A4R6Z7P4_9GAMM NADPH-dependent 7-cyano- 7-deazaguanine reductase OS=Tahibacter aquaticus OX=520 092 GN=queF PE=3 SV=1
MSECELHRKLPLPACVACHAAQFAVLIGAPPKRSVLDRRRIGAGDCRRYNPAKTRGAGSGDSLPGKRVARRKAAKLRGMNTAEHSSLGKSVAYRDDYDASLLFPIPRQAKRIELGLTADLPFHGVDVWNAYELSWLDLRGKPRVAMAEFRVPATSPNIIESKSFKLYLNTFAQTRMADAAAVADLLQRDLSAAAGAQVTVSLRSGGQVAAQGLAELDGECLDELELDIADYDAPRPDYLVAESAWIAEETLVSHLLKSNCPVTGQPDWASVQVRYRGPRIDRAGLLRYLVSFRRHSDFHEQCVERIFTDLLRCCMPVELSVYARYTRRGGLDINPFRSSAAEWRIDNPRGARQ

SEQ ID NO: 50191 - protein, 268 aa, Tamilnaduibacter salinus
  misc_feature (1)..(268): tr|A0A2A2I1P7|A0A2A2I1P7_9ALTE NADPH-dependent 7-cyano- 7-deazaguanine reductase OS=Tamilnaduibacter salinus OX =1484056 GN=queF PE=3 SV=1
MSLNDAPLGQTSDYPEQYAPERLYPVPRAANRKRLALSEGHWPWFGADIWQAWELSWLRSDGIPAVAWARFTVPADSPFLIESKSLKLYLNSLNQERFESAAAVRHCIERDMSQVAGKAVGVQLYSVDDATTAAGRPDNTILIDDAPITTHTPENPTAGERRVTERLCSHLLKSNCPVTGQPDWATVVVAYTGREIERASLLNYLVGFRQKQDFHEHCVETIFTDLMKHCRPEALSVLAQYTRRGGLDINPWRSTADRAPAFQRLVRQ

SEQ ID NO: 50192 - protein, 157 aa, Tannerella forsythia
  misc_feature (1)..(157): tr|G8UIK1|G8UIK1_TANFA NADPH-dependent 7-cyano-7-deazag uanine reductase OS=Tannerella forsythia (strain ATCC 4 3037 / JCM 10827 / FDC 338) OX=203275 GN=queF PE=3 SV=1
MENKELTLLGTATTYRQDYAPEVLEAFTNKHPERDYWVHFECPEFTSLCPITGQPDFATIWIDYLPDVKMVESKSLKLYLFSFRGHGAFHEDCVNLIMNDLIRLMEPKYIEVTGLFTPRGGISIYPYCNYGRPGTKYEALAEQRLFNIQAGNLRAGR

SEQ ID NO: 50193 - protein, 157 aa, Tannerella forsythia; identical to SEQ ID NO: 50192
  misc_feature (1)..(157): tr|A0A1D3URM0|A0A1D3URM0_TANFO NADPH-dependent 7-cyano- 7-deazaguanine reductase OS=Tannerella forsythia OX=281 12 GN=queF PE=3 SV=1

SEQ ID NO: 50194 - protein, 149 aa, Tannerella sp.; identical to SEQ ID NO: 45434
  misc_feature (1)..(149): tr|R7DKQ7|R7DKQ7_9BACT NADPH-dependent 7-cyano-7-deazag uanine reductase OS=Tannerella sp. CAG:51 OX=1262979 GN =queF PE=3 SV=1

SEQ ID NO: 50195 - protein, 148 aa, Tannerella sp.
  misc_feature (1)..(148): tr|A0A2N8N9B0|A0A2N8N9B0_9BACT NADPH-dependent 7-cyano- 7-deazaguanine reductase OS=Tannerella sp. oral taxon 8 08 OX=712711 GN=queF PE=3 SV=1
MEKQELTLLGKKTEYRQDYAPEVLETFTNRHPERDYRVHFHCPEFTSLCPITGQPDFATITIDYIPDMKMVESKSLKLYLFSFRNHGAFHEDCVNLIMKDLIRLMDPKYIEVRGLFTPRGGISIHPLCTYGRPGTRYEALAERRLFDK

SEQ ID NO: 50196 - protein, 155 aa, Tanticharoenia sakaeratensis
  misc_feature (1)..(155): tr|A0A0D6MM34|A0A0D6MM34_9PROT NADPH-dependent 7-cyano- 7-deazaguanine reductase OS=Tanticharoenia sakaeratensi s NBRC 103193 OX=1231623 GN=queF PE=3 SV=1
MTDKPPTEHLSQLGHAITIPQKPEDAILERVPSPHPDRDYMVRFTAPEFTSICPVTGQPDFAHIVIDYVPDAWIVESKSLKLYLTSFRNHGAFHEDCSVAIARRLVDELQPRWLRIGAYWYPRGGIPIDVFWQTGPAPEGVWIPAQDVPSYRGRG

SEQ ID NO: 50197 - protein, 159 aa, Tardiphaga robiniae
  misc_feature (1)..(159): tr|A0A164AAM5|A0A164AAM5_9BRAD NADPH-dependent 7-cyano- 7-deazaguanine reductase OS=Tardiphaga robiniae OX=9438 30 GN=queF PE=3 SV=1
MSKTPRKSPKLPADLQLGRAVEWPTSPEQAKLDRVPNPQKDTNYVVRFTAPEFTSLCPITGQPDFAHLMIDYVPGQWLVESKSLKLYLASFRNHGAFHEDCTVEIGKRVASAIKPKWLRIGGYWYPRGGIPIDVFWQTGTLPKGVWVPEQGVAPYRGRG

SEQ ID NO: 50198 - protein, 159 aa, Tardiphaga sp.
  misc_feature (1)..(159): tr|A0A2U0TWJ0|A0A2U0TWJ0_9BRAD NADPH-dependent 7-cyano- 7-deazaguanine reductase OS=Tardiphaga sp. OV697 OX=213 5487 GN=queF PE=3 SV=1
MSKTPRKSPKLPDDLQLGRAVEWPTSPEQAKLDRVPNPQKDTNYVVRFTAPEFTSLCPITGQPDFAHLMIDYVPGQWLVESKSLKLYLASFRNHGAFHEDCTVEIGKRVASAIKPKWLRIGGYWYPRGGIPIDVFWQTGTLPKGVWVPEQGVAPYRGRG

SEQ ID NO: 50199 - protein, 159 aa, Tardiphaga sp.
  misc_feature (1)..(159): tr|A0A5A7W6C8|A0A5A7W6C8_9BRAD NADPH-dependent 7-cyano- 7-deazaguanine reductase OS=Tardiphaga sp. P9-11 OX=202 4614 GN=queF PE=3 SV=1
MSKTPRKSPKLPNDLQLGRAVEWPTSPEQAKLDRVPNPQKDTNYVVRFTAPEFTSLCPITGQPDFAHLMIDYVPGQWLVESKSLKLYLASFRNHGAFHEDCTVEIGKRVASAIKPKWLRIGGYWYPRGGIPIDVFWQTGTLPKGVWVPEQGVAPYRGRG

SEQ ID NO: 50200 - protein, 154 aa, Tateyamaria omphalii
  misc_feature (1)..(154): tr|A0A1P8MX17|A0A1P8MX17_9RHOB NADPH-dependent 7-cyano- 7-deazaguanine reductase OS=Tateyamaria omphalii OX=299 262 GN=queF PE=3 SV=1
MSDTIYSNLKQLGGDTVQPRSPEEAELERVQNPQADVAYNVRFTAPEFTSLCPMTGQPDFAHLVIDYVPGQWLVESKSLKLYLTSFRNHGAFHEDCTISIARRLVGFLEPAWLRIGGYWYPRGGIPIDVFWQTGEMPEGVWIPDQGVPPYRGRG

SEQ ID NO: 50201 - protein, 154 aa, Tateyamaria sp.
  misc_feature (1)..(154): tr|A0A0B4BVV0|A0A0B4BVV0_9RHOB NADPH-dependent 7-cyano- 7-deazaguanine reductase OS=Tateyamaria sp. ANG-S1 OX=1 577905 GN=queF PE=3 SV=1
MSETIYSNLKQLGGATVQPSSPEEAELERVQNPQADVAYNVRFTAPEFTSLCPMTGQPDFAHLVIDYVPGQWLVESKSLKLYLTSFRNHGAFHEDCTISIARRLVDFLEPAWLRIGGYWYPRGGIPIDVFWQTGEMPEGVWIPDQGVPSYRGRG

SEQ ID NO: 50202 - protein, 415 aa, Tatlockia micdadei
  misc_feature (1)..(415): tr|A0A098GET4|A0A098GET4_TATMI NADPH-dependent 7-cyano- 7-deazaguanine reductase OS=Tatlockia micdadei OX=451 G N=queF PE=3 SV=1
MKYYQIKEISQMTSLSIRSLHYYEEVGLLRPLRHPDSGYRLYSEDDLLILQQIITLKFLGFPLSIIKEIIRNPSFNLAESMGIQARELGEKAVKINEAASLLTYIASQLEMNEHVNWKSTAKIIEILELNTMSDTVLKKYQLVNKSELGKKSDYDAIYNPNRLYPIHRAGKRQEIGIDPANLPFVGFDCWNHYEVSWLNEKGKPMVGIGEIFYDCNSPKLIESKSMKLYFNSFNNTKIKNIEVLENTIKKDLEERVEAPVFVKIYPLEQAKKFTVSPTFTGECIDYLDVECSVYFVEPSFLSVHDLVVEEVLYSDLLKSNCLVTNQPDWGSIQIAYKGKKINREGLLKYLISFRNHNEFHEQCIERIFADIMNCCKPESLTVYGRYTRRGGLDINPYRTTEAAAFDGKNSRLVRQ

SEQ ID NO: 50203 - protein, 281 aa, Tatumella citrea
  misc_feature (1)..(281): tr|A0A1Y0L643|A0A1Y0L643_TATCI NADPH-dependent 7-cyano- 7-deazaguanine reductase OS=Tatumella citrea OX=53336 G N=queF PE=3 SV=1
MNHYDHHQALEGLTLGKQTTYTEHYAPQLLQPVPRSLNRDALNLHDDNLPFHGEDLWTLYELSWLNSLGVPQVAIGHMALSATSINLIESKSFKLYLNSFNQTKFADRDSVRQTLEQDLAACAQGTVKITLHSLDEFEGQPIGSFKGECIDSLPVTVDNYSFDNNLLSGATEPESVEETLVSHLLKSNCLITSQPDWGSVMIRYRGPRIRREALLRYLLSFRQHNEFHEQCVERIFCDLLKFCQPEELTVYARYTRRGGLDINPWRSNVRFDAPTARLARQ

SEQ ID NO: 50204 - protein, 281 aa, Tatumella morbirosei
  misc_feature (1)..(281): tr|A0A095VKB3|A0A095VKB3_9GAMM NADPH-dependent 7-cyano- 7-deazaguanine reductase OS=Tatumella morbirosei OX=642 227 GN=queF PE=3 SV=1
MNHYDHHQALEGLPLGKQTSYTEHYAPQLLQPVPRSLNRDALKLHDDNLPFHGEDLWTLYELSWLNSLGVPQVAIGHMALSAASLNLIESKSFKLYLNSFNQTKFADRESVRQTLEQDLSACAQGEVRITLHSLDEFEGQPVGSFRGECIDSLPVSVDNYSFDNTLLAGASETQVVEETLVSHLLKSNCLITSQPDWGSVMIRYRGPRIRREPLLRYLLSFRQHNEFHEQCVERIFCDLLKFCQPEELTVYARYTRRGGLDINPWRSNVSFDAPTVRLARQ

SEQ ID NO: 50205 - protein, 281 aa, Tatumella ptyseos
  misc_feature (1)..(281): tr|A0A085JAP1|A0A085JAP1_9GAMM NADPH-dependent 7-cyano- 7-deazaguanine reductase OS=Tatumella ptyseos ATCC 3330 1 OX=1005995 GN=queF PE=3 SV=1
MTHYDQHQALEGLTLGKKTSYTEHYAPELLQPVPRSLNRDGLGLQEGNLPFHGEDLWTLYELSWLNDQGVPRVAIGYVALCATSRNLIESKSFKLYLNSFNQTKFADTETVRATLEKDLSACAGGKVTVTLSSLSEAEGQPVGHFAGECIDDLPITVDNYSFDNNLLQDATTSDIVEETLVSHLLKSNCLITQQPDWGSVMIRYRGPRIEREALLRYLLSFRQHNEFHEQCVERIFNDLMQFCQPEQLTVYARYTRRGGLDINPWRSNVAFEAPVARLARQ

SEQ ID NO: 50206 - protein, 281 aa, Tatumella ptyseos; identical to SEQ ID NO: 50205
  misc_feature (1)..(281): tr|A0A2X5NHT6|A0A2X5NHT6_9GAMM NADPH-dependent 7-cyano- 7-deazaguanine reductase OS=Tatumella ptyseos OX=82987 GN=queF PE=3 SV=1

SEQ ID NO: 50207 - protein, 281 aa, Tatumella sp.
  misc_feature (1)..(281): tr|A0A2G8CAV8|A0A2G8CAV8_9GAMM NADPH-dependent 7-cyano- 7-deazaguanine reductase OS=Tatumella sp. OPLPL6 OX=192 8657 GN=queF PE=3 SV=1
MADYENHPTLSELTLGKSTAYISDYQPSLLQAVPRSLNRDSLQLDGAQLPFHGEDFWTLYELSWLNENGIPQVAIGDVALPASSQNLIESKSFKLYLNSFNQTRFSDWHSVEQTLVRDLSECAQGEVRVTLHRLSDFAAQPIDDFAGEVIDEQAITVDDYQFNRDYLRDAAHGEWVEETLVSHLLKSNCLITQQPDWGSVMIHYKGKKIDREALLRYLLSFRQHNEFHEQCVERIYMDIMALCEPEALTVYARYTRRGGLDINPWRTNQHFSPHNRRLARQ

SEQ ID NO: 50208 - protein, 286 aa, Taylorella asinigenitalis
  misc_feature (1)..(286): tr|G4QCE4|G4QCE4_TAYAM NADPH-dependent 7-cyano-7-deazag uanine reductase OS=Taylorella asinigenitalis (strain M CE3) OX=1008459 GN=TASI_0291 PE=3 SV=1
MDLSQSALGKATEYPQGYDSSLLQPFSRDLGRSEIDLNQIDFQGVDIWYAYEFSWLNPNGKPEIAVIRFTFPASNPFLIESKSFKLYLNSFNNEHLEKEEVLKLMTRDLKNATKGDVKIEFFDIDKSEELLSYSVIRRNATSKIQNIDKLDIDFFQYYPDTNLLQTEDIQGSTYISEELESHLLKSNCPVTGQPDWATVHIKYSGNKKINHEGLLRYIVSYRNHSGFHEQCVEKIYADIWKHCQPKYLSVFAMYTRRGGLDINPFRETAGSVEDYEDLKEKRQFRQ

SEQ ID NO: 50209 - protein, 286 aa, Taylorella asinigenitalis
  misc_feature (1)..(286): tr|I7JNK3|I7JNK3_9BURK NADPH-dependent 7-cyano-7-deazag uanine reductase OS=Taylorella asinigenitalis 14/45 OX= 1091495 GN=queF PE=3 SV=1
MDLSQSALGKATEYPQGYDSSLLQPISRDLGRSEIDLNQIDFQGVDIWYAYEFSWLNPNGKPEIAVIRFTFPASNPFLIESKSFKLYLNSFNNEHLEKEEVLKLMTRDLKNATKGDVKIEFFNIDESEELLSYSVIRRNATSKIQNIDKLDIDFFQYYPDTNLLQTEDIQGSTYVSEELESHLLKSNCPVTGQPDWATVHIKYSGNKKINHDGLLRYIVSYRNHSGFHEQCVEQIYADIWKHCQPKYLSVFAMYTRRGGLDINPFRETAGSVEDYDDLKEKRQFRQ

SEQ ID NO: 50210 - protein, 286 aa, Taylorella equigenitalis
  misc_feature (1)..(286): tr|I7JK61|I7JK61_9BURK NADPH-dependent 7-cyano-7-deazag uanine reductase OS=Taylorella equigenitalis 14/56 OX=1 091497 GN=queF PE=3 SV=1
MDLSQSALGKKTEYPQGYDSSLLQPISRELGRTELGSDYIDFQGVDIWYAYEFSWLNPIGKPEIAVIRFTFPASNPYLIESKSFKLYLNSFNNEHLERNEVIKLLTGDLKNATRGDVSVEFFNSDEFENLLSNWLEGRASASCVLNLDELDIDFFQYYPDPNLLQTEEINGSDLIEEELESHLLKSNCPVTGQPDWATVHIKYSSDKKINHEGLLRYIVSYRNHSGFHEQCVERIYADIWKHCQPKYLSVFAMYTRRGGLDINPFRETAGSNTSYNKLDDQRQFRQ

SEQ ID NO: 50211 - protein, 154 aa, Telmatospirillum siberiense
  misc_feature (1)..(154): tr|A0A2N3PPF1|A0A2N3PPF1_9PROT NADPH-dependent 7-cyano- 7-deazaguanine reductase OS=Telmatospirillum siberiense OX=382514 GN=queF PE=3 SV=1
MAETIYDSLTQLGGPASIPASPDQAVLETVRNPHPGTLYLVRFAAPEFTSLCPITGQPDFAHLVIDYVPDELLVESKSLKLFLASFRNHGAFHEDCTVGIGKRLVDALSPLWLRIGGYWFPRGGIPIDVFWQTGEAPDGLWLPDQGVAAYRGRG

SEQ ID NO: 50212 - protein, 146 aa, Tengunoibacter tsumagoiensis
  misc_feature (1)..(146): tr|A0A402AAA6|A0A402AAA6_9CHLR NADPH-dependent 7-cyano- 7-deazaguanine reductase OS=Tengunoibacter tsumagoiensi s OX=2014871 GN=queF PE=3 SV=1
MEEQRVPGRYGFEEIKNNHLEPWPNPHPDRDYVTHFEIPEFTCLCPRSGFPDFATIVIDYVPDGYVVELKSLKLYINAYRDRQISHESAANTILNDLVELLKPRWMRVVGDYTVRGNIKTIVFADYAQPDYQGPRPDYRRYLPTGM

SEQ ID NO: 50213 - protein, 135 aa, Tenuibacillus multivorans
  misc_feature (1)..(135): tr|A0A1G9WR72|A0A1G9WR72_9BACI NADPH-dependent 7-cyano- 7-deazaguanine reductase OS=Tenuibacillus multivorans O X=237069 GN=queF PE=3 SV=1
MTENYYLPRSGPMPRPNSVEEGREILKNEAFDAPNVQSITFNALEFTAVCPKTGQPDFGRVEITYTPQEKCIESKSLKFYLWSFRDQGAFCESLAAQIADDVVYAIQPEEVHVTVYQTARGGIELTTKAVRHRDE

SEQ ID NO: 50214 - protein, 152 aa, Tepidamorphus gemmatus
  misc_feature (1)..(152): tr|A0A4R3MFI8|A0A4R3MFI8_9RHIZ NADPH-dependent 7-cyano- 7-deazaguanine reductase OS=Tepidamorphus gemmatus OX=7 47076 GN=queF PE=3 SV=1
MTSPDSPMQLGRPVPVPESPDVAGLDRVPNPHADTDYVARFTCPEFTSLCPVTGQPDFAHLVIDYVPDQWLVESKSLKLFLASFRNHAAFHEDCTVAIGRRLASRLQPRWLRIGGYWYPRGGIPIDVFWQTGMAPAGLWIPDQGVAPYRGRG

SEQ ID NO: 50215 - protein, 140 aa, Tepidibacillus decaturensis
  misc_feature (1)..(140): tr|A0A135L515|A0A135L515_9BACI NADPH-dependent 7-cyano- 7-deazaguanine reductase OS=Tepidibacillus decaturensis OX=1413211 GN=queF PE=3 SV=1
MAQVEMNHEKYKNIRFDIEDESVILVDILETIPNEYVGKDTLVTIPTTEFTSVCPWSGLPDFADVKITYIPKEELIEMKSLKYYLTSYRNVGIYQEHATNRILEDLVRLCDPKWMKIEAVWNARGGLGTTVIVEYPEKRS

SEQ ID NO: 50216 - protein, 143 aa, Tepidibacillus fermentans
  misc_feature (1)..(143): tr|A0A4R3KI27|A0A4R3KI27_9BACI NADPH-dependent 7-cyano- 7-deazaguanine reductase OS=Tepidibacillus fermentans O X=1281767 GN=queF PE=3 SV=1
MAKVEVNHEKYKNIRFDIEDESVILVDILETIPYEYVGKDIEVTIPTTEFTSVCPWSGLPDFADIKITYIPNEKLIEMKSLKYYLTSYRNVGIYQEHATNRILEDLVRLCDPKWMKVEAVWNARGGLGTVVIAEYPRKEVQNS

SEQ ID NO: 50217 - protein, 153 aa, Tepidicaulis marinus
  misc_feature (1)..(153): tr|A0A081B8Y7|A0A081B8Y7_9RHIZ NADPH-dependent 7-cyano- 7-deazaguanine reductase OS=Tepidicaulis marinus OX=133 3998 GN=queF PE=3 SV=1
MAEYTKDLTQLGAKTAAPATPEEAELERVPNPHADTDYLARFTCPEFTSLCPVTGAPDFAHLVIDYAPGDWLVESKSLKLYLQSFRNHGAFHEDCTVAIGKRLAETLKPKWLRIGGYWYPRGGIPIDVFWQTGTLPEGLWVPDQGVSPYRGRG

SEQ ID NO: 50218 - protein, 281 aa, Tepidicella xavieri
  misc_feature (1)..(281): tr|A0A4R6U4U0|A0A4R6U4U0_9BURK NADPH-dependent 7-cyano- 7-deazaguanine reductase OS=Tepidicella xavieri OX=3602 41 GN=queF PE=3 SV=1
MSQPQDSPLGKATAYVDRYDPSLLFALPRQPKRAEIGIEGAPPFMGADLWTAYELSWLNPRGKPQVALAHITVPCETPNLVESKSLKLYLNSFNQTVFESAEAVRQRLRQDLSEAVWRGQPVGGSVGVRLLEPPAWSAETVAALEGLSLDRLDVECADYTPAPHHLQADHSQPQVQEALVSDLLKSNCLVTGQPDWGSVRIAYVGAPIDQAGLLRYLVSFRQHHEFHEQCVERIFMDIWTRCRPARLSVYARYTRRGGLDINPWRTSHPQQPPASQRTARQ

SEQ ID NO: 50219 - protein, 291 aa, Tepidimonas alkaliphilus
  misc_feature (1)..(291): tr|A0A554W6S8|A0A554W6S8_9BURK NADPH-dependent 7-cyano- 7-deazaguanine reductase OS=Tepidimonas alkaliphilus OX =2588942 GN=queF PE=3 SV=1
MQEAEGGAPAAWLHTTPLGQSSAYPDRYDPGLLCPLPRAAARQALALQGLPPFTGADVWTAYEVSWLNPRGKPQVAMAQFTIPAETPNLIESKSLKLYLNSLNHERMASLEEVRARLRADLTEALWRGSEQPPGHIGVQLWTPAQWGGELHGALPGLSLDRLDVECTHDEPDTALLRADATQPPVQEVLTSDLFRSLCPVTGQPDWASVQIAYTGAPIDQEGLLRYLVGFRRHAGFHEQCVERIFVDLWRRCQPVRLAVLARFTRRGGLDINPWRTSHPQPLPAALRLARQ

SEQ ID NO: 50220 - protein, 293 aa, Tepidimonas aquatica
  misc_feature (1)..(293): tr|A0A554WQW8|A0A554WQW8_9BURK NADPH-dependent 7-cyano- 7-deazaguanine reductase OS=Tepidimonas aquatica OX=247 482 GN=queF PE=3 SV=1
MVTTTDHPQAATAALHATPLGRETAYPERYDPTLLCPVPRALARAALGWTGPLPFTGADLWTAFEVSWLNPRGKPLVAIAHLTVPAETPNLIESKSLKLYLNSFNQERLRDADELRARLRADLTEALWRGSGQTPGSVGVRLQLPTEWACEAAAGLPGLSLDRLDVECTHDHPAPQLLRADATQPPVDETLSSDLFKSNCPVTGQPDWASVQIRYSGPPIDQEGLLRYLVSFRQHQGFHEHCVERIFIDIWQRCRPVRLSVYARFTRRGGLDINPSRTSHPQPAPGAVRLARQ

SEQ ID NO: 50221 - protein, 278 aa, Tepidimonas fonticaldi
  misc_feature (1)..(278): tr|A0A1A6DTN1|A0A1A6DTN1_9BURK NADPH-dependent 7-cyano- 7-deazaguanine reductase OS=Tepidimonas fonticaldi OX=1 101373 GN=queF PE=3 SV=1
MADAPLGRATAYTDTYDATLLCPLPRAPKRAEIGITGTPPFTGADLWTAFELSWLNDRGKPQVALAHITIPAETPHLIESKSFKLYLNSFNQTRFADAEQVRERLRADLAEALWRGSERAGSVGVRLRLPHEWAAEAVRPLPGLSLDRLDVECTHYQPAPELLRADPEQPPVEEVLTSDLLKSNCLVTGQPDWGSVQIAYSGAPIDQEGLLRYLVSFRQHQEFHEQCVERIFMDIWTRCRPVRLSVYARYTRRGGLDINPWRTSHPQQPPVNARTARQ

SEQ ID NO: 50222 - protein, 300 aa, Tepidimonas fonticaldi
  misc_feature (1)..(300): tr|A0A554XL87|A0A554XL87_9BURK NADPH-dependent 7-cyano- 7-deazaguanine reductase OS=Tepidimonas fonticaldi OX=1 101373 GN=queF PE=3 SV=1
MSADSTASVPAIDPARAAGVPGLADAPLGRATAYTDTYDATLLCPLPRAPKRAEIGITGTPPFTGADLWTAFELSWLNHRGKPQVALAHITIPAETPHLIESKSFKLYLNSFNQTRFADAEQVRERLRADLAEALWRGSERAGSVGVRLRLPHEWAAEAVRPLPGLSLDRLDVECTHYQPAPELLRADPEQPPVEEVLTSDLLKSNCLVTGQPDWGSVQIAYSGAPIDQEGLLRYLVSFRQHQEFHEQCVERIFMDIWTRCRPVRLSVYARYTRRGGLDINPWRTSHPQQPPVNARTARQ

SEQ ID NO: 50223 - protein, 293 aa, Tepidimonas ignava
  misc_feature (1)..(293): tr|A0A4R3LCW5|A0A4R3LCW5_9BURK NADPH-dependent 7-cyano- 7-deazaguanine reductase OS=Tepidimonas ignava OX=11424 9 GN=queF PE=3 SV=1
MVTTTEQAPAAADTLHATPLGRETAYPDRYDPTLLCPVPRALARATLGAGAPLPFTGADFWTAFEVSWLNPRGKPQVAIAHLTVPAETPNLIESKSLKLYLNSFNQERLRDADELRARLRADLSEALWRGSGQPPGSVGVRLQPPAEWACEAVAGLPGLSLDRLDVECTHDHPAPELLRADATQPPVDETLCSDLFKSNCPVTGQPDWASVQIRYSGVPIDQEGLLRYLVSFRQHQGFHEHCVERIFIDIWQRCRPVRLSVYARFTRRGGLDINPWRTSHPQPAPSVARLARQ

SEQ ID NO: 50224 - protein, 293 aa, Tepidimonas sediminis
  misc_feature (1)..(293): tr|A0A554WRG2|A0A554WRG2_9BURK NADPH-dependent 7-cyano- 7-deazaguanine reductase OS=Tepidimonas sediminis OX=25 88941 GN=queF PE=3 SV=1
MSEPTATSAAGARLQDTPLGRASACPDRYDPGLLCPLPRAASRVEWGCAGPLPFTGADVWTAYEVSWLNPRGKPQVAIAQFTVPAESPNLIESKSLKLYLNGLNHARFASAEEVRARLRADLAEALWRGSGQPPGTVGVRLWGPQEWGGAALHAALPGLSLDRLDVDCDDDGPQPAWLRAEAAQPPVQEVLTTDLFRSLCPVTGQPDWASVQIAYTGAPIDQEGLLRYLVGFRRHGGFHEQCVERIFVDLWQRCRPVRLAVLARFTRRGGLDINPWRTSHPQPLPPALRLARQ

SEQ ID NO: 50225 - protein, 315 aa, Tepidimonas sp.
  misc_feature (1)..(315): tr|A0A554X9T9|A0A554X9T9_9BURK NADPH-dependent 7-cyano- 7-deazaguanine reductase OS=Tepidimonas sp. SPSP-6 OX=2 267262 GN=queF PE=3 SV=1
MNPEPNICAPASDDDRPSAGSGARPSHAWASAPTAPDLAATPLGRPSPYVDTYDPGLLCPLPRAPKRAEIGVGTTPPFTGADLWTAFELSWLNVRGKPQVAIAHFVIPAETPNLIESKSFKLYLNSFNQTRFADADGVRERLLADLSEALWRGSEQRGRIGVRLRLPAEWAVETVHSLPGLSLDRLDVECTDYQPAPEWLRADTEQPPVQEVLTSDLLKSNCLVTGQPDWGSVQIAYSGHPIDQAGLLRYLVSFRQHQEFHEQCVERIFMDIWTRCRPVRLSVYARYTRRGGLDINPWRTSHPQQPPANVRTARQ

SEQ ID NO: 50226 - protein, 295 aa, Tepidimonas taiwanensis
  misc_feature (1)..(295): tr|A0A554X1Z6|A0A554X1Z6_9BURK NADPH-dependent 7-cyano- 7-deazaguanine reductase OS=Tepidimonas taiwanensis OX= 307486 GN=queF PE=3 SV=1
MTNDPTPTAAAAAALPELAQAPLGRASAYVDQYDPTLLCPLPRAPKRVEIGIDGTPPFTGADLWTAFELSWLNPRGKPQVAIAHFTIPAETPNLIESKSFKLYLNSYNQTVFADARAVRERLRADLTEALWRGADRTGSIGVRLCTPSEWSQEAVQPLGGLSLDRLDVDCTHYQPAPELLRADHDQPPVQEVLTSDLLKSNCLVTGQPDWGSVQIAYSGAPIDQEGLLRYLVSFRQHQEFHEQCVERIFMDIWTRCRPVRLSVYARYTRRGGLDINPWRTSHPQQPPANVRTARQ

SEQ ID NO: 50227 - protein, 300 aa, Tepidimonas thermarum
  misc_feature (1)..(300): tr|A0A554WXK7|A0A554WXK7_9BURK NADPH-dependent 7-cyano- 7-deazaguanine reductase OS=Tepidimonas thermarum OX=33 5431 GN=queF PE=3 SV=1
MSADSTASIPAVDPTRAAVLPGLADAPLGRSTAYTDTYDPTLLCPLPRAPKRAEIGITGTPPFTGADLWTAFELSWLNERGKPQVALAHFTIPAETPNLVESKSFKLYLNSLHQTRFASAEAVRERLRADVSEALWRGSERTGSIGVRLRLPHEWEAEAVQPLAGLSLDRLDVECTHYQPAPELLRADPSQPPVQEVLTSDLLKSNCLVTGQPDWGSVQIAYSGAPIDQEGLLRYLVSFRQHQEFHEQCVERIFMDIWTRCRPVRLSVYARYTRRGGLDINPWRTSHPQQPPLNVRTARQ

SEQ ID NO: 50228 - protein, 268 aa, Tepidiphilus thermophilus
  misc_feature (1)..(268): tr|A0A0K6IRT8|A0A0K6IRT8_9PROT NADPH-dependent 7-cyano- 7-deazaguanine reductase OS=Tepidiphilus thermophilus O X=876478 GN=Ga0061068_102157 PE=3 SV=1
MSELWLGRQVAVPSSYDPGVLTPIARAQTRRDLDPPPFVGFDEWRAYELSWLDGRGKPVVALARFRVPCDSPCLIESKSLKLYLNGLGGTRFSEVDAVAATIRADLSRAAGAAVEVAIAPLSMRPQRAPGYPAGDCVDELPVEIETYRYDPALLRIAEEAPRAQWLVSHLLKSNCPVTGQPDWGCVVVHALGPVIDPASFLRYVVSFREQQEFHEQCVERIYRDLWRLGMQELMVFACYTRRGGLDISPVRASRVGLLPETLPEEIRQ

SEQ ID NO: 50229 - protein, 278 aa, Terasakiispira papahanaumokuakeensis
  misc_feature (1)..(278): tr|A0A1E2V7S8|A0A1E2V7S8_9GAMM NADPH-dependent 7-cyano- 7-deazaguanine reductase OS=Terasakiispira papahanaumok uakeensis OX=197479 GN=queF PE=3 SV=1
MESFEQHLGAAPLGKTQGYVDQHDPSLLYPIPRQAQREPLGVVADQVLPFVGEDVWTAYEVSWLLPGGRPVVRVAEFRIPAQSPNIIESKSFKLYLNSLNQTRASQSQVQQWLETHLSDAAGAPVDVKLMHLDDWIERDIKRPIGHCLDELEVDCDDLAAPQPALLSASGDVVSERLYSHLLKSNCPVTGQPDWATVVVDYTGPKINPEGLLRYIVSYRRHNDFHEHCVEKMFLDLQERCHPEHLSVQARYTRRGGLDINPWRSTSDQRAPDWRDVRQ

SEQ ID NO: 50230 - protein, 268 aa, Teredinibacter sp.
  misc_feature (1)..(268): tr|A0A509E402|A0A509E402_9GAMM NADPH-dependent 7-cyano- 7-deazaguanine reductase OS=Teredinibacter sp. ISS155 O X=2584524 GN=queF PE=3 SV=1
MSEGIQLGKDALYVDHYDAELLVPIPRSESRAKVFGATLPFMGKDIWTSYELSWLSKSGKPQVAIAEFEFPYDSQNIIESKSFKYYLNSFNQTFFDSMEEVRQTLIRDLSQAAGGDVSVDVQNLSSDHQIYVLPGTCVDNLNVNVNQYTPNPELLTSGRRTVEKKQLFSHLLKSNCPVTGQPDWATVWIEYSGTEIIPESFLAYVISYRQHQDFHENCVESMFKDIMRQCQPSTLSVYARYTRRGGLDINPFRTNAREEVPVKRLARQ

SEQ ID NO: 50231 - protein, 276 aa, Teredinibacter turnerae
  misc_feature (1)..(276): sp|C5BR59|QUEF_TERTT NADPH-dependent 7-cyano-7-deazagua nine reductase OS=Teredinibacter turnerae (strain ATCC 39867 / T7901) OX=377629 GN=queF PE=3 SV=1
MSDHADTLLGKDTTYPEHYDPALLQPIPRERSRETMVRGDLPFTGVDIWTAYELSWLDSSGKPHVAVGEFWVPADSSAIIESKSLKYYLNSLNQHRFATREQARQAIAGDLSEAAGGEVQVTLFDIDDYSNVGTLPGTCVDTLDAPVYVYQPDASLLKFVDQPGEQQQLFSHLLKSNCPVTGQPDWATVWVQCSGLTLVPESFLAYVVSFRGHQDFHENCVERIFTDLMAGGKLQDLAVYARYTRRGGLDINPLRFSGAQDPEALEQLVSKRIARQ

SEQ ID NO: 50232 - protein, 140 aa, Terrabacteria group
  misc_feature (1)..(140): tr|A0A537KX24|A0A537KX24_9BACT NADPH-dependent 7-cyano- 7-deazaguanine reductase OS=Terrabacteria group bacteri um ANGP1 OX=2569760 GN=queF PE=3 SV=1
MARIVETPPVPDRRFDIAGYDAIDTAALETFPYEYPGRDVAVDIETDEFTAVCPWSGLPDFGTVKIRYLPGGKILELRSLKYYLLSYRNVGIYQEHAVTRMLDDLVTTVEPKWMEISLDYKIRGGIHTVCRVRYPHLENA

SEQ ID NO: 50233 - protein, 161 aa, Terrabacteria group
  misc_feature (1)..(161): tr|A0A537JZA9|A0A537JZA9_9BACT NADPH-dependent 7-cyano- 7-deazaguanine reductase OS=Terrabacteria group bacteri um ANGP1 OX=2569760 GN=queF PE=3 SV=1
MLGRQRAAQQRGSRRRNPAAPAEGAEAAAPPAPDLRLEIQDPEAVRPGLLETFPYEYPGSPATVEISTDEFTAVCPWSGLPDFGTVTIRYLPRERVLELRSFKYYLLSYRSVGIYQEHAANRILQDLVRACAPEWMELDLDYRVRGGIRTVVRVRWARPAA

SEQ ID NO: 50234 - protein, 165 aa, Terribacillus aidingensis
  misc_feature (1)..(165): tr|A0A285N3S4|A0A285N3S4_9BACI NADPH-dependent 7-cyano- 7-deazaguanine reductase OS=Terribacillus aidingensis O X=586416 GN=queF PE=3 SV=1
MAGRNPEEMEDVTLLGNQNNVYDFDYKPEVLETFDNKHVYRDYFVKFNCPEFTTLCPITNQPDFGTVYISYIPDEKMVESKSLKLYLFSFRNHGDFHEDCINIILNDLKELMNPRYIEVWGKFTPRGGISIDPYVNYGRPGTKYEQMADHRMMNHDLYPEKVDNR

SEQ ID NO: 50235 - protein, 165 aa, Terribacillus goriensis
  misc_feature (1)..(165): tr|A0A075LLX6|A0A075LLX6_9BACI NADPH-dependent 7-cyano- 7-deazaguanine reductase OS=Terribacillus goriensis OX= 386490 GN=queF PE=3 SV=1
MAGRNPEEMEDVTLLGNQNNVYDFDYKPEVLETFDNKHTYRDYFVKFNCPEFTTLCPITNQPDFGTVYISYIPDEKMVESKSLKLYLFSFRNHGDFHEDCINIILNDLKELMNPRYIEVWGKFTPRGGISIDPYVNYGRPGTKYEQMADHRMMNHDMYPEKVDNR

SEQ ID NO: 50236 - protein, 165 aa, Terribacillus halophilus
  misc_feature (1)..(165): tr|A0A1G6HXP1|A0A1G6HXP1_9BACI NADPH-dependent 7-cyano- 7-deazaguanine reductase OS=Terribacillus halophilus OX =361279 GN=queF PE=3 SV=1
MAGRKPEEMTDVTLLGNKNNVYDFDYKPEVLETFDNKHTYRDYFVKFNCPEFTTLCPITNQPDFGTVYISYIPDEKMVESKSLKLYLFSFRNHGDFHEDCMNIILNDLKELMNPRYIEVWGKFTPRGGISIDPYVNYGRPGTKYEQMADHRMMNHDMYPEKVDNR

SEQ ID NO: 50237 - protein, 165 aa, Terribacillus saccharophilus
  misc_feature (1)..(165): tr|A0A268AE98|A0A268AE98_9BACI NADPH-dependent 7-cyano- 7-deazaguanine reductase OS=Terribacillus saccharophilu s OX=361277 GN=queF PE=3 SV=1
MAGRNPEEMEDVTLLGNQNNVYDFNYKPEVLETFDNKHTYRDYFVKFNCPEFTTLCPITNQPDFGTVYISYIPDEKMVESKSLKLYLFSFRNHGDFHEDCINIILNDLKELMNPRYIEVWGKFTPRGGISIDPYVNYGRPGTKYEQMADHRMMNHDMYPEKVDNR

SEQ ID NO: 50238 - protein, 165 aa, Terribacillus saccharophilus; identical to SEQ ID NO: 50235
  misc_feature (1)..(165): tr|A0A1H8G5H8|A0A1H8G5H8_9BACI NADPH-dependent 7-cyano- 7-deazaguanine reductase OS=Terribacillus saccharophilu s OX=361277 GN=queF PE=3 SV=1

SEQ ID NO: 50239 - protein, 165 aa, Terribacillus sp.
  misc_feature (1)..(165): tr|A0A268BW46|A0A268BW46_9BACI NADPH-dependent 7-cyano- 7-deazaguanine reductase OS=Terribacillus sp. 7520-G OX =2025389 GN=queF PE=3 SV=1
MAGRKPEEMEDITLLGNKNNVYDFDYKPEVLETFDNKHTYRDYFVKFNCPEFTTLCPITNQPDFGTVYISYIPDEKMVESKSLKLYLFSFRNHGDFHEDCMNIILNDLKELMNPRYIEVWGKFTPRGGISIDPYVNYGRPGTKYEQMADHRMMNHDMYPEKVDNR

SEQ ID NO: 50240 - protein, 133 aa, Terriglobus albidus
  misc_feature (1)..(133): tr|A0A5B9EDU5|A0A5B9EDU5_9BACT NADPH-dependent 7-cyano- 7-deazaguanine reductase OS=Terriglobus albidus OX=1592 106 GN=queF PE=3 SV=1
MAKKQPRYTDEHAAAGLDTKFPEIETWANQFPAYEILIDDPEFTSVCPKTGLPDFGVLQIRYMPKKRCLELKSLKEYLFTYRNLGIFQENICNQVLEDVVKATDPVWAEVKGDFRPRGGISTIVTARWPRPKK

SEQ ID NO: 50241 - protein, 147 aa, Terriglobus roseus
  misc_feature (1)..(147): tr|A0A1H4K9Z3|A0A1H4K9Z3_9BACT NADPH-dependent 7-cyano- 7-deazaguanine reductase OS=Terriglobus roseus OX=39273 4 GN=queF PE=3 SV=1
MKPIPDNRMNNTSPLYTDEHAAAGLDVAMPEIETWQNHFRSYEILIDDPEFTSVCPRTGLPDFGHLTVRYMPKDRCLELKSLKEYLFCYRNLGIFQENICNRVLDDMVKACDPVWAEVKGDFRPRGGISTVVTATYPRPHDQLTPTR

SEQ ID NO: 50242 - protein, 147 aa, Terriglobus roseus
  misc_feature (1)..(147): tr|I3ZDU0|I3ZDU0_TERRK NADPH-dependent 7-cyano-7-deazag uanine reductase OS=Terriglobus roseus (strain DSM 1839 1 / NRRL B-41598 / KBS 63) OX=926566 GN=queF PE=3 SV=1
MKPIPDNRMNNTSPLYTDEHAAAGLDVAMPEIETWQNHFRSYEILIDDPEFTSVCPRTGLPDFGHLTIRYMPKDRCLELKSLKEYLFCYRNLGIFQENICNRVLDDMVKACEPVWAEVKGDFRPRGGISTVVTATFPRPHEQTTPTC

SEQ ID NO: 50243 - protein, 136 aa, Terriglobus saanensis
  misc_feature (1)..(136): tr|E8V8E7|E8V8E7_TERSS NADPH-dependent 7-cyano-7-deazag uanine reductase OS=Terriglobus saanensis (strain ATCC BAA-1853 / DSM 23119 / SP1PR4) OX=401053 GN=queF PE=3 S V=1
MTTDKRYTDEHAAAGLDHAFPAIETWQNHFRAYEILVDDPEFTSVCPKTGLPDFGVLTIRYMPRESCLELKSLKEYLFHYRNLGIFQENIVNQVLNDVVKACDPIWCEIKGDFRPRGGISTIVTAYHPRTEDDPRR

SEQ ID NO: 50244 - protein, 280 aa, Testudinibacter aquarius
  misc_feature (1)..(280): tr|A0A4R3Y240|A0A4R3Y240_9PAST NADPH-dependent 7-cyano- 7-deazaguanine reductase OS=Testudinibacter aquarius OX =1524974 GN=queF PE=3 SV=1
MATYHHSSLDQLTLGKQTDYHSEYDPRLLQAVPRSLNRDSLGISSQQPFNCGADIWTAYEISWLNAKGLPQVAIGDIYLNFQSKNLIESKSFKLYLNSFNQSRFDSLQQVESLIQQDLAVCAQGEVQVRLRPLDAYQNQTIDYFQGECIDYQDIEIDSYEFQPQLLQHCTTAEQVDEVLVSHLLKSNCLITNQPDWGSVQIEYQGAKINREALLRYLVSFRQHNEFHEQCVERIFCDLVHYAKPTKLKVYARYTRRGGLDINPYRANYPLELQNQRLARQ

SEQ ID NO: 50245 - protein, 166 aa, Tetzosporium hominis
  misc_feature (1)..(166): tr|A0A264W420|A0A264W420_9BACL NADPH-dependent 7-cyano- 7-deazaguanine reductase OS=Tetzosporium hominis OX=202 0506 GN=queF PE=3 SV=1
MSGRTHEQGLDELTLLGNQGTKYPQDYAPEVLEAVDSLHSNRDYFVKFNAPEFTSLCPITGQPDFATMYISYIPDQKIVESKSLKLYLFSFRNHGDFHEDCVNIIMNDLIKLLDPRYIEVWGKFTPRGGISIDPWCNYGKPGTKYEEMAFHRLMNHDLYPEKVDNR

SEQ ID NO: 50246 - protein, 165 aa, Thalassobacillus cyri
  misc_feature (1)..(165): tr|A0A1H3X2E9|A0A1H3X2E9_9BACI NADPH-dependent 7-cyano- 7-deazaguanine reductase OS=Thalassobacillus cyri OX=57 1932 GN=queF PE=3 SV=1
MAGRKDEDLKDLSLLGSQGTNYSFDYDPAVLETFDNQHPNRDYFVKFNCPEFTTLCPKTGQPDFATIYISYIPDEKMVESKSLKLYLFSFRNHGDFHEDSVNIIMNDLIELMTPRYIEVWGKFTPRGGISIDPYCNYGKPGTKFEQMAEQRLFNHDLYPEKIDNR

SEQ ID NO: 50247 - protein, 155 aa, Thalassobaculum litoreum
  misc_feature (1)..(155): tr|A0A1G7Q233|A0A1G7Q233_9PROT NADPH-dependent 7-cyano- 7-deazaguanine reductase OS=Thalassobaculum litoreum DS M 18839 OX=1123362 GN=queF PE=3 SV=1
MSDQTIYGGLNQLGGATALPASPEEAVLEKVENPHRGTDYVVRFTQPEFTSLCPVTGQPDFAFLIIDYVPTDWLVESKSLKLYLGSFRNHGAFHEGCTIDIAKRVTDLLAPKWLRIGGYWYPRGGMPIDVFYQTGEPPKGLWIPSQDVPVYRGRP

SEQ ID NO: 50248 - protein, 155 aa, Thalassobius activus
  misc_feature (1)..(155): tr|A0A0P1IRR4|A0A0P1IRR4_9RHOB NADPH-dependent 7-cyano- 7-deazaguanine reductase OS=Thalassobius activus OX=171 5691 GN=queF PE=3 SV=1
MSDKSIYENLTQLGSHTALPQTPEEAVMERVPNPQKGTDYAVRFTAPEFTSLCPLTSAPDFAHIVIDYVPGDWLVESKSLKLFLGSFRNHGAFHEDCSVTIGKRIEELLEPKWLRVGAYWYPRGGIPIDVFYQTGPELPNVWIPEQGVPTYRGRG

SEQ ID NO: 50249 - protein, 154 aa, Thalassococcus halodurans
  misc_feature (1)..(154): tr|A0A1H5TMI4|A0A1H5TMI4_9RHOB NADPH-dependent 7-cyano- 7-deazaguanine reductase OS=Thalassococcus halodurans O X=373675 GN=queF PE=3 SV=1
MSDSIYSNLKQLGGATVLPTDPDQAELERVQNPQADVDYNVRFTAPEFTSLCPMTGQPDFAHLVIDYVPGDWLVESKSLKLYLGSFRNHGAFHEDCTVSIGRRLNDFLSPRWLRIGGYWYPRGGIPIDVFWQTGPQPESVWIPDQGVPPYRGRG

SEQ ID NO: 50250 - protein, 155 aa, Thalassococcus sp.
  misc_feature (1)..(155): tr|A0A4P6ML24|A0A4P6ML24_9RHOB NADPH-dependent 7-cyano- 7-deazaguanine reductase OS=Thalassococcus sp. S3 OX=20 17482 GN=queF PE=3 SV=1
MMTQDIYQNLTQLGAPTDLPKSPEEAVLERVPNPQAGTGYAVRFVAPEFTSLCPLTGQPDFAHLVLDYVPGDWLVESKSLKLFLGSFRNHGAFHEDCTVSIGLRLVETLSPTWLRIGGYWYPRGGIPIDVFYQTGEPPRGIWIPDQGVQGYRGRG

SEQ ID NO: 50251 - protein, 278 aa, Thalassolituus oleivorans
  misc_feature (1)..(278): tr|A0A1L6KD16|A0A1L6KD16_9GAMM NADPH-dependent 7-cyano- 7-deazaguanine reductase OS=Thalassolituus oleivorans O X=187493 GN=queF PE=3 SV=1
MASVHSDNNPLGQVSAYRDTYDPSVLFPIERDESWRAQGLDRNQFPFFGVDIWNGYEISWLNAKGKPLVCTAEFRIPATSRYLIESKSFKLYLNSFNQSRFDSVDAVKALMVADLSAAAGVAEGTFVDVIFHGFDTQFPSAPEAKCLDDIDIEVFSYELDPEFLRASGDEIFDGWLCSHLLKSNCPVTGQPDWGSIFVYYRGSKIDEAGLLQYLVSLRQHQDFHEQCVERTFRDISARCQPEALTVYARYVRRGGLDINPFRSSMTDAKAENFRLFRQ

SEQ ID NO: 50252 - protein, 278 aa, Thalassolituus oleivorans
  misc_feature (1)..(278): tr|M5DSD7|M5DSD7_9GAMM NADPH-dependent 7-cyano-7-deazag uanine reductase OS=Thalassolituus oleivorans MIL-1 OX= 1298593 GN=queF PE=3 SV=1
MASVHSDNNPLGQVSAYRDTYDPSVLFPIERDESWRAQGLDRNQFPFFGVDIWNGYEISWLNAKGKPLVCTAEFRIPATSRYLIESKSFKLYLNSFNQSRFDSVDAVRALMVADLSAAAGVAEGTFVDVIFHGFDTQFPLAPEAKCLDDIDIEVSSYELDPEFLRANGDEIFDGWLCSHLLKSNCPVTGQPDWGSIFVYYRGSKIDEAGLLQYLVSLRQHQDFHEQCVERTFRDISARCQPEALTVYARYVRRGGLDINPFRSSMTDAKAENFRLFRQ

SEQ ID NO: 50253 - protein, 273 aa, Thalassolituus sp.
  misc_feature (1)..(273): tr|A0A558NM57|A0A558NM57_9GAMM NADPH-dependent 7-cyano- 7-deazaguanine reductase OS=Thalassolituus sp. C2-1 OX= 2597518 GN=queF PE=3 SV=1
MASVTSEHNPLGKVSAYKDEYDASLLFPIEREESWRAQGLDRHEVPFYGVDIWNGYEISWLNSKGKPVVCLAEFRIPATSRFLVESKSFKLYLNSFNQTRFDDAEQARLRMATDLSAAAQGDVQVIFHAVDADFPRPPVAHCIDDLDIEVNSYALDASLLKTTDGQFEGWLCSHLLKSNCPVTGQPDWGTLYIYYRGQKIDEAGLLAYIVSLRQHQDFHEQCAERTYRDISLACKPESLTVYARYVRRGGLDINPFRTSEAVFSAENFRLVRQ

SEQ ID NO: 50254 - protein, 288 aa, Thalassomonas actiniarum
  misc_feature (1)..(288): tr|A0A0D8D3K5|A0A0D8D3K5_9GAMM NADPH-dependent 7-cyano- 7-deazaguanine reductase OS=Thalassomonas actiniarum OX =485447 GN=queF PE=3 SV=1
MSYFMANYQNSDALNNLTLGKTTAYVAQYTPDLLQGVPRSLNRNDLALDQNNLPFQGEDLWYGYELSWLNSKGKPVVAVAEFRFPCSSENIIESKSFKLYLNSFNQTRFDSRENVQLALIEDLSRVAKADVEVALFNVDDCPPLAIAPIDAVCIDDEDITVDHYDFDPKLLQRAQQHGSDEIKQQALVSHLLKSNCLITNQPDWASIFIEYRGREICHAALLRYLISFRQHNEFHEQCVERIFCDLKQYCQLESLTVYARYTRRGGLDINPYRSTSEKSAPKIRTLRQ

SEQ ID NO: 50255 - protein, 282 aa, Thalassomonas sp.
  misc_feature (1)..(282): tr|A0A553FIJ7|A0A553FIJ7_9GAMM NADPH-dependent 7-cyano- 7-deazaguanine reductase OS=Thalassomonas sp. M1454 OX= 2594477 GN=queF PE=3 SV=1
MTKYQNADELKSLTLGKSTEYASKYSPQLLQGVPRALNRDDLNLKADALPFFGEDVWYGYELSWLEPNGKPVVAVAEFRFCCSSVNLIESKSFKLYLNSFNQSHFSNMDEVSAILSKDLEQVSGKPVQVTLYKVDQCPALAIAPITAQCIDDIDLTIDSYQFDRSILENSTSNDEIVTQYLVSHLLKSNCLITNQPDWGSVYINYTGPKINQEKLLRYLISFRQHNEFHEQCVERIYTDLLEFCHCSSLSVFARYTRRGGLDINPFRSSQAESAPQSRTLRQ

SEQ ID NO: 50256 - protein, 284 aa, Thalassomonas viridans
  misc_feature (1)..(284): tr|A0A0D8DAZ2|A0A0D8DAZ2_9GAMM NADPH-dependent 7-cyano- 7-deazaguanine reductase OS=Thalassomonas viridans OX=1 37584 GN=queF PE=3 SV=1
MANYQNSDALNNLTLGKTTSYVAQYTPDLLQGVPRSLNRNDLALDQANLPFYGEDLWYGYELSWLNSKGKPVVAVAEFRFPCSSENIIESKSFKLYLNSFNQTRFDSRESVQKALIEDLSRVANGDVEVALFDVDDCPPLAIAPITAACIDDEDISVDDYDFAPESLKHAQQGSGDEIREHALVSHLLKSNCLITNQPDWASIFIEYTGREISRAALLRYLISFRQHNEFHEQCVERIFCDLQQHCQLQALTVYARYTRRGGLDINPYRSTTDKKAPRIRTLRQ

SEQ ID NO: 50257 - protein, 155 aa, Thalassospira alkalitolerans
  misc_feature (1)..(155): tr|A0A1Y2LHQ7|A0A1Y2LHQ7_9PROT NADPH-dependent 7-cyano- 7-deazaguanine reductase OS=Thalassospira alkalitoleran s OX=1293890 GN=queF PE=3 SV=1
MADQTIYDNLTMLGGATEQPASPEEAVLERVQNPQAGTDYCVRFVAPEFTSLCPITGQPDFAHLVIDYVPGDWLVESKSLKLFLTSFRNHGSFHEDCTVKVGKRIAETIDPKWLRIGGYWYPRGGIPIDVFYQTGPAPDGVWIPDQGVAPYRGRG

SEQ ID NO: 50258 - protein, 155 aa, Thalassospira lohafexi
  misc_feature (1)..(155): tr|A0A2N3LC30|A0A2N3LC30_9PROT NADPH-dependent 7-cyano- 7-deazaguanine reductase OS=Thalassospira lohafexi OX=7 44227 GN=queF PE=3 SV=1
MADQTIYDNLTMLGSDTAQPASPDEAVLERVANPQAGTDYCVRFVAPEFTSLCPMTGQPDFAHLVIDYIPGDWLVESKSLKLFLTSFRNHGSFHEDCTIKVAKRIVETLDPKWLRIGGYWYPRGGIPIDVFYQTGAAPEGVWIPDQGVAPYRGRG

SEQ ID NO: 50259 - protein, 155 aa, Thalassospira lucentensis
  misc_feature (1)..(155): tr|A0A367V634|A0A367V634_9PROT NADPH-dependent 7-cyano- 7-deazaguanine reductase OS=Thalassospira lucentensis M CCC 1A00383 = DSM 14000 OX=1123365 GN=queF PE=3 SV=1
MADQTIYDNLTMLGSDTAQPASPDEAVLERVANPQAGTDYCVRFVAPEFTSLCPMTGQPDFAHLVIDYIPGDWLVESKSLKLFLTSFRNHGSFHEDCTIKVAKRIVETLDPKWLRIGGYWYPRGGIPIDVFYQTGAEPEGVWIPDQGVAPYRGRG

SEQ ID NO: 50260 - protein, 155 aa, Thalassospira lucentensis; identical to SEQ ID NO: 50258
  misc_feature (1)..(155): tr|A0A358HR82|A0A358HR82_9PROT NADPH-dependent 7-cyano- 7-deazaguanine reductase OS=Thalassospira lucentensis O X=168935 GN=queF PE=3 SV=1

SEQ ID NO: 50261 - protein, 155 aa, Thalassospira marina
  misc_feature (1)..(155): tr|A0A2N3KWF7|A0A2N3KWF7_9PROT NADPH-dependent 7-cyano- 7-deazaguanine reductase OS=Thalassospira marina OX=204 8283 GN=queF PE=3 SV=1
MADESIYQNLTMLGGDTKQPASPEEAVLERVQNPQAGTDYCVRFVAPEFTSLCPITGQPDFAHLVIDYVPADWLVESKSLKLFLTSFRNHGSFHEDCTIKVGKRIVETLDPKWLRIGGYWYPRGGIPIDVFYQTGPAPEGVWIPDQGVAPYRGRG

SEQ ID NO: 50262 - protein, 155 aa, Thalassospira mesophila
  misc_feature (1)..(155): tr|A0A1Y2L1Q8|A0A1Y2L1Q8_9PROT NADPH-dependent 7-cyano- 7-deazaguanine reductase OS=Thalassospira mesophila OX= 1293891 GN=queF PE=3 SV=1
MSDQSIYQNLTMLGGDTKQPESPEEAVLEKVKNPQEGTDYCVRFVAPEFTSLCPITGQPDFAHIVIDYIPDGWLVESKSLKLFLTSFRNHGAFHEDCTVSIGKRIAETLNPKWLRIGGYWYPRGGIPIDVFYQTGPAPEGVWIPDQGVAPYRGRG

SEQ ID NO: 50263 - protein, 155 aa, Thalassospira permensis
  misc_feature (1)..(155): tr|A0A074J6A5|A0A074J6A5_9PROT NADPH-dependent 7-cyano- 7-deazaguanine reductase OS=Thalassospira permensis NBR C 106175 OX=1353532 GN=queF PE=3 SV=1
MADQTIYDNLTMLGGTTEQPASPDEAVLERVQNPQAGTDYCVRFVAPEFTSLCPITGQPDFAHLVIDYVPGDWLVESKSLKLFLTSFRNHGSFHEDCTVKVGKRIADMIDPKWLRIGGYWYPRGGIPIDVFYQTGPAPDGVWIPDQGVAPYRGRG

SEQ ID NO: 50264 - protein, 155 aa, Thalassospira povalilytica
  misc_feature (1)..(155): tr|A0A2N3KQ57|A0A2N3KQ57_9PROT NADPH-dependent 7-cyano- 7-deazaguanine reductase OS=Thalassospira povalilytica OX=732237 GN=queF PE=3 SV=1
MADQTIYDNLTMLGGDTVQPASPDEAVLERVQNPQAGTDYCVRFVAPEFTSLCPITGQPDFAHLVIDYVPGDWLVESKSLKLFLTSFRNHGSFHEDCTIKVGKRIVETLDPKWLRIGGYWYPRGGIPIDVFYQTGAAPEGVWIPEQGVAPYRGRG

SEQ ID NO: 50265 - protein, 155 aa, Thalassospira profundimaris; identical to SEQ ID NO: 50264
  misc_feature (1)..(155): tr|A0A367VC24|A0A367VC24_9PROT NADPH-dependent 7-cyano- 7-deazaguanine reductase OS=Thalassospira profundimaris OX=502049 GN=queF PE=3 SV=1

SEQ ID NO: 50266 - protein, 155 aa, Thalassospira profundimaris
  misc_feature (1)..(155): tr|K2LKH1|K2LKH1_9PROT NADPH-dependent 7-cyano-7-deazag uanine reductase OS=Thalassospira profundimaris WP0211 OX=1177928 GN=queF PE=3 SV=1
MADQTIYDNLTMLGGDTKQPASPDEAVLERVQNPQAGTDYCVRFVAPEFTSLCPITGQPDFAHLVIDYVPGDWLVESKSLKLFLTSFRNHGSFHEDCTIKVGKRIVETLDPKWLRIGGYWYPRGGIPIDVFYQTGPAPEGVWIPEQGVAPYRGRG

SEQ ID NO: 50267 - protein, 155 aa, Thalassospira sp.
  misc_feature (1)..(155): tr|A0A419X250|A0A419X250_9PROT NADPH-dependent 7-cyano- 7-deazaguanine reductase OS=Thalassospira sp. DSM 26710 OX=2035225 GN=queF PE=3 SV=1
MADQTIYDNLTMLGGDTQQPASPDEAVLERVQNPQAGTDYCVRFVAPEFTSLCPITGQPDFAHLVIDYVPGDWLVESKSLKLFLTSFRNHGSFHEDCTIKVGKRIVETLDPKWLRIGGYWYPRGGIPIDVFYQTGPAPEGVWIPEQGVAPYRGRG

SEQ ID NO: 50268 - protein, 155 aa, Thalassospira sp.
  misc_feature (1)..(155): tr|A0A1Q4URJ6|A0A1Q4URJ6_9PROT NADPH-dependent 7-cyano- 7-deazaguanine reductase OS=Thalassospira sp. TSL5-1 OX =1544451 GN=queF PE=3 SV=1
MSDQSIYQNLTMLGGDTKQPASPEEAVLERVQNPQAGTDYCVRFVAPEFTSLCPITGQPDFAHLVIDYVPADWLVESKSLKLFLTSFRNHGSFHEDCTIKVGKRIVETLDPKWLRIGGYWYPRGGIPIDVFYQTGPAPEGVWIPDQGVAPYRGRG

SEQ ID NO: 50269 - protein, 155 aa, Thalassospira xiamenensis
  misc_feature (1)..(155): tr|A0A285TZI7|A0A285TZI7_9PROT NADPH-dependent 7-cyano- 7-deazaguanine reductase OS=Thalassospira xiamenensis O X=220697 GN=queF PE=3 SV=1
MADQTIYDNLTMLGGATEQPASPDEAVLERVSNPQAGTDYCVRFVAPEFTSLCPITGQPDFAHLVIDYVPGDWLVESKSLKLFLTSFRNHGSFHEDCTVKVGKRIADMIDPKWLRIGGYWYPRGGIPIDVFYQTGPAPEGVWIPDQGVAPYRGRG

SEQ ID NO: 50270 - protein, 155 aa, Thalassospira xiamenensis
  misc_feature (1)..(155): tr|A0A367XGS1|A0A367XGS1_9PROT NADPH-dependent 7-cyano- 7-deazaguanine reductase OS=Thalassospira xiamenensis O X=220697 GN=queF PE=3 SV=1
MADQTIYDNLTMLGGTTEQPASPDEAVLERVQNPQAGTDYCVRFVAPEFTSLCPITGQPDFAHLVIDYVPGDWLVESKSLKLFLTSFRNHGSFHEDCTVKVGKRIADMIDPKWLRIGGYWYPRGGIPIDVFYQTGPAPEGVWIPDQGVAPYRGRG

SEQ ID NO: 50271 - protein, 155 aa, Thalassospira xianhensis; identical to SEQ ID NO: 50270
  misc_feature (1)..(155): tr|A0A367U6W6|A0A367U6W6_9PROT NADPH-dependent 7-cyano- 7-deazaguanine reductase OS=Thalassospira xianhensis MC CC 1A02616 OX=1177929 GN=queF PE=3 SV=1

SEQ ID NO: 50272 - protein, 283 aa, Thalassotalea agarivorans
  misc_feature (1)..(283): tr|A0A1I0FHZ0|A0A1I0FHZ0_THASX NADPH-dependent 7-cyano- 7-deazaguanine reductase OS=Thalassotalea agarivorans O X=349064 GN=queF PE=3 SV=1
MSKYKDSQALKGLTLGKTTAYVSEYQPEILQAVPRSLNRDDIDVSNDNLPFKGEDVWYGYELSWLNAKGKPIVAVAEFRFPCESENIVESKSFKLYLNSFNQSRFDSWHAVKDALTKDLSEVAKLPVQVTLFAVDDCPALQIGQSTALCIDDLDINIDDFDFNPSLLEGAQAIDGEIRSVSLVSHLLKSNCLITNQPDWASLYIDYQGKEIDNEKLLAYIISFRQHNEFHEQCVERIFCDLQHYFELSSLTVYARYTRRGGLDINPYRSTADLSAPSLRTLRQ

SEQ ID NO: 50273 - protein, 283 aa, Thalassotalea euphylliae
  misc_feature (1)..(283): tr|A0A3E0TPK3|A0A3E0TPK3_9GAMM NADPH-dependent 7-cyano- 7-deazaguanine reductase OS=Thalassotalea euphylliae OX =1655234 GN=queF PE=3 SV=1
MAKYQNSDLLEGLTLGKATDYSNQYDPSLLQGVPRSLNRDDLDIDQSKLPFFGEDIWYGYEVSWLNAKGKPVVAVAEFQFPCSSDNLIESKSFKLYLNSFNQTRFDSQAQVIEHMTNDLSKVAGAHATVRLFPVDNCPPLAIAATKATCIDELDVEIEQYQYQPTLLADATDKDKKQVTEQLVSHLLKSNCLITNQPDWASVYISYTGNEIDKEKLLKYLISFRDHNEFHEQCVERIYCDIQQFCNPKYLTVFARYTRRGGLDINPYRSSLPSNAPTSRTLRQ

SEQ ID NO: 50274 - protein, 283 aa, Thalassotalea euphylliae
  misc_feature (1)..(283): tr|A0A3E0UED7|A0A3E0UED7_9GAMM NADPH-dependent 7-cyano- 7-deazaguanine reductase OS=Thalassotalea euphylliae OX =1655234 GN=queF PE=3 SV=1
MAKYQNSGLLEGLTLGKATDYSDQYDPSLLQGVPRSLNRDDLDIDQSNLPFFGEDIWYGYEVSWLNAKGKPVVAVAEFHFPCSSDNLIESKSFKLYLNSFNQTRFDSQAQVLEHMTNDLSKVAGAHATVRLFPVDNCPPLAIAATKATCIDELDVEIDQYQYQPTLLADATGKGKKQVTEQLVSHLLKSNCLITNQPDWASVYISYTGNEIDKEKLLKYLISFRDHNEFHEQCVERIYCDIQQFCNPKYLTVFARYTRRGGLDINPYRSSLPSNAPSSRSLRQ

SEQ ID NO: 50275 - protein, 283 aa, Thalassotalea sp.
  misc_feature (1)..(283): tr|A0A516HD74|A0A516HD74_9GAMM NADPH-dependent 7-cyano- 7-deazaguanine reductase OS=Thalassotalea sp. PS06 OX=2 594005 GN=queF PE=3 SV=1
MSNYQNADELKALLLGKETEYKSDYDASLLQGVPRSLNRDSLAIDQVNLPFLGEDVWYGFELSWLNAKGLPQVAVAEFRFPCTSTNIVESKSFKLYLNSFNQTRFSSWDMVKEKLGQDLSLVCDGQAIVNLFDVEHCPALQIASQQSYQRIDDQDIEITNYQFDRELLEGAANKDEIVSEQLVSHLLKSNCLITNQPDWASLYIDYRGGKIDQQKLLRYLISFRQHNEFHEQCVERIFVDLMEFCQCQELTVYARYTRRGGLDINPYRSTNASPAPDLRTIRQ

SEQ ID NO: 50276 - protein, 280 aa, Thalassotalea sp.
  misc_feature (1)..(280): tr|A0A1Q6CIP1|A0A1Q6CIP1_9GAMM NADPH-dependent 7-cyano- 7-deazaguanine reductase OS=Thalassotalea sp. PP2-459 O X=1742724 GN=queF PE=3 SV=1
MSQYKNANALEKLTLGKNTEYASQYNAALLQGVPRRLNRDSLSLDENTLPFMGEDVWYGYEISWLNAKGKPIVRVAEFSFPCTSENIIESKSFKLYLNSFNQTTFSSEQEVITAMKNDLSAVCGAQANVILFPVDKCPALEINTPNARCLDELDIEMHDYQLSSALLNTESDTVVSEVLVSHLLKSNCLITNQPDWASLFISYKGKKINHSALLKYIISFREHNEFHEQCVERIFCDLMTICQPEALTVYARYTRRGGLDINPFRSTHESVAPKTRTLRQ

SEQ ID NO: 50277 - protein, 281 aa, Thauera aminoaromatica
  misc_feature (1)..(281): tr|N6YN03|N6YN03_9RHOO NADPH-dependent 7-cyano-7-deazag uanine reductase OS=Thauera aminoaromatica S2 OX=123438 1 GN=queF PE=3 SV=1
MNTDTPRRHGAESSPLGQAVAYRDTYAPELLFPISRQLKRDELGLRADMLPFCGEDLWNAYELSWLDARGKPVVALGEFRVPAASPRLIESKSLKLYLNSFNQQRCASVEEVRATIARDLSAAAGAAVAVVLRPLQERPGRSFGYPEGVCIDALEIDIGRYQPCAETLRAAGPEVEETLYSHLLKSNCLVTGQPDWGTLVVRYRGAAIDREGLLRYVVSFRGHNEFHEQCVERVFCDLMARCKPQELAVWARYTRRGGLDINPFRASRAGLRADEAMEVRQ

SEQ ID NO: 50278 - protein, 281 aa, Thauera aminoaromatica; identical to SEQ ID NO: 50277
  misc_feature (1)..(281): tr|A0A5C7T5W2|A0A5C7T5W2_9RHOO NADPH-dependent 7-cyano- 7-deazaguanine reductase OS=Thauera aminoaromatica OX=1 64330 GN=queF PE=3 SV=1

SEQ ID NO: 50279 - protein, 281 aa, Thauera aromatica
  misc_feature (1)..(281): tr|A0A2R4BJH8|A0A2R4BJH8_THAAR NADPH-dependent 7-cyano- 7-deazaguanine reductase OS=Thauera aromatica K172 OX=4 4139 GN=queF PE=3 SV=1
MSRPRTPRHGAETSLLGQAVAYRDTYAPELLFPIERQLKRDELGLRAGALPFVGEDLWNAYELSWLDARGKPVVALGEFRVPAASPRLVESKSLKLYLNSFNQQRFGTVEEPRARIARDLSAAAGAEVGVAVTPLALRPQRASGYPQGVCLDGLEIDIDTYQPEPGFLRAGGAERSETLYSHLLKSNCLVTGQPDWGMVVVRYTGAAIDREGLLRYIVSFRAHNEFHEQCVERMFCDLLARCRPRELAVWARYTRRGGLDINPFRASHAGLRPDEAMEVRQ

SEQ ID NO: 50280 - protein, 281 aa, Thauera chlorobenzoica
  misc_feature (1)..(281): tr|A0A1H5W1X4|A0A1H5W1X4_9RHOO NADPH-dependent 7-cyano- 7-deazaguanine reductase OS=Thauera chlorobenzoica OX=9 6773 GN=queF PE=3 SV=1
MSRPRSPRHGAETSLLGQAVAYRDTYAPELLFPIERQLKRDELGLRPAALPFVGEDLWNAYELSWLDARGKPVVALGEFRVPAASPRLVESKSLKLYLNSFNQQRFAATEDVRTRIVRDLSAAAGAEVGVAVTPLALRPQRASGYPQGVCLDGLEIDIDTYQPEPGFLRAAGAERSETLYSHLLKSNCLVTGQPDWGMVVVRYTGAAIDREGLLRYIVSFRAHNEFHEQCVERMFCDLLARCRPRELAVWARYTRRGGVDINPFRASHAGLRPDEAMEVRQ

SEQ ID NO: 50281 - protein, 281 aa, Thauera humireducens
  misc_feature (1)..(281): tr|A0A127K720|A0A127K720_9RHOO NADPH-dependent 7-cyano- 7-deazaguanine reductase OS=Thauera humireducens OX=113 4435 GN=queF PE=3 SV=1
MSTDTPRLHGAETSPLGKPVAYRDTYAPELLFPIERQLKRDELGLKPEALPFVGEDLWNAYELSWLDPRGKPVVALARFRVPASSPRLIESKSLKLYLNAFNQQRCADAAEVQATIARDLSAAAGAEVGVEVEPLALRPQRAFGYPDGVCLDTLDIAIDTYQPAPELLTAGGTEVSETLYSHLLKSNCLVTGQPDWGMLVVRYSGPAIAREGLLRYIVSFREHNEFHEQCVERVFCDVLARCRPRELAVWARYTRRGGLDINPFRASRPGLLADERMEIRQ

SEQ ID NO: 50282 - protein, 281 aa, Thauera linaloolentis
  misc_feature (1)..(281): tr|N6ZB24|N6ZB24_9RHOO NADPH-dependent 7-cyano-7-deazag uanine reductase OS=Thauera linaloolentis 47Lol = DSM 1 2138 OX=1123367 GN=queF PE=3 SV=1
MSSTPARPHGAESSPLGRPVAYRDTYAPELLFPIERQLKRDELGLRPGALPFVGEDLWNAYELSWLDPRGKPMVALARFRVPASSPRLIESKSLKLYLNAFNQQRCAAADEVQATIARDLSAAAGAGVEVDIEPLALRPQRISAYPDGVCLDGLEIDIDRYQPDPALLRAGGGEVSETLYSHLLKSNCLVTGQPDWGMLVVRYTGPAIEREGLLRYIVSFREHNEFHEQCVERVFCDLTARCKPRELAVWARYTRRGGLDINPFRASREGLEADAGMEVRQ

SEQ ID NO: 50283 - protein, 281 aa, Thauera phenylacetica
  misc_feature (1)..(281): tr|N6YP61|N6YP61_9RHOO NADPH-dependent 7-cyano-7-deazag uanine reductase OS=Thauera phenylacetica B4P OX=123438 2 GN=queF PE=3 SV=1
MNPDTPRRHGAEESLLGQAVAYRDTYAPELLFPIARQLKRDELGLHADALPFVGEDLWNAYELSWLDARGKPVVALGEFRVPAASPRLIESKSLKLYLNSFNQQRCASVEEVRATIARDLSAAAGAAVAVVLRPLHERPGRRFGYPEGVCLDALEIDIERYQPCPETLRAEGPEVEETLYSHLLKSNCLVTGQPDWGTLVVRYRGAAIDREGLLRYVVSFRAHNEFHEQCVERVFCDLMARCKPQELAVWARYTRRGGLDINPFRASRAGLRADEAMEVRQ

SEQ ID NO: 50284 - protein, 281 aa, Thauera propionica
  misc_feature (1)..(281): tr|A0A235F332|A0A235F332_9RHOO NADPH-dependent 7-cyano- 7-deazaguanine reductase OS=Thauera propionica OX=20194 31 GN=queF PE=3 SV=1
MSTDTPRLHGAESSPLGKPVAYRDTYAPELLFPIERQLKRDELGLKPGALPFVGEDLWNAYELSWLDPRGKPVVALARFRVPASSPRLIESKSLKLYLNAFNQQRCADAAEVQVMIARDLSAAAGAEVGVEVEPLALRPQRVFGYPDGVCLDTLDVAIDTYQPAPELLTAGGAEVSETLYSHLLKSNCLVTGQPDWGMVVVRYSGKAISREGLLRYIVSFREHNEFHEQCVERVFCDVLERCQPRELAVWARYTRRGGLDINPFRASRPGLIADERMEVRQ

SEQ ID NO: 50285 - protein, 281 aa, Thauera sp.
  misc_feature (1)..(281): tr|A0A0C3N175|A0A0C3N175_9RHOO NADPH-dependent 7-cyano- 7-deazaguanine reductase OS=Thauera sp. SWB20 OX=157275 8 GN=queF PE=3 SV=1
MNTDTPRRHGAESSPLGQAVAYRDTYAPELLFPISRQLKRDELGLRADMLPFCGEDLWNAYELSWLDARGKPVVALGEFRVPAASPRLIESKSLKLYLNSFNQQRCASVEEVRATIARDLSAAAGAAVAVVLRPLQERPGRSFGYPEGVCIDALEIDIGRYQPCPETLRAAGPEVEETLYSHLLKSNCLVTGQPDWGTLVVRYRGAAIDREGLLRYVVSFRGHNEFHEQCVERVFCDLMARCKPQELAVWARYTRRGGLDINPFRASRAGLRADEAMEVRQ

SEQ ID NO: 50286 - protein, 283 aa, Thauera sp.
  misc_feature (1)..(283): tr|A0A290ZTJ8|A0A290ZTJ8_9RHOO NADPH-dependent 7-cyano- 7-deazaguanine reductase OS=Thauera sp. K11 OX=2005884 GN=queF PE=3 SV=1
MNTIPDRPHGAEASPLGRAVAYRDTYAPELLFPIDRQLKRAELGLQAGALPFVGEDLWNAYELSWLDPRGKPVVALGRFRVPASTPRLVESKSLKLYLNSFNQQRFASADGVRDAIARDLSAAAGGTVAVDVVPLALRPQRLAAYPEGVCLDTLDIDIDTYQPEPAFLRVADDGGEVGETLYSHLLKSNCLVTGQPDWGMLVVRYRGRPIDRAGLLRYIVSFRGHNEFHEQCVERVFCDILARCRLAELAVWARYTRRGGLDINPFRATHAGLRAGEEMEVRQ

SEQ ID NO: 50287 - protein, 281 aa, Thauera terpenica
  misc_feature (1)..(281): tr|T0B1M3|T0B1M3_9RHOO NADPH-dependent 7-cyano-7-deazag uanine reductase OS=Thauera terpenica 58Eu OX=1348657 G N=queF PE=3 SV=1
MSTDTPRLHGAESSPLGRPAAYRDTYAPDLLFPIERQLKRDELGLKADDLPFIGEDLWNAYELSWLDLRGKPVVALAQFRVPANSPRLIESKSLKLYLNAYNQQRCADVGTVQAMIACDLVAAAGAAVAVRITPLTQRPQRSSSYPQGFCLDQLELDIDTYEPAPDLLHAHGSEVSETLYSHLLKSNCLVTGQPDWGMLVVRYTGPAMDRAGLLRYLVSFRTHNEFHEQCVERVFCDILARCRPRELAVWARYTRRGGLDINPFRTSHAGLQADEGMEVRQ

SEQ ID NO: 50288 - protein, 135 aa, Thermacetogenium phaeum
  misc_feature (1)..(135): tr|A0A117LAU1|A0A117LAU1_9THEO NADPH-dependent 7-cyano- 7-deazaguanine reductase OS=Thermacetogenium phaeum OX= 85874 GN=queF PE=3 SV=1
MEQRVEDKYARRWDVDSYDTIATEVLEAIPFEYPGSKTDVVYTDPEFTSVCPWTGLPDFGTLTITYVPGDKLVELKSLKYYLNSFRNVGILQEHVVNRVKEDLVKLLNPVSLTVEAEFRPRGGISTYVRADYRRA

SEQ ID NO: 50289 - protein, 135 aa, Thermacetogenium phaeum; identical to SEQ ID NO: 50288
  misc_feature (1)..(135): tr|K4LJ92|K4LJ92_THEPS NADPH-dependent 7-cyano-7-deazag uanine reductase OS=Thermacetogenium phaeum (strain ATC C BAA-254 / DSM 12270 / PB) OX=1089553 GN=queF PE=3 SV= 1

SEQ ID NO: 50290 - protein, 139 aa, Thermaerobacter marianensis
  misc_feature (1)..(139): tr|E6SJX2|E6SJX2_THEM7 NADPH-dependent 7-cyano-7-deazag uanine reductase OS=Thermaerobacter marianensis (strain ATCC 700841 / DSM 12885 / JCM 10246 / 7p75a) OX=644966 GN=queF PE=3 SV=1
MTGTEATGRLPAYGPLPRPRSLAEARAILKQERFPAPRVDLVEFEAYEFTAVCPRTGQPDFGKVRITYVPRQWCIESKSLKFYLWAYRDEGAFCETLAAQIADDIVRAVEPQYVEVVVEQNPRGGIGLKATARRGRPPA

SEQ ID NO: 50291 - protein, 126 aa, Thermanaeromonas toyohensis
  misc_feature (1)..(126): tr|A0A1W1W1B0|A0A1W1W1B0_9THEO NADPH-dependent 7-cyano- 7-deazaguanine reductase OS=Thermanaeromonas toyohensis ToBE OX=698762 GN=queF PE=3 SV=1
MMEFEALGKPVREPRKKLEVFPKPPHVEIVTLETDEVTSLCPVTGQPDFETVIVEYAPDKYCIESKSFKLYLWSFREEGIFCESLADTIAKDIYEACQPHWCKVTVIQKPRGGIKITASALYGERK

SEQ ID NO: 50292 - protein, 163 aa, Thermoactinomyces sp.
  misc_feature (1)..(163): tr|A0A151YXQ4|A0A151YXQ4_9BACL NADPH-dependent 7-cyano- 7-deazaguanine reductase OS=Thermoactinomyces sp. AS95 OX=1811386 GN=queF PE=3 SV=1
MSDKSKEELSLKALGNDTTYHFEYNPGLLETFDNRHPGTDYFVKFNCPEFTSLCPITGQPDFATIYLSYVPDQKLVESKSLKLYLFSFRNHGDFHENCIVTIMKDLIEKLDPKYIEVWGKFLPRGGISIDPYVNYGKPGTRWEKIAEQRLALHDLYPEKVDNR

SEQ ID NO: 50293 - protein, 160 aa, Thermoactinomyces sp.
  misc_feature (1)..(160): tr|A0A1K1WAH0|A0A1K1WAH0_9BACL NADPH-dependent 7-cyano- 7-deazaguanine reductase OS=Thermoactinomyces sp. DSM 4 5891 OX=1761907 GN=queF PE=3 SV=1
MAQHDLDLQLLGQKTNYHFEYNPDVLESFDNRHPDTDYFVKFNTPEFTSLCPITNQPDFATLYISYVPDQKLVESKSLKLYLFSFRNHGDFHENCIVVIMKDLVKLLDPKYIEVWGKFLPRGGVSIDPYANYGKPDTRWEAIAEQRLAQHDLYPETITNR

SEQ ID NO: 50294 - protein, 162 aa, Thermoactinomyces vulgaris; identical to SEQ ID NO: 46725
  misc_feature (1)..(162): tr|A0A0N0Y6W8|A0A0N0Y6W8_THEVU NADPH-dependent 7-cyano- 7-deazaguanine reductase OS=Thermoactinomyces vulgaris OX=2026 GN=queF PE=3 SV=1

SEQ ID NO: 50295 - protein, 133 aa, Thermoanaerobacter brockii
  misc_feature (1)..(133): tr|E8UUC5|E8UUC5_THEBF NADPH-dependent 7-cyano-7-deazag uanine reductase OS=Thermoanaerobacter brockii subsp. f innii (strain ATCC 43586 / DSM 3389 / AKO-1) OX=509193 GN=queF PE=3 SV=1
MTDKYKERRFDTYGYEKIDKEVLESIEYEYPEKNTIVEYITNEFSSVCPWTGLPDNAKLTIRYIPSKKLVELKSLKYYLTSYRNVGILQEHAINRILDDLVELLQPKFMEIIGEFQERGGIATRIVAKYEKEK

SEQ ID NO: 50296 - protein, 133 aa, Thermoanaerobacter ethanolicus; identical to SEQ ID NO: 50295
  misc_feature (1)..(133): tr|C7IQ13|C7IQ13_THEET NADPH-dependent 7-cyano-7-deazag uanine reductase OS=Thermoanaerobacter ethanolicus CCSD 1 OX=589861 GN=queF PE=3 SV=1

SEQ ID NO: 50297 - protein, 133 aa, Thermoanaerobacter italicus
  misc_feature (1)..(133): tr|D3T844|D3T844_THEIA NADPH-dependent 7-cyano-7-deazag uanine reductase OS=Thermoanaerobacter italicus (strain DSM 9252 / Ab9) OX=580331 GN=queF PE=3 SV=1
MTDKYKERRFDAYGYEKIDKEVLESIEYEYPEKNTIVEYITNEFSSVCPWTGLPDNAKLTIRYIPSKKLVELKSLKYYLTSYRNVGILQEHAINRILDDLVELLQPKFMEIIGEFQERGGIATRIVAKYEKEK

SEQ ID NO: 50298 - protein, 133 aa, Thermoanaerobacter kivui
  misc_feature (1)..(133): tr|A0A097AQN7|A0A097AQN7_THEKI NADPH-dependent 7-cyano- 7-deazaguanine reductase OS=Thermoanaerobacter kivui OX =2325 GN=queF PE=3 SV=1
MTDKYKERRFDTYGYEKIDKEVLESIEYEYPEKNTIVEYITNEFSSVCPWTGLPDNAKLTIRYIPSKKLVELKSLKYYLTSYRNVGILQEHAINRILDDLVELLQPKFMEVIGEFQERGGIATRIVAKYEKEK

SEQ ID NO: 50299 - protein, 133 aa, Thermoanaerobacter mathranii; identical to SEQ ID NO: 50297
  misc_feature (1)..(133): tr|D7AN57|D7AN57_THEM3 NADPH-dependent 7-cyano-7-deazag uanine reductase OS=Thermoanaerobacter mathranii subsp. mathranii (strain DSM 11426 / CIP 108742 / A3) OX=5833 58 GN=queF PE=3 SV=1

SEQ ID NO: 50300 - protein, 133 aa, Thermoanaerobacter pseudethanolicus; identical to SEQ ID NO: 50295
  misc_feature (1)..(133): sp|B0KAC5|QUEF_THEP3 NADPH-dependent 7-cyano-7-deazagua nine reductase OS=Thermoanaerobacter pseudethanolicus ( strain ATCC 33223 / 39E) OX=340099 GN=queF PE=3 SV=1

SEQ ID NO: 50301 - protein, 137 aa, Thermoanaerobacter siderophilus
  misc_feature (1)..(137): tr|I9AFD7|I9AFD7_9THEO NADPH-dependent 7-cyano-7-deazag uanine reductase OS=Thermoanaerobacter siderophilus SR4 OX=880478 GN=queF PE=3 SV=1
MTDKYKERRFDTYGYEKIDKEVLESIEYEYPEKNTIVEYITNEFSSVCPWTGLPDNAKLTIRYIPSKKLVELKSLKYYLTSYRNVGILQEHAINRILDDLVELLQPKFMEVIGEFQERGGIATRIVAKYEKEKSSRS

SEQ ID NO: 50302 - protein, 133 aa, Thermoanaerobacter sp.
  misc_feature (1)..(133): tr|A0A0B3BHU6|A0A0B3BHU6_9THEO NADPH-dependent 7-cyano- 7-deazaguanine reductase OS=Thermoanaerobacter sp. YS13 OX=1511746 GN=queF PE=3 SV=1
MTDKYKERRFDTYGYEKIDKEVLESIEYEYPEKNTIVEYITNEFSSVCPWTGLPDNAKLTIKYIPFKKLVELKSLKYYLTSYRNVGILQEHAINRILDDLVELLQPKFMEVIGEFQERGGIATRIVAKYEKEK

SEQ ID NO: 50303 - protein, 133 aa, Thermoanaerobacter sp.; identical to SEQ ID NO: 50295
  misc_feature (1)..(133): sp|B0K421|QUEF_THEPX NADPH-dependent 7-cyano-7-deazagua nine reductase OS=Thermoanaerobacter sp. (strain X514) OX=399726 GN=queF PE=3 SV=1

SEQ ID NO: 50304 - protein, 133 aa, Thermoanaerobacter thermocopriae; identical to SEQ ID NO: 50295
  misc_feature (1)..(133): tr|A0A101D879|A0A101D879_9THEO NADPH-dependent 7-cyano- 7-deazaguanine reductase OS=Thermoanaerobacter thermoco priae OX=29350 GN=queF PE=3 SV=1

SEQ ID NO: 50305 - protein, 137 aa, Thermoanaerobacter thermohydrosulfuricus
  misc_feature (1)..(137): tr|A0A1G7WH02|A0A1G7WH02_THETY NADPH-dependent 7-cyano- 7-deazaguanine reductase OS=Thermoanaerobacter thermohy drosulfuricus OX=1516 GN=queF PE=3 SV=1
MTDKYKERRFDTYGYEKIDKEVLESIEYEYSEKNTIVEYITNEFSSVCPWTGLPDNAKLTIRYIPSKKLVELKSLKYYLTSYRNVGILQEHAINRILDDLVELLQPKFMEVIGEFQERGGIATRIVAKYEKEKSSRS

SEQ ID NO: 50306 - protein, 133 aa, Thermoanaerobacter thermohydrosulfuricus; identical to SEQ ID NO: 50298
  misc_feature (1)..(133): tr|M8DQ95|M8DQ95_THETY NADPH-dependent 7-cyano-7-deazag uanine reductase OS=Thermoanaerobacter thermohydrosulfu ricus WC1 OX=1198630 GN=queF PE=3 SV=1

SEQ ID NO: 50307 - protein, 133 aa, Thermoanaerobacter uzonensis; identical to SEQ ID NO: 50302
  misc_feature (1)..(133): tr|A0A1M4Z5W9|A0A1M4Z5W9_9THEO NADPH-dependent 7-cyano- 7-deazaguanine reductase OS=Thermoanaerobacter uzonensi s DSM 18761 OX=1123369 GN=queF PE=3 SV=1

SEQ ID NO: 50308 - protein, 133 aa, Thermoanaerobacter wiegelii
  misc_feature (1)..(133): tr|G2MR17|G2MR17_9THEO NADPH-dependent 7-cyano-7-deazag uanine reductase OS=Thermoanaerobacter wiegelii Rt8.B1 OX=697303 GN=queF PE=3 SV=1
MTDKYKERRFDTYSYEKIDKEVLESIEYEYPEKNTIVEYITNEFFSVCPWTGLPDNAKLTIRYIPSKKLVELKSLKYYLTSYRNVGILQEHAINRILDDLVELLQPKFMEVIGEFQERGGIATRIVAKYEKEK

SEQ ID NO: 50309 - protein, 131 aa, Thermoanaerobacteraceae bacterium
  misc_feature (1)..(131): tr|A0A3A9JVL0|A0A3A9JVL0_9THEO NADPH-dependent 7-cyano- 7-deazaguanine reductase OS=Thermoanaerobacteraceae bac terium SP2 OX=2292448 GN=queF PE=3 SV=1
MDKYSEKRFDIYGYDKIDTDVLETMEYEYPEKDTIIEYHTEEFSSVCPWTGLPDNAKLTIRYIPGNKLVELKSLKYYLTSYRNIGILQEHAVNRILDDLVKLLAPKYMEIIGDFVARGGISTKVMAKYNGS

SEQ ID NO: 50310 - protein, 62 aa, Thermoanaerobacteraceae bacterium
  misc_feature (1)..(62): tr|A0A3A9KA60|A0A3A9KA60_9THEO Uncharacterized protein OS=Thermoanaerobacteraceae bacterium SP2 OX=2292448 GN= DXT63_13265 PE=4 SV=1
MEYNTEEFSSVCPWTGLPDNAKLTINYIPDKKLVELKSLKYYLTSYRNVGILEEHAINTNID

SEQ ID NO: 50311 - protein, 131 aa, Thermoanaerobacterales bacterium; identical to SEQ ID NO: 50309
  misc_feature (1)..(131): tr|A0A3G2R7F8|A0A3G2R7F8_9FIRM NADPH-dependent 7-cyano- 7-deazaguanine reductase OS=Thermoanaerobacterales bact erium SK-G1 OX=2316383 GN=queF PE=3 SV=1

SEQ ID NO: 50312 - protein, 62 aa, Thermoanaerobacterales bacterium; identical to SEQ ID NO: 50310
  misc_feature (1)..(62): tr|A0A3G2R7R8|A0A3G2R7R8_9FIRM Uncharacterized protein OS=Thermoanaerobacterales bacterium SK-G1 OX=2316383 GN =D2962_14065 PE=4 SV=1

SEQ ID NO: 50313 - protein, 164 aa, Thermoanaerobacterium aotearoense
  misc_feature (1)..(164): tr|W9ECZ1|W9ECZ1_9FIRM NADPH-dependent 7-cyano-7-deazag uanine reductase OS=Thermoanaerobacterium aotearoense S CUT27 OX=1421016 GN=queF PE=3 SV=1
MPRDEKELNGLSQLGNKETKYIFDYDPSLLETFPNKHQENDYFVKFNCPEFTSLCPKTGQPDFATIYISYVPDKLMVESKSLKLYLFSFRNHGDFHEDCVNIIMKDLIKLLDPKYIEVWGKFTPRGGISIDPYCNYGKPGTKWEDVAQKRLFYHDMYPEKVDNR

SEQ ID NO: 50314 - protein, 164 aa, Thermoanaerobacterium saccharolyticum; identical to SEQ ID NO: 50313
  misc_feature (1)..(164): tr|I3VYD9|I3VYD9_THESW NADPH-dependent 7-cyano-7-deazag uanine reductase OS=Thermoanaerobacterium saccharolytic um (strain DSM 8691 / JW/SL-YS485) OX=1094508 GN=queF P E=3 SV=1

SEQ ID NO: 50315 - protein, 165 aa, Thermoanaerobacterium sp.
  misc_feature (1)..(165): tr|A0A285BHC9|A0A285BHC9_9FIRM NADPH-dependent 7-cyano- 7-deazaguanine reductase OS=Thermoanaerobacterium sp. R BIITD OX=1550240 GN=queF PE=3 SV=1
MSERNRKELDELSLLGRKVAKYNYDYDPSVLETFINKHQENDYFVKFNCPEFTSLCPKTGQPDFATIYISYVPDKLMVESKSLKLYLFSFRNHGDFHEDCVNIIMKDLIKLLDPKYIEVWGKFTPRGGISIDPYCNYGKPGTKWENVAEKRLFYHDLYPEKIDNR

SEQ ID NO: 50316 - protein, 164 aa, Thermoanaerobacterium sp.
  misc_feature (1)..(164): tr|A0A1X2G1C8|A0A1X2G1C8_9FIRM NADPH-dependent 7-cyano- 7-deazaguanine reductase OS=Thermoanaerobacterium sp. P SU-2 OX=1930849 GN=queF PE=3 SV=1
MSRDEKELNGLSQLGNKETKYIFDYDPSLLETFPNKHQENDYFVKFNCPEFTSLCPKTGQPDFATIYISYVPDKLMVESKSLKLYLFSFRNHGDFHEDCVNIIMKDLIKLLDPKYIEVWGKFTPRGGISIDPYCNYGRPGTKWEDVAQKRLFYHDMYPEKVDNR

SEQ ID NO: 50317 - protein, 165 aa, Thermoanaerobacterium thermosaccharolyticum
  misc_feature (1)..(165): tr|A0A231VL60|A0A231VL60_THETR NADPH-dependent 7-cyano- 7-deazaguanine reductase OS=Thermoanaerobacterium therm osaccharolyticum OX=1517 GN=queF PE=3 SV=1
MSERDKKELDELSLLGKKDTKYIFDYDPSLLETFPNKHQENDYFVKFNCPEFTSLCPKTGQPDFATIYISYVPDKLMVESKSLKLYLFSFRNHGDFHEDCVNIIMKDLIKLLDPKYIEVWGKFTPRGGISIDPYCNYGRPGTKWADVAEKRLFYHDMYPEKVDNR

SEQ ID NO: 50318 - protein, 165 aa, Thermoanaerobacterium thermosaccharolyticum
  misc_feature (1)..(165): tr|L0ILE7|L0ILE7_THETR NADPH-dependent 7-cyano-7-deazag uanine reductase OS=Thermoanaerobacterium thermosacchar olyticum M0795 OX=698948 GN=queF PE=3 SV=1
MSERNKKELDELSLLGKKDTKYIFDYDPSLLETFPNKHQENDYFVKFNCPEFTSLCPKTGQPDFATIYISYVPDKLMVESKSLKLYLFSFRNHGDFHEDCVNIIMKDLIKLLDPKYIEVWGKFTPRGGISIDPYCNYGRPGTKWADVAEKRLFYHDMYPEKVDNR

SEQ ID NO: 50319 - protein, 164 aa, Thermoanaerobacterium xylanolyticum
  misc_feature (1)..(164): tr|F6BIR9|F6BIR9_THEXL NADPH-dependent 7-cyano-7-deazag uanine reductase OS=Thermoanaerobacterium xylanolyticum (strain ATCC 49914 / DSM 7097 / LX-11) OX=858215 GN=qu eF PE=3 SV=1
MPRDEKELNGLSQLGNKETKYIFDYDPSLLETFPNKHQENDYFVKFNCPEFTSLCPKTGQPDFATIYISYVPDKLMVESKSLKLYLFSFRNHGDFHEDCVNIIMKDLIKLLDPKYIEVWGKFTPRGGISIDPYCNYGRPGTKWEDVAQKRLFYHDMYPEKVDNR

SEQ ID NO: 50320 - protein, 135 aa, Thermoanaerobaculum aquaticum; identical to SEQ ID NO: 44436
  misc_feature (1)..(135): tr|A0A062XRJ6|A0A062XRJ6_9BACT NADPH-dependent 7-cyano- 7-deazaguanine reductase OS=Thermoanaerobaculum aquatic um OX=1312852 GN=queF PE=3 SV=1

SEQ ID NO: 50321 - protein, 165 aa, Thermobacillus composti
  misc_feature (1)..(165): tr|L0EL03|L0EL03_THECK NADPH-dependent 7-cyano-7-deazag uanine reductase OS=Thermobacillus composti (strain DSM 18247 / JCM 13945 / KWC4) OX=717605 GN=queF PE=3 SV=1
MAGRGPEDLQDLTLLGSRNTRYAYTYDPKLLETFENRHPGRDYFVKFNCPEFTSLCPMTGQPDFATIYISYIPDKRLVESKSLKLYLFSFRNHGDFHEDCVNIIMNDLIEAMDPKYIEVWGKFKPRGGISIDPYCNWGKPGTKYEAMAEHRLLHHDLYPEKVDNR

SEQ ID NO: 50322 - protein, 165 aa, Thermobacillus sp.
  misc_feature (1)..(165): tr|A0A3E0QYS6|A0A3E0QYS6_9BACL NADPH-dependent 7-cyano- 7-deazaguanine reductase OS=Thermobacillus sp. OX=21084 67 GN=queF PE=3 SV=1
MAGRGHEDLQDLTLLGSRNTRYAYTYDPKLLETFENKHPGRDYFVKFNCPEFTSLCPMTGQPDFATIYISYIPDKRLVESKSLKLYLFSFRNHGDFHEDCVNIIMNDLIEAMDPKYIEVWGKFTPRGGISIDPYCNWGKPGTKYEAMAEHRLLHHDLYPEKVDNR

SEQ ID NO: 50323 - protein, 125 aa, Thermocrinis albus
  misc_feature (1)..(125): tr|D3SMA4|D3SMA4_THEAH NADPH-dependent 7-cyano-7-deazag uanine reductase OS=Thermocrinis albus (strain DSM 1448 4 / JCM 11386 / HI 11/12) OX=638303 GN=queF PE=3 SV=1
MEKKYGELAIEQAQLEPWENPYPDRDYMIEITFPEFSCLCPRSGYPDYATIKIRYIPDKYIVELRSLKLWLNKFRNRYISHEAATNEIYNALYSLLRPRFLEVIGDFNPRGNVHTIVRVRSDSQY

SEQ ID NO: 50324 - protein, 126 aa, Thermocrinis minervae
  misc_feature (1)..(126): tr|A0A1M6SU34|A0A1M6SU34_9AQUI NADPH-dependent 7-cyano- 7-deazaguanine reductase OS=Thermocrinis minervae OX=38 1751 GN=queF PE=3 SV=1
MEKKYGELAIEQAQLEPWENPTPERDYLIEITFPEFSCLCPRSGYPDYATIKIRYIPDKYIVELKSLKLWLNKFRNRYISHEQATNEIYTALYELLKPRFLEVIGDFNPRGNVHTVIRVRSDGKYV

SEQ ID NO: 50325 - protein, 125 aa, Thermocrinis ruber
  misc_feature (1)..(125): tr|W0DE51|W0DE51_9AQUI NADPH-dependent 7-cyano-7-deazag uanine reductase OS=Thermocrinis ruber OX=75906 GN=queF PE=3 SV=1
MEKKYGELAIEQAQLEVWENPSKERDYLIEITFPEFSCLCPRSGYPDYATIKIRYIPDQYIVELRSLKLWLNKFRNRYISHEQATNEIYQALYETLKPKFLEVIGDFNPRGNVHTVIKVRSDGNY

SEQ ID NO: 50326 - protein, 129 aa, Thermodesulfatator autotrophicus
  misc_feature (1)..(129): tr|A0A177EBB7|A0A177EBB7_9BACT NADPH-dependent 7-cyano- 7-deazaguanine reductase OS=Thermodesulfatator autotrop hicus OX=1795632 GN=queF PE=3 SV=1
MSEELKYGEKAILEAELEPWPNPYPDRDYLIEITFPEFTCLCPRSGYPDFATIKLSYIPDQKIVELKSLKLWLNKFRNRYISHEAATNEIFDALWKTLEPRYLKVIGDFHPRGNVHTVITVERRKNENT

SEQ ID NO: 50327 - protein, 126 aa, Thermodesulfatator indicus
  misc_feature (1)..(126): tr|F8ADL2|F8ADL2_THEID NADPH-dependent 7-cyano-7-deazag uanine reductase OS=Thermodesulfatator indicus (strain DSM 15286 / JCM 11887 / CIR29812) OX=667014 GN=queF PE= 3 SV=1
MSDEIKYGEKAILEAELEPWSNPYPDRDYLIEITFPEFTCLCPRSGYPDFATIRLSYIPDQKIVELRSLKLWLNKFRNRYISHEAATNEIFDALWEKLEPRYLKVEGDFHPRGNVHTVITVEKHKE

SEQ ID NO: 50328 - protein, 127 aa, Thermodesulfatator sp.
  misc_feature (1)..(127): tr|A0A432UIV2|A0A432UIV2_9BACT NADPH-dependent 7-cyano- 7-deazaguanine reductase OS=Thermodesulfatator sp. OX=1 874629 GN=queF PE=3 SV=1
MAREEKRYGEKAIEEAQLEAWPNPYPDRDYLIEITFPEFTCLCPRSGYPDFATLKISYIPDQKIVELRSLKLWLNKFRSRYISHEAATNEIFDALWQLLKPRKLKVVGDFHPRGNVHTVVTVERSNS

SEQ ID NO: 50329 - protein, 123 aa, Thermodesulfatator sp.
  misc_feature (1)..(123): tr|A0A432UDU7|A0A432UDU7_9BACT NADPH-dependent 7-cyano- 7-deazaguanine reductase OS=Thermodesulfatator sp. OX=1 874629 GN=queF PE=3 SV=1
MKYGQEAIREARLEPWPNPSPERDYLVEISFPEFTCLCPRSGYPDFAVIRIKYVPDEFIVELKSLKLYLNSFRNKHISHEESTNRIFADIQGAIRPKSLEVVGDFHPRGNVHTVITVKQGEIS

SEQ ID NO: 50330 - protein, 132 aa, Thermodesulfobacteria bacterium
  misc_feature (1)..(132): tr|A0A496QKJ9|A0A496QKJ9_9BACT NADPH-dependent 7-cyano- 7-deazaguanine reductase OS=Thermodesulfobacteria bacte rium OX=2202153 GN=queF PE=3 SV=1
MKYGEKEIKNAGLESWPNPCPERDYTIEISFPEFTCLCPRSGYPDFATIRITYVPDRFIVELKSLKLYLNGYRDQYISHEEAVNKIFSDLTEVLSPRTIKVEGDFHPRGNVHTVIKVEGGPGLPSELVPRQK

SEQ ID NO: 50331 - protein, 126 aa, Thermodesulfobacteriales bacterium
  misc_feature (1)..(126): tr|A0A524JHJ2|A0A524JHJ2_9BACT NADPH-dependent 7-cyano- 7-deazaguanine reductase OS=Thermodesulfobacteriales ba cterium OX=2528040 GN=queF PE=3 SV=1
MADKHSEILETFENQYPQREYEIIISCPEFTCVCPKTGQPDFATITLTYVPDKLCMELKSLKLYMFSYRDEGAFHEHVTNKILDDIVEACRPIRAQVTGDFNIRGGIKTVVKATYFKDKNAEAGFK

SEQ ID NO: 50332 - protein, 123 aa, Thermodesulfobacterium commune
  misc_feature (1)..(123): tr|A0A124FKQ3|A0A124FKQ3_9BACT NADPH-dependent 7-cyano- 7-deazaguanine reductase OS=Thermodesulfobacterium comm une OX=1741 GN=queF PE=3 SV=1
MSEKKYGELAIEQAELEAWPNPYPDRDYTITITFPEFTCLCPRSGYPDFAVIKIEYVPNEKIVELRSLKLWLNKFRNRYISHEAATNEIFDALWKVLEPKKLKVIGDFHPRGNVHTVITVEKP

SEQ ID NO: 50333 - protein, 123 aa, Thermodesulfobacterium commune; identical to SEQ ID NO: 50332
  misc_feature (1)..(123): tr|A0A075WRL0|A0A075WRL0_9BACT NADPH-dependent 7-cyano- 7-deazaguanine reductase OS=Thermodesulfobacterium comm une DSM 2178 OX=289377 GN=queF PE=3 SV=1

SEQ ID NO: 50334 - protein, 125 aa, Thermodesulfobacterium geofontis
  misc_feature (1)..(125): tr|A0A2N7QFU5|A0A2N7QFU5_9BACT NADPH-dependent 7-cyano- 7-deazaguanine reductase OS=Thermodesulfobacterium geof ontis OX=1295609 GN=queF PE=3 SV=1
MLNMEKKYGEIAIEEAQLEAWDNPYPDRDYFIEITFPEFTCLCPRSGYPDFAVIKISYVPKDKIVELRSLKLWLNKFRNRYISHEAATNEIFDALWKLLEPKKLKVIADFHPRGNVHTIVTVEKP

SEQ ID NO: 50335 - protein, 122 aa, Thermodesulfobacterium geofontis
  misc_feature (1)..(122): tr|F8C2C5|F8C2C5_THEGP NADPH-dependent 7-cyano-7-deazag uanine reductase OS=Thermodesulfobacterium geofontis (s train OPF15) OX=795359 GN=queF PE=3 SV=1
MEKKYGEIAIEEAQLEAWDNPYPDRDYLIEITFPEFTCLCPRSGYPDFAIIKISYIPKNKIVELKSLKLWLNKFRNRYISHEAATNEIFDALWNLLQPKKLKVVADFHPRGNVHTVVTVEKP

SEQ ID NO: 50336 - protein, 127 aa, Thermodesulfobium acidiphilum
  misc_feature (1)..(127): tr|A0A2R4W2K4|A0A2R4W2K4_9FIRM NADPH-dependent 7-cyano- 7-deazaguanine reductase OS=Thermodesulfobium acidiphil um OX=1794699 GN=queF PE=3 SV=1
MPEASGKTFEFKDESHIKTDFLEGFSFSAEEYIKIETKEFSAVCPFSGLPDIGQLIIEYFPDGGICVELKSLKYYLTSFRNVGIYQEAATKRIYEDLKKLLKTDRLKVTLIYNTRGGINTLTSMGNL

SEQ ID NO: 50337 - protein, 127 aa, Thermodesulfobium narugense
  misc_feature (1)..(127): tr|M1E963|M1E963_9FIRM NADPH-dependent 7-cyano-7-deazag uanine reductase OS=Thermodesulfobium narugense DSM 147 96 OX=747365 GN=queF PE=3 SV=1
MPEASGKTFEFKDESHIMTDFLEGFSFRAEEYIKIETKEFSAVCPFSGLPDIGRLIIEYFPDGGVCVELKSLKYYLTSFRNVGIYQEAVTKRIYEDLKRLLKTDRLKVTLIYNTRGGMDTLTSMGSL

SEQ ID NO: 50338 - protein, 127 aa, Thermodesulfobium narugense; identical to SEQ ID NO: 50336
  misc_feature (1)..(127): tr|A0A2J6XBI5|A0A2J6XBI5_9FIRM NADPH-dependent 7-cyano- 7-deazaguanine reductase OS=Thermodesulfobium narugense OX=184064 GN=queF PE=3 SV=1

SEQ ID NO: 50339 - protein, 148 aa, Thermodesulforhabdus norvegica
  misc_feature (1)..(148): tr|A0A1I4SMH7|A0A1I4SMH7_9DELT NADPH-dependent 7-cyano- 7-deazaguanine reductase OS=Thermodesulforhabdus norveg ica OX=39841 GN=queF PE=3 SV=1
MSERVKRELSQLGRSASIPENPDKAVLETFENPHPDVHYVVRLKAPEFTCLCPITGQPDFATIIVDYVPGKWILESKSFKLFLGSFRNTGIFHEDGTVYIHKRLKEALDPVYLRVIGFWNVRGGISIDVAVESGRLPENCRPLPIRQD

SEQ ID NO: 50340 - protein, 122 aa, Thermodesulfovibrio aggregans
  misc_feature (1)..(122): tr|A0A2J6WH20|A0A2J6WH20_9BACT NADPH-dependent 7-cyano- 7-deazaguanine reductase OS=Thermodesulfovibrio aggrega ns OX=86166 GN=queF PE=3 SV=1
MLYGEKAIKEAKLEAWDNPYPERDYRIEISFPEFTCLCPRSGYPDFATIRISYIPDKKIVELKSLKLYLNSYRDKYISHEAVTNKIYEDLYNLLQPRALEVIGDFNPRGNVKTVIKVSSESK

SEQ ID NO: 50341 - protein, 119 aa, Thermodesulfovibrio aggregans
  misc_feature (1)..(119): tr|A0A0U9HLP6|A0A0U9HLP6_9BACT NADPH-dependent 7-cyano- 7-deazaguanine reductase OS=Thermodesulfovibrio aggrega ns OX=86166 GN=queF PE=3 SV=1
MLYGEKAIEEAKLEAWDNPYPDRDYRIEISFPEFTCLCPRSGYPDFATIKISYIPDKKIVELKSLKLYLNSYRDKYISHEAVTNKIYDDLHNLLKPRFLEVIGDFNPRGNVKTIIKVSS

SEQ ID NO: 50342 - protein, 122 aa, Thermodesulfovibrio sp.
  misc_feature (1)..(122): tr|A0A1C3FD16|A0A1C3FD16_9BACT NADPH-dependent 7-cyano- 7-deazaguanine reductase OS=Thermodesulfovibrio sp. N1 OX=1871110 GN=queF PE=3 SV=1
MRYGEKAIEEAKLEAWDNPYPDRDYKIEITFPEFTCLCPRSGYPDFATIKINYIPDKKIIELKSLKLYLNSYRSQYISHEAATNKIFDDLKKILQPRFLEVIGDFNPRGNVKTIIKISSENK

SEQ ID NO: 50343 - protein, 128 aa, Thermodesulfovibrio sp.
  misc_feature (1)..(128): tr|A0A1G3XWQ5|A0A1G3XWQ5_9BACT NADPH-dependent 7-cyano- 7-deazaguanine reductase OS=Thermodesulfovibrio sp. RBG _19FT_COMBO_41_18 OX=1802372 GN=queF PE=3 SV=1
MKYGEKIIKKAVLEIWNNPHPERDYEINISFPEFTCLCPRSGYPDFATIKINYKPGKKIVELKSLKLYLNFFRTTYISHEDVTNVIYTELKKKLRPKFLEVIGDFNPRGNVKTIVRVCSDSKVKVEKV

SEQ ID NO: 50344 - protein, 122 aa, Thermodesulfovibrio yellowstonii
  misc_feature (1)..(122): tr|B5YKP6|B5YKP6_THEYD NADPH-dependent 7-cyano-7-deazag uanine reductase OS=Thermodesulfovibrio yellowstonii (s train ATCC 51303 / DSM 11347 / YP87) OX=289376 GN=queF PE=3 SV=1
MLYGEKAIKEALLEAWDNPYPDRDYKIEISFPEFTCLCPRSGYPDFATIKISYIPDKKIVELKSLKLYLNSYRDKYISHEAVTNKIYEDLHNLLKPRNLEVIGDFNPRGNVKTIIKVSSECK

SEQ ID NO: 50345 - protein, 162 aa, Thermoflavimicrobium dichotomicum
  misc_feature (1)..(162): tr|A0A1I3RNV7|A0A1I3RNV7_9BACL NADPH-dependent 7-cyano- 7-deazaguanine reductase OS=Thermoflavimicrobium dichot omicum OX=46223 GN=queF PE=3 SV=1
MHKKPEEELTLLGNKGTEYVFEYDPSVLEAFSNRHPDTDYFVKFNCPEFTSLCPITGQPDFATIYISYVPDKKLVESKSLKLYLFSFRNHGDFHENCIVTIMKDLIKLLDPKYIEVWGKFLPRGGISIDPYVNYGKKGTKWEEIAKQRLANHDLYPERVDNR

SEQ ID NO: 50346 - protein, 162 aa, Thermoflavimicrobium sp.
  misc_feature (1)..(162): tr|A0A364K1E9|A0A364K1E9_9BACL NADPH-dependent 7-cyano- 7-deazaguanine reductase OS=Thermoflavimicrobium sp. FB KL4.011 OX=2137476 GN=queF PE=3 SV=1
MHNKLDEELTLLGNQGTKYTFEYNPDILETFSNAHPDTDYFVKFNCPEFTTLCPITGQPDFATVYISYVPDEKLVESKSLKLYLFSFRNHGDFHENAVVVIMKDLIKLLDPKYIEVWGKFLPRGGISIDPYVNYGKKGTAWEDIAKRRLANHDLYPERVDNR

SEQ ID NO: 50347 - protein, 126 aa, Thermoflexus hugenholtzii
  misc_feature (1)..(126): tr|A0A2A9HIT2|A0A2A9HIT2_9CHLR NADPH-dependent 7-cyano- 7-deazaguanine reductase OS=Thermoflexus hugenholtzii O X=1495650 GN=queF PE=3 SV=1
MNPKNTFRTDGTIDAFDNQFPGRDYVIEFIAPEFTSVCPMTGQPDFGTIRVTYVPDRKCIELRSFKFYLHAFRNRGIFYEDVVNTILEDIVAAVQPRSATVTGEFNTRGGISARVTASYPSRPSGA

SEQ ID NO: 50348 - protein, 155 aa, Thermogemmatispora argillosa
  misc_feature (1)..(155): tr|A0A455T565|A0A455T565_9CHLR NADPH-dependent 7-cyano- 7-deazaguanine reductase OS=Thermogemmatispora argillos a OX=2045280 GN=queF PE=3 SV=1
MSEDQQQQQQQTRVPGRYGLDEIAANRLEAWPNPNPERDYVIHLEIPEFTCLCPRSGFPDFATVVIDYVPDRSVVELKSLKLYINGYRDRQISHEAATNTILNDLVALLEPRWMRVAGDFNVRGNIKTIIFAEYAAPGYSGPRPDYRRYMLGSTL

SEQ ID NO: 50349 - protein, 151 aa, Thermogemmatispora aurantia
  misc_feature (1)..(151): tr|A0A5J4K5J4|A0A5J4K5J4_9CHLR NADPH-dependent 7-cyano- 7-deazaguanine reductase OS=Thermogemmatispora aurantia OX=2045279 GN=queF PE=4 SV=1
MSEEQQQTRVPGRYGLDEIAANRLEAWPNPNPERDYVVHLEIPEFTCLCPRSGFPDFATIVIDYVPDRSVVELKSLKLYINGYRDRQISHEAATNTILNDLVTLLGPRWMRVAGDFNVRGNIKTIIFAEYVAPNYSGPRPEYRRHMTGSSL

SEQ ID NO: 50350 - protein, 136 aa, Thermogemmatispora tikiterensis
  misc_feature (1)..(136): tr|A0A328VFH4|A0A328VFH4_9CHLR NADPH-dependent 7-cyano- 7-deazaguanine reductase OS=Thermogemmatispora tikitere nsis OX=1825093 GN=queF PE=3 SV=1
MDEIATNRLEAWPNPNPERDYVVHLEIPEFTCLCPRSGFPDFATIVIDYVPDRSVVELKSLKLYINGYRDRQISHEAATNTILNDLVTLLEPRWMRVAGDFNVRGNIKTIIFAEYAAPNYSGPRPEYRRHMTGSSL

SEQ ID NO: 50351 - protein, 124 aa, Thermogutta terrifontis
  misc_feature (1)..(124): tr|A0A286RM70|A0A286RM70_9PLAN NADPH-dependent 7-cyano- 7-deazaguanine reductase OS=Thermogutta terrifontis OX= 1331910 GN=queF PE=3 SV=1
MAQQAESFRHILETFENQYPDRDYTIEIICPEFTSVCPRTGQPDFGTITITYCPDKLCVELKSLKFYLQAYRNVGIFYEHVTNRILDDLVAVLRPRWMKVVADFRPRGGITTRVSAQYQVETAG

SEQ ID NO: 50352 - protein, 165 aa, Thermohydrogenium kirishiense
  misc_feature (1)..(165): tr|A0A4V2W8Y5|A0A4V2W8Y5_9FIRM NADPH-dependent 7-cyano- 7-deazaguanine reductase OS=Thermohydrogenium kirishien se OX=937254 GN=queF PE=3 SV=1
MSERDKKELDELSLLGKKDTKYIFDYDPSLLETFPNKHQENDYFVKFNCPEFTSLCPKTGQPDFATIYILYVPDKLMVESKSLKLYLFSFRNHGDFHEDCVNIIMKDLIKLLDPKYIEVWGKFTPRGGISIDPYCNYGRPGTKWADVAEKRLFYHDMYPEKVDNR

SEQ ID NO: 50353 - protein, 165 aa, Thermolongibacillus altinsuensis
  misc_feature (1)..(165): tr|A0A4R1QFZ1|A0A4R1QFZ1_9BACI NADPH-dependent 7-cyano- 7-deazaguanine reductase OS=Thermolongibacillus altinsu ensis OX=575256 GN=queF PE=3 SV=1
MVGRKDEELKGCTLLGNQGTKYVFEYNPDILEVFDNKHPDRDYFVKFNCPEFTSLCPKTGQPDFATIYISYIPDKKCVESKSLKLYLFSFRNHGDFHEDCVNIIMNDLIRVMNPRYIEVWGKFTPRGGISIDPYCNWGRPGTKYEKMAEYRLMNHDLYPEKVDNR

SEQ ID NO: 50354 - protein, 128 aa, Thermomicrobium roseum
  misc_feature (1)..(128): sp|B9L0W9|QUEF_THERP NADPH-dependent 7-cyano-7-deazagua nine reductase OS=Thermomicrobium roseum (strain ATCC 2 7502 / DSM 5159 / P-2) OX=309801 GN=queF PE=3 SV=1
MPTQPSKELERIPNPKPERDYEIEITTNEFTCVCPRTGQPDFATITIRYVPDQWIVELKSLKLYLWSYRNEGHYHEEVTNTILDDLVRTLEPRRMTVIADFNIRGGLHTVVTARYERTAEGPARLAAD

SEQ ID NO: 50355 - protein, 273 aa, Thermomonas haemolytica
  misc_feature (1)..(273): tr|A0A4V2V2I7|A0A4V2V2I7_9GAMM NADPH-dependent 7-cyano- 7-deazaguanine reductase OS=Thermomonas haemolytica OX= 141949 GN=queF PE=3 SV=1
MSTQTPDGSPLGRDTAYPSAYDPGLLYPIPRAPARARLGLGAALPFVGHDRWQAFELSWLDARGKPCVATATLQVPADSPHLVESKSLKLYLNSLNATRFEHADAVRARIEADLSTAAGAPVALAFGLAPLQEDDGTAISIDGLDIAIDHYGPPDAALLQADATTVVEETLTSALLKSNCPVTGQPDWADVSIAYRGPRLDRAGLLRYIVSFREHAGFHEQCVEQLFVDLLTRCAPQWLSVEARYTRRGGLDINPWRGSPGCTPPPPRRSLRQ

SEQ ID NO: 50356 - protein, 273 aa, Thermomonas hydrothermalis
  misc_feature (1)..(273): tr|A0A1M4WM14|A0A1M4WM14_9GAMM NADPH-dependent 7-cyano- 7-deazaguanine reductase OS=Thermomonas hydrothermalis OX=213588 GN=queF PE=3 SV=1
MTTHAPTDSPLGRHTHYPDRYDPGLLYPVPRAPARAALGIDAAALPFIGHDRWQAFELSWLDLRGKPCVACATLWVPATSPALIESKSLKLYLNSLNAHRFPDAEAVRACIEADLSGAAGAPVQLMFSLPPFETAAPGESIDVLDVTITSYGPPDASLLQADPDTIVEETLTSALLKSNCPVTGQPDWADVCIRYRGPRIDRASLLRYLVSFREHAGFHEQCVEQVFVDLMARCAPQRLSVEARYTRRGGLDINPWRATPGDTPPPPRRTLRQ

SEQ ID NO: 50357 - protein, 270 aa, Thermomonas sp.
  misc_feature (1)..(270): tr|A0A5B7ZRM6|A0A5B7ZRM6_9GAMM NADPH-dependent 7-cyano- 7-deazaguanine reductase OS=Thermomonas sp. SY21 OX=220 2149 GN=queF PE=3 SV=1
MPAIEHSPLGREVAYPQRFDAGLLYPIPRAQGRAALGIAGAALPFVGNDRWHAYELSWLDARGKPQVATATFEVPADSPNLIESKSFKLYLNSCNAARFPGADALRMQVEADLSAAAGAPVSMAFGLPAMRAGEGDSIDALEIDIDRYGPPDASQLAADAADDVAETLASALLKSNCPVTGQPDWADLAIAYSGPRIDRAGLLRYLVSFRDHAEFHEQCVERIFIDLMARCRPRSLSVQARYTRRGGLDINPWRATPGEPAPAANRSERQ

SEQ ID NO: 50358 - protein, 291 aa, Thermophagus xiamenensis
  misc_feature (1)..(291): tr|A0A1I2F0E8|A0A1I2F0E8_9BACT 7-cyano-7-deazaguanine r eductase OS=Thermophagus xiamenensis OX=385682 GN=SAMN0 5444380_12539 PE=4 SV=1
MNESKYLGKSVQYPQQYAPEMLVPVPRHLNREQYGLYNNQLPFTGYDVWHAYEFSFLTQKGLPVTGILKMVYPSDSPFLVESKSLKLYLNSLNMERYGATPREGIKEVISIIQKDISKVLQTEVTLHFFDAKESQYFDFWGYELLEKTGRIETVTFSEYREAPHLLCSEQSSSEKNILKVATHLLRSNCKVTFQPDWGSAFIYLKGKDIPDKIGLLKYLVSIRNENHFHEEICEMIYKRLWDRFTPEQLMVACLYTRRGGIDICPVRASQPHLLPQYLINPYKLTDKLLRQ

SEQ ID NO: 50359 - protein, 146 aa, Thermophagus xiamenensis
  misc_feature (1)..(146): tr|A0A1I2F3B9|A0A1I2F3B9_9BACT NADPH-dependent 7-cyano- 7-deazaguanine reductase OS=Thermophagus xiamenensis OX =385682 GN=SAMN05444380_12612 PE=3 SV=1
MSEKVLTYKDIDKSILKALPNPVKKAYEIKIKIPEFTFLGVKNQPDFADVYITFYPTDKIIELKSLKLYVHALRNITVSYERLINVFYDHLMEVYEPDRIRIVMICNPRGGISSRLTIDSDWKARGGEEKYSDWKNHLDDTWNVTL

SEQ ID NO: 50360 - protein, 165 aa, Thermosinus carboxydivorans
  misc_feature (1)..(165): tr|A1HNW9|A1HNW9_9FIRM NADPH-dependent 7-cyano-7-deazag uanine reductase OS=Thermosinus carboxydivorans Nor1 OX =401526 GN=queF PE=3 SV=1
MAGRSEHELSGVTLLGSQETVYKYQYDPSILEAFVNKHPENDYFVKFNCPEFTSICPKTGQPDFATIYISYVPDKLLVESKSLKLYLMSFRNHGDFHEDCVNIIMKDLIRLLDPKYIEVWGKFTPRGGISIDPYCNYGKPGTKWEQVAEKRLFYHDMYPEKVDNR

SEQ ID NO: 50361 - protein, 130 aa, Thermosipho melanesiensis
  misc_feature (1)..(130): tr|A6LJH6|A6LJH6_THEM4 NADPH-dependent 7-cyano-7-deazag uanine reductase OS=Thermosipho melanesiensis (strain D SM 12029 / CIP 104789 / BI429) OX=391009 GN=queF PE=3 S V=1
MPQAEGKKFSFVGEEHIRTDFLETIPFDRNEEKITIETEEFSAVCPFSGLPDIGKLIIEYYPDGGKIVELKSLKYYLVSFRNVGIYQEKATVRIYDDLKNILGTKRIKVKLIYNIRGGILTTTEVGSLEG

SEQ ID NO: 50362 - protein, 149 aa, Thermosporothrix hazakensis
  misc_feature (1)..(149): tr|A0A326U493|A0A326U493_9CHLR NADPH-dependent 7-cyano- 7-deazaguanine reductase OS=Thermosporothrix hazakensis OX=644383 GN=queF PE=3 SV=1
MSEEQEKQRVPGRYGIDEIKTNKLEPWPNPHPESDYVVHFEIPEFTCLCPRSGFPDFATFVIDYVPDASVVELKSLKLYINGYRDRQISHESSVNTVLNDLVALLSPRWMRVVGDFTVRGNIKTIVFAEHAKEGYTGPRPEYRRYMQQV

SEQ ID NO: 50363 - protein, 149 aa, Thermosporothrix sp.
  misc_feature (1)..(149): tr|A0A455SEZ5|A0A455SEZ5_9CHLR NADPH-dependent 7-cyano- 7-deazaguanine reductase OS=Thermosporothrix sp. COM3 O X=2490863 GN=queF PE=3 SV=1
MSEEQEKQRVPGRYGIDEIKANKLEPWPNPHPESDYVVHFEIPEFTCLCPRSGFPDFATFVIDYVPDASVVELKSLKLYINGYRDRQISHESSVNTVLNDLVALLSPRWMRVVGDFTVRGNIKTIVFAEHAKEGYTGPRPEYRRYMQQV

SEQ ID NO: 50364 - protein, 126 aa, Thermosulfidibacter takaii
  misc_feature (1)..(126): tr|A0A0S3QUW0|A0A0S3QUW0_THET7 NADPH-dependent 7-cyano- 7-deazaguanine reductase OS=Thermosulfidibacter takaii (strain DSM 17441 / JCM 13301 / NBRC 103674 / ABI70S6) OX=1298851 GN=queF PE=3 SV=1
MSEVKRYGEIEIEKAQLEAWPNPSEKNYIIEITFPEFTCLCPRSGYPDFATIRIKYIPDKYIVELKSLKLYLNKYRNQYISHEAATNKIFDDLKKLLQPKFLEVVGDFNPRGNVKTIIKVSTEDNK

SEQ ID NO: 50365 - protein, 133 aa, Thermosulfurimonas dismutans
  misc_feature (1)..(133): tr|A0A179D585|A0A179D585_9BACT NADPH-dependent 7-cyano- 7-deazaguanine reductase OS=Thermosulfurimonas dismutan s OX=999894 GN=queF PE=3 SV=1
MAEEKRYGERAIEEAELEAWPNPYPDRDYRIDITFPEFTCLCPRSGYPDFATIKISYLPHKKIVELRSLKLWLNKFRGRYISHEAATNEIFDALWKLLEPRELKVVGDFNPRGNVHTVITVERRQGSSGSPTA

SEQ ID NO: 50366 - protein, 132 aa, Thermosynechococcus elongatus
  misc_feature (1)..(132): tr|A0A3B7MIY7|A0A3B7MIY7_9CYAN NADPH-dependent 7-cyano- 7-deazaguanine reductase OS=Thermosynechococcus elongat us PKUAC-SCTE542 OX=2016101 GN=queF PE=3 SV=1
MQVSEMKYGERAIQEGQLITFPNPRPGRQYTIEITLPEFTCKCPFSGYPDFATLYVSYIPHEKVVELKAIKLYINSYRDRYISHEEAVNQVLDDLVAACDPLYMKIKGDFAPRGNVHTVITVEHHRQPDSSC

SEQ ID NO: 50367 - protein, 132 aa, Thermosynechococcus elongatus
  misc_feature (1)..(132): sp|Q8DMA3|QUEF_THEEB NADPH-dependent 7-cyano-7-deazagua nine reductase OS=Thermosynechococcus elongatus (strain BP-1) OX=197221 GN=queF PE=3 SV=1
MQVSEMKYGERAIQEGQLITFPNPRPGRQYTIEITLPEFTCKCPFSGYPDFATLYVSYIPHEKVVELKAIKLYINSYRDRYISHEEAVNQVLDDLVAACDPLYMKIKGDFAPRGNVHTVITVEHHRQTESLC

SEQ ID NO: 50368 - protein, 132 aa, Thermosynechococcus sp.; identical to SEQ ID NO: 50366
  misc_feature (1)..(132): tr|A0A5C2MAJ2|A0A5C2MAJ2_9CYAN NADPH-dependent 7-cyano- 7-deazaguanine reductase OS=Thermosynechococcus sp. CL- 1 OX=2583530 GN=queF PE=3 SV=1

SEQ ID NO: 50369 - protein, 132 aa, Thermosynechococcus sp.
  misc_feature (1)..(132): tr|V5V422|V5V422_9CYAN NADPH-dependent 7-cyano-7-deazag uanine reductase OS=Thermosynechococcus sp. NK55a OX=13 94889 GN=queF PE=3 SV=1
MQVSEMKYGERAIQEGQLMTFPNPRPGRQYTIEITLPEFTCKCPFSGYPDFATLYVSYIPHEKVVELKAIKLYINSYRDRYISHEEAVNQVLDDLVAACDPLYMKIKGDFAPRGNVHTVITVEHHRQAVSSC

SEQ ID NO: 50370 - protein, 137 aa, Thermotoga maritima
  misc_feature (1)..(137): tr|G4FD33|G4FD33_THEMA NADPH-dependent 7-cyano-7-deazag uanine reductase OS=Thermotoga maritima (strain ATCC 43 589 / MSB8 / DSM 3109 / JCM 10099) OX=243274 GN=queF PE =3 SV=1
MPKAEGRIFDFKGHDAIRTDFLEAIDFDGKDEYIKIETDEFSAVCPFSGLPDIGRVIIEYYPDGGKIVELKSLKYYFVSFRNVGIYQEEATKRIYEDLKNLLKTDRIRVTVIYNIRGGIKTTTQMGSLEGKKSGEVE

SEQ ID NO: 50371 - protein, 137 aa, Thermotoga maritima; identical to SEQ ID NO: 50370
  misc_feature (1)..(137): sp|Q9WZP8|QUEF_THEMA NADPH-dependent 7-cyano-7-deazagua nine reductase OS=Thermotoga maritima (strain ATCC 4358 9 / MSB8 / DSM 3109 / JCM 10099) OX=243274 GN=queF PE=3 SV=1

SEQ ID NO: 50372 - protein, 137 aa, Thermotoga naphthophila; identical to SEQ ID NO: 50370
  misc_feature (1)..(137): tr|A0A101ERP7|A0A101ERP7_9THEM NADPH-dependent 7-cyano- 7-deazaguanine reductase OS=Thermotoga naphthophila OX= 93930 GN=queF PE=3 SV=1

SEQ ID NO: 50373 - protein, 137 aa, Thermotoga naphthophila; identical to SEQ ID NO: 50370
  misc_feature (1)..(137): tr|D2C5K8|D2C5K8_THENR NADPH-dependent 7-cyano-7-deazag uanine reductase OS=Thermotoga naphthophila (strain ATC C BAA-489 / DSM 13996 / JCM 10882 / RKU-10) OX=590168 G N=queF PE=3 SV=1

SEQ ID NO: 50374 - protein, 137 aa, Thermotoga neapolitana
  misc_feature (1)..(137): tr|B9KAI0|B9KAI0_THENN NADPH-dependent 7-cyano-7-deazag uanine reductase OS=Thermotoga neapolitana (strain ATCC 49049 / DSM 4359 / NS-E) OX=309803 GN=queF PE=3 SV=1
MPKAEGRIFDFKGHDAIRTDFLEAIDFDGKEEYIRIETEEFSAVCPFSGLPDIGKVIIEYYPDGGKIVELKSLKYYFVSFRNVGIYQEEATKRIYEDLKNLLKTDRLRVTVIYNIRGGIKTTTQIGSLEGRENGKAE

SEQ ID NO: 50375 - protein, 137 aa, Thermotoga petrophila; identical to SEQ ID NO: 50370
  misc_feature (1)..(137): sp|A5IIZ4|QUEF_THEP1 NADPH-dependent 7-cyano-7-deazagua nine reductase OS=Thermotoga petrophila (strain RKU-1 / ATCC BAA-488 / DSM 13995) OX=390874 GN=queF PE=3 SV=1

SEQ ID NO: 50376 - protein, 136 aa, Thermotoga sp.; identical to SEQ ID NO: 49045
  misc_feature (1)..(136): tr|A0A101ESB6|A0A101ESB6_9THEM NADPH-dependent 7-cyano- 7-deazaguanine reductase OS=Thermotoga sp. 50_1627 OX=1 635260 GN=queF PE=3 SV=1

SEQ ID NO: 50377 - protein, 137 aa, Thermotoga sp.
  misc_feature (1)..(137): tr|A0A0A6MWB6|A0A0A6MWB6_9THEM NADPH-dependent 7-cyano- 7-deazaguanine reductase OS=Thermotoga sp. Mc24 OX=1231 241 GN=queF PE=3 SV=1
MPKAEGRIFDFKGHDAIRTDFLEAIDFDGKDEYIKIETDEFSAVCPFSGLPDIGRVIIEYYPDGGKIVELKSLKYYFVSFRNVGIYQEEATKRIYEDLKNLLKTDRIRVTVIYNIRGGIKTTTQIGSLEGKESGKVE

SEQ ID NO: 50378 - protein, 128 aa, Thermotogae bacterium
  misc_feature (1)..(128): tr|A0A496QE62|A0A496QE62_9BACT NADPH-dependent 7-cyano- 7-deazaguanine reductase OS=Thermotogae bacterium OX=20 53689 GN=queF PE=3 SV=1
MPKAEGKSFNFEGKEKIRADFLEAVPFDGREEYIRIDTEEFSAVCPFSGLPDIAKVTIEYYPEGGKIVELKSLKYYFISFRNVGVYQEEATKIIYEDLKKLLQTNRIKVTMVYNIRGGILTTTTMGTL

SEQ ID NO: 50379 - protein, 164 aa, Thermovibrio ammonificans
  misc_feature (1)..(164): tr|E8T4D4|E8T4D4_THEA1 NADPH-dependent 7-cyano-7-deazag uanine reductase OS=Thermovibrio ammonificans (strain D SM 15698 / JCM 12110 / HB-1) OX=648996 GN=queF PE=3 SV= 1
MERKDFGNISKLGRKTEYTFKYSPQLLERFPNRFPDRFYWVSFNCPEFTTLCPITGQPDFATIYIQYIPDRWLVESKSLKLYLFSFRDARDFHEDVVNRIADDLFNLLEPFYLEVYGEFNPRGGISIDPFVQRFRSELDWVKELASERFKLHRITPPPIRRNRG

SEQ ID NO: 50380 - protein, 163 aa, Thermovibrio guaymasensis
  misc_feature (1)..(163): tr|A0A420W710|A0A420W710_9BACT NADPH-dependent 7-cyano- 7-deazaguanine reductase OS=Thermovibrio guaymasensis O X=240167 GN=queF PE=3 SV=1
MEKKPSGITKLGRKVDYVFDYSPQLLEKFENRFPDRIYWVSFNCPEFTTLCPITGQPDFATIYIQYIPDKWLVESKSLKLYLFSFRNAKGFHEDTVNRIADDLYNLLEPYYIEVYGEFNPRGGISIDPFVQRFRGGVDWVEELAKERFKLHKITPPDIRRNRG

SEQ ID NO: 50381 - protein, 129 aa, Thioalbus denitrificans
  misc_feature (1)..(129): tr|A0A369CHQ9|A0A369CHQ9_9GAMM NADPH-dependent 7-cyano- 7-deazaguanine reductase OS=Thioalbus denitrificans OX= 547122 GN=queF PE=3 SV=1
MSTQPSKDLETFPNPAPERDYTIRIRVPEFTCLCPKTGQPDFATLQLEYVPHDRCVELKSLKLYVWSFREEGAFHEAVTNRILADLVEACEPRFMRLTAEFNVRGGVYTTVVAEHRSDSWVAPSPVTLP

SEQ ID NO: 50382 - protein, 129 aa, Thioalkalivibrio denitrificans
  misc_feature (1)..(129): tr|A0A1V3NLX7|A0A1V3NLX7_9GAMM NADPH-dependent 7-cyano- 7-deazaguanine reductase OS=Thioalkalivibrio denitrific ans OX=108003 GN=queF PE=3 SV=1
MPSQPSKDLETFENPRPGRDYTIRIRIPEFTCLCPKTGQPDFATLHLEYVPRARCVELKALKLYVWSFREEGAFHEAVTNRILDDLVAATDPHFMRLTAEFNVRGGIYTTVVAEHRHPEWQAPAPVSLP

SEQ ID NO: 50383 - protein, 140 aa, Thioalkalivibrio halophilus
  misc_feature (1)..(140): tr|A0A1V2ZVR3|A0A1V2ZVR3_9GAMM NADPH-dependent 7-cyano- 7-deazaguanine reductase OS=Thioalkalivibrio halophilus OX=252474 GN=queF PE=3 SV=1
MPSQPSKTLDTFDNPSPDNNFAIYIRIPEFTCLCPATGQPDFAELHLQYVADQRCVELKSLKNYMWSFRNEGAFHEAVTNQILNDLVAATDPRFMRLTANFYVRGGIYTTVVAEHRQEGWTPPESVTLPPPTRSPQGTEY

SEQ ID NO: 50384 - protein, 134 aa, Thioalkalivibrio nitratireducens
  misc_feature (1)..(134): tr|L0DVM6|L0DVM6_THIND NADPH-dependent 7-cyano-7-deazag uanine reductase OS=Thioalkalivibrio nitratireducens (s train DSM 14787 / UNIQEM 213 / ALEN2) OX=1255043 GN=que F [H] PE=3 SV=1
MPSAPSKTLDTFPNPQPGRDYTIHMRIPEFTCLCPATGQPDFAELHLEYVPDTACVELKSLKLYIWSYRNEGAYHEAVTNRIVDDLVAAIQPRFMRLTADFNVRGGIFTQVVAEHRAPGWTPAAAVELPQPIPR

SEQ ID NO: 50385 - protein, 134 aa, Thioalkalivibrio paradoxus
  misc_feature (1)..(134): tr|W0DJ49|W0DJ49_9GAMM NADPH-dependent 7-cyano-7-deazag uanine reductase OS=Thioalkalivibrio paradoxus ARh 1 OX =713585 GN=queF PE=3 SV=1
MPSAPSKTLDTFPNPQPARDYTIHMRIPEFTCLCPATGQPDFAELHLEYVPDLTCVELKSLKLYIWSYRNEGAYHEAVTNRILDDLVAAIDPRFMRLTADFNVRGGIFTQVVAEHRAPGWTPAAAVELPQPIPR

SEQ ID NO: 50386 - protein, 140 aa, Thioalkalivibrio sp.
  misc_feature (1)..(140): tr|D3SAM0|D3SAM0_THISK NADPH-dependent 7-cyano-7-deazag uanine reductase OS=Thioalkalivibrio sp. (strain K90mix ) OX=396595 GN=queF PE=3 SV=1
MPSQPSKTLDTFDNPAPENDFAIYIRIPEFTCLCPATGQPDFAELHLEYVADRKCVELKSLKNYMWSFRDEGAFHEAVTNRILADLVAATEPRFMRLTSYFNVRGGIYTSVVAEHRQPGWTPPERVTLPPPGRSPLHSGL

SEQ ID NO: 50387 - protein, 140 aa, Thioalkalivibrio sp.; identical to SEQ ID NO: 50383
  misc_feature (1)..(140): tr|A0A318VN07|A0A318VN07_9GAMM NADPH-dependent 7-cyano- 7-deazaguanine reductase OS=Thioalkalivibrio sp. ALE21 OX=1158175 GN=queF PE=3 SV=1

SEQ ID NO: 50388 - protein, 129 aa, Thioalkalivibrio sulfidiphilus
  misc_feature (1)..(129): sp|B8GTL3|QUEF_THISH NADPH-dependent 7-cyano-7-deazagua nine reductase OS=Thioalkalivibrio sulfidiphilus (strai n HL-EbGR7) OX=396588 GN=queF PE=3 SV=1
MSSQPSKDLETFENPQPGRDYTIRIRVPEFTCLCPKTGQPDFATLFLDYVPRARCVELKSLKLYVWAFRDQGAFHEKVTNEILNDLVAATDPNFMRLTAEFNVRGGVYTTVVAEHRHPDWQPPVPVTLP

SEQ ID NO: 50389 - protein, 140 aa, Thioalkalivibrio versutus
  misc_feature (1)..(140): tr|A0A0G3G0Q7|A0A0G3G0Q7_9GAMM NADPH-dependent 7-cyano- 7-deazaguanine reductase OS=Thioalkalivibrio versutus O X=106634 GN=queF PE=3 SV=1
MPSQPSKTLETFDNPAPENDFAIYIRVPEFTCLCPATGQPDFAEIHIQYVADGKCVELKSLKNYMWSYRDEGAFHEAVTNRILADLVAATDPRYMRLTSYFNVRGGVYTTVVAEHRKPGWTPPEPVHLPAPTRSPLDMNG

SEQ ID NO: 50390 - protein, 140 aa, Thioalkalivibrio versutus
  misc_feature (1)..(140): tr|A0A1V3BRG3|A0A1V3BRG3_9GAMM NADPH-dependent 7-cyano- 7-deazaguanine reductase OS=Thioalkalivibrio versutus O X=106634 GN=queF PE=3 SV=1
MPSQPSKTLETFDNPAPENDFAIYIRIPEFTCLCPATGQPDFAEIHIQYVADGKCVELKSLKNYMWSYRDEGAFHEAVTNRILADLVAATDPRYMRLTSYFNVRGGVYTTVVAEHRKPGWTPPEPVQLPAPTRSPLDMNG

SEQ ID NO: 50391 - protein, 129 aa, Thiobaca trueperi
  misc_feature (1)..(129): tr|A0A4R3N867|A0A4R3N867_9GAMM NADPH-dependent 7-cyano- 7-deazaguanine reductase OS=Thiobaca trueperi OX=127458 GN=queF PE=3 SV=1
MPSLPSKALETFPNPQPERDYTIRIRVPEFTCLCPKTGQPDFAELTLEYVPDRLCAELKALKTYVWSYRDEGAFHEAVTNLILSDLVTAIAPRFMRLTADFNVRGGIYTTVVAEHRDPGWQPPEPVRLP

SEQ ID NO: 50392 - protein, 139 aa, Thiobacillus denitrificans
  misc_feature (1)..(139): tr|A0A106BLN7|A0A106BLN7_THIDE NADPH-dependent 7-cyano- 7-deazaguanine reductase OS=Thiobacillus denitrificans OX=36861 GN=queF PE=3 SV=1
MPSTPTKTLETFPNPKVGRDFHIHMEVPEFTCLCPKTGQPDFATLILDYIPDKTCVELKSLKLYMWSFREEGHFHEDVTNRILDDLVKVTKPRFMRLTAKFYVRGGIFTNVVAEHRKKGWAPAPRVDLTQFEHQSNTRG

SEQ ID NO: 50393 - protein, 139 aa, Thiobacillus denitrificans
  misc_feature (1)..(139): sp|Q3SJI1|QUEF_THIDA NADPH-dependent 7-cyano-7-deazagua nine reductase OS=Thiobacillus denitrificans (strain AT CC 25259) OX=292415 GN=queF PE=3 SV=1
MPSTPSKTLETFPNPKPGRDFHIHMEVPEFTCLCPKTGQPDFATLVLDYIPNQACVELKSLKLYMWSFRDEGHFHEDVTNRILDDLVAATDPRYMRLTAKFYVRGGIFTNVVAEHRKDGWQPAPRVDLTQFEHQSNTRG

SEQ ID NO: 50394 - protein, 139 aa, Thiobacillus sp.
  misc_feature (1)..(139): tr|A0A1Q4EJZ7|A0A1Q4EJZ7_9PROT NADPH-dependent 7-cyano- 7-deazaguanine reductase OS=Thiobacillus sp. 0-1251 OX= 1895858 GN=queF PE=3 SV=1
MPSTPAKTLETFPNPKPGRDFHIHMEVPEFTCLCPKTGQPDFATLILDYIPDKTCVELKSLKLYMWSFREEGHFHEDVTNRILDDLVKATKPRFMRLTAKFYVRGGIFTNVVAEHRKKGWQPAPRVDLTQFEHQSNTRG

SEQ ID NO: 50395 - protein, 139 aa, Thiobacillus sp.
  misc_feature (1)..(139): tr|A0A1Q4GVW2|A0A1Q4GVW2_9PROT NADPH-dependent 7-cyano- 7-deazaguanine reductase OS=Thiobacillus sp. 65-29 OX=1 895862 GN=queF PE=3 SV=1
MPSTPSKTLETFPNPKPERDFHIHMEVPEFTCLCPKTGQPDFATLSIDYIPDKACVELKSLKLYMWSFRDEGHFHEDVTNRILDDLVKATKPRFMRLTAKFYVRGGIFTNVVAEHRKKGWQPAPRVDLTQFEHQSNILG

SEQ ID NO: 50396 - protein, 129 aa, Thiocapsa marina
  misc_feature (1)..(129): tr|F9U5P2|F9U5P2_9GAMM NADPH-dependent 7-cyano-7-deazag uanine reductase OS=Thiocapsa marina 5811 OX=768671 GN= queF PE=3 SV=1
MSTAPSRALETFPNPQPERDYSIRIQIPEFTCLCPKTGQPDFAELTLEYVPEARCVELKALKLYVWTYRDQGAFHEAVTNEILGDLVAATEPRFMRLTAAFNVRGGIYTTVVAEHRAAGWRPADPVQLP

SEQ ID NO: 50397 - protein, 129 aa, Thiocapsa rosea
  misc_feature (1)..(129): tr|A0A495V2E8|A0A495V2E8_9GAMM NADPH-dependent 7-cyano- 7-deazaguanine reductase OS=Thiocapsa rosea OX=69360 GN =queF PE=3 SV=1
MSTTPSRALETFPNPQPERDYSIRIQIPEFTCLCPKTGQPDFAELTLEYVPEARCVELKALKLYVWTYRDQGAFHEAVTNAILGDLVAATEPRFMRLTAAFNVRGGIYTTVVAEHRAAGWRPADPVQLP

SEQ ID NO: 50398 - protein, 129 aa, Thiocapsa roseopersicina
  misc_feature (1)..(129): tr|A0A1H2QSE9|A0A1H2QSE9_THIRO NADPH-dependent 7-cyano- 7-deazaguanine reductase OS=Thiocapsa roseopersicina OX =1058 GN=queF PE=3 SV=1
MSTAPSRALETFPNPQPERDYSIRIQIPEFTCLCPKTGQPDFAELTLEYVPEARCVELKALKLYVWTYRDQGAFHEAVTNQILGDLVAATEPRFMRLTAAFNVRGGIYTTVVAEHRAAGWRPADPVQLP

SEQ ID NO: 50399 - protein, 129 aa, Thiocapsa sp.
  misc_feature (1)..(129): tr|A0A0U5IJE1|A0A0U5IJE1_9GAMM NADPH-dependent 7-cyano- 7-deazaguanine reductase OS=Thiocapsa sp. KS1 OX=610332 GN=queF PE=3 SV=1
MSTAPSRSLETFPNPQPERDYSIRIQIPEFTCLCPKTGQPDFAELTLEYVPEARCVELKALKLYVWTYRDQGAFHEAVTNQILGDLVAATEPRFMRLTAAFNVRGGIYTTVVAEHRAAGWRPADPVQLP

SEQ ID NO: 50400 - protein, 153 aa, Thioclava arenosa
  misc_feature (1)..(153): tr|A0A2A4CNH4|A0A2A4CNH4_9RHOB NADPH-dependent 7-cyano- 7-deazaguanine reductase OS=Thioclava arenosa OX=179530 8 GN=queF PE=3 SV=1
MSDIYSHLTQLGGPSALPASPEEAVLERVPNPEAGTDYCVRFTAPEFTSLCPITGQPDFAHLMIDYIPGEWLIESKALKLYLGSFRNHGAFHEACTVSIGKRLVEFLDPKWLRIGGYWYPRGGIPIDVFYQTGAAPAGVWIPEQGVPPYRGRG

SEQ ID NO: 50401 - protein, 153 aa, Thioclava atlantica
  misc_feature (1)..(153): tr|A0A085TV55|A0A085TV55_9RHOB NADPH-dependent 7-cyano- 7-deazaguanine reductase OS=Thioclava atlantica OX=1317 124 GN=queF PE=3 SV=1
MSTDVTGLTQLGQATDLPNAPEDAVLERVPQPREGERYLVRFTAPEFTSLCPLTGQPDFAHIMIDYVPKDWLVESKSLKLFLGSFRNHGAFHEDCSVMIGQRLRDLLEPEWLRIGAYWYPRGGIPIDVFWQTGPQPADMWIPDQGVPPYRGRG

SEQ ID NO: 50402 - protein, 153 aa, Thioclava dalianensis
  misc_feature (1)..(153): tr|A0A074TIB0|A0A074TIB0_9RHOB NADPH-dependent 7-cyano- 7-deazaguanine reductase OS=Thioclava dalianensis OX=11 85766 GN=queF PE=3 SV=1
MVSDASGLSQLGQSVDLPASPEAAVLERVPQPRAGERYLVRFTAPEFTSLCPLTAQPDFAHIMIDYVPRDWLVESKSLKLFLGSFRNHGAFHEDCSVMIGQRLRDLLEPEWLRIGAYWYPRGGIPIDVFWQTGPQPSDLWIPDQGVPPYRGRG

SEQ ID NO: 50403 - protein, 153 aa, Thioclava electrotropha
  misc_feature (1)..(153): tr|A0A1W9XRL7|A0A1W9XRL7_9RHOB NADPH-dependent 7-cyano- 7-deazaguanine reductase OS=Thioclava electrotropha OX= 1549850 GN=queF PE=3 SV=1
MSTDTSGLTQLGQSTDLPQTPEEAVLERVPQPRKGERYLVRFTAPEFTSLCPLTGQPDFAHIMIDYVPRDWLVESKSLKLFLGAFRNHGAFHEDCSVMIGQRLRDLLEPEWLRIGAYWYPRGGIPIDVFWQSAPKPEDMWIPDQGVPPYRGRG

SEQ ID NO: 50404 - protein, 153 aa, Thioclava pacifica
  misc_feature (1)..(153): tr|A0A074JJZ3|A0A074JJZ3_9RHOB NADPH-dependent 7-cyano- 7-deazaguanine reductase OS=Thioclava pacifica DSM 1016 6 OX=1353537 GN=queF PE=3 SV=1
MSTDTSGLTQLGQATELPQSPEEAVLERVPQPRAGERYLVRFTAPEFTSLCPLTGQPDFAHIMIDYVPRDWLVESKSLKLFLGSFRNHGAFHEDCSVMIGQRLRDLLDPEWLRIGAYWYPRGGIPIDVFWQSGPQPTDLWIPDQGVPPYRGRG

SEQ ID NO: 50405 - protein, 153 aa, Thioclava sp.
  misc_feature (1)..(153): tr|A0A4V3ET57|A0A4V3ET57_9RHOB NADPH-dependent 7-cyano- 7-deazaguanine reductase OS=Thioclava sp. ES.032 OX=179 8206 GN=queF PE=3 SV=1
MSTDTSGLTQLGQSTDLPQTPDEAVLERVPQPRAGERYLVRFTAPEFTSLCPLTGQPDFAHIMIDYVPRDWLVESKSLKLFLGAFRNHGAFHEDCSVMIGQRLRDLLEPEWLRIGAYWYPRGGIPIDVFWQSAPKPEDMWIPDQGVPPYRGRG

SEQ ID NO: 50406 - protein, 153 aa, Thioclava sp.
  misc_feature (1)..(153): tr|A0A1T2A471|A0A1T2A471_9RHOB NADPH-dependent 7-cyano- 7-deazaguanine reductase OS=Thioclava sp. F28-4 OX=1915 315 GN=queF PE=3 SV=1
MSTDTSGLTQLGQSTDLPQTPDEAVLERVPQPRKGERYLVRFTAPEFTSLCPLTGQPDFAHIMIDYVPRDWLVESKSLKLFLGAFRNHGAFHEDCSVMIGQRLRDLLEPEWLRIGAYWYPRGGIPIDVFWQSAPKPEDMWIPDQGVPPYRGRG

SEQ ID NO: 50407 - protein, 129 aa, Thiocystis violascens
  misc_feature (1)..(129): tr|I3Y9V8|I3Y9V8_THIV6 NADPH-dependent 7-cyano-7-deazag uanine reductase OS=Thiocystis violascens (strain ATCC 17096 / DSM 198 / 6111) OX=765911 GN=queF PE=3 SV=1
MSSAPSKTLEIFPNPQTERDYTVRIRVPEFTCLCPKTGQPDFAELTLEYVPDRVCVELKSLKTYVWSYRDEGAFHEAVTNRILTDLIEAVEPRFMRLTADFNVRGGIYTTVVAEHRAAGWQPPVPVQLP

SEQ ID NO: 50408 - protein, 129 aa, Thioflavicoccus mobilis
  misc_feature (1)..(129): tr|L0H3K9|L0H3K9_9GAMM NADPH-dependent 7-cyano-7-deazag uanine reductase OS=Thioflavicoccus mobilis 8321 OX=765 912 GN=queF PE=3 SV=1
MPTRPTKDLETFPNPEPSRDYTVRIRVPEFTCLCPKTGQPDFAELTLEYVPDALCVELKSLKLYVWSFRDEGAFHEAVTNRILADLVTALAPRFMRLRADFNVRGGIYTTIVAEHRDPDWAIPPRIELP

SEQ ID NO: 50409 - protein, 126 aa, Thioflexothrix psekupsii
  misc_feature (1)..(126): tr|A0A251XBI9|A0A251XBI9_9GAMM NADPH-dependent 7-cyano- 7-deazaguanine reductase OS=Thioflexothrix psekupsii OX =1570016 GN=queF PE=3 SV=1
MPSVPSRELEVFANPHPQRDYTIEMKIPEFTCLCPKTGQPDFATLHVKYIPDLWCLELKALKLYCWSYRNEGAFHEAVTNQILTDLVAACAPRYLQLRAEFYVRGGIYTTVTAEYHQGEQKEQGQG

SEQ ID NO: 50410 - protein, 129 aa, Thiogranum longum
  misc_feature (1)..(129): tr|A0A4R1HB33|A0A4R1HB33_9GAMM NADPH-dependent 7-cyano- 7-deazaguanine reductase OS=Thiogranum longum OX=153752 4 GN=queF PE=3 SV=1
MSTQPSKALETFDNPHPQRDYTIRIRMPEFTCLCPKTGQPDFAELELEYVPHEYCVELKSLKMYIWSFRDEGAFHEDVTNQILDKLVSVCNPRFMRLTADFNVRGGVYTTIVAEHRDPVWKAPERVELP

SEQ ID NO: 50411 - protein, 129 aa, Thiohalobacter thiocyanaticus
  misc_feature (1)..(129): tr|A0A426QFY5|A0A426QFY5_9GAMM NADPH-dependent 7-cyano- 7-deazaguanine reductase OS=Thiohalobacter thiocyanatic us OX=585455 GN=queF PE=3 SV=1
MPSQPSKDLETFDNPQPERDYTIRIRVPEFTCLCPKTGQPDFATLHLEYVPEYKCVELKSLKLYVWAFRDQGAFHEAVTNRILDDLVAAIQPRFMRLTAEFNVRGGIYTTVVAEHRAEHWQPAPPVTLP

SEQ ID NO: 50412 - protein, 129 aa, Thiohalobacter thiocyanaticus
  misc_feature (1)..(129): tr|A0A1Z4VRW0|A0A1Z4VRW0_9GAMM NADPH-dependent 7-cyano- 7-deazaguanine reductase OS=Thiohalobacter thiocyanatic us OX=585455 GN=queF PE=3 SV=1
MPSQPSKDLETFDNPQPERDYTIRIRVPEFTCLCPKTGQPDFATLDLEYVPEHKCVELKSLKLYVWSFRDEGAFHEAVTNRILDDLVAAIQPRFMRLTAEFNVRGGIYTTVVAEYRAEYWQPAPPVSLP

SEQ ID NO: 50413 - protein, 129 aa, Thiohalomonas denitrificans
  misc_feature (1)..(129): tr|A0A1G5PII9|A0A1G5PII9_9GAMM NADPH-dependent 7-cyano- 7-deazaguanine reductase OS=Thiohalomonas denitrificans OX=415747 GN=queF PE=3 SV=1
MPTQPSKTLETFDNPAPAMDYTIRIEIPEFTCLCPKTGQPDFATIYIDYVPDERCLELKALKLYIWSFREEGAFHEKVTNDMLADFIAACQPRFMRVTGRFNVRGGIYTSITAEHRKEGWQPPQPVTLP

SEQ ID NO: 50414 - protein, 129 aa, Thiohalophilus thiocyanatoxydans
  misc_feature (1)..(129): tr|A0A4R8INZ4|A0A4R8INZ4_9GAMM NADPH-dependent 7-cyano- 7-deazaguanine reductase OS=Thiohalophilus thiocyanatox ydans OX=381308 GN=queF PE=3 SV=1
MPSQPSKTLETFDNPMPERDYTIRIEVPEFTCLCPKTGQPDFATLYLEYVPEAKCVELKSLKMYVWAYRDEGAFHEKVTNTILDDLVKATEPRFMRLTAKFNVRGGIYTSVVAEHRQSGWQAPEAVTLP

SEQ ID NO: 50415 - protein, 153 aa, Thiohalorhabdus denitrificans
  misc_feature (1)..(153): tr|A0A0N8PNH1|A0A0N8PNH1_9GAMM NADPH-dependent 7-cyano- 7-deazaguanine reductase OS=Thiohalorhabdus denitrifica ns OX=381306 GN=queF PE=3 SV=1
MPDYHDLRYLGQTDSPLPESPEQTELEAVPDPHADIDYLVRFTVPEFTSLCPVTGQPDFAHLVVDYVPDGLIVESKSLKLFLGAFRNHGAFHEDCTLLIAKRIQAAIQPKWLRIGGYWYPRGGIPIDVFYQTGEPPAGVWIPDQGVPPYRGRG

SEQ ID NO: 50416 - protein, 132 aa, Thiohalospira halophila
  misc_feature (1)..(132): tr|A0A1I1N6L7|A0A1I1N6L7_9GAMM NADPH-dependent 7-cyano- 7-deazaguanine reductase OS=Thiohalospira halophila DSM 15071 OX=1123397 GN=queF PE=3 SV=1
MTTQPSRDLETFPNPTPERDYTVRFVIPEFTCLCPKTGQPDFATFYIDYIPGTTCVELKSLKLYMWSFRDEGAFHEAVTNRITDDLVTAIVPRFLRVTGRFNVRGGIYTDVTTEHRAEGWQPAAPVQLPPRE

SEQ ID NO: 50417 - protein, 129 aa, Thiolapillus brandeum
  misc_feature (1)..(129): tr|W0TKG7|W0TKG7_9GAMM NADPH-dependent 7-cyano-7-deazag uanine reductase OS=Thiolapillus brandeum OX=1076588 GN =queF PE=3 SV=1
MPSQPSKELETFDNPQPERDYTIRIRIPEFTCLCPKTGQPDFAELHLEYVPDHLCVELKALKMYVWSFRDEGAFHEAVTNRILDDLVTATQPRFMRLTADFNVRGGIYTQVVAEYRDPDWQAPACVDLP

SEQ ID NO: 50418 - protein, 275 aa, Thiomicrorhabdus sp.
  misc_feature (1)..(275): tr|A0A4V1HI26|A0A4V1HI26_9GAMM NADPH-dependent 7-cyano- 7-deazaguanine reductase OS=Thiomicrorhabdus sp. G1 OX= 2580412 GN=queF PE=3 SV=1
MSSNKATDSLLGKTTPYCAEYDASLLFPIARKEKRDELGIDELNLPFTGLDIWTGYEISWLNAKGKPVVRIAEFAFQADSPNLVESKSFKLYLNSFNGSRFAGEAEVIQLMEKDLSEASGGPVVIDFKPLHGHELLFGDLPGENIDELDITVDAYQVDASLLKTLSNKVEQETINSHLLKSNCLVTAQPDWGSVVIRYSGQEIEVESLLKYLISFREHNEFHEQCVERIFMDISKHCQPTQLTVYARYVRRGGLDINPYRSNFEDEFDISRTMRQ

SEQ ID NO: 50419 - protein, 280 aa, Thiomicrospira aerophila
  misc_feature (1)..(280): tr|W0DYM9|W0DYM9_9GAMM NADPH-dependent 7-cyano-7-deazag uanine reductase OS=Thiomicrospira aerophila AL3 OX=717 772 GN=queF PE=3 SV=1
MSDANGLVGDVAASQLGKATLYPQNYDAGLLFPIPRQTKRDELNISGQKLPFTGVDVWNAYEISWLNPKGKPMVAIGQFILRADTPNIIESKSFKLYLNSFNASRFDSQAAVAHIMEQDLSAAAGGKVKVHLSSLNQEPCLVSDIDRAECLDFQDLDIDTYQVNPGFLRAGNQYAEEAFYSHLLKSNCLVTGQPDWGTVVIRYRGPKIDRAGLLRYIISFRDHNEFHEQCVERMFCDIQRQCQPDALTVYARYVRRGGLDINPFRSNFQSEAVMPRLVRQ

SEQ ID NO: 50420 - protein, 280 aa, Thiomicrospira cyclica
  misc_feature (1)..(280): tr|F6DBH9|F6DBH9_THICA NADPH-dependent 7-cyano-7-deazag uanine reductase OS=Thiomicrospira cyclica (strain DSM 14477 / JCM 11371 / ALM1) OX=717773 GN=queF PE=3 SV=1
MSDAKVLVGDVAASQLGKTTVYPQQYDAGLLFPIPRQTKRDELAIDAQKLPFTGVDVWNAYEISWLNLKGKPMVAMGQFTLRADTPNIIESKSFKLYLNSFNASRFESQAAVAHTMERDLSAVAGGKVKVQLSSLNQEPCLVSDIDRAECLDFQDLEIDTYQVNPDFLRAGNQYAEEAFYSHLLKSNCLVTGQPDWGTVVIRYRGPKIDRAGLLRYIISFRDHNEFHEQCVERMFCDIQRQCQPDALTVYARYVRRGGLDINPFRSNFQSEAVMPRLVRQ

SEQ ID NO: 50421 - protein, 273 aa, Thiomicrospira sp.
  misc_feature (1)..(273): tr|A0A0X3T993|A0A0X3T993_9GAMM NADPH-dependent 7-cyano- 7-deazaguanine reductase OS=Thiomicrospira sp. WB1 OX=1 685380 GN=queF PE=3 SV=1
MTRAEHSQLGRTTRYCNQYDPSLLFPIPRSEKRDELGIQAEALPFSGVDVWQAFEVSWLDAQGKPQVRLVRFEIPASSPNLIESKSFKLYLNSFNGTRFESEQAVTSLWQQDLSDAAGAPVGINVQSVSEPQTLIGGPEGICLDDESVTIERYQVTPDLLKADDSTRVGETLYSHLLKSNCLVTGQPDWGSVVIDYTGPKIDRAALLKYLVSFREHNEFHEQCVERVFTDLKRHCQPEKLTVYARYVRRGGLDINPYRSDWQTEFDLRRWVRQ

SEQ ID NO: 50422 - protein, 282 aa, Thiomicrospira sp.
  misc_feature (1)..(282): tr|A0A0X3TE89|A0A0X3TE89_9GAMM NADPH-dependent 7-cyano- 7-deazaguanine reductase OS=Thiomicrospira sp. XS5 OX=1 775636 GN=queF PE=3 SV=1
MTNTLSPKSDSTANQSLLGQATPYCTQYDPSLLFPVPRQEKRDELGVSPDALPFSGQDVWTGFEISWLNDKGKPQVGWALFFFPAESPNLIESKSFKLYLNSFNGTRFASAEVVKQHWITDLSQACGGEVKVALYDLDEPQTLIGAPPGECLDDLDIEVSDYQIRPEWLTTVSSTPVSETLYSHLLKSNCLVTGQPDWGSIVIRYEGPKIDRENLLKYLVSFREHNEFHEQCVERVFVDLMHYCQPEKLTVYARYVRRGGLDINPYRSNFETDFDLRRLVRQ

SEQ ID NO: 50423 - protein, 150 aa, Thiomonas arsenitoxydans
  misc_feature (1)..(150): tr|D6CUG0|D6CUG0_THIA3 NADPH-dependent 7-cyano-7-deazag uanine reductase OS=Thiomonas arsenitoxydans (strain DS M 22701 / CIP 110005 / 3As) OX=426114 GN=queF PE=3 SV=1
MNSEFQPNRKKMTTKPSKSLQTFPNPAPERDYHIHMQVPEFTCLCPLTGQPDFARFDIDFIPDKKCVELKSLKLYMWSYRDEGAFHEKVTNAILDDLVKAMSPRFLRVTARWYVRGGIYTNVVVEHRKRGWKPTPRVDLTQFDAAEPAAN

SEQ ID NO: 50424 - protein, 139 aa, Thiomonas bhubaneswarensis
  misc_feature (1)..(139): tr|A0A0K6HZ39|A0A0K6HZ39_9BURK NADPH-dependent 7-cyano- 7-deazaguanine reductase OS=Thiomonas bhubaneswarensis OX=339866 GN=queF PE=3 SV=1
MTTKPSKTLQTFPNPAPGRDYHIHMQVPEFTCLCPLTGQPDFARFDIDFIPDKKCVELKSLKLYMWSYRDEGAFHEKVTNTILDDLVKAMSPRFLRVTARWYVRGGIYTSVVVEHRKRGWKPAPRVDLTQFDAADPTAA

SEQ ID NO: 50425 - protein, 141 aa, Thiomonas delicata
  misc_feature (1)..(141): tr|A0A238D7V9|A0A238D7V9_THIDL NADPH-dependent 7-cyano- 7-deazaguanine reductase OS=Thiomonas delicata OX=36403 0 GN=queF PE=3 SV=1
MSTQPSKTLQTFPNPAPERDYHIHMQVPEFTCLCPLTGQPDFARIVLDIIPDKKCVELKSLKLYMWSYRNEGAFHEKVTNTILDDLVKALSPRFARVTAQWYVRGGIYTNVVVEHHKRGWKPKPRVDLGQFDPAQPAAMGG

SEQ ID NO: 50426 - protein, 139 aa, Thiomonas intermedia
  misc_feature (1)..(139): tr|D5X274|D5X274_THIK1 NADPH-dependent 7-cyano-7-deazag uanine reductase OS=Thiomonas intermedia (strain K12) O X=75379 GN=queF PE=3 SV=1
MTTKPSKSLQTFPNPAPERDYHIHMQVPEFTCLCPLTGQPDFARFDIDFIPDKKCVELKSLKLYMWSYRDEGAFHEKVTNAILDDLVKAMSPRFLRVTARWYVRGGIYTNVVVEHRKRGWKPTPRVDLTQFDAAEPAAN

SEQ ID NO: 50427 - protein, 141 aa, Thiomonas sp.; identical to SEQ ID NO: 50425
  misc_feature (1)..(141): tr|A0A259PBV9|A0A259PBV9_9BURK NADPH-dependent 7-cyano- 7-deazaguanine reductase OS=Thiomonas sp. 15-66-11 OX=1 970452 GN=queF PE=3 SV=1

SEQ ID NO: 50428 - protein, 139 aa, Thiomonas sp.; identical to SEQ ID NO: 50426
  misc_feature (1)..(139): tr|A0A078BM10|A0A078BM10_9BURK NADPH-dependent 7-cyano- 7-deazaguanine reductase OS=Thiomonas sp. CB2 OX=554131 GN=queF PE=3 SV=1

SEQ ID NO: 50429 - protein, 130 aa, Thioploca ingrica
  misc_feature (1)..(130): tr|A0A090AJ65|A0A090AJ65_9GAMM NADPH-dependent 7-cyano- 7-deazaguanine reductase OS=Thioploca ingrica OX=40754 GN=queF PE=3 SV=1
MPTQSSKILETFANPHWQRDYTIHIRIPEFTCLCPKTGQPDFATLFLDYVPDKLCLELKALKNYIWSYRNEGTFHETVTNQILTDLVQACPPRFMRLRAEFNVRGGIYTTIVVEHQAPGWIPPMPVHLPS

SEQ ID NO: 50430 - protein, 276 aa, Thiopseudomonas denitrificans
  misc_feature (1)..(276): tr|A0A4R6U6L9|A0A4R6U6L9_9GAMM NADPH-dependent 7-cyano- 7-deazaguanine reductase OS=Thiopseudomonas denitrifica ns OX=1501432 GN=queF PE=3 SV=1
MLHPAEHSLLGKQTRYKSRYDASLLFAIERRVKWEQFGLDGSQLPYLGVDIWTAYELSWLLPSGKPVVAMAEVEVPADSPNIIESKSFKLYLNSFNQSVFADTHAVCSLMEHDLSAVAGAAVRVRMLDLDQATAQGLAVLPGACIDGLEIDIGQYHEPDAGLLQTSEQVAHEQLHSHLLRSCCPVTGQPDWGSVAIDYQGTKKLCRAGLLRYLVSFREHQDFHEQCVERIFLDLHRLLEPERLTVHARYLRRGGLDINPYRSTHQAPWDTGRLVRQ

SEQ ID NO: 50431 - protein, 129 aa, Thiorhodococcus drewsii
  misc_feature (1)..(129): tr|G2E1Z1|G2E1Z1_9GAMM NADPH-dependent 7-cyano-7-deazag uanine reductase OS=Thiorhodococcus drewsii AZ1 OX=7659 13 GN=queF PE=3 SV=1
MPSVPSKSLEIFPNPQPERDYTIRIRVPEFTCLCPKTGQPDFAELTLEYIAEQHCVELKSLKTYVWSYRDEGAFHEAVTNRILDDLVEATQPRFMRLTADFNVRGGIYTTVVAEHRASGWQAPTPVSLP

SEQ ID NO: 50432 - protein, 117 aa, Thiorhodospira sibirica
  misc_feature (1)..(117): tr|G4E267|G4E267_9GAMM NADPH-dependent 7-cyano-7-deazag uanine reductase OS=Thiorhodospira sibirica ATCC 700588 OX=765914 GN=queF PE=3 SV=1
MSASSTAVLETFPNPAPERDYTIEMRIPEFTCLCPKTGQPDFATLELSYIPDALCVELKSLKLYVWSFRDQGAFHEAITNRILEDLVTLLQPRFMRLSAIFNVRGGIYTTVTVEHRQ

SEQ ID NO: 50433 - protein, 129 aa, Thiorhodovibrio sp.
  misc_feature (1)..(129): tr|H8Z402|H8Z402_9GAMM NADPH-dependent 7-cyano-7-deazag uanine reductase OS=Thiorhodovibrio sp. 970 OX=631362 G N=queF PE=3 SV=1
MPSEPSKTLETFPNPQPQRDYSIRIQVPEFTCLCPKTGQPDFAELMIEYVPDALCVELKSLKLYVWSFRDEGHFHEDVTNRILDDVVAALSPRFIRLTAEFNVRGGIYTTVVAEHRAPGWTPAEPVRLS

SEQ ID NO: 50434 - protein, 129 aa, Thiothrix caldifontis
  misc_feature (1)..(129): tr|A0A1H3YB51|A0A1H3YB51_9GAMM NADPH-dependent 7-cyano- 7-deazaguanine reductase OS=Thiothrix caldifontis OX=52 5918 GN=queF PE=3 SV=1
MSTRPSKDLETFPNPNPQRDYTIRIDMPEFTCICPKTGQPDFAQFKLEYVPDQKNVELKSLKLYMWSYREEGAFHEAVTNKILEDLVAATEPRFMRLTGVWNVRGGIYTTVVVEHHQAGWQPAPKVELP

SEQ ID NO: 50435 - protein, 129 aa, Thiothrix lacustris
  misc_feature (1)..(129): tr|A0A1Y1QKG0|A0A1Y1QKG0_9GAMM NADPH-dependent 7-cyano- 7-deazaguanine reductase OS=Thiothrix lacustris OX=5259 17 GN=queF PE=3 SV=1
MSTRPSKELDTFPNPNPQRDYTIRIDLPEFTCVCPKTGQPDFAQFKLEYVAADKCVELKSLKLYMWSYREEGAFHEAVTNKILEDLVAATDPRFMRLTGVWNVRGGVYTTVIVEHRQAGWQPAPKVELP

SEQ ID NO: 50436 - protein, 129 aa, Thiothrix lacustris
  misc_feature (1)..(129): tr|A0A1Y1Q9V7|A0A1Y1Q9V7_9GAMM NADPH-dependent 7-cyano- 7-deazaguanine reductase OS=Thiothrix lacustris OX=5259 17 GN=queF PE=3 SV=1
MSTRPSKDLETFPNPNPQRDYTIRIDLPEFTCICPKTGQPDFAQFKIEYVPDGKCVELKALKLYMWSYREEGAFHEAVTNKILEDLVAATEPRFMRLTGVWNVRGGVYTTVIVEHRKAGWQPAPKVELP

SEQ ID NO: 50437 - protein, 154 aa, Thiothrix sp.
  misc_feature (1)..(154): tr|A0A5C7QKV8|A0A5C7QKV8_9GAMM NADPH-dependent 7-cyano- 7-deazaguanine reductase OS=Thiothrix sp. OX=1032 GN=qu eF PE=3 SV=1
MNELIYQNLSQLGSATKLPESPENAILESVQNPQADVNYVVRFTAPEFTSLCPITGQPDFAHLVIDYIPDQRLVESKSLKLFLGSFRNHGAFHEDCTISIARRLIAEIQPKWLRIGGYWYPRGGMPIDVFFAQGEIPKGVWIPEQGVAGYRGRG

SEQ ID NO: 50438 - protein, 154 aa, Thiothrix sp.
  misc_feature (1)..(154): tr|A0A5C7R6S7|A0A5C7R6S7_9GAMM NADPH-dependent 7-cyano- 7-deazaguanine reductase OS=Thiothrix sp. OX=1032 GN=qu eF PE=3 SV=1
MNETIYQNLSQLGGATKLPESPETAVLESVQNPQADVDYVVRFTAPEFTSLCPITGQPDFAHLVIDYIPDQRLVESKSLKLFLGSFRNHGAFHEDCTVSIARRLIAEIKPKWLRIGGYWYPRGGIPIDVFFAQGEIPKGVWIPEQGVAGYRGRG

SEQ ID NO: 50439 - protein, 129 aa, Thiotrichaceae bacterium
  misc_feature (1)..(129): tr|A0A2A5GA00|A0A2A5GA00_9GAMM NADPH-dependent 7-cyano- 7-deazaguanine reductase OS=Thiotrichaceae bacterium OX =2030882 GN=queF PE=3 SV=1
MASKPSKELEIFDNPTPERDYTIRISLPEFTCLCPKTGQPDFATLDLEYVPDKSCIELKALKMYIWSFRDEGTFHEAVTNSILSDLVAACDPRFMRLTAEFNVRGGVYTSIVAEHKNPDWTAPAVVTLP

SEQ ID NO: 50440 - protein, 129 aa, Thiotrichaceae bacterium
  misc_feature (1)..(129): tr|A0A2A4WIS5|A0A2A4WIS5_9GAMM NADPH-dependent 7-cyano- 7-deazaguanine reductase OS=Thiotrichaceae bacterium OX =2030882 GN=queF PE=3 SV=1
MSSTPSKALETFENPNQDRDYTIRIRIPEFTCLCPKTGQPDFATINIDYVPEQSCIELKALKMYIWSFRDQGAFHEAVTNQMLNDFVAACDPRFMRVTAEFNVRGGVYTNVIAEHRHPDWIAPEPVHLP

SEQ ID NO: 50441 - protein, 271 aa, Thiotrichales bacterium
  misc_feature (1)..(271): tr|A0A259KC69|A0A259KC69_9GAMM NADPH-dependent 7-cyano- 7-deazaguanine reductase OS=Thiotrichales bacterium 34- 46-19 OX=1970605 GN=queF PE=3 SV=1
MSAIEQSQLGHHTHYPTHYDPSLLFAVPRALNRAQLSPSPMQGVDVWTAYELSWLNAQGLPQVAIAEFSIPASSPNLIESKSFKLYLNSLNAHKFSDSHAMMTQVTHDLSGCAGAMVTMRLHDVNHLSIGQLPGQCLDKLPVNINSYTPDPALLSLDPHLSGDGCWHSHLLKSNCPVTNQPDWGSVVIEMRALKLPKAESLLAYIVSYRDHQGFHEHCVESIYSDLWHTFQPERLTVYARYVRRGGLDINPWRCHDKHAPTWPVMPRLARQ

SEQ ID NO: 50442 - protein, 129 aa, Thiotrichales bacterium; identical to SEQ ID NO: 50440
  misc_feature (1)..(129): tr|A0A2A4RVE9|A0A2A4RVE9_9GAMM NADPH-dependent 7-cyano- 7-deazaguanine reductase OS=Thiotrichales bacterium OX= 2026796 GN=queF PE=3 SV=1

SEQ ID NO: 50443 - protein, 131 aa, Bathymodiolus puteoserpentis
  misc_feature (1)..(131): tr|A0A483ALA5|A0A483ALA5_9BACT NADPH-dependent 7-cyano- 7-deazaguanine reductase OS=thiotrophic endosymbiont of Bathymodiolus puteoserpentis (Logatchev) OX=343240 GN= queF PE=3 SV=1
MSSQASKTLEVFDNPNRARDYVIQIELPEFTCLCPKTGQPDFATLHLEYIADKDCVELKSLKMYVWSFRDEGAFHEAVTNQILEDLVAATNPRFMRLKAIFNVRGGVYTTVIAEHQQSGWQPKPSVDLKHI

SEQ ID NO: 50444 - protein, 126 aa, Thiovulum sp.
  misc_feature (1)..(126): tr|J0UY58|J0UY58_9HELI NADPH-dependent 7-cyano-7-deazag uanine reductase OS=Thiovulum sp. ES OX=1177931 GN=queF PE=3 SV=1
MKYGEKEIAEFNPETDLEIWENTNENRFAIKIELPEFSNLCPRSGYPDYATIYLEYIPNEFVVELKALKLYMNTFRNRYISHENSANEIFSILVKKLKPHYLKITADFYPRGNVHTVIEIDTDMQK

SEQ ID NO: 50445 - protein, 299 aa, Tibeticola sediminis
  misc_feature (1)..(299): tr|A0A3N4US04|A0A3N4US04_9BURK NADPH-dependent 7-cyano- 7-deazaguanine reductase OS=Tibeticola sediminis OX=191 7811 GN=queF PE=3 SV=1
MNPSPSKHPSESSSPAAQDLRPEQSPLGKPARYCDRYDPSLLFPLPRAPKRAEIGITGAPPFGGADLWTAYEVSWLNPRGKPQVAIAHITVPAESTHIVESKSFKLYLNSYNNTRFDDAEAVRTRLREDLSAAVWQGGPVRASVGVRLLGPEAFDAQPIHELDGLSLDRLDVECTHDTPAPELLRAAFDEQPVEETLVSHLLKSNCLVTGQPDWASVQIHYSGPQIDQEGLLRYLVSFRNHNEFHEQCVERIFMDLWTRCKPAKLTVYARYTRRGGLDINPWRSSHPAPLPANVRTARQ

SEQ ID NO: 50446 - protein, 165 aa, Tissierella creatinophila
  misc_feature (1)..(165): tr|A0A1U7M725|A0A1U7M725_TISCR NADPH-dependent 7-cyano- 7-deazaguanine reductase OS=Tissierella creatinophila D SM 6911 OX=1123403 GN=queF PE=3 SV=1
MFERKAEELEGVTLLGNQGTSYDYNYNPSFLETFENKHRENDYFVKFNSPEFTSLCPKTGQPDFASIYISYVPDVLMVESKSLKLYLFSFRNHGDFHEDCMNIIMKDLIKLLDPKYIEVWGRFTPRGGISIDPYCNYGKKGTKWQDVAEKRLFYHDMNPENINNR

SEQ ID NO: 50447 - protein, 165 aa, Tissierella sp.
  misc_feature (1)..(165): tr|A0A265Q4T4|A0A265Q4T4_9FIRM NADPH-dependent 7-cyano- 7-deazaguanine reductase OS=Tissierella sp. P1 OX=12804 83 GN=queF PE=3 SV=1
MSGRKEQELEGITLLGNQGTSYNYNYNPSVLETFENKHKENDYFVKFNCPEFTSLCPKTGQPDFASVYISYVPERLMVESKSLKLYLFSFRNHGDFHEDCMNIIMKDLISLLDPKYIEVWGKFTPRGGISIDPYCNYGKEGTKWKDVAEKRLFYHDMNPENINNR

SEQ ID NO: 50448 - protein, 151 aa, Tistlia consotensis
  misc_feature (1)..(151): tr|A0A1Y6CL22|A0A1Y6CL22_9PROT NADPH-dependent 7-cyano- 7-deazaguanine reductase OS=Tistlia consotensis USBA 35 5 OX=560819 GN=queF PE=3 SV=1
MTGEELTQLGRSVQAPASPDEAVLERVPNGNPDLDFLARFTCPEFTALCPVTGQPDFAHLVIDYVPDRWLVESKSLKLYLAAFRNEGCFHEDTTLRIARRIVAAVAPRWLRIGGYWYPRGGIPIDVFWQSGPPPAGLWLPDQGVPPYRGRG

SEQ ID NO: 50449 - protein, 157 aa, Tistrella mobilis
  misc_feature (1)..(157): tr|I3TQ97|I3TQ97_TISMK NADPH-dependent 7-cyano-7-deazag uanine reductase OS=Tistrella mobilis (strain KA081020- 065) OX=1110502 GN=queF PE=3 SV=1
MTGPSETIYAGLEQLGRSTDLPASPDQAVLERVANPHPGTRYAVRFVCPEFTSLCPITGQPDFAHLVIDYVPGDWLVESKSLKLYLHAFRNHGDFHEACTVGIGKRLAELLAPEWLRIGGYWYPRGGIPIDVFYATGPVPADLWIPDQGVPPYRGRG

SEQ ID NO: 50450 - protein, 159 aa, Tistrella mobilis
  misc_feature (1)..(159): tr|A0A161R5H3|A0A161R5H3_9PROT NADPH-dependent 7-cyano- 7-deazaguanine reductase OS=Tistrella mobilis OX=171437 GN=queF PE=3 SV=1
MPVTGPSETIYAGLEQLGRSTDLPASPDQAVLERVANPHPGTRYAVRFVCPEFTSLCPITGQPDFAHLVIDYVPGDWLVESKSLKLYLHAFRNHGDFHEACTVGIGKRLAELLAPEWLRIGGYWYPRGGIPIDVFYATGPVPADLWIPDQGVPPYRGRG

SEQ ID NO: 50451 - protein, 157 aa, Tistrella sp.; identical to SEQ ID NO: 50449
  misc_feature (1)..(157): tr|A0A2D8QHC6|A0A2D8QHC6_9PROT NADPH-dependent 7-cyano- 7-deazaguanine reductase OS=Tistrella sp. OX=2024861 GN =queF PE=3 SV=1

SEQ ID NO: 50452 - protein, 159 aa, Tistrella sp.; identical to SEQ ID NO: 50450
  misc_feature (1)..(159): tr|A0A2E3ETB1|A0A2E3ETB1_9PROT NADPH-dependent 7-cyano- 7-deazaguanine reductase OS=Tistrella sp. OX=2024861 GN =queF PE=3 SV=1

SEQ ID NO: 50453 - protein, 283 aa, Tolumonas auensis
  misc_feature (1)..(283): sp|C4L9Z3|QUEF_TOLAT NADPH-dependent 7-cyano-7-deazagua nine reductase OS=Tolumonas auensis (strain DSM 9187 / TA4) OX=595494 GN=queF PE=3 SV=1
MSHASPYENNPLLANLTLGQKTDYIAEYSPQLLQPVPRQLNRDALNLAGNLPFHGEDLWTLYEISWLNNKGKPVVAIGEARIDAGSINLIESKSFKLYLNSFNQTRFADLATVRHTLEQDLSKCAEGAIKVALYPLSEAAHHIGTFPGECIDDLDIVIDEYHFSSDWLEQAGDNHTIVEETLHSHLLKSNCLVTGQPDWGSVVIHYKGPRINREKMLRYLISFRQHNEFHEQCVERIFVDLQRHCQPEKLTVYARYTRRGGLDINPFRSNWETAPANMRLIRQ

SEQ ID NO: 50454 - protein, 125 aa, Tolypothrix bouteillei
  misc_feature (1)..(125): tr|A0A0C1NC44|A0A0C1NC44_9CYAN NADPH-dependent 7-cyano- 7-deazaguanine reductase OS=Tolypothrix bouteillei VB52 1301 OX=1479485 GN=queF PE=3 SV=1
MEMKYGERNIAEGELITFPNPRVGRRYNIDITLPEFTCKCPFSGYPDFATIYITYIPDERVVELKALKLYINNYRDRYISHEETANQILDDFVAVCDPLEVVVKADFAPRGNVHMVVEVKHQKNN

SEQ ID NO: 50455 - protein, 123 aa, Tolypothrix campylonemoides
  misc_feature (1)..(123): tr|A0A0C2LRR8|A0A0C2LRR8_9CYAN NADPH-dependent 7-cyano- 7-deazaguanine reductase OS=Tolypothrix campylonemoides VB511288 OX=1245935 GN=queF PE=3 SV=1
MEMKYGERNIAEGQLITFPNPRIGRRYDINITLPEFTCKCPFSGYPDFATIHVSYIPNERVVELKALKLYINSYRDRYISHEETANQILDDFVAACDPLEVTVKADFTPRGNVHTVISVRHQK

SEQ ID NO: 50456 - protein, 134 aa, Tolypothrix sp.; identical to SEQ ID NO: 46075
  misc_feature (1)..(134): tr|A0A0D6KHX0|A0A0D6KHX0_9CYAN NADPH-dependent 7-cyano- 7-deazaguanine reductase OS=Tolypothrix sp. PCC 7601 OX =1188 GN=queF PE=3 SV=1

SEQ ID NO: 50457 - protein, 136 aa, Tolypothrix sp.
  misc_feature (1)..(136): tr|A0A218QHG3|A0A218QHG3_9CYAN NADPH-dependent 7-cyano- 7-deazaguanine reductase OS=Tolypothrix sp. NIES-4075 O X=2005459 GN=queF PE=3 SV=1
MTNSLPETASESSPEKKYGEREIAEGQLIIFPNPRVGRRYNINISLPEFTCKCPFSGYPDFATIYISYVPDERVVELKALKLYINSYRDRYISHEESANQILDDFVAACDPLEVTVKADFTPRGNVHTVVEVHHQK

SEQ ID NO: 50458 - protein, 131 aa, Tolypothrix tenuis; identical to SEQ ID NO: 44147
  misc_feature (1)..(131): tr|A0A1Z4MVN5|A0A1Z4MVN5_9CYAN NADPH-dependent 7-cyano- 7-deazaguanine reductase OS=Tolypothrix tenuis PCC 7101 OX=231146 GN=queF PE=3 SV=1

SEQ ID NO: 50459 - protein, 281 aa, Trabulsiella guamensis
  misc_feature (1)..(281): tr|A0A085A8A8|A0A085A8A8_9ENTR NADPH-dependent 7-cyano- 7-deazaguanine reductase OS=Trabulsiella guamensis ATCC 49490 OX=1005994 GN=queF PE=3 SV=1
MSSYENHQALAGLTLGKATDYRDTYDASLLQGVPRSLNRDPLGLHADNLPFHGADIWTLYELSWLNAKGLPQVAVGHVELDNTTVNLVESKSFKLYLNSFNQTRFADQEAVRTTLERDLSACAQGKVSVALYRLEEIEGQPVAHFNGTCIDDQDIDIDNYQFSADYLQGAASGKRTEETLVSHLLKSNCLITHQPDWGSVQIQYRGAKIDREKLLRYLVSFRHHNEFHEQCVERIFNDIMRFCQPETLSVYARYTRRGGLDINPWRSNTDFAPATGRLARQ

SEQ ID NO: 50460 - protein, 281 aa, Trabulsiella odontotermitis
  misc_feature (1)..(281): tr|A0A0L0H116|A0A0L0H116_9ENTR NADPH-dependent 7-cyano- 7-deazaguanine reductase OS=Trabulsiella odontotermitis OX=379893 GN=queF PE=3 SV=1
MSSYENHQALAGLTLGKTTDYRDTYDASLLQGVPRSLNRDPLGLHADSLPFHGADIWTLYELSWLNAKGLPQVAVGHVELDDTTANLVESKSFKLYLNSFNQTRFADWDAVRSTLERDLSACAQGKVTVALYRLDEVEGQPVAHFHGTCIDSQDIEIDNYQFSADYLQDAASGHIVEETLVSHLLKSNCLITHQPDWGSVQIQYRGAKIDREKLLRYLVSFRHHNEFHEQCVERIFNDILRFCQPETLSVYARYTRRGGLDINPWRSNTDFSPATGRLARQ

SEQ ID NO: 50461 - protein, 154 aa, Tranquillimonas sp.
  misc_feature (1)..(154): tr|A0A438ALB8|A0A438ALB8_9RHOB NADPH-dependent 7-cyano- 7-deazaguanine reductase OS=Tranquillimonas sp. M0103 O X=2486419 GN=queF PE=3 SV=1
MTDDIYADLTQLGGATRVPASPEAARLERVRNPQADVSYNVRFTAPEFTSLCPMTGQPDFAHLVIDYVPGDRLVESKSLKLYLTAFRNHGAFHEDCTISIARRLVACLDPLWLRIGGYWYPRGGIPIDVFWQTGPVPEGVWIPDQGVPPYRGRG

SEQ ID NO: 50462 - protein, 158 aa, Treponema saccharophilum
  misc_feature (1)..(158): tr|H7EGX6|H7EGX6_9SPIO NADPH-dependent 7-cyano-7-deazag uanine reductase OS=Treponema saccharophilum DSM 2985 O X=907348 GN=queF PE=3 SV=1
MRSESELSGVTLLGAGKTEYAYDYNPALLERFPNKHPGNDYMVTLNCPEFTSLCPKTGQPDFAEIRINYIPDQFIVESKSLKLYLFSFRNHGDFHEDCANIIMKDLVSLLEPKYIEVEGIFTPRGGISIYPFANYGKPDTPYELRARERLFSAIDRRR

SEQ ID NO: 50463 - protein, 161 aa, Treponema sp.
  misc_feature (1)..(161): tr|A0A353S7L0|A0A353S7L0_9SPIO NADPH-dependent 7-cyano- 7-deazaguanine reductase OS=Treponema sp. OX=166 GN=que F PE=3 SV=1
MRSASELEGVTLLGGSTTYVTDYSPEILEKFPNKHPVNDYMVTFNCPEFTSLCPKTGQPDFAEIHINYIPDGFLVESKSLKLYLFSFRNHGDFHEDCVNIIMKDLVRLLEPKYLEVEGIFTPRGGISIYPFANYGRAGTRYASIAEERLFAAVDRRPVSHR

SEQ ID NO: 50464 - protein, 156 aa, Treponema sp.
  misc_feature (1)..(156): tr|A0A351Z1E5|A0A351Z1E5_9SPIO NADPH-dependent 7-cyano- 7-deazaguanine reductase OS=Treponema sp. OX=166 GN=que F PE=3 SV=1
MRTDEELKGVTLLGGSTSYNRDYSPEILEKFPNKHPENDYMVTFNCPEFTSLCPKTGQPDFAEIKINYIPGPFLVESKSLKLYLFSFRNHGDFHEDCVNIIMKDLVKLLDPKYLEVKGIFTPRGGISIYPFANYAKKGSPYENTAKERLFSSLSSN

SEQ ID NO: 50465 - protein, 166 aa, Trichococcus collinsii
  misc_feature (1)..(166): tr|A0A143Z496|A0A143Z496_9LACT NADPH-dependent 7-cyano- 7-deazaguanine reductase OS=Trichococcus collinsii OX=1 57076 GN=queF PE=3 SV=1
MTAGRNEADLNGITQLGNQQTKYPQDYDPKVLETFPNKHPDNDYFVKFNCPEFTSLCPMTGQPDFATIYISYVPGEIMVESKSLKLYLFSFRNHGDFHEDCMNIIMKDLIALMAPKYIEVWGKFTPRGGISIDPYCNYGKPGTKWADVAWQRLAQHDLYPEKVDNR

SEQ ID NO: 50466 - protein, 166 aa, Trichococcus flocculiformis
  misc_feature (1)..(166): tr|A0A143YS34|A0A143YS34_9LACT NADPH-dependent 7-cyano- 7-deazaguanine reductase OS=Trichococcus flocculiformis OX=82803 GN=queF PE=3 SV=1
MTAGRNEADLNGITQLGNQQTKYPQDYDPKVLETFPNKHPDNDYFVKFNCPEFTSLCPMTGQPDFATIYISYVPGEIMVESKSLKLYLFSFRNHGDFHEDCMNIIMKDLIALMAPKYIEVWGKFTPRGGISIDPYCNYGKPDTRWADVAWQRLAQHDLYPEKVDNR

SEQ ID NO: 50467 - protein, 166 aa, Trichococcus ilyis
  misc_feature (1)..(166): tr|A0A143Z6I7|A0A143Z6I7_9LACT NADPH-dependent 7-cyano- 7-deazaguanine reductase OS=Trichococcus ilyis OX=64093 8 GN=queF PE=3 SV=1
MTAGRNEADLNGITQLGNQQTKYPQDYAPEVLETFPNKHPDNDYFVKFNCPEFTSLCPMTGQPDFATIYISYVPGEIMVESKSLKLYLFSFRNHGDFHEDCMNIIMKDLIALMAPKYIEVWGKFTPRGGISIDPYCNYGKPDTKWADVAWQRLAQHDLYPEKVDNR

SEQ ID NO: 50468 - protein, 166 aa, Trichococcus palustris
  misc_feature (1)..(166): tr|A0A143YM30|A0A143YM30_9LACT NADPH-dependent 7-cyano- 7-deazaguanine reductase OS=Trichococcus palustris OX=1 40314 GN=queF PE=3 SV=1
MPSGRKEKELTGITQLGNQQTKYQQDYAPEVLETFPNKHPDNDYFVKFNCPEFTSLCPMTGQPDFATIYISYVPGEIMVESKSLKLYLFSFRNHGDFHEDCMNIIMKDLITLMDPKYIEVWGKFTPRGGISIDPYCNYGKPGTKWEDVAWQRLSQHDLYPEKVDNR

SEQ ID NO: 50469 - protein, 166 aa, Trichococcus pasteurii
  misc_feature (1)..(166): tr|A0A1W1IDY2|A0A1W1IDY2_9LACT NADPH-dependent 7-cyano- 7-deazaguanine reductase OS=Trichococcus pasteurii OX=4 3064 GN=queF PE=3 SV=1
MTAGRNEADLNGITQLGNQQTKYPQDYDPKVLETFPNKHPDNDYFVKFNCPEFTSLCPMTGQPDFATIYISYVPGEIMVESKSLKLYLFSFRNHGDFHEDCMNIIMKDLIALMAPKYIEVWGKFTPRGGISIDPYCNYGKPDTKWEDVAWQRLAQHDLYPEKVDNR

SEQ ID NO: 50470 - protein, 166 aa, Trichococcus patagoniensis
  misc_feature (1)..(166): tr|A0A2T5IBA1|A0A2T5IBA1_9LACT NADPH-dependent 7-cyano- 7-deazaguanine reductase OS=Trichococcus patagoniensis OX=382641 GN=queF PE=3 SV=1
MTAGRNEADLNGITQLGNQQTKYPQDYDPKVLETFPNKHPDNDYFVKFNCPEFTSLCPMTGQPDFATIYISYVPGEIMVESKSLKLYLFSFRNHGDFHEDCMNIIMKDLIALMAPKYIEVWGKFTPRGGISIDPYCNYGKPDTKWADVAWQRLAQHDLYPEKVDNR

SEQ ID NO: 50471 - protein, 166 aa, Trichococcus sp.
  misc_feature (1)..(166): tr|A0A383TBS8|A0A383TBS8_9LACT NADPH-dependent 7-cyano- 7-deazaguanine reductase OS=Trichococcus sp. ART1 OX=20 94020 GN=queF PE=3 SV=1
MTAGRNEADLNGITQLGNQQTKYPQDYDSKVLETFPNKHPDNDYFVKFNCPEFTSLCPMTGQPDFATIYISYVPGEIMVESKSLKLYLFSFRNHGDFHEDCMNIIMKDLIALMAPKYIEVWGKFTPRGGISIDPYCNYGQPGTKWADVAWQRLAQHDLYPEKVDNR

SEQ ID NO: 50472 - protein, 166 aa, Trichococcus sp.
  misc_feature (1)..(166): tr|A0A143Z2E3|A0A143Z2E3_9LACT NADPH-dependent 7-cyano- 7-deazaguanine reductase OS=Trichococcus sp. ES5 OX=872 292 GN=queF PE=3 SV=1
MTAGRNEADLNGITQLGNQQTKYPQDYDPKVLETFPNKHPDNDYFVKFNCPEFTSLCPMTGQPDFATIYISYVPGEIMVESKSLKLYLFSFRNHGDFHEDCMNIIMKDLIALMVPKYIEVWGKFTPRGGISIDPYCNYGKPDTRWADVAWQRLAQHDLYPEKVDNR

SEQ ID NO: 50473 - protein, 141 aa, Trichodesmium erythraeum
  misc_feature (1)..(141): sp|Q113I7|QUEF_TRIEI NADPH-dependent 7-cyano-7-deazagua nine reductase OS=Trichodesmium erythraeum (strain IMS1 01) OX=203124 GN=queF PE=3 SV=1
MNYDETNNELFQESNMQELKYGERNILEGELITFPNPRIGRRYEINISLPEFTCKCPFSGYPDFATIHIKYIPNERVVELKAIKLYINSYRERYISHEESVNQILDDFVAACDPLEVKIKGDFLPRGNVHTTIEVEHYKAS

SEQ ID NO: 50474 - protein, 136 aa, Trichormus variabilis; identical to SEQ ID NO: 47769
  misc_feature (1)..(136): tr|A0A1Z4KT31|A0A1Z4KT31_ANAVA NADPH-dependent 7-cyano- 7-deazaguanine reductase OS=Trichormus variabilis NIES- 23 OX=1973479 GN=queF PE=3 SV=1

SEQ ID NO: 50475 - protein, 136 aa, Trichormus variabilis
  misc_feature (1)..(136): sp|Q3M4S2|QUEF_TRIV2 NADPH-dependent 7-cyano-7-deazagua nine reductase OS=Trichormus variabilis (strain ATCC 29 413 / PCC 7937) OX=240292 GN=queF PE=3 SV=1
MSNSSPETVSQPSQEVKYGEREIAEGQLITFPNPRVGRRYDINITLPEFTCKCPFSGYPDFATIYITYVPDERVVELKALKLYINSYRDRYISHEESANQILDDFVAACDPLEATVKADFTPRGNVHTVVEVKHRK

SEQ ID NO: 50476 - protein, 274 aa, Trinickia caryophylli
  misc_feature (1)..(274): tr|A0A1X7ESD9|A0A1X7ESD9_TRICW NADPH-dependent 7-cyano- 7-deazaguanine reductase OS=Trinickia caryophylli OX=28 094 GN=queF PE=3 SV=1
MTPEQSPLGKASSYTEQYDPTLLFPIARGIAREQIGIGARLPFFGTDIWNAYELSWLNARGKPQIAIATFFVPAESPNIVESKSFKLYLGSFAQTRVESADALREMLKRDVSAACGATVSVRLAAPSEFHALEFDELDGLSLDRLDLEADVYHPDPALLTAAHDEAPIEETVFSNLLKSNCPVTGQPDWGSVQIHYVGPQIDHAGLLRYIISYRNHTGFHEQCVERIFIDILRECRPVKLAVYARYTRRGGLDINPFRTNYNLPMPDNARTARQ

SEQ ID NO: 50477 - protein, 274 aa, Trinickia soli
  misc_feature (1)..(274): tr|A0A2N7WBA4|A0A2N7WBA4_9BURK NADPH-dependent 7-cyano- 7-deazaguanine reductase OS=Trinickia soli OX=380675 GN =queF PE=3 SV=1
MTPEHSPLGKSTTYTEQYDPALLFPIARGRAREAIGITAALPFFGTDIWNAYELSWLNARGKPQIAIATFFVPAESANIVESKSFKLYLGSFAQTRIESIDALRDTLKRDVSAACGATVSVRLSTPAEFAKLEFDELDGLSLDRLDLDADVYQPDPTLLKAALDEAPVEETLYSNLLKSNCPVTGQPDWGSVQIHYVGPQIDHAGLLRYIISYRSHTGFHEQCVERIFIDILRECRPVKLAVYARYTRRGGLDINPFRTNYNLPMPDNARTARQ

SEQ ID NO: 50478 - protein, 267 aa, Trinickia sp.
  misc_feature (1)..(267): tr|A0A4U1IG24|A0A4U1IG24_9BURK NADPH-dependent 7-cyano- 7-deazaguanine reductase OS=Trinickia sp. 7GSK02 OX=257 1161 GN=queF PE=3 SV=1
MELGKTSVYESKYNPERLFAIPRRPKREELGITGELLPFVGYDLWNHYEVSWLDQRGKPQVATAQIAYPCDSEFIIESKSMKLYFNSLNNTRFESIDVLRDTIAADLSSRLKANVSVVVNPLQDQMHRIISPLEGVCIDDAEIDVEDFALNPQYLETERWQAEEMLYSNLLKSNCLVTGQPDWGSVWIKYRGKKISREGLLRYIVSFREHHEFHEQCVERIFVDIMRMCEPASLTVGARYTRRGGIDINPVRSTQNQKIANPRLIRQ

SEQ ID NO: 50479 - protein, 275 aa, Trinickia sp.
  misc_feature (1)..(275): tr|A0A4U1I880|A0A4U1I880_9BURK NADPH-dependent 7-cyano- 7-deazaguanine reductase OS=Trinickia sp. 7GSK02 OX=257 1161 GN=queF PE=3 SV=1
MTPEHSPLGKTTTYSEQYDPTLLFPIPRSKAREEIGIGAQLPFFGTDIWNAYELSWLNPRGKPQIAIATFYIPADSPNIVESKSFKLYLGSFAQTQVESLDALRDMLKRDVSAAAGASVSVRLATPSAEFAKLKLEEFEGLSLDRLDLDADVYHPDPSLLKAALNEAPVEETLFSNLLKSNCPVTGQPDWGSVQVHYVGPQIDHAGLLRYIISYRSHTGFHEQCVERIFVDIMRECQPVKLAVYARYTRRGGLDINPFRTSYNLPMPDNARLARQ

SEQ ID NO: 50480 - protein, 274 aa, Trinickia symbiotica
  misc_feature (1)..(274): tr|A0A2T3XXL4|A0A2T3XXL4_9BURK NADPH-dependent 7-cyano- 7-deazaguanine reductase OS=Trinickia symbiotica OX=863 227 GN=queF PE=3 SV=1
MTPDQSPLGKPSSYTEQYDPTLLFPIARSLAREAIGIGAQLPFFGTDIWNAYELSWLNARGKPQIAIATFYVPAESPNIVESKSFKLYLGSFAQTRVESIDALREMLKRDVSAACGANVSVRLASPSEFGKLELDELDGLSLDRLDLETDVYHLEPSLLKAALEEAPVEETLFSNLLKSNCPVTGQPDWGSVQIHYVGPQIDQAGLLRYIISYRNHTGFHEQCVERMFVDILRECRPVKLAIYARYTRRGGLDINPFRTNFNLPMPDNARTARQ

SEQ ID NO: 50481 - protein, 274 aa, Trinickia symbiotica
  misc_feature (1)..(274): tr|A0A2N7X4A2|A0A2N7X4A2_9BURK NADPH-dependent 7-cyano- 7-deazaguanine reductase OS=Trinickia symbiotica OX=863 227 GN=queF PE=3 SV=1
MTPDQSPLGKPSSYTEQYDPTLLFPIARSLAREAIGIDAQVPFFGTDIWNAYELSWLNARGKPQIAIATFYVPAESPNIVESKSFKLYLGSFAQTRIESIDALREMLKRDVSAACGATVSVRLASPSEFGKLELDELDGLSLDRLDLETDVYHPESSLLKAALDEAPVEETLFSNLLKSNCPVTGQPDWGSVQIHYVGPQIDQAGLLRYIISYRNHTGFHEQCVERMFVDILRECRPVKLAIYARYTRRGGLDINPFRTNFNLPMPDNARTARQ

SEQ ID NO: 50482 - protein, 154 aa, Tropicibacter naphthalenivorans
  misc_feature (1)..(154): tr|A0A0P1G955|A0A0P1G955_9RHOB NADPH-dependent 7-cyano- 7-deazaguanine reductase OS=Tropicibacter naphthalenivo rans OX=441103 GN=queF PE=3 SV=1
MSEDIYSGLQQLGKQTEVPLAPEQAVLERVPNPEAGTRYCVRFTAPEFTSLCPMTGQPDFAHLVIDYVPGDWLVESKSLKLFLFSFRNHGAFHEACTVMIGKRIVDLLDPEWLRIGGYWYPRGGIPIDVFYQTGETPQGVWIPDQNVPTYRGRG

SEQ ID NO: 50483 - protein, 154 aa, Tropicibacter phthalicicus
  misc_feature (1)..(154): tr|A0A238JEX1|A0A238JEX1_9RHOB NADPH-dependent 7-cyano- 7-deazaguanine reductase OS=Tropicibacter phthalicicus OX=1037362 GN=queF PE=3 SV=1
MTDSIYSNLKQLGGDTILPSDPSQAELERVQNPQADTAYNVRFVAPEFTSLCPMTGQPDFAHLVIDYVPGDWLVESKSLKLFLGSFRNHGAFHEDCTVSIGRRLAEFLDPQWLRIGGYWYPRGGIPIDVFWQTGPMPEAVWIPDQGVPPYRGRG

SEQ ID NO: 50484 - protein, 124 aa, Tumebacillus algifaecis
  misc_feature (1)..(124): tr|A0A223D4Q9|A0A223D4Q9_9BACL NADPH-dependent 7-cyano- 7-deazaguanine reductase OS=Tumebacillus algifaecis OX= 1214604 GN=queF PE=3 SV=1
MSTEPTKTLDPVPNPHPEREYEVEIRCPEFTALCPKTGQPDFATIIVRYVPGPHIIELKSLKLYLWAFRDEGHFHEDVTNIILNDLVKALEPRWMQVEGEFNVRGGIYTNVKVEHNPEFKRSRA

SEQ ID NO: 50485 - protein, 124 aa, Tumebacillus avium
  misc_feature (1)..(124): tr|A0A1Y0IQQ8|A0A1Y0IQQ8_9BACL NADPH-dependent 7-cyano- 7-deazaguanine reductase OS=Tumebacillus avium OX=19037 04 GN=queF PE=3 SV=1
MSTKPTKTLDPVPNPHPEREYEVEIRCPEFTALCPKTGQPDFATITVRYVPGPHIIELKSLKLYLWAFRDEGHFHEDVTNIILNDLVASLQPRWMQVEGEFNVRGGIYTNVKVEHNPEYKRSRA

SEQ ID NO: 50486 - protein, 124 aa, Tumebacillus flagellatus
  misc_feature (1)..(124): tr|A0A074LT01|A0A074LT01_9BACL NADPH-dependent 7-cyano- 7-deazaguanine reductase OS=Tumebacillus flagellatus OX =1157490 GN=queF PE=3 SV=1
MSTKPSKELHPVPNPHPDRDYEVEIRCPEFTALCPVTGQPDFATITVRYVPGPKLIELKSLKLYLWTFREEGHFHEDVTNLILNDLVEALDPRWMEVEGDFNVRGGIYTKVKAEHNPEFRKTRG

SEQ ID NO: 50487 - protein, 124 aa, Tumebacillus permanentifrigoris
  misc_feature (1)..(124): tr|A0A316D6J7|A0A316D6J7_9BACL NADPH-dependent 7-cyano- 7-deazaguanine reductase OS=Tumebacillus permanentifrig oris OX=378543 GN=queF PE=3 SV=1
MTTKPSKELHPVPNPHPDRDYEVEIRCPEFTALCPVTGQPDFATIIVRYVPGPKLIELKSLKLYLWTFREEGHFHEDVTNMILNDLIEALDPRWMEVEGDFNVRGGIYTKVRAEHNPEFRKTRG

SEQ ID NO: 50488 - protein, 124 aa, Tumebacillus sp.
  misc_feature (1)..(124): tr|A0A4R2R1H7|A0A4R2R1H7_9BACL NADPH-dependent 7-cyano- 7-deazaguanine reductase OS=Tumebacillus sp. BK434 OX=2 512169 GN=queF PE=3 SV=1
MSTKPTKTLDPVPNPHPEREYEVEIRCPEFTALCPKTGQPDFATITVRYVPGPHIIELKSLKLYLWAFRDEGHFHEDVTNIILNDLVASLEPRWMQVEGEFNVRGGIYTNVRVEHNPEYKRSRA

SEQ ID NO: 50489 - protein, 165 aa, Turicibacter sanguinis
  misc_feature (1)..(165): tr|D4W841|D4W841_9FIRM NADPH-dependent 7-cyano-7-deazag uanine reductase OS=Turicibacter sanguinis PC909 OX=702 450 GN=queF PE=3 SV=1
MSGRKQEELSEITLLGNQGTTYTYSYDPEILEVFNNKHPKNDYFVKFNCPEFTSLCPITGQPDFATIYISYIPGEKMVESKSLKLYLFSFRNHGDFHEDCMNIIMEDLIKLMDPKYIEVWGKFTPRGGISIDPYCNYGRPGTKFEEMAQYRLMNHDLYPEKVDNR

SEQ ID NO: 50490 - protein, 165 aa, Turicibacter sanguinis
  misc_feature (1)..(165): tr|A0A173ZSN8|A0A173ZSN8_9FIRM NADPH-dependent 7-cyano- 7-deazaguanine reductase OS=Turicibacter sanguinis OX=1 54288 GN=queF PE=3 SV=1
MAGRTKEELKDITLLGNQGTTYQYSYDPTILEVFENKHPNNDYFVKFNCPEFTSLCPITGQPDFATIYISYIPGEKMVESKSLKLYLFSFRNHGDFHEDCMNIIMKDLVKLMDPKYIEVWGKFTPRGGISIDPYCNYGRPGTKYEQMANYRLMNHDLYPEKVDNR

SEQ ID NO: 50491 - protein, 165 aa, Turicibacter sp.
  misc_feature (1)..(165): tr|A0A0X8G3L6|A0A0X8G3L6_9FIRM NADPH-dependent 7-cyano- 7-deazaguanine reductase OS=Turicibacter sp. H121 OX=17 12675 GN=queF PE=3 SV=1
MAGRTKEELKDITLLGNQGTTYQYSYDPTILEVFENKHPNNDYFVKFNCPEFTSLCPITGQPDFATIYISYIPGEKMVESKSLKLYLFSFRNHGDFHEDCMNIIMKDLVKLMDPKYIEVWGKFTPRGGISIDPYCNYGRPGTKYEEMANYRLMNHDLYPEKVDNR

SEQ ID NO: 50492 - protein, 139 aa, Turicimonas muris
  misc_feature (1)..(139): tr|A0A227KQI3|A0A227KQI3_9BURK NADPH-dependent 7-cyano- 7-deazaguanine reductase OS=Turicimonas muris OX=179665 2 GN=queF PE=3 SV=1
MPTQPSKTLETFDNPQPNRDYLIHIEIPEFTSLCPLTGQPDFATLFLDYIPDKKNVELKALKLYIWSFREEGAFHEAITNKILDDLVEALQPRYMRLKAKWWVRGGIYTTVVAEHRKPGWAPQPMVELPEFETNDPTRG

SEQ ID NO: 50493 - protein, 129 aa, Turneriella parva
  misc_feature (1)..(129): tr|I4B7Z2|I4B7Z2_TURPD NADPH-dependent 7-cyano-7-deazag uanine reductase OS=Turneriella parva (strain ATCC BAA- 1111 / DSM 21527 / NCTC 11395 / H) OX=869212 GN=queF PE =3 SV=1
MAETAYEGRQGHIRALDLPKIDVFENIYPDRDYNIRLEFPEFTAICPKTGLPDFGVVTINYSPDKYCLELKSLKEYFLSYRTVGIFHENVVNRVLDDIILAADMRSAEISVVYNPRGGITTTVSRSYSR

SEQ ID NO: 50494 - protein, 121 aa, Tychonema bourrellyi
  misc_feature (1)..(121): tr|A0A2G4EVV8|A0A2G4EVV8_9CYAN NADPH-dependent 7-cyano- 7-deazaguanine reductase OS=Tychonema bourrellyi FEM_GT 703 OX=2040638 GN=queF PE=3 SV=1
MKYGEREILDGELITFPNPRIGRRYFVNITLPEFTCKCPFSGYPDFAAIHITYVPDERVVELKALKLYINSYRDRYISHEESINQILDDFVAACSPLEATIKGDFLPRGNVHTVIEVRHEK

SEQ ID NO: 50495 - protein, 279 aa, Uliginosibacterium sp.
  misc_feature (1)..(279): tr|A0A2N4XS24|A0A2N4XS24_9RHOO NADPH-dependent 7-cyano- 7-deazaguanine reductase OS=Uliginosibacterium sp. TH13 9 OX=2067453 GN=queF PE=3 SV=1
MNEKLVPENSPLGRATAYRSDYAPELLFPIPRKQKRDELGLDEAALPFTGEDLWNAYEISWLNPRGKPVVALGEFRVPAHSPRLIESKSLKLYLNSFNQTRMTDAEAVSATLARDLSQAAGASVRVSVQPLERRPRREIDYLQGECIDALDIEVAQYSPQPSLLRADPAQLVEDELLCSHLLKSNCLVTGQPDWGMVALRYSGPRIEREALLRYIISFREHNEFHEQCVERIFTDVLTRCAPRELAVWARYTRRGGLDINPFRSNRADWCAENLFEVRQ

SEQ ID NO: 50496 - protein, 279 aa, Umboniibacter marinipuniceus
  misc_feature (1)..(279): tr|A0A3M0A5H4|A0A3M0A5H4_9GAMM NADPH-dependent 7-cyano- 7-deazaguanine reductase OS=Umboniibacter marinipuniceu s OX=569599 GN=queF PE=3 SV=1
MSEINKIHEQIPLGKSTEYQSSYNPELLAPIPRELSRRNLEACQREMFGEDLWTAYEMSWLKPGGVPVVAVMRCYVPSTSSHIIESKSFKLYLNSYNGSEFESFGEVEGRLVADLSAAAGDTVHVVLESLALADSSLQVGTLTDVQCVDDLPITVSQYEPDASLLAVEQGTNVEEALCSHLLKSNCPVTSQPDWASVIIRYKGKKIVPESFLAYVISFREHQDFHEHCVERIYVDLMNRFNFDYLDVVARYTRRGGLDINPFRSSRADAPRIETRLVRQ

SEQ ID NO: 50497 - protein, 152 aa, Alphaproteobacteria bacterium
  misc_feature (1)..(152): tr|A0A212JLY9|A0A212JLY9_9PROT NADPH-dependent 7-cyano- 7-deazaguanine reductase OS=uncultured Alphaproteobacte ria bacterium OX=91750 GN=queF PE=3 SV=1
MTQETLTQLGHSAAAAARPEDAVLERVPWRGDDAPRTVVRFVCPEFTSLCPVTGQPDFAHLVIDYVPAQWLVESKSLKLFLQSFRNHGAFHESCTVMVGRRLVEVLDPVWLRIGGYWYPRGGIPIDVFWQTGPVPEGVWLPDQGVPPYRGRG

SEQ ID NO: 50498 - protein, 283 aa, Avibacterium sp.
  misc_feature (1)..(283): tr|A0A486XFW8|A0A486XFW8_9PAST NADPH-dependent 7-cyano- 7-deazaguanine reductase OS=uncultured Avibacterium sp. OX=1936169 GN=queF PE=3 SV=1
MDYNHESLHALKLGQETKYAQHYDRTLLQAVPRQLNRAQLGIVENQPFTFGADIWTAYEISWLNPKGVPQVAIADVEIDFRSENLIESKSFKLYLNSFNQSHFDSFEQVQQLLQQDLADCAKGQVKVRLNSLQNYHRTFIDSLQGDCIDDQDIEIRDYQFNPNYLEHCTHAEQHAEQVEEHLVSHLLKSNCLITQQPDWGSLQIHYVGKRIDREKLLRYLVSFRQHNEFHEQCVERIYCDLMRFAQPEKLTVYARYTRRGGLDINPFRSNFKTVPHNARLARQ

SEQ ID NO: 50499 - protein, 100 aa, Unknown
  misc_feature (1)..(100): tr|K1YVZ0|K1YVZ0_9BACT NADPH-dependent 7-cyano-7-deazag uanine reductase (Fragment) OS=uncultured bacterium OX= 77133 GN=ACD_75C01416G0003 PE=3 SV=1
MRKKLTTKSDLKHLTILGGKKGIPGRKLETFPNHHPERDYWVTMHTEEFTCVCPLTGQPDFAKLKIQYIPDKYVLESKSLKLYLRAFRNEGTFHEHVVNV

SEQ ID NO: 50500 - protein, 134 aa, Unknown
  misc_feature (1)..(134): tr|A0A059XD40|A0A059XD40_9BACT NADPH-dependent 7-cyano- 7-deazaguanine reductase OS=uncultured bacterium OX=771 33 GN=queF PE=3 SV=1
MPKPELLETFDNPYADRDYEIHMDCSEFTSLCPVGGIESDAAELALLKGGAPDFGTIRITYVPAAKCIELKSLKLYLWSFRNDGIFYERAVNRILDDLVASSSPKWMRVVGDFNLRGGIKSIITAVHGKAPIAK

SEQ ID NO: 50501 - protein, 151 aa, Bacteroides sp.
  misc_feature (1)..(151): tr|A0A1C6KVL7|A0A1C6KVL7_9BACE NADPH-dependent 7-cyano- 7-deazaguanine reductase OS=uncultured Bacteroides sp. OX=162156 GN=queF PE=3 SV=1
MTELKDQLSLLGRKTEYKQDYAPEVLEAFDNKHPENDYWVRFNCPEFTSLCPITGQPDFAEIRISYIPDIKMVESKSLKLYLFSFRNHGAFHEDCVNIIMKDLIHLMNPKYIEVTGLFTPRGGISIYPYANYGRPGTKYEGIAEQRLMNRE

SEQ ID NO: 50502 - protein, 151 aa, Bacteroides sp.; identical to SEQ ID NO: 44503
  misc_feature (1)..(151): tr|A0A1C5U0E6|A0A1C5U0E6_9BACE NADPH-dependent 7-cyano- 7-deazaguanine reductase OS=uncultured Bacteroides sp. OX=162156 GN=queF PE=3 SV=1

SEQ ID NO: 50503 - protein, 153 aa, Bacteroidetes bacterium
  misc_feature (1)..(153): tr|H5SNT7|H5SNT7_9BACT NADPH-dependent 7-cyano-7-deazag uanine reductase OS=uncultured Bacteroidetes bacterium OX=152509 GN=queF PE=3 SV=1
MYKPLGVSYLWAMPIRIADTRAEVRKPERRSILQTFPFQTEVPQVIHLHTEEFSAVCPGTGLPDIGTLDLWYIPKDRCIELKSLKLYLFSYRNEEIFQEPVADLIFEDLWAVLEPRYMRLSLRYNIRGGILTTVHLARGELVELPPEVRELLP

SEQ ID NO: 50504 - protein, 164 aa, Blautia sp.
  misc_feature (1)..(164): tr|A0A1C5TT98|A0A1C5TT98_9FIRM NADPH-dependent 7-cyano- 7-deazaguanine reductase OS=uncultured Blautia sp. OX=7 65821 GN=queF PE=3 SV=1
MSRENLEKEGITLLGNQKVKYPDNYAPEVLETFLNKHPDNDYFVKFNCPEFTSLCPITGQPDFATITISYVPGEKMVESKSLKLYLFSFRNHGDFHEDCVNIIMKDLIRLMDPKYIEVWGKFTPRGGISIDPYCNYGKTGTRWEEIAWKRLTEHDMYPEKIDNR

SEQ ID NO: 50505 - protein, 165 aa, Blautia sp.; identical to SEQ ID NO: 44645
  misc_feature (1)..(165): tr|A0A1C5TSQ4|A0A1C5TSQ4_9FIRM NADPH-dependent 7-cyano- 7-deazaguanine reductase OS=uncultured Blautia sp. OX=7 65821 GN=queF PE=3 SV=1

SEQ ID NO: 50506 - protein, 165 aa, Butyricicoccus sp.; identical to SEQ ID NO: 44870
  misc_feature (1)..(165): tr|A0A1C6GCP8|A0A1C6GCP8_9CLOT NADPH-dependent 7-cyano- 7-deazaguanine reductase OS=uncultured Butyricicoccus s p. OX=1193532 GN=queF PE=3 SV=1

SEQ ID NO: 50507 - protein, 282 aa, Citrobacter sp.; identical to SEQ ID NO: 45328
  misc_feature (1)..(282): tr|A0A212ILG2|A0A212ILG2_9ENTR NADPH-dependent 7-cyano- 7-deazaguanine reductase OS=uncultured Citrobacter sp. OX=200446 GN=queF PE=3 SV=1

SEQ ID NO: 50508 - protein, 160 aa, Clostridium sp.
  misc_feature (1)..(160): tr|A0A1C5TKT4|A0A1C5TKT4_9CLOT NADPH-dependent 7-cyano- 7-deazaguanine reductase OS=uncultured Clostridium sp. OX=59620 GN=queF PE=3 SV=1
MREKENLTLLGNQQTEYSMDYNPSVLEAFQNKHPENDYFVKFNCPEFTSLCPITGQPDFATITISYVPDERLVESKSLKLYLFSFRNHGDFHEDVINIIMKDLVKLLKPKYIEVWGKFLPRGGLSIDPYCNYGKPGTDWEQVAWNRMSNHDMFPERVDNR

SEQ ID NO: 50509 - protein, 156 aa, Clostridium sp.; identical to SEQ ID NO: 46039
  misc_feature (1)..(156): tr|A0A1C5UC00|A0A1C5UC00_9CLOT NADPH-dependent 7-cyano- 7-deazaguanine reductase OS=uncultured Clostridium sp. OX=59620 GN=queF PE=3 SV=1

SEQ ID NO: 50510 - protein, 164 aa, Coprococcus sp.
  misc_feature (1)..(164): tr|A0A1C5TLV4|A0A1C5TLV4_9FIRM NADPH-dependent 7-cyano- 7-deazaguanine reductase OS=uncultured Coprococcus sp. OX=458253 GN=queF PE=3 SV=1
MGRTAEEMEDVTLLGNKNVKYSMDYAPEMLQTFINKHQDNDYFVKFNCPEFTSLCPITGQPDFATVYISYVPDVKMVESKSLKLYLFSFRNHGDFHEDCMNIIMKDLIKLMDPKYIEVWGKFTPRGGISIDPYCNYGRPGTKWEEVAWNRMSNHDLYPEKIDNR

SEQ ID NO: 50511 - protein, 172 aa, Unknown
  misc_feature (1)..(172): tr|A0A212JUA9|A0A212JUA9_9DELT NADPH-dependent 7-cyano- 7-deazaguanine reductase OS=uncultured delta proteobact erium OX=34034 GN=queF PE=3 SV=1
MAATPKKKQKPVSPAKTAARSGAGKETAGLTKLGAPTSYRFDNPGPDLLEAFPNRYPDRDYVITFEHPEFTSLCPMTGQPDFATITVQYAPGTKCVESKSFKLYMCAFRNHGSFMESVTNKIADDLIAVLSPRRMTVIGQFNVRGGTDITVRVEHMDPALDKAAVQALRELW

SEQ ID NO: 50512 - protein, 151 aa, Desulfobacteraceae bacterium
  misc_feature (1)..(151): tr|A0A484HDN2|A0A484HDN2_9DELT NADPH-dependent 7-cyano- 7-deazaguanine reductase OS=uncultured Desulfobacterace ae bacterium OX=218296 GN=queF PE=3 SV=1
MNASLKTCEERFAMTEKKAAPKPPYAIEDPGSVKAGILDPIDYAYSGKRDIDIVIRQPEFTSVCPMTGLPDYATISVRYTPDQKIIELKSLKYYLLQYRNVGIFYEHVVNRILDDLCERIKPKRMEVTGEFTARGGIGARVSAAYPASDGG

SEQ ID NO: 50513 - protein, 138 aa, Desulfobacteraceae bacterium
  misc_feature (1)..(138): tr|A0A484HIH0|A0A484HIH0_9DELT NADPH-dependent 7-cyano- 7-deazaguanine reductase OS=uncultured Desulfobacterace ae bacterium OX=218296 GN=queF PE=3 SV=1
MTAKKAAPKPPYAIEDPGSVKAGILDPIDYAYSGKRDIDIVIRQPEFTSVCPMTGLPDYATISVRYTPDQKIIELKSLKYYLLQYRNVGIFYEHVVNRILDDLCERIKPKRMEVTGEFTARGGIDARVSAAYPASEGG

SEQ ID NO: 50514 - protein, 137 aa, Desulfobacterium sp.
  misc_feature (1)..(137): tr|E1Y8S0|E1Y8S0_9DELT NADPH-dependent 7-cyano-7-deazag uanine reductase OS=uncultured Desulfobacterium sp. OX= 201089 GN=queF PE=3 SV=1
MAKNKKLKPDYNANSPEDIKIDILDSMDYKYRQKRDIDIEIRQPEFTSVCPMTGLPDFGTIVIKYTPDKKIIELKSLKYYLLQYRNVGIFYEHVVNHILDDLVEVLKPKQMEITGEFSARGGIITKAVAIYRLYAED

SEQ ID NO: 50515 - protein, 167 aa, Desulfovibrio sp.
  misc_feature (1)..(167): tr|A0A212JAD9|A0A212JAD9_9DELT NADPH-dependent 7-cyano- 7-deazaguanine reductase OS=uncultured Desulfovibrio sp . OX=167968 GN=queF PE=3 SV=1
MSTRSQDQTQDLKVLGTGRLQSPEGGPSVALLEAFPNCFPQRPYVISISFPEFTSLCPVTGQPDCGTITVEYIPDELCVESKSFKLYMFAFRNHQSFMETITNNVLEDLRTLLNPCWCRVKGLFAPRGGTRIHVFAETFKDTMPEEQNRLVREAVAAWKSEPDPHRP

SEQ ID NO: 50516 - protein, 166 aa, Desulfovibrio sp.
  misc_feature (1)..(166): tr|A0A212L190|A0A212L190_9DELT NADPH-dependent 7-cyano- 7-deazaguanine reductase OS=uncultured Desulfovibrio sp . OX=167968 GN=queF PE=3 SV=1
MTTRSQDQTQDLKVLGTGRLATPEGGPSVAQLEAFPNCFPQRPYVISISFPEFTSLCPVTGQPDCGTITVEYIPDELCVESKSFKLYMFAFRNHQSFMETITNNVLDDLRTLLNPCWCRVKGLFAPRGGTRIHVFAESFKDMPQEQNALVREVVRSWKSEPDPHRP

SEQ ID NO: 50517 - protein, 155 aa, Dysgonomonas sp.
  misc_feature (1)..(155): tr|A0A212JKB7|A0A212JKB7_9BACT NADPH-dependent 7-cyano- 7-deazaguanine reductase OS=uncultured Dysgonomonas sp. OX=206096 GN=queF PE=3 SV=1
MTIEGLSHLGGKTEYKDNYAPEVLEAFENKHQSNDYWVTFNCPEFTSLCPITGQPDFATIHINYIPDVKMVESKSLKLYLFSFRNHGAFHEDCVNIMMKDLIELMNPKYIEVVGIFTPRGGISIYPFCNYGRPGTKFERLAEERLINHNPQQIYK

SEQ ID NO: 50518 - protein, 155 aa, Dysgonomonas sp.; identical to SEQ ID NO: 45790
  misc_feature (1)..(155): tr|A0A212JV07|A0A212JV07_9BACT NADPH-dependent 7-cyano- 7-deazaguanine reductase OS=uncultured Dysgonomonas sp. OX=206096 GN=queF PE=3 SV=1

SEQ ID NO: 50519 - protein, 165 aa, Eubacterium sp.
  misc_feature (1)..(165): tr|A0A1C6FME1|A0A1C6FME1_9FIRM NADPH-dependent 7-cyano- 7-deazaguanine reductase OS=uncultured Eubacterium sp. OX=165185 GN=queF PE=3 SV=1
MSGRNEKETEGITLLGNQGTKYPMDYAPEVLETFVNKHQDNDYFVKFNCPEFTSLCPITGQPDFATITISYVPDIKMVESKSLKLYLFSFRNHGDFHEDCVNVIMKDLIKLMNPKYIEVWGKFTPRGGISIDPYCNYGRKGTRWEEVAWNRMSNHDMYPEKVDNR

SEQ ID NO: 50520 - protein, 164 aa, Eubacterium sp.; identical to SEQ ID NO: 43989
  misc_feature (1)..(164): tr|A0A1C6BWQ6|A0A1C6BWQ6_9FIRM NADPH-dependent 7-cyano- 7-deazaguanine reductase OS=uncultured Eubacterium sp. OX=165185 GN=queF PE=3 SV=1

SEQ ID NO: 50521 - protein, 131 aa, Gammaproteobacteria bacterium
  misc_feature (1)..(131): tr|A0A5E5QK45|A0A5E5QK45_9GAMM NADPH-dependent 7-cyano- 7-deazaguanine reductase OS=uncultured Gammaproteobacte ria bacterium OX=86473 GN=queF PE=3 SV=1
MSSQASKTLEVFDNPNRARDYVIQIELPEFTCLCPKTGQPDFATLHLEYIADRDCVELKSLKMYIWSFRDEGAFHEAVTNQILEDLVAATHPRFMRLKAIFNVRGGVYTTIIAEHQQSGWQPKPSVDLKHI

SEQ ID NO: 50522 - protein, 131 aa, Gammaproteobacteria bacterium; identical to SEQ ID NO: 44432
  misc_feature (1)..(131): tr|A0A5E5Q8T7|A0A5E5Q8T7_9GAMM NADPH-dependent 7-cyano- 7-deazaguanine reductase OS=uncultured Gammaproteobacte ria bacterium OX=86473 GN=queF PE=3 SV=1

SEQ ID NO: 50523 - protein, 164 aa, Megasphaera sp.
  misc_feature (1)..(164): tr|A0A1C5R8D0|A0A1C5R8D0_9FIRM NADPH-dependent 7-cyano- 7-deazaguanine reductase OS=uncultured Megasphaera sp. OX=165188 GN=queF PE=3 SV=1
MNRTSEELSQLASLGSQHTTYRQDYDPGLLETFDNKHPGRDYFVKFNCPEFTSLCPKTGQPDYATIYISYVPDQKMVESKSLKLYLFSFRNRGDFHEDCVNIIMDDLIALMNPKYIEVWGKFLPRGGISIDPYCNYGRKGTPWEQVAWQRLSQHDLYPEKVDNR

SEQ ID NO: 50524 - protein, 136 aa, Prochlorococcus marinus
  misc_feature (1)..(136): tr|Q1PKD1|Q1PKD1_PROMR NADPH-dependent 7-cyano-7-deazag uanine reductase OS=uncultured Prochlorococcus marinus clone HF10-11D6 OX=379374 GN=queF PE=3 SV=1
MNTAKLGDSTQRPLYGERIIEESKIICFENPNKKRIYEIAIQLPEFTCKCPFSGYPDFATLNIIYQPNLRVYELKSLKLYINNFRDIKISHEEVVNRIMDDLVNEGSPHWIHLNAAFNPRGNVSMQLDIFSGQKKN

SEQ ID NO: 50525 - protein, 165 aa, Roseburia sp.
  misc_feature (1)..(165): tr|A0A1C5VXJ9|A0A1C5VXJ9_9FIRM NADPH-dependent 7-cyano- 7-deazaguanine reductase OS=uncultured Roseburia sp. OX =512314 GN=queF PE=3 SV=1
MTGRNQEEVKGITLLGNQGTAYPDDYAPQVLETFVNKHPNHDYFVKFNCPEFTSLCPITGQPDFAAITISYVPGERMVESKSLKLYLFSFRNHGDFHEDCMNIIMNDLIRLMDPKYIEVWGKFTPRGGISIDPYCNYGKPGTRWEEVAWNRLANHDLYPEKIDNR

SEQ ID NO: 50526 - protein, 165 aa, Ruminococcus sp.
  misc_feature (1)..(165): tr|A0A1C6F3G6|A0A1C6F3G6_9FIRM NADPH-dependent 7-cyano- 7-deazaguanine reductase OS=uncultured Ruminococcus sp. OX=165186 GN=queF PE=3 SV=1
MEGRTAEEKQGITLLGNQKTKYPDDYAPQMLETFINKHQDNDYFVKFNCPEFTSLCPITGQPDFATIYISYIPDVRMVESKSLKLYLYSFRNHGDFHEDCVNIIMKDLIKLMDPKYIEVWGKFTPRGGISIDPYCNYGRKGTKFEEMAMHRLMEHDMYPEKVDNR

SEQ ID NO: 50527 - protein, 162 aa, Ruminococcus sp.
  misc_feature (1)..(162): tr|A0A1C6DM27|A0A1C6DM27_9FIRM NADPH-dependent 7-cyano- 7-deazaguanine reductase OS=uncultured Ruminococcus sp. OX=165186 GN=queF PE=3 SV=1
MDNREKENLTLLGNQQTKYPDNYAPEVLETFENKHQENDYFVKFNCPEFTSLCPITGQPDFATIYISYIPDVKMVESKSLKLYLFSYRNHGDFHEDCVNKIMKDLIDLMDPKYIEVWGKFTPRGGISIDPYCNYGKPGTKWEKLAENRLFNHDMYPEKIDNR

SEQ ID NO: 50528 - protein, 156 aa, Sphingopyxis sp.
  misc_feature (1)..(156): tr|A0A1Y5PWF0|A0A1Y5PWF0_9SPHN NADPH-dependent 7-cyano- 7-deazaguanine reductase OS=uncultured Sphingopyxis sp. OX=310581 GN=queF PE=3 SV=1
MTDSTPTPLAPKHLGQSSELPASPEAAVLDYVPNPRTGELYLVRFAAPEFTSLCPVTGQPDFAHLVIDYAPGETIVESKSLKLFLGSFRNHAGFHEDCTVGIGRRLFDEMRPRWLRIGGYWYPRGGIPIDVFWQSGPPPEGLWLPDQGVAPYRGRG

SEQ ID NO: 50529 - protein, 133 aa, Unknown
  misc_feature (1)..(133): tr|A0A3P3XJC2|A0A3P3XJC2_9SPIR NADPH-dependent 7-cyano- 7-deazaguanine reductase OS=uncultured spirochete OX=15 6406 GN=queF PE=3 SV=1
MAEYKFEILGKKVSEPMRKLETFPTPEHVKKVVLDCDEVTSLCPVTGQPDWETVRIEFEPDKFCIESKSLKLYLWSFREEGAFCESLSARIAQDIFDVCKPRWVKVTVAQKARGGIAITAESRIPDLEQGAGA

SEQ ID NO: 50530 - protein, 128 aa, Unknown
  misc_feature (1)..(128): tr|A0A3P3XMY1|A0A3P3XMY1_9SPIR NADPH-dependent 7-cyano- 7-deazaguanine reductase OS=uncultured spirochete OX=15 6406 GN=queF PE=3 SV=1
MAEYEFKSLGKTTRAPSRELETFPTPPSVTKVVLESDEVTSLCPVTGQPDWETVRIEFEPGNLCIESKSLKLYLWSFREEGVFCEALAARIAKDVFDAIKPKSVAVSITQKPRGGITISAEARLPKIV

SEQ ID NO: 50531 - protein, 271 aa, Stenotrophomonas sp.
  misc_feature (1)..(271): tr|A0A1Y5Q4C6|A0A1Y5Q4C6_9GAMM NADPH-dependent 7-cyano- 7-deazaguanine reductase OS=uncultured Stenotrophomonas sp. OX=165438 GN=queF PE=3 SV=1
MNTPQDSSLGREVAYPSQYDPGLLFPIPRAAARAEIGIDGGLPFSGNDRWHAYELGWLDGRGKPCVATATLQVPCDSPNLIESKSLKLYLNSLNATRFDSADAAWARIAADLSACAGATVRVEPGLPPVAGAGGESIDALEVDIDCYGPPDAGLLVADADADVLVTEMLVSDLLKSNCPVTGQPDWASVGIRYHGPRIDRAGLLRYLVSYRDHAEFHEQCVERIFLDLSRHCRCHWLEVEARYTRRGGLDINPRRATPGRPISAAFRDARQ

SEQ ID NO: 50532 - protein, 131 aa, Unknown
  misc_feature (1)..(131): tr|A0A482ZBV8|A0A482ZBV8_9GAMM NADPH-dependent 7-cyano- 7-deazaguanine reductase OS=uncultured SUP05 cluster ba cterium OX=655186 GN=queF PE=3 SV=1
MSSQPSKVLEVFDNPNTDRDYLIQIDTPEFTCLCPKTGQPDFATLHLEYIADKSCVELKSFKMYIWSFRDEGAFHEAVTNQILEDLVAVTNPRFMRLKAIFNVRGGVYTTIIAEHQQKGWQPNPIVDLQHL

SEQ ID NO: 50533 - protein, 132 aa, Unknown
  misc_feature (1)..(132): tr|D1KDX9|D1KDX9_9GAMM NADPH-dependent 7-cyano-7-deazag uanine reductase OS=uncultured SUP05 cluster bacterium OX=655186 GN=queF PE=3 SV=1
MPSKANKELEVFDNPNPNRNFVIQIDMPEFTCLCPKTGQPDFATLHLEYIADQSCVELKSLKMYIWSFRDEGAFHEAVTNQILDDLVSATNPRFMRLKAVFNVRGGVYTTVIAEHQQEGWVPQVVVDLKHLR

SEQ ID NO: 50534 - protein, 129 aa, Thiohalocapsa sp.; identical to SEQ ID NO: 45275
  misc_feature (1)..(129): tr|V4JTF1|V4JTF1_9GAMM NADPH-dependent 7-cyano-7-deazag uanine reductase OS=uncultured Thiohalocapsa sp. PB-PSB 1 OX=1385625 GN=queF PE=3 SV=1

SEQ ID NO: 50535 - protein, 281 aa, Undibacterium parvum
  misc_feature (1)..(281): tr|A0A3S9HKW8|A0A3S9HKW8_9BURK NADPH-dependent 7-cyano- 7-deazaguanine reductase OS=Undibacterium parvum OX=401 471 GN=queF PE=3 SV=1
MNTNNHNQPEQSTLGKTASYTTQYDASLLFPIPRADKRQEIGISNNLPFFGMDIWNAYEVSWLNLRGKPQVAIATIMAPADSANIIESKSFKLYLNSFNQTKLADTDALLNLLRTDLSAGFGAGVQVSLLMQEDFSKLSMQELDGILIDRLDIEVDSYAPNPSLLKCDNLVAPVEETLVSHLLKSNCLVTGQPDWGSVQIRYVGAPIDQEGLLKYLIGFREHNEFHEQCVERIFTDIMQQCAPQKLSVYARYTRRGGLDINPWRSNFSSAQKPSNARNARQ

SEQ ID NO: 50536 - protein, 281 aa, Undibacterium pigrum
  misc_feature (1)..(281): tr|A0A318J5A1|A0A318J5A1_9BURK NADPH-dependent 7-cyano- 7-deazaguanine reductase OS=Undibacterium pigrum OX=401 470 GN=queF PE=3 SV=1
MTDSAPNTPEHSLLGKPATYKSEYDASLLFPISRSGKREEIGLGSSLPFFGVDIWNAYEISWLNMRGKPQVAIAAITVPADSPNIIESKSFKLYLNSFNQTRLAGTDALVSLLQADLSAGFGAAVQVKLTTPDQFDKLAMHELQGQLLDRLDVEVDSYTPNPTLLTANVDEPAVEETLISHLLKSNCLVTGQPDWGSVQIHYVGPQINQEGLLQYLIGFRDHNEFHEQCVERIFVDIMRHCKPQKLSVYARYTRRGGLDINPWRSNFSTGQGPDNRRNARQ

SEQ ID NO: 50537 - protein, 282 aa, Undibacterium sp.
  misc_feature (1)..(282): tr|A0A3S0PYJ6|A0A3S0PYJ6_9BURK NADPH-dependent 7-cyano- 7-deazaguanine reductase OS=Undibacterium sp. S11R28 OX =2495591 GN=queF PE=3 SV=1
MTTPDHSNSPEQSTLGKAATYTSQYDASLLFPIPRADKREEIGITTSLPFFGMDIWNAYEVSWLNLRGKPQVAIATIMAPADSPNIIESKSFKLYLNSYNQTRLAGSDELLQRLRTDLSAGFGASVQVTLTTQEEFCKLSMQELDGMLLDRLDIEVDSYTPDPLLLKADNQVAPVEETLVSHLLKSNCLVTGQPDWGSVQIHYIGAPIDQESLLKYLIGFREHNEFHEQCVERIFIDIMQQCKPQKLSVYARYTRRGGLDINPWRSNFSTAQKPSNARNARQ

SEQ ID NO: 50538 - protein, 166 aa, Ureibacillus terrenus
  misc_feature (1)..(166): tr|A0A540UYD5|A0A540UYD5_9BACL NADPH-dependent 7-cyano- 7-deazaguanine reductase OS=Ureibacillus terrenus OX=11 8246 GN=queF PE=3 SV=1
MSVRKFEDGLKDLTLLGNNKTVYPEKYAPEVLEAVDNLHSDRDYFVKFNCPEFTSLCPLTGQPDFATIYISYIPDKKLVESKSLKLYLFSFRNHGDFHEDCVNIIMNDLIQLLDPRYIEVWGKFTPRGGISIDPYCNYGRPGTKYEEMANYRLMNHDLYPEKVDNR

SEQ ID NO: 50539 - protein, 166 aa, Ureibacillus thermophilus
  misc_feature (1)..(166): tr|A0A4P6UU88|A0A4P6UU88_9BACL NADPH-dependent 7-cyano- 7-deazaguanine reductase OS=Ureibacillus thermophilus O X=367743 GN=queF PE=3 SV=1
MSSRKLEDGLKDLTLLGNQKTNYPTKYAPEVLEAVNNLHSDRDYFVKFNCPEFTSLCPLTGQPDFATIYISYIPDKKLVESKSLKLYLFSFRNHGDFHEDCVNIITNDLIKLLDPRYIEVWGKFTPRGGISIDPYCNYGRPGTKYEEMANYRLMNHDLYPEKVDNR

SEQ ID NO: 50540 - protein, 157 aa, Uruburuella suis
  misc_feature (1)..(157): tr|A0A4R2MVG5|A0A4R2MVG5_9NEIS NADPH-dependent 7-cyano- 7-deazaguanine reductase OS=Uruburuella suis OX=252130 GN=queF PE=3 SV=1
MSRNTEELGGLSLLGNQHTEYRADYAPEVLEAFPNKHPGNDYFVKFVCPEFTSLCPMTGQPDFATIYIRYIPDIQMVESKSLKLYLFSFRNHGDFHEDCVNIIMKDLIALMQPKYIEVFGEFTPRGGIAIHPFANWGRPDTRFAALAEERLFAHDMQ

SEQ ID NO: 50541 - protein, 130 aa, Vampirococcus sp.
  misc_feature (1)..(130): tr|A0A410P2U0|A0A410P2U0_9BACT NADPH-dependent 7-cyano- 7-deazaguanine reductase OS=Vampirococcus sp. LiM OX=19 30593 GN=queF PE=3 SV=1
MKKSSYENLQNHIRRLKTPEIEVWKNQYPDKRFAVHIEIPEFTCMCPKTGLPDFAVILIDYVPAEVCVELKSLKEYLVFYRNVGIFHEHFANKLMDDFVKAARPRWAKIVTRFNPRGGITTVVTREYRGR

SEQ ID NO: 50542 - protein, 150 aa, Variibacter gotjawalensis
  misc_feature (1)..(150): tr|A0A0S3PWN4|A0A0S3PWN4_9BRAD NADPH-dependent 7-cyano- 7-deazaguanine reductase OS=Variibacter gotjawalensis O X=1333996 GN=queF PE=3 SV=1
MSKRPLQLGKPTALPASPDQAQLDRVPNPHPDTNYVARFTAPEFTTLCPITGQPDFAHLVIDYVPGKWLVESKSLKLYLASFRNHGGFHEDCTVGIGKELQKLLKPRWLRIGGYWYPRGGIPIDVFWQAGRLPAGVWVPDQGVAPYRGRG

SEQ ID NO: 50543 - protein, 293 aa, Variovorax boronicumulans
  misc_feature (1)..(293): tr|A0A1E7U5L0|A0A1E7U5L0_9BURK NADPH-dependent 7-cyano- 7-deazaguanine reductase OS=Variovorax boronicumulans O X=436515 GN=queF PE=3 SV=1
MSHDPTNPNTNPNTPEQSQLGRASAYADKYDPSLLFPIARTTQREAMGIQAGALPFFGADLWTAFELSWLNPRGKPQVAIAHFTIPCETPNIIESKSFKLYLNSFNNSTFASIDAVREHLRTDLSEAAWRGSDQSAGIGVKLLTPDLFDREPVHEIDGLDLDRLDIECTHYQPAPELLSSDTTQVHVNETLTSRLLKSNCLVTGQPDWGSVQIRYSGPPIDQAGLLAYIVSFRNHNEFHEPCAERMFTDIWRQCQPTKLAVYARYTRRGGLDINPFRTSWPQALPPNIRTARQ

SEQ ID NO: 50544 - protein, 293 aa, Variovorax boronicumulans
  misc_feature (1)..(293): tr|A0A250DQJ2|A0A250DQJ2_9BURK NADPH-dependent 7-cyano- 7-deazaguanine reductase OS=Variovorax boronicumulans O X=436515 GN=queF PE=3 SV=1
MSHDPTNPNTNPNTPEQSQLGRASAYADKYDPSLLFPIARTTQREAMGIQAGALPFFGADLWTAFELSWLNPRGKPQVAIAHFTIPCETPNIIESKSFKLYLNSFNNSTFASIDAVREHLRTDLAEAAWRGSDQSAGIGVKLLTPDLFDREPVHEIDGLDLDRLDIECTHYQPAPELLSSDTTQVHVNETLTSRLLKSNCLVTGQPDWGSVQIRYSGPPIDQAGLLAYIVSFRNHNEFHEPCAERMFTDIWRQCQPTKLAVYARYTRRGGLDINPFRTSWPQALPPNIRTARQ

SEQ ID NO: 50545 - protein, 289 aa, Variovorax gossypii
  misc_feature (1)..(289): tr|A0A3S0H1R9|A0A3S0H1R9_9BURK NADPH-dependent 7-cyano- 7-deazaguanine reductase OS=Variovorax gossypii OX=1679 495 GN=queF PE=3 SV=1
MSHDPHNPNTPEQSQLGRASAYADRYDPTLLFPIARATQREAMGIKTGALPFFGADLWTAFEVSWLNLRGKPQLAIAHFTIPCETPNIIESKSFKLYLNSFNNSQFASADAVRERLRADLSEAAWRGSDQQATIGVSLLAPDMFDREPVHELDGLDLDRLDIECTHYQPTPELLSSDTTQAPVNETLTSRLLKSNCLVTGQPDWGSVQIRYSGPPIDQAGLLAYIISFRNHNEFHEPCAERMFTDIWTRCKPNKLAVYARYTRRGGLDINPFRTSWPQALPPNIRTARQ

SEQ ID NO: 50546 - protein, 285 aa, Variovorax guangxiensis
  misc_feature (1)..(285): tr|A0A502DKU9|A0A502DKU9_9BURK NADPH-dependent 7-cyano- 7-deazaguanine reductase OS=Variovorax guangxiensis OX= 1775474 GN=queF PE=3 SV=1
MSLDNTPAQSQLGRASAYADRYDPTLLFPIARATQRTAMGIAENALPFFGADLWTAFELSWLNARGKPQVAIAHFTVPCETPNIIESKSFKLYLNSFNSSVFDSVDAVRERLRSDLAEAAWRGSDRSGGIGVKLLAPEAFDREPVHELDGLDLDRLDIECTHYQPAPELLSSDSSQPPVTETLTSRLLKSNCLVTGQPDWGSVRVSYSGPAIDQAGLLAYIVSFRNHNEFHEPCAERMFWDIWRHCKPTKLSVYARYTRRGGLDINPFRASWPQALPPNIRTARQ

SEQ ID NO: 50547 - protein, 294 aa, Variovorax guangxiensis
  misc_feature (1)..(294): tr|A0A433MN59|A0A433MN59_9BURK NADPH-dependent 7-cyano- 7-deazaguanine reductase OS=Variovorax guangxiensis OX= 1775474 GN=queF PE=3 SV=1
MSHDPNSTNPTNPNTPEQSQLGRASAYADHYDPTLLFPIARATQREAMGIKAGALPFFGADLWSAFEVSWLNLRGKPQLAIAHFTIPCETPNIIESKSFKLYLNSFNNSQFASVDAVRERLRADLSEAAWRGSDQQATIGVTLLAPDMFDREPVHELDGLDLDRLDIECSHYQPTPELLSSDATQAPVNETLTSRLLKSNCLVTGQPDWGSVQIRYSGPPIDQAGLLAYIVSFRNHNEFHEPCAERMFTDIWTRCKPNKLAVYARYTRRGGLDINPFRTSWPQALPANIRTARQ

SEQ ID NO: 50548 - protein, 291 aa, Variovorax paradoxus
  misc_feature (1)..(291): tr|E6V1G5|E6V1G5_VARPE NADPH-dependent 7-cyano-7-deazag uanine reductase OS=Variovorax paradoxus (strain EPS) O X=595537 GN=queF PE=3 SV=1
MSLDNHPDNPNTPEQSQLGRASAYADHYDPSLLFPIARATQREAMGIKTGALPFFGADLWTAFEVSWLNPRGKPQLAIAHFTIPCETPNIIESKSFKLYLNSFNNSTFASIEAVREHLRTDLAEAAWRGSDQSAGIGVKLLTPDLFDREPVHEIDGLDLDRLDIECTHYQPAPELLTSDTTQVHVNETLTSRLLKSNCLVTGQPDWGSVQIRYSGPPIDQAGLLAYIVSFRNHNEFHEPCAERMFTDIWNRCKPVKLAVYARYTRRGGLDINPFRTSWPQALPPNIRTARQ

SEQ ID NO: 50549 - protein, 292 aa, Variovorax paradoxus
  misc_feature (1)..(292): tr|A0A0P9BIB4|A0A0P9BIB4_VARPD NADPH-dependent 7-cyano- 7-deazaguanine reductase OS=Variovorax paradoxus OX=340 73 GN=queF PE=3 SV=1
MSHDASHTPNPNTPEQSQLGRASAYADRYDPTLLFPIARATQREAMGIAAGALPFFGADLWTAFELSWLNPRGKPQLAIAHFTVPCETPNIIESKSFKLYLNSFNNTAFADAEAVRERLRTDLAEALWRGSDRAAGIGVKLVAPELFDREPVHELDGLDLDRLDIECTHYQPAPELLSSDATQVPVTETLTSRLLKSNCLVTGQPDWGSVQIRYSGPPIDQAGLLAYIVSFRNHNEFHEPCAERMFTDIWKHCHPTKLAVYARYTRRGGLDINPFRTSWPQALPANVRTARQ

SEQ ID NO: 50550 - protein, 291 aa, Variovorax sp.
  misc_feature (1)..(291): tr|A0A0Q6MXA3|A0A0Q6MXA3_9BURK NADPH-dependent 7-cyano- 7-deazaguanine reductase OS=Variovorax sp. Root318D1 OX =1736513 GN=queF PE=3 SV=1
MSLDNAPDNPNTPEQSQLGRASAYADKYDASLLFPISRATQREAMGITGAVLPFFGADLWTAFEVSWLNLRGKPQLAIAHFTVPCETPNIIESKSFKLYLNSFNSTAFASLDAVRERLRTDLSEALWRGSDQSAGIGVKLLAPDMFDREPVHELDGLDLDRLDIECTHYQPAPELLSSDTTQPPVNETLTSRLLKSNCLVTGQPDWGSVQIRYSGPAIDQAGLLAYIVSFRNHNEFHEPCVERMFTDIWRQCQPNKLAVYARYTRRGGLDINPFRTSWPQALPPNIRTARQ

SEQ ID NO: 50551 - protein, 285 aa, Variovorax sp.
  misc_feature (1)..(285): tr|A0A244EG15|A0A244EG15_9BURK NADPH-dependent 7-cyano- 7-deazaguanine reductase OS=Variovorax sp. JS1663 OX=18 51577 GN=queF PE=3 SV=1
MSLDNTPEQSQLGRASAYVDRYDAGLLFPIPRATQREAMGIAAHPLPFFGADLWTAFELSWLNPRGKPQLAIAHFTIPCETPNIIESKSFKLYLNSFNSTVFASAEAVRERLRADLSEAVWRGADRSAAIGVKLMASDLFDREQVQELDGVDLDRLDIECTQYLPAPELLSSDTTQAPVSEALCSRLLKSNCLVTGQPDWGSVQIRYSGPQIDQAGLLAYIVSFRNHNEFHEPCAERMFQDIWQRCQPTKLAVYARYTRRGGLDINPFRTSWPQALPANIRTARQ

SEQ ID NO: 50552 - protein, 154 aa, Varunaivibrio sulfuroxidans
  misc_feature (1)..(154): tr|A0A4R3J9X5|A0A4R3J9X5_9PROT NADPH-dependent 7-cyano- 7-deazaguanine reductase OS=Varunaivibrio sulfuroxidans OX=1773489 GN=queF PE=3 SV=1
MSDYSQTNLSQLGHAAAAPDNPEDAVLEAVPNPQAGTDFLARFTVPEFTSVCPVTGQPDFAHLVIDIVPDALLIESKSLKLYLTSFRNHGAFHEDCTVAIAQKIIAAAHPKWLRIGGYWFPRGGIPIDVFYQYGDAPQGVWIPDQGVSPYRGRG

SEQ ID NO: 50553 - protein, 165 aa, Veillonella atypica
  misc_feature (1)..(165): tr|A0A380N1P1|A0A380N1P1_9FIRM NADPH-dependent 7-cyano- 7-deazaguanine reductase OS=Veillonella atypica OX=3977 7 GN=queF_1 PE=3 SV=1
MASGRSEKELQGVTMLGHKTDYPTDYAPQVLEAFDNKHPDNDYFVKFNCPEFTSLCPMTGQPDFATIYISYIPDKKMVESKSLKLYLFSFRNHGDFHEDCINIIMKDLIKLMDPKYIEVWGKFTPRGGLSIDPYANYGKPGTDWEKTAKERLHFHDMQPERVAYR

SEQ ID NO: 50554 - protein, 165 aa, Veillonella atypica
  misc_feature (1)..(165): tr|E1LAX7|E1LAX7_9FIRM NADPH-dependent 7-cyano-7-deazag uanine reductase OS=Veillonella atypica ACS-134-V-Col7a OX=866778 GN=queF PE=3 SV=1
MASGRSEKELQGVTMLGHKTDYPTDYAPQVLEAFDNKHPDNDYFVKFNCPEFTSLCPMTGQPDFATIYISYVPDKKMVESKSLKLYLFSFRNHGDFHEDCINIIMKDLIKLMNPKYIEVWGKFTPRGGLSIDPYANYGKPGTDWEKTAKERLHFHDMQPERVAYR

SEQ ID NO: 50555 - protein, 165 aa, Veillonella criceti
  misc_feature (1)..(165): tr|A0A380NMM0|A0A380NMM0_9FIRM NADPH-dependent 7-cyano- 7-deazaguanine reductase OS=Veillonella criceti OX=1038 91 GN=queF PE=3 SV=1
MASGRTSEELQGVHGLGQTTKYPTDYAPEVLESFPNKHPNNDYFVKFNCPEFTSLCPMTGQPDFATIYISYVPDERLVESKSLKLYLFSFRNHGDFHEDCVNIIMKDLIALMSPKYIEVWGKFTPRGGLAIDPYANYGKPGTEWENVAKERLHFHDMQPERVAYR

SEQ ID NO: 50556 - protein, 165 aa, Veillonella denticariosi
  misc_feature (1)..(165): tr|A0A2S7ZCI3|A0A2S7ZCI3_9FIRM NADPH-dependent 7-cyano- 7-deazaguanine reductase OS=Veillonella denticariosi JC M 15641 OX=1298594 GN=queF PE=3 SV=1
MASGRSEQELQGVTMLGHQTDYPTDYAPQVLEAFENKHPDNDYFVKFNCPEFTSLCPMTGQPDFATIYISYVPDKRMVESKSLKLYLFSFRNHGDFHEDCINIIMKDLVKLMDPKYIEVWGKFTPRGGLSIDPYANYGKSGTEWEKTAKERLHFHDMQPERVAYR

SEQ ID NO: 50557 - protein, 165 aa, Veillonella dispar
  misc_feature (1)..(165): tr|W1UW68|W1UW68_9FIRM NADPH-dependent 7-cyano-7-deazag uanine reductase OS=Veillonella dispar DORA_11 OX=14039 49 GN=queF PE=3 SV=1
MASGRSEKELQGVTMLGHKTDYPTDYAPQVLEAFDNKHPDNDYFVKFNCPEFTSLCPMTGQPDFATIYISYVPDKKMVESKSLKLYLFSFRNHGDFHEDCINIIMKDLVKLMDPKYIEVWGKFTPRGGLSIDPYANYGKPGTEWEKTAKERLHFHDMQPERVAYR

SEQ ID NO: 50558 - protein, 165 aa, Veillonella dispar
  misc_feature (1)..(165): tr|C4FS11|C4FS11_9FIRM NADPH-dependent 7-cyano-7-deazag uanine reductase OS=Veillonella dispar ATCC 17748 OX=54 6273 GN=queF PE=3 SV=1
MASGRSEKELQGVTMLGHKTDYPTDYAPQVLEAFDNKHPDNDYFVKFNCPEFTSLCPMTGQPDFATIYISYVPDKKMVESKSLKLYLFSFRNHGDFHEDCINIIMKDLIKLMDPKYIEVWGKFTPRGGLSIDPYANYGKPGTEWEKTAKERLHFHDMQPERVAYR

SEQ ID NO: 50559 - protein, 165 aa, Veillonella montpellierensis
  misc_feature (1)..(165): tr|A0A096AIN6|A0A096AIN6_9FIRM NADPH-dependent 7-cyano- 7-deazaguanine reductase OS=Veillonella montpellierensi s DNF00314 OX=1401067 GN=queF PE=3 SV=1
MSTGRTTEELHGVTGLGHTTTYPTDYAPQVLEAFDNKHPDNDYFVKFNCPEFTSLCPMTKQPDFATIYISYVPDKKMVESKSLKLYLFSFRNHGDFHEDCINIIMKDLIRLMDPKYIEVWGKFTPRGGLSIDPFANYGKPGTDWEQTAKERLHFHDMQPERVAYR

SEQ ID NO: 50560 - protein, 165 aa, Veillonella parvula
  misc_feature (1)..(165): tr|A0A418PKQ0|A0A418PKQ0_9FIRM NADPH-dependent 7-cyano- 7-deazaguanine reductase OS=Veillonella parvula OX=2946 6 GN=queF PE=3 SV=1
MASGRSEKELQGVTMLGHKTDYPTDYAPQVLEAFDNKHPDNDYFVKFNCPEFTSLCPMTGQPDFATIYISYVPDKKMVESKSLKLYLFSFRNHGDFHEDCINIIMKDLVKLMDPKYIEVWGKFTPRGGLSIDPYANYGKPGTEWEKTAKERLHFHDMHPERVAYR

SEQ ID NO: 50561 - protein, 165 aa, Veillonella parvula; identical to SEQ ID NO: 50557
  misc_feature (1)..(165): tr|D1BQL4|D1BQL4_VEIPT NADPH-dependent 7-cyano-7-deazag uanine reductase OS=Veillonella parvula (strain ATCC 10 790 / DSM 2008 / JCM 12972 / Te3) OX=479436 GN=queF PE= 3 SV=1

SEQ ID NO: 50562 - protein, 165 aa, Veillonella rodentium
  misc_feature (1)..(165): tr|A0A239Y932|A0A239Y932_9FIRM NADPH-dependent 7-cyano- 7-deazaguanine reductase OS=Veillonella rodentium OX=24 8315 GN=queF PE=3 SV=1
MASGRSEQELQGVTMLGHQTDYPTDYAPQVLEAFENKHPDNDYFVKFNCPEFTSLCPMTGQPDFATIYISYVPDKRMVESKSLKLYLFSFRNHGDFHEDCINIIMKDLVKLMDPKYIEVWGKFTPRGGLSIDPYANYGKPGSEWEKTAKERLHFHDMQPERVAYR

SEQ ID NO: 50563 - protein, 165 aa, Veillonella rogosae; identical to SEQ ID NO: 50557
  misc_feature (1)..(165): tr|A0A2S7Z134|A0A2S7Z134_9FIRM NADPH-dependent 7-cyano- 7-deazaguanine reductase OS=Veillonella rogosae JCM 156 42 OX=1298595 GN=queF PE=3 SV=1

SEQ ID NO: 50564 - protein, 166 aa, Veillonella seminalis
  misc_feature (1)..(166): tr|K9DJK4|K9DJK4_9FIRM NADPH-dependent 7-cyano-7-deazag uanine reductase OS=Veillonella seminalis ACS-216-V-Col 6b OX=883156 GN=queF PE=3 SV=1
MASGRTSEELQGVHGLGSQQTKYPMDYAPEVLESFVNKHPGNDYFVKFNCPEFTSLCPMTGQPDFATIYISYVPDERLVESKSLKLYLFSFRNHGDFHEDCVNIIMKDLIKLMEPKYIEVWGRFTPRGGLAIDPYANYGKPGTEWEKVAKERLHFHDMQPERVAYR

SEQ ID NO: 50565 - protein, 165 aa, Veillonella sp.
  misc_feature (1)..(165): tr|A0A2S7ZF55|A0A2S7ZF55_9FIRM NADPH-dependent 7-cyano- 7-deazaguanine reductase OS=Veillonella sp. T34266-5 OX =2027457 GN=queF PE=3 SV=1
MASGRSEKELQGVTMLGHKTDYPTDYAPQVLEAFDNKHPDNDYFVKFNCPEFTSLCPMTGQPDFATIYISYVPDKKMVESKSLKLYLFSFRNHGDFHEDCINIIMKDLIKLMEPKYIEVWGKFTPRGGLSIDPYANYGKPGTEWEKTAKERLHFHDMQPERVAYR

SEQ ID NO: 50566 - protein, 165 aa, Veillonella sp.
  misc_feature (1)..(165): tr|F9N4B0|F9N4B0_9FIRM NADPH-dependent 7-cyano-7-deazag uanine reductase OS=Veillonella sp. oral taxon 780 str. F0422 OX=944564 GN=queF PE=3 SV=1
MSSGRNAAELQGVHALGSHTDYPTDYAPQVLEAFPNKHPGNDYFVKFNCPEFTSLCPMTGQPDFATIYISYVPDEKLVESKSLKLYLFSFRNHGDFHEDCINIIMKDLVALMEPKYIEVWGEFTPRGGLSIDPYANYGKPGTDWEATAKERLHFHDMQPKRVAYR

SEQ ID NO: 50567 - protein, 165 aa, Veillonella tobetsuensis; identical to SEQ ID NO: 50554
  misc_feature (1)..(165): tr|A0A480BF24|A0A480BF24_9FIRM NADPH-dependent 7-cyano- 7-deazaguanine reductase OS=Veillonella tobetsuensis OX =1110546 GN=queF PE=3 SV=1

SEQ ID NO: 50568 - protein, 165 aa, Veillonella tobetsuensis
  misc_feature (1)..(165): tr|A0A480AYI4|A0A480AYI4_9FIRM NADPH-dependent 7-cyano- 7-deazaguanine reductase OS=Veillonella tobetsuensis OX =1110546 GN=queF PE=3 SV=1
MASGRSEKELQGITMLGHKTDYPTDYAPQVLEAFDNKHPDNDYFVKFNCPEFTSLCPMTGQPDFATIYISYVPDKKMVESKSLKLYLFSFRNHGDFHEDCINIIMKDLIKLMNPKYIEVWGKFTPRGGLSIDPYANYGKPGTDWEKTAKERLHFHDMQPERVAYR

SEQ ID NO: 50569 - protein, 163 aa, Veillonellaceae bacterium
  misc_feature (1)..(163): tr|A0A134CK21|A0A134CK21_9FIRM NADPH-dependent 7-cyano- 7-deazaguanine reductase OS=Veillonellaceae bacterium D NF00626 OX=1588754 GN=queF PE=3 SV=1
MEHREGIEKLHALGNQETKYAYDYDPSVLEKIPNKHKDNDYFVKFNCPEFTSLCPKTGQPDFATVYISYIPDEYIVESKSLKLYLFSYRNHGDFHEDCVNMILHDLVQLLQPRYMEVWGKFLPRGGLSIDPYANYGKPGTDWVEFARYRLLHHDLSPEMVRNR

SEQ ID NO: 50570 - protein, 163 aa, Veillonellaceae bacterium
  misc_feature (1)..(163): tr|A0A316LHH8|A0A316LHH8_9FIRM NADPH-dependent 7-cyano- 7-deazaguanine reductase OS=Veillonellaceae bacterium O X=2049049 GN=queF PE=3 SV=1
MEKREGLDELTLLGNQHTHYEYDYNPDYLERIPNKHKDRDYFIKFNCPEFTSLCPKTGQPDFATIYISYIPGDFMVESKSLKLYLFSFRNHGDFHEDCVNIIMDDLINLLHPRYIEVWGKFLPRGGLSIDPYCNHGMKGTKWEEFAAYRLREHDIYPETIHNR

SEQ ID NO: 50571 - protein, 281 aa, Verminephrobacter eiseniae
  misc_feature (1)..(281): sp|A1WS75|QUEF_VEREI NADPH-dependent 7-cyano-7-deazagua nine reductase OS=Verminephrobacter eiseniae (strain EF 01-2) OX=391735 GN=queF PE=3 SV=1
MNPPESSPLGKASACVDQYDATLLFPIARADQRAELGISGAAPFFGADLWTAFELSWLNQRGKPQVALAHITVPCETPRIVESKSFKLYLNSFSNTRFADAAQVQARIRADVSAAVWRGAASAGSVGVTLLGPDRFAQELMQELDGLSLDRLDVQCTQYQPAPELLSAQHDAAPVSERLTSQLLKSNCPVTGQPDWASVQIAYRGPPIDQEGLLQYLVSFRNHSGFHEQCVERIFMDLWTRCQPIELTVYARYTRRGGLDINPLRTSHPQGLPRNMRTARQ

SEQ ID NO: 50572 - protein, 140 aa, Verrucomicrobia bacterium
  misc_feature (1)..(140): tr|A0A1Z8U3Z7|A0A1Z8U3Z7_9BACT NADPH-dependent 7-cyano- 7-deazaguanine reductase OS=Verrucomicrobia bacterium T MED56 OX=1986792 GN=queF PE=3 SV=1
MSETNPEHSNLTKLGEGGTQPKRELETFPNRNPERDYVVELNTSEFTCICPKTGQPDFAEIMIRYVPDQKIVESKSLKLYLWTFRDEGTFHEHFANRLLDDLVTALDPRWCRVEVNFNARGGIGIIVSAEHGTPPSIAYA

SEQ ID NO: 50573 - protein, 150 aa, Verrucomicrobia bacterium
  misc_feature (1)..(150): tr|A0A2V6ND18|A0A2V6ND18_9BACT NADPH-dependent 7-cyano- 7-deazaguanine reductase OS=Verrucomicrobia bacterium O X=2026799 GN=queF PE=3 SV=1
MLGRSEARVPASPAEATLETFPNPARCNYRIHFETSDFTSLCPITGQADFAKIEIDYTPGKLCIESKSLKFYLASFRNERGFNEAITNRILDDFVRACEPREANVTASFSARGGIALTVRASFPDRSVGRDSVEPAKIDGSAERHPSAGR

SEQ ID NO: 50574 - protein, 132 aa, Verrucomicrobia subdivision
  misc_feature (1)..(132): tr|A0A0R2RH68|A0A0R2RH68_9BACT NADPH-dependent 7-cyano- 7-deazaguanine reductase OS=Verrucomicrobia subdivision 6 bacterium BACL9 MAG-120507-bin52 OX=1655590 GN=queF PE=3 SV=1
MSRLSLLGRKAVVPANPSLARLETFPNPKPNRPFAITFSTSEFTSLCPVTGQPDFATITIHYTPKKKCVESKSLKLYLHSFRNVGSFAEAVTNRILDDLVRAISPAHAVVTGDFAARGGVALKVSASFGKTR

SEQ ID NO: 50575 - protein, 131 aa, Verrucomicrobia subdivision
  misc_feature (1)..(131): tr|A0A520Q534|A0A520Q534_9BACT NADPH-dependent 7-cyano- 7-deazaguanine reductase OS=Verrucomicrobia subdivision 3 bacterium OX=2052186 GN=queF PE=3 SV=1
MKDLKQLGQITEVPAIRDAATLEKIDNPSPNRFYEVKLHSKEFTSLCPVTGQADFGEITISYSPDRHLIETKSLKMYLASYRNEKLFNEQTVNTILDDLIEVLNPKSICIQGVFSQRGGIQLTVKASYPDS

SEQ ID NO: 50576 - protein, 142 aa, Verrucomicrobiaceae bacterium
  misc_feature (1)..(142): tr|A0A4V1SB50|A0A4V1SB50_9BACT NADPH-dependent 7-cyano- 7-deazaguanine reductase OS=Verrucomicrobiaceae bacteri um OX=2026800 GN=queF PE=3 SV=1
MENSPPITLLGSSARLPQSPEEARLECFPNRTPGRPFWIHLDYPEFSSLCPVTGQPDSSRLRICYVPDQLCLETKSLKYYLASWRNTAAFNEDIVNRLLDELSAACSPRQMIVRGDFSPRGGIRLTAQASLPPGIVDNPFGL

SEQ ID NO: 50577 - protein, 121 aa, Verrucomicrobiaceae bacterium
  misc_feature (1)..(121): tr|A0A4Q2Y6S8|A0A4Q2Y6S8_9BACT NADPH-dependent 7-cyano- 7-deazaguanine reductase OS=Verrucomicrobiaceae bacteri um OX=2026800 GN=queF PE=3 SV=1
MPSSPDEAKLEIFPNKRPGRKYWITLNTSEFSSLCPVTGQPDSARIEIRYVPGETIVETKSLKYYLASFRNQPAFNEEIVNRILDDLVAALSPRQLIVRGEFAPRGGIQLTTEATYPEDNS

SEQ ID NO: 50578 - protein, 126 aa, Verrucomicrobiae bacterium
  misc_feature (1)..(126): tr|B5JRC9|B5JRC9_9BACT NADPH-dependent 7-cyano-7-deazag uanine reductase OS=Verrucomicrobiae bacterium DG1235 O X=382464 GN=queF PE=3 SV=1
MESKYLGKTVQQPIDELDTFEAPEGVTTVTMTSDELTSSCPITGQPDFYNVSIEYAPKELCIESKSLKLFLWGFRDKAMFAEKIAAVICDRVVQDISPRRCRVMTFQKARGGIEIESVAEFPRATD

SEQ ID NO: 50579 - protein, 143 aa, Verrucomicrobiae bacterium
  misc_feature (1)..(143): tr|A0A2A2YFH3|A0A2A2YFH3_9BACT NADPH-dependent 7-cyano- 7-deazaguanine reductase OS=Verrucomicrobiae bacterium AMD-G2 OX=1982328 GN=queF PE=3 SV=1
MSDTLTLLGNSQTSWPQSPEQAKLETFPNRSPQAHYWVHLDFPEFSSLCPVTGQPDTARIQIRYIPSENCIETKSLKFYLTSFRNHQAFNEEIVNRILRDIVSAVNPREAVVRGDFSPRGGISLTAQASHPQAQWNGLSIDEK

SEQ ID NO: 50580 - protein, 119 aa, Verrucomicrobiales bacterium
  misc_feature (1)..(119): tr|A0A358ELZ7|A0A358ELZ7_9BACT NADPH-dependent 7-cyano- 7-deazaguanine reductase OS=Verrucomicrobiales bacteriu m OX=2026801 GN=queF PE=3 SV=1
MPSSRKEAIIETFANPSPGRDYWIELHTQEYTSKCPVTNQPDFGSITIRYIPKDLCIETKSLKFYLSSYRNEECFNEMAVNWMLDDLVKACAPTKMVVKGEFASRGGIRVVVEASHPDN

SEQ ID NO: 50581 - protein, 144 aa, Verrucomicrobiales bacterium
  misc_feature (1)..(144): tr|A0A3D3LGF7|A0A3D3LGF7_9BACT NADPH-dependent 7-cyano- 7-deazaguanine reductase OS=Verrucomicrobiales bacteriu m OX=2026801 GN=queF PE=3 SV=1
MSDLNELSLLGRSEHRLPASPDEAELETFPNRTPGRNYTIHLTAPDFSSLCPVTGQPDAAHVEIIYIPDERCVETKSLKFYLASYRNHAAFNEAIVNRILDDLVKACAPRQARVRGRFAPRGGIQLTCEACHPDRDAALGWPAA

SEQ ID NO: 50582 - protein, 152 aa, Verticiella sediminum
  misc_feature (1)..(152): tr|A0A556AVD3|A0A556AVD3_9BURK NADPH-dependent 7-cyano- 7-deazaguanine reductase OS=Verticiella sediminum OX=12 47510 GN=queF PE=3 SV=1
MSQTDHLTQLGQAAAPAASPEHAVLERVPNPHPDTDYVARFTAPEFTSLCPVTGQPDFAHLVIDYVPDQWLVESKSLKLYLTSFRNHGAFHEDCTVGIGRRLQALLEPRWLRIGGYWYPRGGIPIDVFWQTGEPPKGIWLPDTGVAAYRGRG

SEQ ID NO: 50583 - protein, 132 aa, Vesicomyosocius okutanii
  misc_feature (1)..(132): sp|A5CWU3|QUEF_VESOH NADPH-dependent 7-cyano-7-deazagua nine reductase OS=Vesicomyosocius okutanii subsp. Calyp togena okutanii (strain HA) OX=412965 GN=queF PE=3 SV=1
MSSQPNKNLKVFDNPNIERNFIIQINMPEFTCLCPKTGQPDFATLYLEYIADKVCIELKSLKMYIWSYRSKGEFHEAVTNKILDDLIQISNPRFMRLKAIFNVRGGIYTTIIAEYQQKNWTFKTKIDLQYQG

SEQ ID NO: 50584 - protein, 281 aa, Vespertiliibacter pulmonis
  misc_feature (1)..(281): tr|A0A3N4WJ27|A0A3N4WJ27_9PAST NADPH-dependent 7-cyano- 7-deazaguanine reductase OS=Vespertiliibacter pulmonis OX=1443036 GN=queF PE=3 SV=1
MNYEHHSLNTLKLGKSTNYADQYDPTLLQGVPRKLNRDDLAITEKQPFTNGTDLWTAYEISWLNVKGLPQVAIADIKLDFRSENLIESKSFKLYLNSFNQTKFSSMEEVRRIIEKDLVNCANGNVSVTLYSLPYYTNQRIIALDGVCIDDQDIEISDYTFSPELLMNITNESEEIVQEKLVSHLLKSNCLITQQPDWGTVQIHYVGKRLDREKLLRYLVSFRQHNEFHEQCVERIFCDLMKFAAPEKLTVYARYTRRGGLDINPFRSNFEQLSENYRLARQ

SEQ ID NO: 50585 - protein, 273 aa, Vibrio aerogenes
  misc_feature (1)..(273): tr|A0A1M5ZM76|A0A1M5ZM76_9VIBR NADPH-dependent 7-cyano- 7-deazaguanine reductase OS=Vibrio aerogenes CECT 7868 OX=1216006 GN=queF_2 PE=3 SV=1
MNTAYSKNLGKKTSYISTYSPELLDPIPRAYGRENITDCQNHCFSGYDLWTGYELSWLNLKGKPMVAVAEFIIPANSLNLIESKSFKLYLNSLNQTRISSEDELVSMLVRDLSQAAEGDVEVKLLNVNRDFSPRVNTTFECIDDLDIEVNSYDYDENLLQGSVSETHAEESLCSHLLKSNCLVTHQPDWGSVYIKYKGKAINREKLLRYIISFREHNEFHEQCVERIFSDIKRCCSPDQLTVFARYTRRGGLDINPFRSNFEDEMSVEREYRQ

SEQ ID NO: 50586 - protein, 281 aa, Vibrio aerogenes
  misc_feature (1)..(281): tr|A0A1M5Z2M7|A0A1M5Z2M7_9VIBR NADPH-dependent 7-cyano- 7-deazaguanine reductase OS=Vibrio aerogenes CECT 7868 OX=1216006 GN=queF_1 PE=3 SV=1
MSKYSDDKALAGLTLGKTTHYKAHYDPSLLQPVPRSLNRDDLQLNSSLPFTGCDLWTLYELSWLNHNGLPQIAIGHVSVPAESPALIESKSFKLYLNSYNQSRFDSIQAVQKQLENDLSACAGAPVSVILSKVTDFTGEAITPMQGECIDDTDILIDCYDFNPSLLDNATGHEWVEETLHSHLLKSNCLITSQPDWGSIEIHYQGHKINREALLRYLISFREHNEFHEQCVERIFTDIKKYCAPKKLTVYARYTRRGGLDINPYRSSENKAPINTGRMARQ

SEQ ID NO: 50587 - protein, 272 aa, Vibrio agarivorans
  misc_feature (1)..(272): tr|A0A2K1CEV2|A0A2K1CEV2_9VIBR NADPH-dependent 7-cyano- 7-deazaguanine reductase OS=Vibrio agarivorans OX=15362 2 GN=queF PE=3 SV=1
MTTYNKNLGKKTEYVSHYDPELLDPIPRQRGRNEIKEIQMASHMGFDLWTAFEVSWLNLKGKPVVAIAEFIFPHTSANLIESKSFKLYLNSFNQTRLESADVVMEKMALDLSKAAGAEVNVSFLDVAIPQELTVSRDFDCIDHLDITVDDFSYDEDALLGSTTDAQVTESLCSHLLKSNCLVTNQPDWGSVYIRYTGAKIDQERLLKYLISFREHNEFHEQCVERIYSDIKRCCAPEKLTVFARYTRRGGLDINPYRSDFEAEICSGRNPRQ

SEQ ID NO: 50588 - protein, 281 aa, Vibrio agarivorans
  misc_feature (1)..(281): tr|A0A2K1CFF8|A0A2K1CFF8_9VIBR NADPH-dependent 7-cyano- 7-deazaguanine reductase OS=Vibrio agarivorans OX=15362 2 GN=queF PE=3 SV=1
MSKYSDAKELADLTLGKKTEYTNQFDPALLQPVPRSLNRDDLNLGDSLPFVGYDIWTLYELSWLNSKGLPQVALGEVYIPATSTNLIESKSFKLYLNSYNQTCFASWEEVTQHLTQDLSACAGEQVLVNVYPVTHYTNQPIVIMDGECIDNQDIEINDYQFNPALLENASEPERVEEVLHSHLLKSNCLITNQPDWGSIEIRYQGNKINREKLLRYLVSFREHNEFHEQCVERIFSDLMKYCQPEKLTVFARYTRRGGLDINPYRSSHQDKPLHNQRLARQ

SEQ ID NO: 50589 - protein, 281 aa, Vibrio alfacsensis
  misc_feature (1)..(281): tr|A0A347US81|A0A347US81_9VIBR NADPH-dependent 7-cyano- 7-deazaguanine reductase OS=Vibrio alfacsensis OX=10743 11 GN=queF PE=3 SV=1
MSKYSDAKELAGLTLGKKTEYANQYDASLLQPVPRSLNRDDLELGDSLPFLGHDIWTLYELSWLNGKGLPQVAVGEVYIPATSANLIESKSFKLYLNSYNQTRFTSWEEVTERLIQDLSACAGERVLVEVNPVNHYTNQPIVTMEGECIDDQDIEITDYDFDATLLEGAAGEEQVEEILHSHLLKSNCLITNQPDWGSVEIRYQGAKLNREKLLRYLVSFREHNEFHEQCVERIFTDLMKYGQPNKLTVFARYTRRGGLDINPYRSTEQDKPTHNNRMARQ

SEQ ID NO: 50590 - protein, 281 aa, Vibrio alginolyticus
  misc_feature (1)..(281): tr|D0WU02|D0WU02_VIBAL NADPH-dependent 7-cyano-7-deazag uanine reductase OS=Vibrio alginolyticus 40B OX=674977 GN=queF PE=3 SV=1
MSKYSDAKELAGLTLGKTTEYANQYDPSLLQPVPRSLNRDDLQLGDTLPFMGHDIWTLYELSWLNSKGLPQVAVGEVYIPATSANLIESKSFKLYLNSYNQTRFASWEEVTERLTQDLSECAGEKVLVEVNPVTHYTNQPIVTMDGECIDDQDINITSYDFDADLLEGAAGEVQVEEVLHSHLLKSNCLITNQPDWGSVEIRYQGAKIDREKLLRYLVSFREHNEFHEQCVERIFTDLMKYCQPSKLTVFARYTRRGGLDINPYRSTEQDKPAHNHRMARQ

SEQ ID NO: 50591 - protein, 281 aa, Vibrio alginolyticus
  misc_feature (1)..(281): tr|A0A2L1Y3X1|A0A2L1Y3X1_VIBAL NADPH-dependent 7-cyano- 7-deazaguanine reductase OS=Vibrio alginolyticus OX=663 GN=queF PE=3 SV=1
MSKYSDAKELAGLTLGKTTEYANQYDPSLLQPVPRSLNRDDLQLGDTLPFMGHDIWTLYELSWLNSKGLPQVAVGEVYIPATSANLIESKSFKLYLNSYNQTRFASWEEVTERLTQDLSECAGEKVLVEVNPVTHYTNQPIVTMDGECIDDQDIDITSYDFDADLLEGAAGEVQVEEVLHSHLLKSNCLITNQPDWGSVEIRYQGAKIEREKLLRYLVSFREHNEFHEQCVERIFTDLMKYCQPSKLTVFARYTRRGGLDINPYRSTEQDKPAHNHRMARQ

SEQ ID NO: 50592 - protein, 289 aa, Vibrio algivorus
  misc_feature (1)..(289): tr|A0A557PA86|A0A557PA86_9VIBR NADPH-dependent 7-cyano- 7-deazaguanine reductase OS=Vibrio algivorus OX=1667024 GN=queF PE=3 SV=1
MTHSSKQTKYANAKELQGLTLGQATQYSHDYDASLLQPVPRSLNRDDLGLKDSAELPFVGSDIWTLYELSWLNIKGLPQVAIGDVILPPTSPNLIESKSFKLYLNSFNQTRFESWQQVKQIIAQDLSHCAGEAVEVTLHSLSHYTQQPITTMQGQCIDDQDIEISDYQFDESYLKGSTFPKKVSECLHSHLLKSNCLITNQPDWGSVEIEYTGNKINQEALLRYLVSFREHNEFHEQCVERIFCDIMKYCQPEKLSVYARYTRRGGLDINPFRSTHLSKPSQMTRMARQ

SEQ ID NO: 50593 - protein, 281 aa, Vibrio anguillarum
  misc_feature (1)..(281): tr|A0A290PVG4|A0A290PVG4_VIBAN NADPH-dependent 7-cyano- 7-deazaguanine reductase OS=Vibrio anguillarum OX=55601 GN=queF PE=3 SV=1
MSKYSDAKALAGLTLGKKTDYAKQYDPSLLQPVPRSLNRDDLHLGDSLPFKGCDIWTLYELSWLNEKGLPQVAIGEVSIPATSASLIESKSFKLYLNSYNQSKVASWDEVTQRLTNDLSACAGAPVSVTLNPVSDYTGQAIVTMQGECIDGQDIEIESYQFDASLLKSAARGEQVNETLHSHLLKSNCLITNQPDWGSVEIHYQGPQIDREALLRYLVSFREHNEFHEQCVERIFTDIMQYCQPTQLTVYARYTRRGGLDINPFRSTEQERPTHNQRMARQ

SEQ ID NO: 50594 - protein, 281 aa, Vibrio anguillarum
  misc_feature (1)..(281): tr|F7YMW4|F7YMW4_VIBA7 NADPH-dependent 7-cyano-7-deazag uanine reductase OS=Vibrio anguillarum (strain ATCC 685 54 / 775) OX=882102 GN=queF PE=3 SV=1
MSKYSDAKALAGLTLGKKTDYAKQYDPSLLQPVPRSLNRDDLHLGDSLPFKGCDIWTLYELSWLNEKGLPQVAIGEVSIPATSASLIESKSFKLYLNSYNQSKIASWDEVTQRLTNDLSACAGAPVSVTLNPVTDYTGQAIVTMQGECIDGQDIEIESYQFDASLLKSAARGEQVNETLHSHLLKSNCLITNQPDWGSVEIHYQGQQIDREALLRYLVSFREHNEFHEQCVERIFTDIMQYCQPTQLTVYARYTRRGGLDINPFRSTEQERPTHNQRMARQ

SEQ ID NO: 50595 - protein, 281 aa, Vibrio antiquarius
  misc_feature (1)..(281): tr|A7K612|A7K612_VIBAE NADPH-dependent 7-cyano-7-deazag uanine reductase OS=Vibrio antiquarius (strain Ex25) OX =150340 GN=queF PE=3 SV=1
MSKYSDAKELAGLTLGKKTEYANQYDPSLLQPVPRSLNRDDLQLGDSLPFMGHDIWTLYELSWLNSKGLPQVAVGEVYIPATSANLIESKSFKLYLNSYNQTRFSSWEEVEERLTQDLSECAGEKVLVEVNPVTHYTNQPIVTMEGECIDDQDIDITSYDFDADLLEGAAGEEQVEEILHSHLLKSNCLITNQPDWGSVEIRYQGAKIDREKLLRYLVSFREHNEFHEQCVERIFTDLMKYCQPNKLTVFARYTRRGGLDINPYRSTEQDKPDHNHRMARQ

SEQ ID NO: 50596 - protein, 281 aa, Vibrio atlanticus
  misc_feature (1)..(281): tr|A0A1C3J1R3|A0A1C3J1R3_9VIBR NADPH-dependent 7-cyano- 7-deazaguanine reductase OS=Vibrio atlanticus OX=693153 GN=queF PE=3 SV=1
MSKYSDAKELAGLTLGQKTEYSNQYDASLLQPVPRSLNRNDLALNGELPFVGHDIWTMYELSWLNTNGLPQVAVGEVFIPATSQNLIESKSFKLYLNSYNQTQFENWDQVTERLTQDLSACAGESVIVNVNSVTDYTNQPIVTMEGDCIDNQDIQITSYDFEASLLEGAAGEQEVEETLHSHLLKSNCLITNQPDWGSVEIAYSGKQIDREALLRYLVSFREHNEFHEQCVERIFTDIMKYCAPSKLTVFARYTRRGGLDINPYRSTEQDRPSHNKRMARQ

SEQ ID NO: 50597 - protein, 281 aa, Vibrio atlanticus
  misc_feature (1)..(281): tr|A0A558H3Q3|A0A558H3Q3_9VIBR NADPH-dependent 7-cyano- 7-deazaguanine reductase OS=Vibrio atlanticus OX=693153 GN=queF PE=3 SV=1
MSKYSDAKELAGLTLGQKTEYSNQYDASLLQPVPRSLNRDDLALNGDLPFVGHDIWTMYELSWLNTNGLPQVAVGEVFIPATSPNLIESKSFKLYLNSYNQTQFQNWDQVTERLTQDLSACAGEAVIVNVNSVTDYTNQPIVTMEGDCIDNQDIQITSYDFEASLLEGAAGEQDVEETLHSHLLKSNCLITNQPDWGSVEIAYSGKKIDRESLLRYLVSFREHNEFHEQCVERIFTDIMKYCAPSKLTVFARYTRRGGLDINPYRSTEQDRPSHNKRMARQ

SEQ ID NO: 50598 - protein, 272 aa, Vibrio azureus
  misc_feature (1)..(272): tr|U3A657|U3A657_9VIBR NADPH-dependent 7-cyano-7-deazag uanine reductase OS=Vibrio azureus NBRC 104587 OX=12190 77 GN=queF PE=3 SV=1
MTTYNKNLGKKTEYVSHYAPELLDPIPRQRGRDEIKEIQMASHAGFDLWTAFEVSWLNMKGKPVVAIAEFIFPHTSANLIESKSFKLYLNSFNQTRLESADVVMEKMVHDLSQAAGAEVSVSFSDVATPQELTVSRDFDCIDHLDITVDDFSYDEDALLGSTTDEQVTESLCSHLLKSNCLVTNQPDWGSVYIRYTGAKIDQERLLKYLISFREHNEFHEQCVERIYSDIKRCCAPEKLTVFARYTRRGGLDINPYRSDFEAEICSGRNPRQ

SEQ ID NO: 50599 - protein, 281 aa, Vibrio azureus
  misc_feature (1)..(281): tr|U3ANR7|U3ANR7_9VIBR NADPH-dependent 7-cyano-7-deazag uanine reductase OS=Vibrio azureus NBRC 104587 OX=12190 77 GN=queF PE=3 SV=1
MSKYSDAKELAGLTLGKKTEYASQFDPSLLQPVPRSLNRDDLNLGDSLPFVGYDIWTLYELSWLNSKGLPQVALGEVYIPATSTNLIESKSFKLYLNSYNQTRFASWEEITQRLTQDLSACAGEQVLVNVFPVTHYTDQPIVTMDGECIDNQDIEISDYQFNPELLDNAAESEQVEEVLHSHLLKSNCLITNQPDWGSVEIRYQGNKINREKLLRYLVSFREHNEFHEQCVERIFSDLMKYCQPEKLTVFARYTRRGGLDINPYRSSYQDKPLHNHRLARQ

SEQ ID NO: 50600 - protein, 281 aa, Vibrio barjaei
  misc_feature (1)..(281): tr|A0A1J4R1C0|A0A1J4R1C0_9VIBR NADPH-dependent 7-cyano- 7-deazaguanine reductase OS=Vibrio barjaei OX=1676683 G N=queF PE=3 SV=1
MSKYSNAKELSGLTLGQKTEYANHYDANLLQPVPRSLNRDDLELGETLPFQGCDIWTLYEISWLNTKGLPQVAVGEVSIPATSANLIESKSFKLYLNSYNQTRFATWEQVQSTIAADLSNCAGETVSVKLIPVADFENTNIVGMAGECIDDQDITIDNYEFDAELLKDAADDEIVEEALHSHLLKSNCLITNQPDWGSVEIQYQGAKINREALLRYLVSFREHNEFHEQCVERIFTDLMQYCNPTKLTVYARYTRRGGLDINPYRSNQYQAPEHNARMARQ

SEQ ID NO: 50601 - protein, 281 aa, Vibrio bivalvicida
  misc_feature (1)..(281): tr|A0A177XWD6|A0A177XWD6_9VIBR NADPH-dependent 7-cyano- 7-deazaguanine reductase OS=Vibrio bivalvicida OX=12768 88 GN=queF PE=3 SV=1
MSKYSDAKELTGLTLGQKTEYSNQYDSSLLQPVPRSLNRDDLNLGDSLPFRGCDIWTLYELSWLNDKGLPQVAVGEVSIPATSANLIESKSFKLYLNSLNQTRFPSWDHVEQTLVQDLSACAGETVSVTVRSVVDYTDSVVVTMDGECIDEQDIEITNYDFDRTLIQGAAIGELVEESLHSHLLKSNCLITNQPDWGSVEIQYKGKQIDREALLRYLVSFREHNEFHEQCVERIFTDIMEFCQPETLTVYARYTRRGGLDINPYRSNVNSQPSHNQRMARQ

SEQ ID NO: 50602 - protein, 281 aa, Vibrio brasiliensis
  misc_feature (1)..(281): tr|E8LPF7|E8LPF7_9VIBR NADPH-dependent 7-cyano-7-deazag uanine reductase OS=Vibrio brasiliensis LMG 20546 OX=94 5543 GN=queF PE=3 SV=1
MSKYSDAKELAGLTLGQKTEYSNQYDPSLLQPVPRSLNRDDLDLGDTLPFQGCDIWTLYELSWLNEKGLPQVAIGEVSIPATSTNLIESKSFKLYLNSFNQTRFASWDEVERALVKDLSHCAGEEVSVTIRSVVDYTDSVVVTMDGDCIDDQDIEITSYDFDRTLIQGAATGDIVEESLHSHLLKSNCLITNQPDWGSVEIQYKGKQIDREALLRYIVSFREHNEFHEQCVERIFTDIMEFCQPESLTVYARYTRRGGLDINPYRSNVNGQPNHNQRMARQ

SEQ ID NO: 50603 - protein, 284 aa, Vibrio breoganii
  misc_feature (1)..(284): tr|A0A193KDR2|A0A193KDR2_9VIBR NADPH-dependent 7-cyano- 7-deazaguanine reductase OS=Vibrio breoganii OX=553239 GN=queF PE=3 SV=1
MSKYSDAKELAGLTLGQKTQYASLYDPELLQAVPRSLNRDDLELGDTLPFKGQDIWTLYELSWLNANGLPQVAVGEVSIPASSPNLIESKSFKLYLNSYNQTKFSDWDAVKNQLSVDLSACAGGEVSVTLSRVQDFNQQPIVDMQGACIDEQDISITEYEFSTDYLKGSVSEESVDEVLHSHLLKSNCLITNQPDWGSVEIRYSGKKINQEALLRYLVSFREHNEFHEQCVERIFTDIMHFCQPKTLSVYARYTRRGGLDINPYRTSLDSESNAPDSTLRLARQ

SEQ ID NO: 50604 - protein, 284 aa, Vibrio breoganii
  misc_feature (1)..(284): tr|A0A4U2GPS6|A0A4U2GPS6_9VIBR NADPH-dependent 7-cyano- 7-deazaguanine reductase OS=Vibrio breoganii OX=553239 GN=queF PE=3 SV=1
MSKYSDAKELAGLTLGQKTQYASLYDPELLQAVPRSLNRDDLELGDTLPFKGQDIWTLYELSWLNANGLPQVAVGEVSIPASSPNLIESKSFKLYLNSYNQTKFSDWDAVKNQLSVDLSACAGGEVSVTLSRVQDFNQQPIVDMQGACIDEQDISITEYEFSTDYLKGSVSEESVGEVLHSHLLKSNCLITNQPDWGSVEIRYSGKKINQEALLRYLVSFREHNEFHEQCVERIFTDIMHFCQPKSLSVYARYTRRGGLDINPYRTSLDSESNAPDSTLRLARQ

SEQ ID NO: 50605 - protein, 281 aa, Vibrio campbellii
  misc_feature (1)..(281): sp|A7MYB6|QUEF_VIBCB NADPH-dependent 7-cyano-7-deazagua nine reductase OS=Vibrio campbellii (strain ATCC BAA-11 16 / BB120) OX=338187 GN=queF PE=3 SV=1
MSKYSDAKELAGLTLGKKTEYANQYDASLLQPVPRSLNRDDLELGDSLPFLGHDIWTLYELSWLNSKGLPQVAVGEVYIPATSANLIESKSFKLYLNSYNQTRFATWEEVTERLTQDLSACAGEAVLVEVNPVNHYTNQPIVTMEGECIDDQDIEITSYDFNAALLEGAAGDEQVEEILHSHLLKSNCLITNQPDWGSVEIRYQGAKLDREKLLRYLVSFREHNEFHEQCVERIFTDLMKYCQPTKLTVFARYTRRGGLDINPYRSTEQDKPAHNNRMARQ

SEQ ID NO: 50606 - protein, 281 aa, Vibrio campbellii
  misc_feature (1)..(281): tr|A0A1P8MG94|A0A1P8MG94_9VIBR NADPH-dependent 7-cyano- 7-deazaguanine reductase OS=Vibrio campbellii OX=680 GN =queF PE=3 SV=1
MSKYSDAKELAGLTLGKKTEYANQYDASLLQPVPRSLNRDDLELGDSLPFLGHDIWTLYELSWLNSKGLPQVAVGEVYIPATSANLIESKSFKLYLNSYNQTRFATWEEVTERLTQDLSACAGEAVLVEVNPVNHYTNQPIVTMEGECIDDQDIEITSYDFDAALLQGAAGDEQVEEILHSHLLKSNCLITNQPDWGSVEIRYQGAKLDREKLLRYLVSFREHNEFHEQCVERIFTDLMKYCQPTKLTVFARYTRRGGLDINPYRSTEQDKPAHNNRMARQ

SEQ ID NO: 50607 - protein, 281 aa, Vibrio caribbeanicus
  misc_feature (1)..(281): tr|E3BPQ4|E3BPQ4_9VIBR NADPH-dependent 7-cyano-7-deazag uanine reductase OS=Vibrio caribbeanicus ATCC BAA-2122 OX=796620 GN=queF PE=3 SV=1
MSKYSNAQELAGLTLGQKTEYSNQYDPNLLHPVPRSLNRDDLYLGDTLPFIGCDLWTMYEVSWLNKNGLPQVAIGEVSVPATSSNLIESKSFKLYLNSFNQTHFSDWDEVERIMTKDLSACAGEQVGVTLRALEDYTDTLIVSMDGECIDNQDITIDNYDLTRELLQNSATGEVIEESLHSHLLKSNCLITNQPDWGSVEIQYKGKKINREALLRYIVSFREHNEFHEQCVERIFTDIMEFCQPSELTVFARYTRRGGLDINPYRSNIRAQPNHNQRMARQ

SEQ ID NO: 50608 - protein, 281 aa, Vibrio caribbeanicus
  misc_feature (1)..(281): tr|A0A0A6QLP0|A0A0A6QLP0_9VIBR NADPH-dependent 7-cyano- 7-deazaguanine reductase OS=Vibrio caribbeanicus OX=701 175 GN=queF PE=3 SV=1
MSKYSDAKELAGLTLGQKTDYSNQYDPSLLQPVPRSLNRDDLNLGDELPFQGCDIWTLYELSWLNEKGLPQVAVGEVSIPATSANLIESKSFKLYLNSFNQTRFSSWDEVENTLIQDLSQCAGETVAVTLRSVVDYTDSVIVSMDGECIDDQDIKITHYDFDETLLQNATDNEVVEESLHSHLLKSNCLITNQPDWGSVEIRYRGNKINREALLRYIVSFREHNEFHEQCVERIFTDIMKFCQPQQLTVYARYTRRGGLDINPYRSNQDAQPAHNQRMARQ

SEQ ID NO: 50609 - protein, 288 aa, Vibrio casei
  misc_feature (1)..(288): tr|A0A368LLQ7|A0A368LLQ7_9VIBR NADPH-dependent 7-cyano- 7-deazaguanine reductase OS=Vibrio casei OX=673372 GN=q ueF PE=3 SV=1
MTHSTQTKYANAKELQGLTLGQTTQYSHDYDPRLLQPVPRSLNRNDLGLTDNQKLPFIGCDIWTMYELSWLNSKGLPQVAVGDVMLPVTSENLIESKSFKLYLNSLNQTRFESWQQVQATIEKDLSQCAGEHVFVQLHPLSHYTEQLITTMKGHCIDEQDIEIKNYNFDDAYLNGAVSSHVVTETLHSHLLKSNCLITNQPDWGSVEIEYTGKQINQEALLRYLVSFREHNEFHEQCVERIFCDLMQYCQPEQLSVYARYTRRGGLDINPFRSTNLKQPHMMTRMARQ

SEQ ID NO: 50610 - protein, 281 aa, Vibrio celticus
  misc_feature (1)..(281): tr|A0A1C3JFG5|A0A1C3JFG5_9VIBR NADPH-dependent 7-cyano- 7-deazaguanine reductase OS=Vibrio celticus OX=446372 G N=queF PE=3 SV=1
MSKYSDAKELAGLTLGQKTEYSNQYDASLLQPVPRSLNRDDLALNGELPFVGHDIWTMYELSWLNTNGLPQVAVGEVFIPATSPNLIESKSFKLYLNSYNQTQFENWDQVTERLTQDLSACSGETVIVNVNSVTDYTNQPIVTMEGDCIDNQDIQITSYDFEASLLEGAAGEQDVEETLHSHLLKSNCLITNQPDWGSVEIAYSGKQIDREALLRYLVSFREHNEFHEQCVERIFTDIMKYCAPSKLTVFARYTRRGGLDINPYRSTEQDRPSHNKRMARQ

SEQ ID NO: 50611 - protein, 281 aa, Vibrio chagasii
  misc_feature (1)..(281): tr|A0A2S7VIJ6|A0A2S7VIJ6_9VIBR NADPH-dependent 7-cyano- 7-deazaguanine reductase OS=Vibrio chagasii OX=170679 G N=queF PE=3 SV=1
MSKYSDAKELAGLTLGQKTEYSNQYDASLLQPVPRSLNRDDLALNGELPFVGHDIWTMYELSWLNTNGLPQVAVGEVFIPATSPNLIESKSFKLYLNSYNQTQFENWEQVTERLTQDLSACAGEAVIVNVNSVTDYTNQPIVTMEGECIDNQDIQITSYDFEASLLEGATGEQEVEETLHSHLLKSNCLITNQPDWGSVEIAYSGKQIDREALLRYLVSFREHNEFHEQCVERIFTDIMKYCAPSKLTVFARYTRRGGLDINPYRSTEQDRPSHNKRMARQ

SEQ ID NO: 50612 - protein, 281 aa, Vibrio cholerae
  misc_feature (1)..(281): sp|Q9KTK0|QUEF_VIBCH NADPH-dependent 7-cyano-7-deazagua nine reductase OS=Vibrio cholerae serotype O1 (strain A TCC 39315 / El Tor Inaba N16961) OX=243277 GN=queF PE=1 SV=2
MSKYSDAKELASLTLGKKTEYANQYDPSLLQPVPRSLNRNDLHLSATLPFQGCDIWTLYELSWLNQKGLPQVAIGEVSIPATSANLIESKSFKLYLNSYNQTRFASWDEVQTRLVHDLSACAGETVTVNVKSLNEYTAEPIVTMQGECIDDQDIEIANYEFDDALLQGAAQGEEVSEVLHSHLLKSNCLITNQPDWGSVEIAYHGAKMNREALLRYLVSFREHNEFHEQCVERIFTDIMRYCQPQSLTVYARYTRRGGLDINPFRSSHQSAPNHNQRMARQ

SEQ ID NO: 50613 - protein, 281 aa, Vibrio cholerae; identical to SEQ ID NO: 50612
  misc_feature (1)..(281): tr|A0A4S3QLI6|A0A4S3QLI6_VIBCL NADPH-dependent 7-cyano- 7-deazaguanine reductase OS=Vibrio cholerae O1 biovar E l Tor OX=686 GN=queF PE=3 SV=1

SEQ ID NO: 50614 - protein, 281 aa, Vibrio cidicii
  misc_feature (1)..(281): tr|A0A151KX16|A0A151KX16_9VIBR NADPH-dependent 7-cyano- 7-deazaguanine reductase OS=Vibrio cidicii OX=1763883 G N=queF PE=3 SV=1
MSKYSDAKELAGLTLGKKTEYATQYDASLLQPVPRSLNRDDLQLGANLPFVGHDIWTLYELSWLNSKGLPQVAVGEVSIPATSPNLIESKSFKLYLNSYNQTRFSTWQAVIERLTSDLSACAGEPVAVKVNPLSHYTQQPIVTMAGECIDDQDIEIENYDFDQSLLQDAAGETVVQETLHSHLLKSNCLITNQPDWGSVEIAYHGKQIDREKLLRYLVSFREHNEFHEQCVERIFTDIMKYCAPQSLTVYARYTRRGGLDINPYRSTQQAKPAHNQRMARQ

SEQ ID NO: 50615 - protein, 281 aa, Vibrio cidicii
  misc_feature (1)..(281): tr|A0A151JJT0|A0A151JJT0_9VIBR NADPH-dependent 7-cyano- 7-deazaguanine reductase OS=Vibrio cidicii OX=1763883 G N=queF PE=3 SV=1
MSKYSDAKELAGLTLGKKTEYATQYDASLLQPVPRSLNRDDLQLGANLPFVGHDIWTLYELSWLNSKGLPQVAVGEVSIPATSPNLIESKSFKLYLNSYNQTRFATWQAVIERLTSDLSACAGEPVAVKVNPLSHYTQQPIVTMAGECIDDQDIEIESYDFDQSLLQDAAGETVVQETLHSHLLKSNCLITNQPDWGSVEIAYHGKQIDREKLLRYLVSFREHNEFHEQCVERIFTDIMKYCAPQSLTVYARYTRRGGLDINPYRSTQQAKPAHNQRMARQ

SEQ ID NO: 50616 - protein, 282 aa, Vibrio cincinnatiensis
  misc_feature (1)..(282): tr|A0A1T4RX84|A0A1T4RX84_VIBCI NADPH-dependent 7-cyano- 7-deazaguanine reductase OS=Vibrio cincinnatiensis DSM 19608 OX=1123491 GN=queF PE=3 SV=1
MMSKYSEAKELAELTLGKKTDYTHQYDPKLLQPVPRRLNREQLNLHESLPFIGCDLWTLYEISWLNDKGLPQVAIGEVSIPATSTNLIESKSFKLYLNSLNQTQFSSWQAVHECLTHDLSQCAGETVSVQLFPLSHYTHQPIVNMQGECIDEQEIAITDYQFNPEVLCQATSEIIVEETLHSHLLKSNCLITNQPDWGSVEITYQGPQIHREALLRYIVSFREHNEFHEQCVERIFTDIQRYCHPEHLTVMARYTRRGGLDINPFRSTHQATPTHHFRMARQ

SEQ ID NO: 50617 - protein, 284 aa, Vibrio comitans
  misc_feature (1)..(284): tr|A0A4Y3IKW2|A0A4Y3IKW2_9VIBR NADPH-dependent 7-cyano- 7-deazaguanine reductase OS=Vibrio comitans NBRC 102076 OX=1219078 GN=queF PE=3 SV=1
MSKYSDAKELAGLTLGQKTQYASLYDPKLLQAVPRSLNRDDLELGDALPFKGQDIWTLYELSWLNANGLPQVAVGEVSIPASSPNLIESKSFKLYLNSYNQTKFSNWDEVQEQLAIDLSACAGGKVSVTLSRVQDFNQQPIVDMQGTCIDEQDISITEYEFSTDYLKGSVSEKSVDEVLHSHLLKSNCLITNQPDWGSVEIRYSGKKINQEALLRYLVSFREHNEFHEQCVERIFTDIMLFCKPQSLSVYARYTRRGGLDINPYRTSLNSESSAPDSTLRLARQ

SEQ ID NO: 50618 - protein, 272 aa, Vibrio coralliilyticus
  misc_feature (1)..(272): tr|A0A1V0IDN9|A0A1V0IDN9_9VIBR NADPH-dependent 7-cyano- 7-deazaguanine reductase OS=Vibrio coralliilyticus OX=1 90893 GN=queF PE=3 SV=1
MTTYDKNLGKKSEYISQYQPELLDPIPRQKGRDEIKDLKVATHAGYDLWTAFEVSWLNNKGKPIVAIAEFIIPHTSNNLIESKSFKLYLNSFNQTRFESKDIVIEKMQSDLTNAASAEVTVSFMDVDEPQQTSINKQFDCIDGLDITVDSFEYDADSLSGSTVDEYVSESLCSHLLKSNCLVTNQPDWGSVYIRYTGAKINHESLLKYLISFREHNEFHEQCVERIYSDIKRCCAPEKLTVFARYTRRGGLDINPYRSDFESEICSGRNPRQ

SEQ ID NO: 50619 - protein, 281 aa, Vibrio coralliilyticus
  misc_feature (1)..(281): tr|A0A2A2CQ98|A0A2A2CQ98_9VIBR NADPH-dependent 7-cyano- 7-deazaguanine reductase OS=Vibrio coralliilyticus OX=1 90893 GN=queF PE=3 SV=1
MSKYSDAKELAGLTLGQKTEYANQYDASLLQPVPRSLNRDDLNLGDELPFQGCDTWTLYELSWLNEKGLPQVAIGDVSIPATSANLIESKSFKLYLNSFNQTRFSSWDQVEQTLAKDLSHCAGEEVSVTIRSVVDYTDSVVVTMDGDCIDDQDIEIESYEFDTSLLEGAAEQEHVSESLHSHLLKSNCLITNQPDWGSVEIQYQGQKINREALLRYLVSFREHNEFHEQCVERIFTDIMKYCQPEKLTVYARYTRRGGLDINPYRSTEQAQPTHNQRMARQ

SEQ ID NO: 50620 - protein, 281 aa, Vibrio crassostreae
  misc_feature (1)..(281): tr|A0A560YIW9|A0A560YIW9_9VIBR NADPH-dependent 7-cyano- 7-deazaguanine reductase OS=Vibrio crassostreae OX=2461 67 GN=queF PE=3 SV=1
MSKYSDAKELAGLTLGQKTEYSNQYDASLLQPVPRSLNRDDLALNGELPFVGHDIWTMYELSWLNTNGLPQVAVGEVFIPATSPNLIESKSFKLYLNSYNQSQFENWEQVTERLTQDLSACAGETVIVNVNSVTDYTNQPIVTMEGECIDNQDIHITSYDFEASLLEGAAGEQEVEETLHSHLLKSNCLITNQPDWGSVEIAYSGKQIDREALLRYLVSFREHNEFHEQCVERIFTDIMKYCGPSKLTVFARYTRRGGLDINPYRSTEQDRPSHNKRMARQ

SEQ ID NO: 50621 - protein, 281 aa, Vibrio crassostreae
  misc_feature (1)..(281): tr|A0A0T7CVH8|A0A0T7CVH8_9VIBR NADPH-dependent 7-cyano- 7-deazaguanine reductase OS=Vibrio crassostreae OX=2461 67 GN=queF PE=3 SV=1
MSKYSDAKELAGLTLGQKTEYSNQYDASLLQPVPRSLNRDDLALNGELPFVGHDIWTMYELSWLNTNGLPQVAVGEVFIPATSPNLIESKSFKLYLNSYNQTQFENWEQVTERLTQDLSACAGETVIVNVNSVTDYTNQPIVTMEGECIDNQDIHITSYDFEASLLEGAAGEQEVEETLHSHLLKSNCLITNQPDWGSVEIAYSGKQIDREALLRYLVSFREHNEFHEQCVERIFTDIMKYCGPSKLTVFARYTRRGGLDINPYRSTEQDRPSHNKRMARQ

SEQ ID NO: 50622 - protein, 281 aa, Vibrio diabolicus
  misc_feature (1)..(281): tr|A0A2L2K404|A0A2L2K404_9VIBR NADPH-dependent 7-cyano- 7-deazaguanine reductase OS=Vibrio diabolicus OX=50719 GN=queF PE=3 SV=1
MSKYSDAKELAGLTLGKKTEYANQYDPSLLQPVPRSLNRDDLQLGDSLPFMGHDIWTLYELSWLNSKGLPQVAVGEVYIPATSANLIESKSFKLYLNSYNQTRFASWEEVEERLTQDLSECAGEKVLVEVNPVTHYTNQPIVTMEGECIDDQDIDITSYDFDADLLEGAAGEEQVEEILHSHLLKSNCLITNQPDWGSVEIRYQGAKIDREKLLRYLVSFREHNEFHEQCVERIFTDLMKYCQPSKLTVFARYTRRGGLDINPYRSTEQDKPDRNHRMARQ

SEQ ID NO: 50623 - protein, 281 aa, Vibrio diazotrophicus
  misc_feature (1)..(281): tr|A0A2J8I695|A0A2J8I695_VIBDI NADPH-dependent 7-cyano- 7-deazaguanine reductase OS=Vibrio diazotrophicus OX=68 5 GN=queF PE=3 SV=1
MSKYSDAKELAGLTLGKKTDYSHQYDPTLLQPVPRSLNRDDLNLGSELPFKGCDIWTLYELSWLNTKGLPQVAIGEVAIPATSANLIESKSFKLYLNSFNQTKFENWQQVEQHLITDLSACAGETVEVKVKPLSDYTAEPIVTMKGDCIDNQDIEIDSYDFDESLLEGAAEDTIVSETLHSHLLKSNCLITNQPDWGSVEIEYRGPKINREALLRYIVSFREHNEFHEQCVERIFTDITRFCKPEQLTVFARYTRRGGLDINPYRSTEQAAPQDNKRMARQ

SEQ ID NO: 50624 - protein, 281 aa, Vibrio diazotrophicus
  misc_feature (1)..(281): tr|A0A329E7F6|A0A329E7F6_VIBDI NADPH-dependent 7-cyano- 7-deazaguanine reductase OS=Vibrio diazotrophicus OX=68 5 GN=queF PE=3 SV=1
MSKYSDAKELAGLTLGKKTDYSHLYDPTLLQPVPRSLNRDDLNLGSELPFKGCDIWTLYELSWLNTKGLPQVAIGEVAIPATSANLIESKSFKLYLNSFNQTKFENWQQVEQHLITDLSACAGETVEVKVKPLSDYTAEPIVTMKGDCIDDQDIEIDSYDFDESLLEEAAEDTIVSETLHSHLLKSNCLITNQPDWGSVEIEYRGPKINREALLRYIVSFREHNEFHEQCVERIFTDITRFCKPEQLTVFARYTRRGGLDINPFRSTEQAAPQDNKRMARQ

SEQ ID NO: 50625 - protein, 281 aa, Vibrio europaeus
  misc_feature (1)..(281): tr|A0A178JC97|A0A178JC97_9VIBR NADPH-dependent 7-cyano- 7-deazaguanine reductase OS=Vibrio europaeus OX=300876 GN=queF PE=3 SV=1
MSKYSDAKELAGLTLGQKTEYSNQYDASLLQPVPRSLNRDDLNLGDSLPFQGCDIWTLYELSWLNEKGLPQVAIGEVSIPATSANLIESKSFKLYLNSFNQTRFSSWDQVEQTLIKDLSACAGETVSVTVRSVVDYTDSVVVTMDGDCIDEQEIEITSYEFDHTLIQGAATGEVVEESLHSHLLKSNCLITNQPDWGSVEIQYKGKQIDREALLRYLVSFREHNEFHEQCVERIFTDIMEFCQPESLTVYARYTRRGGLDINPYRSNVNGQPSHNQRMARQ

SEQ ID NO: 50626 - protein, 284 aa, Vibrio ezurae
  misc_feature (1)..(284): tr|U3CAL1|U3CAL1_9VIBR NADPH-dependent 7-cyano-7-deazag uanine reductase OS=Vibrio ezurae NBRC 102218 OX=121908 0 GN=queF PE=3 SV=1
MSKYSDAKELAGLTLGQKTQYSSSYDPKLLQAVPRSLNRDDLELGDTLPFKGHDIWTLYELSWLNNNGLPQVAVGHVVIPANTPNLIESKSFKLYLNSYNQTQFAHWDDVQTQLIQDLSACAGGDVSVTLSKVQDFNQQPIIDMQGTCIDEQEIRVTSYEFNADYLKDSVSEEWVTETLHSHLLKSNCLITNQPDWGSVEIRYTGKKINREALLRYLVSFREHNEFHEQCVERIFTDIRSLCQPKELSVYARYTRRGGLDINPFRTSLHSENSSPDNTLRLARQ

SEQ ID NO: 50627 - protein, 281 aa, Vibrio fluvialis
  misc_feature (1)..(281): tr|A0A0X8LN70|A0A0X8LN70_VIBFL NADPH-dependent 7-cyano- 7-deazaguanine reductase OS=Vibrio fluvialis OX=676 GN= queF PE=3 SV=1
MSKYSDAKELAGLTLGKKTEYANQYDPSLLQPVPRSLNRNDLNLGNELPFLGCDIWTLYELSWLNDKGLPQVAIGEVAIPATSANLIESKSFKLYLNSFNQTRFADWAEVQACLQKDLSACAGESVQVEVKSLAAYTTQPIVTMQGECIDDQDIEISSYDFDDTLLAEASSDEIVEETLHSHLLKSNCLITNQPDWGSVEIAYRGPKIDREALLRYIVSFREHNEFHEQCVERIFTDISRYCHPEHLTVLARYTRRGGLDINPFRSSHQAAPANNQRMARQ

SEQ ID NO: 50628 - protein, 281 aa, Vibrio fluvialis
  misc_feature (1)..(281): tr|S7IBI8|S7IBI8_VIBFL NADPH-dependent 7-cyano-7-deazag uanine reductase OS=Vibrio fluvialis PG41 OX=1336752 GN =queF PE=3 SV=1
MSKYSDAKELAGLTLGKKTEYANQYDPSLLQPVPRSLNRNDLNLGNELPFLGCDIWTLYELSWLNDKGLPQVAIGEVAIPATSANLIESKSFKLYLNSFNQTRFADWAEVQACLQKDLSACAGESVQVEVKSLAAYTAQPIVTMQGECIDDQDIEISSYDFDDTLLAEASSDEIVEETLHSHLLKSNCLITNQPDWGSVEIAYRGPKIDREALLRYIVSFREHNEFHEQCVERIFTDISRYCHPEHLTVLARYTRRGGLDINPFRSSHQAAPANNQRMARQ

SEQ ID NO: 50629 - protein, 281 aa, Vibrio fortis
  misc_feature (1)..(281): tr|A0A066UVR2|A0A066UVR2_9VIBR NADPH-dependent 7-cyano- 7-deazaguanine reductase OS=Vibrio fortis OX=212667 GN= queF PE=3 SV=1
MSKYSDAKELAGLTLGQKTEYANQYDVSLLQPVPRSLNRDDLALGDELPFIGHDIWTMYELSWLNDKGLPQVAVGEVFIPATSPNLIESKSFKLYLNSYNQTRFSDWEAVTERLTQDLSACAGETVLVNVNKVTDYTNQPIVTMQGDCIDEQDIEITSYDFEASILEGAAEQEHVEETLHSHLLKSNCLITNQPDWGSVEIAYTGSKINREALLRYLVSFREHNEFHEQCVERIFTDIMKYCAPTKLTVFARYTRRGGLDINPYRSTEQDKPAHNMRMARQ

SEQ ID NO: 50630 - protein, 281 aa, Vibrio furnissii
  misc_feature (1)..(281): tr|F0LVK9|F0LVK9_VIBFN NADPH-dependent 7-cyano-7-deazag uanine reductase OS=Vibrio furnissii (strain DSM 14383 / NCTC 11218 / VL 6966) OX=903510 GN=queF PE=3 SV=1
MSKYSDAKELAGLTLGKKTEYANQYDPSLLQPVPRSLNRNDLHLGDTLPFLGCDLWTLYELSWLNDNGLPQVAIGEVAIPATSANLIESKSFKLYLNSFNQTRFSTWADVQARLQHDLSACAGETVHVEVKPLAAYTAQPIVTMQGDCIDDQDITITSYAFDDTLLADATSDDVVEETLHSHLLKSNCLITNQPDWGSVEITYRGPKINREALLRYIVSFREHNEFHEQCVERIFTDITRYCHPEHLTVLARYTRRGGLDINPYRSTEQAAPSHNQRMARQ

SEQ ID NO: 50631 - protein, 281 aa, Vibrio furnissii; identical to SEQ ID NO: 50630
  misc_feature (1)..(281): tr|A0A0Q2MVW5|A0A0Q2MVW5_VIBFU NADPH-dependent 7-cyano- 7-deazaguanine reductase OS=Vibrio furnissii OX=29494 G N=queF PE=3 SV=1

SEQ ID NO: 50632 - protein, 281 aa, Vibrio galatheae
  misc_feature (1)..(281): tr|A0A0F4NLM4|A0A0F4NLM4_9VIBR NADPH-dependent 7-cyano- 7-deazaguanine reductase OS=Vibrio galatheae OX=579748 GN=queF PE=3 SV=1
MSKYSDAKELAGLTLGQKTEYATQYDSSLLQPVPRSLNRDDLNLGDTLPFEGCDIWTLYELSWLNEKGLPQVAIGEVSIPATSANLIESKSFKLYLNSFNQTRFSSWDEVEQTLVKDLSQCAGETVAVTVRSVVDYTDSLIVTMDGECIDDQDIAISSYDFDRTLIQGAANGEIIEESLHSHLLKSNCLITNQPDWGSVEIQYKGNKIDREALLRYIVSFREHNEFHEQCVERIFTDIMEFCQPESLTVYARYTRRGGLDINPYRSNVNSQPSHNQRMARQ

SEQ ID NO: 50633 - protein, 281 aa, Vibrio gazogenes
  misc_feature (1)..(281): tr|A0A1Z2SHF4|A0A1Z2SHF4_VIBGA NADPH-dependent 7-cyano- 7-deazaguanine reductase OS=Vibrio gazogenes OX=687 GN= queF PE=3 SV=1
MSKYSDTEALADLKLGQDTVYASHYDPSLLQAVPRSLNRDDLQLSEPLPFQGCDLWTLYELSWLNTKGLPQVAIGYVSIPATSPNLIESKSFKLYLNSLNQTKFDDWQTVQTKLRADLSHCAGEEVTVNLRHVNDFTHQHIITMEGECIDEQDIEIDQYAFNAAYLEQATTETFVEETLHSHLLKSNCLITNQPDWGSVEIHYRGRQINREALLRYLISFREHNEFHEQCVERIFTDLMKYCAPQSLTVYARYTRRGGLDINPYRSTEDHQPASVLRMARQ

SEQ ID NO: 50634 - protein, 281 aa, Vibrio gazogenes
  misc_feature (1)..(281): tr|A0A1M5DGK0|A0A1M5DGK0_VIBGA NADPH-dependent 7-cyano- 7-deazaguanine reductase OS=Vibrio gazogenes DSM 21264 = NBRC 103151 OX=1123492 GN=queF PE=3 SV=1
MSKYSDTKALADLKLGQDTVYASHYDPSLLQAVPRSLNRNDLHLSEPLPFQGCDLWTLYELSWLNTKGLPQVAIGYVSIPATSPNLIESKSFKLYLNSLNQTKFDDWRTVQTRLSADLSHCAGEEVTVNLRHVNDFTHQHIITMEGECIDEQDIEIDQYAFNAAYLEQATAETFVEETLHSHLLKSNCLITNQPDWGSVEIHYRGRQINREALLRYLISFREHNEFHEQCVERIFTDLMKYCAPQSLTVYARYTRRGGLDINPYRSTEDHQPASVLRMARQ

SEQ ID NO: 50635 - protein, 281 aa, Vibrio genomosp.
  misc_feature (1)..(281): tr|A0A1B9QXL1|A0A1B9QXL1_9VIBR NADPH-dependent 7-cyano- 7-deazaguanine reductase OS=Vibrio genomosp. F10 OX=723 171 GN=queF PE=3 SV=1
MSKYSNAKELAGLTLGQKTQYTNHYDASLLQPVPRSLNRDDLHLGASLPFQGCDIWTMYELSWLNENGLPQVAIGEVAIPATSANLIESKSFKLYLNSYNQTTFESWDQVSKQLQDDLSACAGETVALNIYPVTNYTQQPIVTMSGECIDAQDIKIESYDFDATLLDGATSDEIIEETLHSHLLKSNCLITNQPDWGSVEIQYQGQKINREALLRYIVSFREHNEFHEQCVERIFTDIMKYCQPTRLTVYARYTRRGGLDINPYRSSESSKPAHNQRMARQ

SEQ ID NO: 50636 - protein, 281 aa, Vibrio genomosp.
  misc_feature (1)..(281): tr|A0A4U1Y539|A0A4U1Y539_9VIBR NADPH-dependent 7-cyano- 7-deazaguanine reductase OS=Vibrio genomosp. F6 OX=7231 72 GN=queF PE=3 SV=1
MSKYSDAKELAGLTLGQKTEYASQYDPSLLQPVPRSLNRDDLELGDELPFMGHDIWTLYELSWLNNKGLPQVAVAEVYIPATSSNLIESKSFKLYLNSYNQTRFNDWSSVQASLAKDLSQCAGEAVEVEVNPVTQYTNQAIVTMEGDCIDGQDIEITSYDFDATLLSGAAGTNIVEESLHSHLLKSNCLITNQPDWGSVEIQYKGKQINRESLLRYLVSFREHNEFHEQCVERIFTDIMKYCQPSKLTVFARYTRRGGLDINPYRSTEQAKPSHNCRMARQ

SEQ ID NO: 50637 - protein, 284 aa, Vibrio halioticoli
  misc_feature (1)..(284): tr|V5FGI4|V5FGI4_9VIBR NADPH-dependent 7-cyano-7-deazag uanine reductase OS=Vibrio halioticoli NBRC 102217 OX=1 219072 GN=queF PE=3 SV=1
MSKYSDAKELAGLTLGQKTQYSSSYDPKLLQAVPRSLNRDDLKLGDTLPFKGQDIWTLYELSWLNNNGLPQVAVGHVVIPANTPNLIESKSFKLYLNSYNQTQFSDWDKVQALLVKDLSACAGGEVSVSLSKVQDFNQQPIVDMQGSCIDEQDITITAYEFNADYLKDSVSDELVTETLHSNLLKSNCLITNQPDWGSVEIRYTGKKINREALLRYIVSFREHNEFHEQCVERIFTDIMLLCQPEELSVYARYTRRGGLDINPFRTSLHNPDSLPDSTLRLARQ

SEQ ID NO: 50638 - protein, 281 aa, Vibrio hangzhouensis
  misc_feature (1)..(281): tr|A0A1H5UPK2|A0A1H5UPK2_9VIBR NADPH-dependent 7-cyano- 7-deazaguanine reductase OS=Vibrio hangzhouensis OX=462 991 GN=queF PE=3 SV=1
MSKYSNAKELSGLTLGQKTEYANQYDASLLQPVPRSLNRDDLELGDTLPFQGCDIWTLYEISWLNAKGLPQVAVGEAYIPATSANLIESKSFKLYLNSYNQTRFESWDIVEATIAKDLSACAGEPVVVKLLAVDKFEHSHIAAMAGECIDHQDISIDSYEFDAELLANATSDEVVEEALHSHLLKSNCLITNQPDWGSVEIQYQGPKINREALLRYLVSFREHNEFHEQCVERIFTDIMTYCKPSKLTVYARYTRRGGLDINPYRSNQSGAPAHNTRMARQ

SEQ ID NO: 50639 - protein, 281 aa, Vibrio harveyi
  misc_feature (1)..(281): tr|A0A2S0S410|A0A2S0S410_VIBHA NADPH-dependent 7-cyano- 7-deazaguanine reductase OS=Vibrio harveyi OX=669 GN=qu eF PE=3 SV=1
MSKYSDAKELAGLTLGKKTEYANQYDASLLQPVPRSLNRDDLELGDSLPFMGHDIWTLYELSWLNSKGLPQVAVGEVYIPATSANLIESKSFKLYLNSYNQTRFATWEEVTERLAQDLSACAGEKVLVEVNPVSHYTNQPIVTMEGECIDDQDIEITSYDFDAALLDGAAGNEQVEEVLHSHLLKSNCLITNQPDWGSVEIRYQGAKLDREKLLRYLVSFREHNEFHEQCVERIFTDLMKYCQPTKLTVFARYTRRGGLDINPYRSTEQDKPAHNNRMARQ

SEQ ID NO: 50640 - protein, 281 aa, Vibrio harveyi
  misc_feature (1)..(281): tr|D0XDA0|D0XDA0_VIBH1 NADPH-dependent 7-cyano-7-deazag uanine reductase OS=Vibrio harveyi (strain 1DA3) OX=673 519 GN=queF PE=3 SV=1
MSKYSDAKELAGLTLGKKTEYANQYDASLLQPVPRSLNRDDLELGDSLPFMGHDIWTLYELSWLNSKGLPQVAVGEVYIPATSANLIESKSFKLYLNSYNQTRFATWEEVTERLTQDLSACAGEQVLVEVNPVTHYTNQPIVTMEGECIDDQDIEITSYDFDPALLEGAAGDEQVEEILHSHLLKSNCLITNQPDWGSVEIRYQGAKLDREKLLRYLVSFREHNEFHEQCVERIFTDLMKYCQPTKLTVFARYTRRGGLDINPYRSTEQDKPAHNNRMARQ

SEQ ID NO: 50641 - protein, 281 aa, Vibrio hepatarius
  misc_feature (1)..(281): tr|A0A0M0HYC1|A0A0M0HYC1_9VIBR NADPH-dependent 7-cyano- 7-deazaguanine reductase OS=Vibrio hepatarius OX=171383 GN=queF PE=3 SV=1
MSKYSDAKELAGLTLGQKTEYANQYDPTLLQPVPRSLNRNDLELGEQLPFKGCDIWTLYELSWLNEKGLPQVAVGEVSIPATSDNLIESKSFKLYLNSFNQTRFASWDEVEATLKKDLSACAGEEVGVTVRSVVDYTDSVIVTMDGDCIDDQDIEILSYDFDDSLLQGATSEQIVEESLHSHLLKSNCLITNQPDWGSVEIQYRGQQIDREALLRYIVSFREHNEFHEQCVERIFTDIMKYCQPEKLTVYARYTRRGGLDINPYRSTEQAQPNHNQRMARQ

SEQ ID NO: 50642 - protein, 281 aa, Vibrio ichthyoenteri
  misc_feature (1)..(281): tr|F9RXA2|F9RXA2_9VIBR NADPH-dependent 7-cyano-7-deazag uanine reductase OS=Vibrio ichthyoenteri ATCC 700023 OX =870968 GN=queF PE=3 SV=1
MSKYSNAKELAGLTLGQKTEYASLYNPSLLQPVPRSLNRDDLELGETLPFHGCDIWTLYELSWLNDKGLPQVAVGDVAIPATSANLIESKSFKLYLNSLNQTRFACWDDVEATLIKDLSACAGETVSVTLRSVEDYTDSVIVTMAGECIDHQDIEISHYEFDATLLDGAAEQEIVTESLHSHLLKSNCLITNQPDWGSVEIQYHGQKINREALLRYIVSFREHNEFHEQCVERIFTDIMTYCQPEHLTVYARYTRRGGLDINPYRSTEQTQPSHNQRMARQ

SEQ ID NO: 50643 - protein, 284 aa, Vibrio inusitatus
  misc_feature (1)..(284): tr|A0A4Y3HSN2|A0A4Y3HSN2_9VIBR NADPH-dependent 7-cyano- 7-deazaguanine reductase OS=Vibrio inusitatus NBRC 1020 82 OX=1219070 GN=queF PE=3 SV=1
MSKYSDAKELAGLTLGQKTQYASLYDPELLQAVPRSLNRDDLELGDTLPFKGQDIWTLYELSWLNANGLPQVAVGEVSIPASSPNLIESKSFKLYLNSYNQTKFNSWDAVQQQLVRDLSACAGGEVSVILSRVQDFNQQPIVDMQGTCIDDQDISITEYEFSTDYLIGSVSEEFVDEVLHSHLLKSNCLITNQPDWGSVEICYSGKKINQEFLLRYLVSFREHNEFHEQCVERIFTDITHFCQPQSLSVYARYTRRGGLDINPYRTSLNSVSNAPDSTLRLARQ

SEQ ID NO: 50644 - protein, 284 aa, Vibrio ishigakensis
  misc_feature (1)..(284): tr|A0A0B8Q7V3|A0A0B8Q7V3_9VIBR NADPH-dependent 7-cyano- 7-deazaguanine reductase OS=Vibrio ishigakensis OX=1481 914 GN=queF PE=3 SV=1
MHFKMSKYSDAKELAGLTLGQKTEYASQYDPSLLQPVPRSLNRDDLELGDELPFVGEDIWTLYELSWLNSNGLPQVAVGTVSIPADSPNLVESKSFKLYLNSYNQTRFANWAEVQAQLAKDLSACAGGNVSVEVQKVQEFNQQPIVDMQGECIDEQDIVISDYEFKADYLEGATSEEEVSETLHSHLLKSNCLITNQPDWGSVEINYTGNKIDREALLRYLVSFREHNEFHEQCVERIFTDITRYCKPSSLSVYARYTRRGGLDINPIRSSSPINVNKQRLARQ

SEQ ID NO: 50645 - protein, 284 aa, Vibrio ishigakensis
  misc_feature (1)..(284): tr|A0A0B8NYC6|A0A0B8NYC6_9VIBR NADPH-dependent 7-cyano- 7-deazaguanine reductase OS=Vibrio ishigakensis OX=1481 914 GN=queF PE=3 SV=1
MHFKMSKYSDAKELAGLTLGQKTEYASQYDPSLLQPVPRSLNRDDLELGDELPFVGEDIWTLYELSWLNSNGLPQVAVGTVSIPADSPNLVESKSFKLYLNSYNQTRFANWTEVQAQLAKDLSACAGGNVSVEVQKVQEFNQQPIVDMQGECIDEQDIVISDYEFKADYLEGATSEEEVSETLHSHLLKSNCLITNQPDWGSVEINYTGKKIDREALLRYLVSFREHNEFHEQCVERIFTDITRYCKPSSLSVYARYTRRGGLDINPIRSSSPINVNKQRLARQ

SEQ ID NO: 50646 - protein, 281 aa, Vibrio jasicida
  misc_feature (1)..(281): tr|A0A2S7VLM2|A0A2S7VLM2_9VIBR NADPH-dependent 7-cyano- 7-deazaguanine reductase OS=Vibrio jasicida OX=766224 G N=queF PE=3 SV=1
MSKYSDAKELAGLTLGKKTEYANQYDASLLQPVPRSLNRDDLELGDSLPFMGHDIWTLYELSWLNSKGLPQVAVGEVYIPATSANLIESKSFKLYLNSYNQTRFATWEEVTERLTQDLSACAGEQVLVEVNPVTHYTNQPIVTMEGECIDAQDIEITSYDFDAALLEGAAGDEQVEEILHSHLLKSNCLITNQPDWGSVEIRYQGAKLDREKLLRYLVSFREHNEFHEQCVERIFTDLMKYCQPTKLTVFARYTRRGGLDINPYRSTEQDKPAHNNRMARQ

SEQ ID NO: 50647 - protein, 281 aa, Vibrio kanaloae
  misc_feature (1)..(281): tr|A0A1E5DPJ3|A0A1E5DPJ3_9VIBR NADPH-dependent 7-cyano- 7-deazaguanine reductase OS=Vibrio kanaloae 5S-149 OX=1 191299 GN=queF PE=3 SV=1
MSKYSDAKELTGLTLGEKTEYANQYDASLLQPVPRSLNRDDLALNGELPFVGHDIWTMYELSWLNSNGLPQVAVGEVFIPATSPNLIESKSFKLYLNSYNQTQFENWNQVTERLTQDLSACAGETVTVNVNSVTDYTNQPIVTMKGDCIDNQDIKITSYDFDASLLEGAAGEQGVEETLHSHLLKSNCLITNQPDWGSVEIEYSGKQINREALLRYLVSFREHNEFHEQCVERIFTDIMKHCEPSKLTVFARYTRRGGLDINPYRSTEQDRPSHNKRMARQ

SEQ ID NO: 50648 - protein, 281 aa, Vibrio kanaloae
  misc_feature (1)..(281): tr|A0A2N7J876|A0A2N7J876_9VIBR NADPH-dependent 7-cyano- 7-deazaguanine reductase OS=Vibrio kanaloae OX=170673 G N=queF PE=3 SV=1
MSKYSDAKELTGLTLGEKTEYANQYDASLLQPVPRSLNRDDLELNGELPFVGHDIWTMYELSWLNSNGLPQVAVGEVFIPATSPNLIESKSFKLYLNSYNQTQFENWNQVTERLTQDLSACAGETVTVNVNSVTDYTNQPIVTMKGDCIDNQDIKITSYDFDASLLEGAAGEQGVEETLHSHLLKSNCLITNQPDWGSVEIEYSGKQINREALLRYLVSFREHNEFHEQCVERIFTDIMKHCEPSKLTVFARYTRRGGLDINPYRSTEQDRPSHNKRMARQ

SEQ ID NO: 50649 - protein, 281 aa, Vibrio lentus
  misc_feature (1)..(281): tr|A0A1B9PSM4|A0A1B9PSM4_9VIBR NADPH-dependent 7-cyano- 7-deazaguanine reductase OS=Vibrio lentus OX=136468 GN= queF PE=3 SV=1
MSKYSDAKELAGLTLGQKTEYSNQYDASLLQPVPRSLNRDDLALNGDLPFVGHDIWTMYELSWLNSNGLPQVAVGEVFIPATSPNLIESKSFKLYLNSYNQTQFENWDQVTERLTQDLSACAGETVIVNVNSVTDYTNQPIVTMEGDCIDNQDIQITSYDFEASLLEGAAGGQDVEEILHSHLLKSNCLITNQPDWGSVEIAYSGKQIDREALLRYLVSFREHNEFHEQCVERIFTDIMKYCGPSKLTVFARYTRRGGLDINPYRSTEQDRPSHNKRMARQ

SEQ ID NO: 50650 - protein, 272 aa, Vibrio lentus
  misc_feature (1)..(272): tr|A0A1B9QKH5|A0A1B9QKH5_9VIBR NADPH-dependent 7-cyano- 7-deazaguanine reductase OS=Vibrio lentus OX=136468 GN= queF PE=3 SV=1
MTTYDKNLGKRSEYISQYQPELLDPIPRKKGRDEIKDLKVANHAGYDLWTAFEVSWLNNKGKPIVAIAEFMVPHTSDNLIESKSFKLYLNSFNQTRFESKEIVIEKMQSDLANAAGAEVTVSFTDVDEPQQTSINKQFNCIDNLDITVDSFEYDADSLSGSTVDEYVSESLCSHLLKSNCLVTNQPDWGSVYIRYKGAKINHESLLKYLVSFREHNEFHEQCVERIYSDIKRCCAPENLTVFARYTRRGGLDINPYRSDFESKICSARNPRQ

SEQ ID NO: 50651 - protein, 281 aa, Vibrio mangrovi
  misc_feature (1)..(281): tr|A0A1Y6IUW7|A0A1Y6IUW7_9VIBR NADPH-dependent 7-cyano- 7-deazaguanine reductase OS=Vibrio mangrovi OX=474394 G N=queF_1 PE=3 SV=1
MSKYSDTEALADLKLGQNTQYSSHYDPSLLQAVPRSLNRDDLQLSAPLPFQGCDLWTLYELSWLNSKGLPQVAIGYVSIPATSPNLIESKSFKLYLNSYNQTKFTDWQEVQSRLSADLSDCAGEEVTVNLRHVADFTHQHIVTMEGECIDEQEIEIEQYAFNAAYLEQATGENFVDETLHSHLLKSNCLITSQPDWGSVEIHYRGKQINREALLRYLVSFREHNEFHEQCVERIFTDLMKYCQPQSLTVYARYTRRGGLDINPYRSTEDSHPASVLRMARQ

SEQ ID NO: 50652 - protein, 273 aa, Vibrio mangrovi
  misc_feature (1)..(273): tr|A0A1Y6IWB6|A0A1Y6IWB6_9VIBR NADPH-dependent 7-cyano- 7-deazaguanine reductase OS=Vibrio mangrovi OX=474394 G N=queF_2 PE=3 SV=1
MDTTYSKNLGKKTDYISTYTPELLDPIPRARGRGNITACDSDAFTGYDLWTGYELSWLNTKGKPMVAVAEFMIPCTSPNLIESKSFKLYLNSLNQTPFVSEQVLIETLTKDLSATSGGDVRVKLSRVDEEQDIRSDRSFVCIDDLDIEIDSYEYDEDLLLGAASETVVEERICSHLLKSNCLVTNQPDWGSVYIRYQGAEIDREKLLRYIISFRGHNEFHEQCVERIFSDIKRCCQPEKLTVFARYTRRGGLDINPFRSDFEEEMPVGREYRQ

SEQ ID NO: 50653 - protein, 246 aa, Vibrio maritimus
  misc_feature (1)..(246): tr|A0A090RWT4|A0A090RWT4_9VIBR NADPH-dependent 7-cyano- 7-deazaguanine reductase OS=Vibrio maritimus OX=990268 GN=queF PE=3 SV=1
MSKYSNAKELSGLTLGQKTDYANQYDASLLQPVPRSLNRDDLELGDSLPFQGCDIWTMYEISWLNANGLPQVAVGEAYIPATSANLIESKSFKLYLNSYNQTRFDSWDEVQNTIAGDLSNCAGETVTVKLIPVGDFENTQIVGMKGECIDNQDIRIDSYDFDAALLEGAAGEEVVEEALHSHLLKSNCLITNQPDWGSVEIQYHGAKIDREALLRYLVSFREHNEFHEQCVERIFTDIMAYCKQQS

SEQ ID NO: 50654 - protein, 281 aa, Vibrio maritimus
  misc_feature (1)..(281): tr|A0A090SYR4|A0A090SYR4_9VIBR NADPH-dependent 7-cyano- 7-deazaguanine reductase OS=Vibrio maritimus OX=990268 GN=queF PE=3 SV=1
MSKYSNAKELSGLTLGQKTDYANQYDASLLQPVPRSLNRDDLELGDSLPFQGCDIWTMYEISWLNANGLPQVAVGEAYIPATSANLIESKSFKLYLNSYNQTRFDSWGEVESTIAGDLSNCAGETVTVKLIPVGDFENTQIVGMKGECIDNQDIRIDSYDFDAALLKGAAGEEVVEEALHSHLLKSNCLITNQPDWGSVEIQYHGAKIDREALLRYLVSFREHNEFHEQCVERIFTDIMSYCKPSKLTVYARYTRRGGLDINPYRSNQDSAPSHNMRMARQ

SEQ ID NO: 50655 - protein, 281 aa, Vibrio mediterranei
  misc_feature (1)..(281): tr|A0A3G4VBH1|A0A3G4VBH1_9VIBR NADPH-dependent 7-cyano- 7-deazaguanine reductase OS=Vibrio mediterranei OX=689 GN=queF PE=3 SV=1
MSKYSNAKELSGLTLGQKTEYANHYDATLLQPVPRSLNRDDLELGKTLPFQGCDIWTLYEISWLNAKGLPQVAVGEVSIPATSANLIESKSFKLYLNSYNQTRFATWEQVQSTIATDLSNCAGETVSVKLIPVADFENTKIVGMAGECIDDQDITIDNYEFDAELLKDAAGDEIVEEALHSHLLKSNCLITNQPDWGSVEIQYQGAKIDREALLRYLVSFREHNEFHEQCVERIFTDLMQYCNPTKLTVYARYTRRGGLDINPYRSNQYQAPEHNARMARQ

SEQ ID NO: 50656 - protein, 281 aa, Vibrio mediterranei
  misc_feature (1)..(281): tr|A0A2C9PBS9|A0A2C9PBS9_9VIBR NADPH-dependent 7-cyano- 7-deazaguanine reductase OS=Vibrio mediterranei OX=689 GN=queF PE=3 SV=1
MSKYSNAKELSGLTLGQKTEYANHYDATLLQPVPRSLNRDDLELGETLPFQGCDIWTLYEISWLNAKGLPQVAVGEVSIPATSANLIESKSFKLYLNSYNQTRFATWEQVQSTIATDLSNCAGETVSVKLIPVADFENTKIVGMAGECIDDQDITIDNYEFDAELLKDAASDEIVEEALHSHLLKSNCLITNQPDWGSVEIQYQGAKIDREALLRYLVSFREHNEFHEQCVERIFTDLMQYCNPTKLTVYARYTRRGGLDINPYRSNQYQAPEHNARMARQ

SEQ ID NO: 50657 - protein, 281 aa, Vibrio metoecus
  misc_feature (1)..(281): tr|A0A0Q0PWC6|A0A0Q0PWC6_9VIBR NADPH-dependent 7-cyano- 7-deazaguanine reductase OS=Vibrio metoecus OX=1481663 GN=queF PE=3 SV=1
MSKYSDAKELAGLTLGKKTEYANHYDPTLLQPVPRRLNRDDLHLGATLPFQGCDIWTLYELSWLNQKGLPQVAIGEVSIPATSANLIESKSFKLYLNSYNQTRFESWNEVQARLVHDLSACAGETVTVHVKSLHEYTAEPIVTMQGECIDDQNIEIKDYEFDHTLLQGAAQGDEVHEVLHSHLLKSNCLITNQPDWGSVEIAYHGSKINREALLRYIVSFREHNEFHEQCVERIFTDLMRYCQPHTLTVYARYTRRGGLDINPFRSNCQSAPEHNQRMARQ

SEQ ID NO: 50658 - protein, 281 aa, Vibrio metoecus
  misc_feature (1)..(281): tr|A0A0Q0KKQ1|A0A0Q0KKQ1_9VIBR NADPH-dependent 7-cyano- 7-deazaguanine reductase OS=Vibrio metoecus OX=1481663 GN=queF PE=3 SV=1
MSKYSDAKELAGLTLGKKTEYANHYDPTLLQPVPRSLNRDDLHLGATLPFQGCDIWTLYELSWLNQKGLPQVAIGEVSIPATSANLIESKSFKLYLNSYNQTRFESWNEVQARLVHDLSACAGETVTVHVKSLHEYTAEPIVTMQGECIDDQDIEIKDYEFDHTLLQGAAQGDEVHEVLHSHLLKSNCLITNQPDWGSVEIAYHGSKINREALLRYIVSFREHNEFHEQCVERIFTDLMRYCQPHTLTVYARYTRRGGLDINPFRSNCQSAPEHNQRMARQ

SEQ ID NO: 50659 - protein, 281 aa, Vibrio metschnikovii
  misc_feature (1)..(281): tr|C9P627|C9P627_VIBME NADPH-dependent 7-cyano-7-deazag uanine reductase OS=Vibrio metschnikovii CIP 69.14 OX=6 75813 GN=queF PE=3 SV=1
MSKYSDAKELSGLTLGKATAYASQYDPSLLQPVPRSLNRNDLDLGETLPFQGCDIWTLYELSWLNSNGLPQVAIGEVRIPATSANLIESKSFKLYLNSFNQSRFQDWQTVQTHLINDLSACAGETVEVRLFSLDHYTNQPIVSMQGECIDQQDIEIEHYQFDASLLEQATDAEIVTETLHSHLLKSNCLITNQPDWGSVEITYHGPKIQREALLRYIVSFREHNEFHEQCVERIFHDLCRYCQPKQLTVLARYTRRGGLDINPFRSTERPSPEHNLRMARQ

SEQ ID NO: 50660 - protein, 282 aa, Vibrio metschnikovii
  misc_feature (1)..(282): tr|A0A380NVF0|A0A380NVF0_VIBME NADPH-dependent 7-cyano- 7-deazaguanine reductase OS=Vibrio metschnikovii OX=281 72 GN=queF PE=3 SV=1
MMSKYSDAKELSGLTLGKATAYASQYDPSLLQPVPRSLNRNDLDLGETLPFQGCDIWTLYELSWLNSNGLPQVAIGEVRIPATSANLIESKSFKLYLNSFNQSRFQDWQTVQTHLINDLSACAGETVEVRLFSLDHYTNQPIVSMQGECIDQQDIEIEHYQFDASLLEQATDAEIVTETLHSHLLKSNCLITNQPDWGSVEITYHGPKIQREALLRYIVSFREHNEFHEQCVERIFHDLCRYCQPKQLTVLARYTRRGGLDINPFRSTERPSPEHNLRMARQ

SEQ ID NO: 50661 - protein, 281 aa, Vibrio mimicus
  misc_feature (1)..(281): tr|A0A2J9V1Z2|A0A2J9V1Z2_VIBMI NADPH-dependent 7-cyano- 7-deazaguanine reductase OS=Vibrio mimicus OX=674 GN=qu eF PE=3 SV=1
MSKYSDAKELAGLTLGKKTDYANQYDPTLLQPVPRSLNRDDLHLGDTLPFQGCDIWTLYELSWLNEKGLPQVAIGEVSIPATSANLIESKSFKLYLNSYNQTRFASWDDVQARLVQDLSACAGETVTVKVKSLSEYTAEPIVTMQGECIDEQDIEIKGYEFDDALLQGAAQGEEISEVLHSHLLKSNCLITNQPDWGSVEIAYHGAKINREALLRYIVSFREHNEFHEQCVERIFTDIMRYCQPKNLTVYARYTRRGGLDINPFRSNCYSAPEHNQRMARQ

SEQ ID NO: 50662 - protein, 281 aa, Vibrio mimicus
  misc_feature (1)..(281): tr|A0A5B6XGH2|A0A5B6XGH2_VIBMI NADPH-dependent 7-cyano- 7-deazaguanine reductase OS=Vibrio mimicus OX=674 GN=qu eF PE=3 SV=1
MSKYSDAKELASLTLGKKTDYTNQYDPTLLQPVPRSLNRDDLHLGDTLPFQGCDIWTLYELSWLNEKGLPQVAIGEVSIPATSANLIESKSFKLYLNSYNQTRFASWDDVQARLVQDLSACAGETVTVKVKSLSEYTAEPIVTMQGECIDEQDIEIKGYEFDDALLQGAAQGEEISEVLHSHLLKSNCLITNQPDWGSVEIAYHGAKINREALLRYIVSFREHNEFHEQCVERIFTDIMRYCQPKTLTVYARYTRRGGLDINPFRSNCHSAPEHNQRMARQ

SEQ ID NO: 50663 - protein, 281 aa, Vibrio mytili
  misc_feature (1)..(281): tr|A0A0C3HS90|A0A0C3HS90_9VIBR NADPH-dependent 7-cyano- 7-deazaguanine reductase OS=Vibrio mytili OX=50718 GN=q ueF PE=3 SV=1
MSKYSDAKELAGLTLGKKTEYSNQYDASLLQPVPRSLNRDDLQLGDELPFVGHDIWTLYELSWLNSKGLPQVAVGEVYIPATSANLIESKSFKLYLNSYNQTHFASWEAVADRLTQDLSECAGEQVFVEVNPVTHYTNQPIVTMAGECIDDQDINITNYEFDPTLLEGAAGKAHVEESLHSHLLKSNCLITNQPDWGSVEIHYQGAKIDREKLLRYIVSFREHNEFHEQCVERIFTDLMKYCQPSKLTVFARYTRRGGLDINPYRSTEQDKPTHNHRMARQ

SEQ ID NO: 50664 - protein, 281 aa, Vibrio natriegens
  misc_feature (1)..(281): tr|A0A1B1EAD4|A0A1B1EAD4_VIBNA NADPH-dependent 7-cyano- 7-deazaguanine reductase OS=Vibrio natriegens OX=691 GN =queF PE=3 SV=1
MSKYSNAKELAGLTLGKKTEYANQYDASLLQPVPRSLNRDDLELGEALPFMGHDIWTLYELSWLNSKGLPQVAVAEVYIPATSANLIESKSFKLYLNSYNQTRFASWQDVTERLVQDLSACAGEQVIVEVNPVTHYTNQPIVTMEGECIDDQDIEINSYDFDASLLEGAAGEEQVEETLHSHLLKSNCLITNQPDWGSVEIRYQGAKLDREKLLRYLVSFREHNEFHEQCVERIFTDLMKYCHPSKLTVFARYTRRGGLDINPYRSTENAKPEHNHRMARQ

SEQ ID NO: 50665 - protein, 281 aa, Vibrio navarrensis
  misc_feature (1)..(281): tr|A0A099LTE4|A0A099LTE4_9VIBR NADPH-dependent 7-cyano- 7-deazaguanine reductase OS=Vibrio navarrensis OX=29495 GN=queF PE=3 SV=1
MSKYSDAKELAGLTLGKKTEYATQYDASLLQPVPRSLNRDDLQLGANLPFVGHDIWTLYELSWLNSKGLPQVAVGEVYIPATSPNLIESKSFKLYLNSYNQTRFATWQAVVERLTSDLSSCAGEPVTVEVNPLSHYTQQPIVTMAGECIDDQDIEIERYDFDQSLLQDAAGETVVQETLHSHLLKSNCLITNQPDWGSVEIAYHGKQIDREKLLRYLVSFREHNEFHEQCVERIFTDIMKYCAPQSLTVYARYTRRGGLDINPYRSTQQAKPAHNQRMARQ

SEQ ID NO: 50666 - protein, 281 aa, Vibrio neocaledonicus
  misc_feature (1)..(281): tr|A0A4P8FXX4|A0A4P8FXX4_9VIBR NADPH-dependent 7-cyano- 7-deazaguanine reductase OS=Vibrio neocaledonicus OX=12 08308 GN=queF PE=3 SV=1
MSKYSDAKELAGLTLGKTTEYANQYDPSLLQPVPRSLNRDDLQLGDTLPFMGHDIWTLYELSWLNSKGLPQVAVGEVYIPATSANLIESKSFKLYLNSYNQTRFASWEEVTERLTQDLSECAGEKVLVEVNPVTHYTNQPIVTMDGECVDDQDIDITSYDFDADLLEGAAGKIQVEEVLHSHLLKSNCLITNQPDWGSVEIRYQGAKIDREKLLRYLVSFREHNEFHEQCVERIFTDLMKYCQPSKLTVFARYTRRGGLDINPYRSTEQDKPAHNHRMARQ

SEQ ID NO: 50667 - protein, 281 aa, Vibrio neptunius
  misc_feature (1)..(281): tr|A0A0F4PAF2|A0A0F4PAF2_9VIBR NADPH-dependent 7-cyano- 7-deazaguanine reductase OS=Vibrio neptunius OX=170651 GN=queF PE=3 SV=1
MSKYSDAKELAGLTLGQKTEYANQYDASLLQPVPRSLNRDDLNLGDELPFQGCDIWTLYELSWLNEKGLPQVAIGDVSIPATSANLIESKSFKLYLNSFNQTRFSSWDQVEQTLVKDLSHCAGEEVSVTLRSVVDYTDSVVVTMDGDCIDDQDIEIESYEFDTSLLEGAVKQEHVSESLHSHLLKSNCLITNQPDWGSVEIQYQGQKINREALLRYLVSFREHNEFHEQCVERIFTDMMKYCQPEKLTVYARYTRRGGLDINPYRSTEHAQPAHNQRMARQ

SEQ ID NO: 50668 - protein, 272 aa, Vibrio neptunius
  misc_feature (1)..(272): tr|A0A0F4NUE4|A0A0F4NUE4_9VIBR NADPH-dependent 7-cyano- 7-deazaguanine reductase OS=Vibrio neptunius OX=170651 GN=queF PE=3 SV=1
MTTYDKNLGKKSEYISQYQPELLDPIPRQRGRNEIKDLKVATHAGFDLWTAFEVSWLNNKGKPIVAIAEFIIPHTSNNLIESKSFKLYLNSFNQTCFESQDIVIETMQSDLTNAAGAEVTVSFMEVDEPQQTSINKQFDCIDGLDITVDSFEYDADALCGSTVDEYVSESLCSHLLKSNCLVTNQPDWGSVYIRYTGAKINHESLLKYLISFREHNEFHEQCVERIYSDIKRCCAPEKLTVFARYTRRGGLDINPYRSDFEDEICSGRNPRQ

SEQ ID NO: 50669 - protein, 281 aa, Vibrio nereis
  misc_feature (1)..(281): tr|A0A0M0HPT5|A0A0M0HPT5_VIBNE NADPH-dependent 7-cyano- 7-deazaguanine reductase OS=Vibrio nereis OX=693 GN=que F PE=3 SV=1
MSKYSDAKELAGLTLGQKTEYANQYDPSLLQPVPRSLNRNDLNLGEELPFKGCDIWTLYELSWLNEKGLPQVAVGEVSIPATSENLIESKSFKLYLNSFNQTRFASWDEVEATLKKDLSECAGEEVSVTVRSVVDYTDSVIVTMDGECIDEQDIEILSYDFDDALLKGATSEQIVEESLHSHLLKSNCLITNQPDWGSVEIQYTGKQINREALLRYIVSFREHNEFHEQCVERIFTDVMKYCQPEKLTVYARYTRRGGLDINPYRSTEQAQPTHNQRMARQ

SEQ ID NO: 50670 - protein, 281 aa, Vibrio nigripulchritudo
  misc_feature (1)..(281): tr|U4KGC5|U4KGC5_9VIBR NADPH-dependent 7-cyano-7-deazag uanine reductase OS=Vibrio nigripulchritudo OX=28173 GN =queF PE=3 SV=1
MSKYSNAEELAGLTLGQKTEYSSQYDPSLLQGVPRSLNRDDIQLTGDLPFVGVDIWTLYELSWLNRNGLPQVAVGEVMLPATSPNLVESKSFKLYLNSYNQTQFDSWEQVQASLVKDLSECAGEPVEVVINPVSHYDNQPIVSLQGECIDEQDITIESYEFDPELLRNASSDEMVTETLVSNLLKSNCLITNQPDWGSVSIEYTGSRIDREALLRYLVSFREHNEFHEQCVERIFTDIQKYCAPTSLTVFARYTRRGGLDINPYRSTEQSKPDNNLRLARQ

SEQ ID NO: 50671 - protein, 281 aa, Vibrio nigripulchritudo
  misc_feature (1)..(281): tr|U4E8H7|U4E8H7_9VIBR NADPH-dependent 7-cyano-7-deazag uanine reductase OS=Vibrio nigripulchritudo FTn2 OX=123 8441 GN=queF PE=3 SV=1
MSKYSNAEELAGLTLGQKTEYSSQYDPSLLQGVPRSLNRDDIQLTGELPFVGVDIWTLYELSWLNRNGLPQVAVGEVMLPATSPNLVESKSFKLYLNSYNQTQFDSWEQVQASLVKDLSECAGEPVEVVINPVSHYDNQPIVSLQGECIDDQDIKIESYEFDPELLRNASSDEMVTETLVSNLLKSNCLITNQPDWGSVSIEYTGSRIDREALLRYLVSFREHNEFHEQCVERIFTDIQKYCAPTSLTVFARYTRRGGLDINPYRSTEQSKPDNNLRLARQ

SEQ ID NO: 50672 - protein, 281 aa, Vibrio orientalis
  misc_feature (1)..(281): tr|C9QJC3|C9QJC3_VIBOR NADPH-dependent 7-cyano-7-deazag uanine reductase OS=Vibrio orientalis CIP 102891 = ATCC 33934 OX=675816 GN=queF PE=3 SV=1
MSKYSDAKELAGLTLGQKTEYANQYDPSLLQPVPRSLNRDDLNLGDTLPFQGCDIWTLYELSWLNDKGLPQVAVGEVSIPATSANLIESKSFKLYLNSFNQTRFSTWDDVEKTLIKDLSHCAGEEVGVTVRSVVDYTDSVIVTMAGECIDDQDIEIASYDFDRTLLEGAASGDQVEESVHSHLLKSNCLITNQPDWGSVEISYSGKQIDREALLRYLVSFREHNEFHEQCVERIFTDIMEFCQPSALTVYARYTRRGGLDINPYRSNVNAQPNHNQRMARQ

SEQ ID NO: 50673 - protein, 281 aa, Vibrio owensii
  misc_feature (1)..(281): tr|A0A0C1VWQ1|A0A0C1VWQ1_9VIBR NADPH-dependent 7-cyano- 7-deazaguanine reductase OS=Vibrio owensii CAIM 1854 = LMG 25443 OX=1229493 GN=queF PE=3 SV=1
MSKYSDAKELAGLTLGKKTEYANQYDASLLQPVPRSLNRDDLELGDSLPFMGHDIWTLYELSWLNSKGLPQVAVGEVYIPATSANLIESKSFKLYLNSYNQTRFATWEEVTERLTQDLSACAGEQVLVEVNPVTHYTNQPIVTMEGECIDDQDIEITSYDFDAALLEGAAGDEQVEEILHSHLLKSNCLITNQPDWGSVEIRYQGAKLDREKLLRYLVSFREHNEFHEQCVERIFTDLMKYCQPTKLTVFARYTRRGGLDINPYRSTEQDKPAHNNRMARQ

SEQ ID NO: 50674 - protein, 281 aa, Vibrio owensii
  misc_feature (1)..(281): tr|A0A3G2PYM5|A0A3G2PYM5_9VIBR NADPH-dependent 7-cyano- 7-deazaguanine reductase OS=Vibrio owensii OX=696485 GN =queF PE=3 SV=1
MSKYSDAKELAGLTLGKKTEYANQYDASLLQPVPRSLNRDDLELGDSLPFMGHDIWTLYELSWLNSKGLPQVAVGEVYIPATSANLIESKSFKLYLNSYNQTRFATWEEVTERLMQDLSACAGEQVLVEVNPVTHYTNQPIVTMEGECIDDQDIEITSYDFDAALLEGAAGDEQVEEILHSHLLKSNCLITNQPDWGSVEIRYQGAKLDREKLLRYLVSFREHNEFHEQCVERIFTDLMKYCQPTKLTVFARYTRRGGLDINPYRSTEQDKPAHNNRMARQ

SEQ ID NO: 50675 - protein, 281 aa, Vibrio palustris
  misc_feature (1)..(281): tr|A0A1R4B183|A0A1R4B183_9VIBR NADPH-dependent 7-cyano- 7-deazaguanine reductase OS=Vibrio palustris OX=1918946 GN=queF PE=3 SV=1
MSKYSDAKELTGLTLGKGTAYTSHYDVTLLQGVPRSLNRDDLNLGTELPFKGCDVWTLYELSWLNQRGLPQVAVAQATLPATSPNLIESKSFKLYLNSFNQTRFSSIDDVRQTLVNDLSACAGEAVSVEIFPVTHFTNQPIVNMQGENIDDQDIEITHYEFDENLLQGATNDMVVTERLNSHLLKSNCLITSQPDWGSVEIRYTGKQIDREALLRYLVSFREHNEFHEQCVERIFTDIQRFCQPDSLTVYARYTRRGGLDINPFRSTHNLGPTHNYRLARQ

SEQ ID NO: 50676 - protein, 281 aa, Vibrio panuliri
  misc_feature (1)..(281): tr|A0A1Q9HM43|A0A1Q9HM43_9VIBR NADPH-dependent 7-cyano- 7-deazaguanine reductase OS=Vibrio panuliri OX=1381081 GN=queF PE=3 SV=1
MSKYSNAKELAGLTLGQKTEYANQYDPTLLQPVPRSLNRDDLNLGSELPFLGCDIWTLYELSWLNEKGLPQVAVGEVSIPATSANLIESKSFKLYLNSFNQTRFSNWEQVEQTLVRDLSACAGETVSVTVRSVVDYTDSVIVTMQGECIDEQDIEINSYDFDDTLLADATGTEWVEEALHSHLLKSNCLITNQPDWGSVEIQYQGQKIDREALLRYIVSFREHNEFHEQCVERIFTDIMKYCQPQKLTVYARYTRRGGLDINPYRSTEQLQPNHNQRMARQ

SEQ ID NO: 50677 - protein, 281 aa, Vibrio parahaemolyticus
  misc_feature (1)..(281): sp|Q87RS6|QUEF_VIBPA NADPH-dependent 7-cyano-7-deazagua nine reductase OS=Vibrio parahaemolyticus serotype O3:K 6 (strain RIMD 2210633) OX=223926 GN=queF PE=3 SV=1
MSKYSDAKELAGLTLGKKTEYANQYDASLLQPVPRSLNRDDLELGDTLPFLGHDIWTLYELSWLNSKGLPQVAVGEVYIPATSANLIESKSFKLYLNSYNQTRFASWEEVAERLTQDLSACAGEKVLVEVNPVGHYTNQPIVTMEGECIDDQDIEINSYDFDADLLAGAAGEDQVEEVLHSHLLKSNCLITNQPDWGSVEIRYQGAKIDREKLLRYLVSFREHNEFHEQCVERIFTDLMKYCQPNKLTVFARYTRRGGLDINPYRSTEQDKPAHNHRMARQ

SEQ ID NO: 50678 - protein, 281 aa, Vibrio parahaemolyticus
  misc_feature (1)..(281): tr|A0A0D1EC84|A0A0D1EC84_VIBPH NADPH-dependent 7-cyano- 7-deazaguanine reductase OS=Vibrio parahaemolyticus 49 OX=1288779 GN=queF PE=3 SV=1
MSKYSDAKELAGLTLGKKTEYANQYDASLLQPVPRSLNRDDLELGDTLPFLGHDIWTLYELSWLNSRGLPQVAVGEVYIPATSANLIESKSFKLYLNSYNQTRFASWEEVAERLTQDLSACAGEKVLVEVNPVGHYTNQPIVTMEGECIDDQDIEINSYDFDADLLAGSAGEEQVEEVLHSHLLKSNCLITNQPDWGSVEIRYQGAKIDREKLLRYLVSFREHNEFHEQCVERIFTDLMKYCQPNKLTVFARYTRRGGLDINPYRSTEQDKPAHNHRMARQ

SEQ ID NO: 50679 - protein, 281 aa, Vibrio penaeicida
  misc_feature (1)..(281): tr|A0A432DJ50|A0A432DJ50_9VIBR NADPH-dependent 7-cyano- 7-deazaguanine reductase OS=Vibrio penaeicida OX=104609 GN=queF PE=3 SV=1
MSKYSNAEELAGLTLGQITEYSSQYDPSLLQGVPRSLNRNDIQLTDDLPFIGVDIWTLYELSWLNENGLPQVAVGEVILPATSPNLVESKSFKLYLNSFNQTRFSHWDEVKKALVKDLSECAGEAVDVVINPVTFYDNQPIVSFKGECIDNQDIKIEHYEFDAALLQNSTSDDLVSETLVSNLLKSNCLITNQPDWGSVSIQYTGKKINRESLLRYLVSFREHNEFHEQCVERIFTDIQKYCAPTSLTVFARYTRRGGLDINPYRSTEQSRPDNNLRLARQ

SEQ ID NO: 50680 - protein, 281 aa, Vibrio ponticus
  misc_feature (1)..(281): tr|A0A090PBY1|A0A090PBY1_9VIBR NADPH-dependent 7-cyano- 7-deazaguanine reductase OS=Vibrio ponticus OX=265668 G N=queF PE=3 SV=1
MSKYSNAKELAGLTLGQKTEYASQYDPSLLQPVPRSLNRDDLELGDSLPFKGCDVWTLYELSWLNEKGLPQVAVGDVSIPATSANLIESKSFKLYLNSFNQTRFACWDDVEKTLVNDLSACAGEEVTVTVRSVVDYTDSLIVTMHGECIDEQDIEITNYEFDASLLADSTSDEVVEEALHSHLLKSNCLITNQPDWGSVEIQYQGQKIDREALLRYIVSFREHNEFHEQCVERIYTDIMKYCRPEKLTVYARYTRRGGLDINPFRSSELTQPNHNQRMARQ

SEQ ID NO: 50681 - protein, 281 aa, Vibrio ponticus
  misc_feature (1)..(281): tr|A0A3N3DZD8|A0A3N3DZD8_9VIBR NADPH-dependent 7-cyano- 7-deazaguanine reductase OS=Vibrio ponticus OX=265668 G N=queF PE=3 SV=1
MSKYSDAKELAGLTLGQKTEYASQYNPSLLQPVPRSLNRDDLELGDSLPFKGCDIWTLYELSWLNDKGLPQVAVGEVSIPATSANLIESKSFKLYLNSFNQTRFSSWDDVEKTLVKDLSACAGEEVSVTVRSVVDYTDSLIVTMQGDCIDEQDIEITSYEFDASLLANAAGKEVVEEALHSHLLKSNCLITNQPDWGSVEIQYQGQKINREALLRYIVSFREHNEFHEQCVERIFTDIMKYCQPEKLTVYARYTRRGGLDINPFRSTEQQQPNHNQRMARQ

SEQ ID NO: 50682 - protein, 281 aa, Vibrio proteolyticus
  misc_feature (1)..(281): tr|U3BQ96|U3BQ96_VIBPR NADPH-dependent 7-cyano-7-deazag uanine reductase OS=Vibrio proteolyticus NBRC 13287 OX= 1219065 GN=queF PE=3 SV=1
MSKYSNAKELAGLTLGQKTEYASQYDPSLLQPVPRSLNRNDLNLEAPLPFQGCDIWTLYELSWLNDKGLPQVAVGEVALPATSPNLIESKSFKLYLNSYNQTHFPDWQQVQARLAQDLSACAGEAVSVTLHPVTAFTNQPIVTMGGECIDEQDITISGYDFDETLLKDAATGEQVSETLHSHLLKSNCLITNQPDWGSVEIRYQGKQIDREALLRYIVSFREHNEFHEQCVERIFTDIMNFCQPDSLTVYARYTRRGGLDINPFRSTEQATPAHNHRMARQ

SEQ ID NO: 50683 - protein, 281 aa, Vibrio qinghaiensis
  misc_feature (1)..(281): tr|A0A223MVZ8|A0A223MVZ8_9VIBR NADPH-dependent 7-cyano- 7-deazaguanine reductase OS=Vibrio qinghaiensis OX=2025 808 GN=queF PE=3 SV=1
MSKYSDAKALAGLTLGKKTDYAKQYDPSLLQPVPRSLNRDDLHLGDSLPFKGCDIWTLYELSWLNAKGLPQVAIGEVSIPATSANLIESKSFKLYLNSYNQSKIANWDEVTQRLTRDLSACAGAPVSVTLNPVSDYTDQAIVTMQGECIDEQDIEIESYQFDASLLKSAARGEQVNETLHSHLLKSNCLITNQPDWGSVEIHYQGQQIDREALLRYLVSFREHNEFHEQCVERIFTDIMQYCQPTQLTVYARYTRRGGLDINPFRSTEQERPTHNQRMARQ

SEQ ID NO: 50684 - protein, 281 aa, Vibrio quintilis
  misc_feature (1)..(281): tr|A0A1M7YQ52|A0A1M7YQ52_9VIBR NADPH-dependent 7-cyano- 7-deazaguanine reductase OS=Vibrio quintilis OX=1117707 GN=queF_2 PE=3 SV=1
MSKYSDAKALAGLTLGKNTHYKAHYDPSLLQPVPRSLNRDDLQLSSPLPFTGCDLWTLYELSWLNQNGLPQVAIGHVSVPAESPALIESKSFKLYLNSYNQSRFDTIQTVQKQLETDLSACAGAPVLVELKTVSDFTGEAIVPMQGECIDDTEIQIDCYDFNASLLENATSDEWIEETLHSHLLKSNCLITSQPDWGSIEIHYQGHKINREALLRYLISFREHNEFHEQCVERIFTDVMKYCAPKSLTVYARYTRRGGLDINPYRSSENKAPIHTGRMARQ

SEQ ID NO: 50685 - protein, 273 aa, Vibrio quintilis
  misc_feature (1)..(273): tr|A0A1M7YPE4|A0A1M7YPE4_9VIBR NADPH-dependent 7-cyano- 7-deazaguanine reductase OS=Vibrio quintilis OX=1117707 GN=queF_1 PE=3 SV=1
MNTAYSKNLGKKTSYISTYAPDLLDPIPREFGRKNITECQQNCFSGYDLWTGYELSWLNSKGKPKVAVAEFMIPSDSVNLIESKSFKLYLNSLNQTRIASEEELVSMLIRDLSKAAEGDVKVKLLDVNQDFSPRAEATFECVDDLDIEVNSYEYDENILMNSTSELLAEENLCSHLLKSNCLVTHQPDWGSVYIRYKGKAIDREKLLRYVISFREHNEFHEQCVERIFSDIKRCCSPEKLTVFARYTRRGGLDINPFRSDFEHEMCVEREYRQ

SEQ ID NO: 50686 - protein, 281 aa, Vibrio renipiscarius
  misc_feature (1)..(281): tr|A0A0C2NKT6|A0A0C2NKT6_9VIBR NADPH-dependent 7-cyano- 7-deazaguanine reductase OS=Vibrio renipiscarius OX=146 1322 GN=queF PE=3 SV=1
MSKYSNAKELAGLTLGQKTEYASLYNPSLLQPVPRSLNRDDLELGETLPFHGCDIWTLYELSWLNNNGLPQVAVGDVTIPATSANLIESKSFKLYLNSLNQTRFASWDEVEATLIKDLSACAGEAVSVTLRSVEDYTDSVVVTMAGECIDHQDIEITHYEFDATLLDGAAEQEIVSESLHSHLLKSNCLITNQPDWGSVEIQYHGQKINREALLRYIVSFREHNEFHEQCVERIFTDIMTYCKPDSLTVYARYTRRGGLDINPYRSTEHTQPSHNQRMARQ

SEQ ID NO: 50687 - protein, 281 aa, Vibrio rotiferianus
  misc_feature (1)..(281): tr|A0A510I3E5|A0A510I3E5_9VIBR NADPH-dependent 7-cyano- 7-deazaguanine reductase OS=Vibrio rotiferianus OX=1908 95 GN=queF PE=3 SV=1
MSKYSDAKELAGLTLGKKTEYANQYDASLLQPVPRSLNRDDLELGDSLPFMGHDIWTLYELSWLNSKGLPQVAVGEVYIPATSANLIESKSFKLYLNSYNQTRFATWEEVTERLAQDLSACAGEQVLVEVNPVTHYTNQPIVTMEGECIDGQDIEITSYDFDAALLEGAAGEEQVEETLHSHLLKSNCLITNQPDWGSVEIRYQGAKLDREKLLRYLVSFREHNEFHEQCVERIFTDLMQYCQPTKLTVFARYTRRGGLDINPYRSTEQDKPAHNNRMARQ

SEQ ID NO: 50688 - protein, 281 aa, Vibrio rotiferianus
  misc_feature (1)..(281): tr|A0A2K7SW96|A0A2K7SW96_9VIBR NADPH-dependent 7-cyano- 7-deazaguanine reductase OS=Vibrio rotiferianus OX=1908 95 GN=queF PE=3 SV=1
MSKYSDAKELAGLTLGKKTEYANQYDASLLQPVPRSLNRDDLELGDSLPFMGHDIWTLYELSWLNSKGLPQVAVGEVYIPATSANLIESKSFKLYLNSYNQTRFATWEEVTERLTQDLSACAGEQVLVEVNPVTHYTNQPIVTMEGECIDGQDIEITSYDFDAALLEGAAGEEQVEETLHSHLLKSNCLITNQPDWGSVEIRYQGAKLDREKLLRYLVSFREHNEFHEQCVERIFTDLMKYCQPTKLTVFARYTRRGGLDINPYRSTEQDKPAHNNRMARQ

SEQ ID NO: 50689 - protein, 281 aa, Vibrio ruber
  misc_feature (1)..(281): tr|A0A1R4LAT7|A0A1R4LAT7_9VIBR NADPH-dependent 7-cyano- 7-deazaguanine reductase OS=Vibrio ruber DSM 16370 OX=1 123498 GN=queF_2 PE=3 SV=1
MSKYSDTEALADLKLGQETVYASHYDPSLLQGVPRSLNRDDLQLSEPLPFQGCDLWTLYELSWLNNKGLPQVAIGYVSIPATSPNLIESKSFKLYLNSFNQTKFDDWQTVHSRLCTDLSHCAGEAVTVNLRHVNDFTHQHIITMEGECIDEQDIEIDQYAFNPAYLEQATGETFVEETLHSHLLKSNCLITNQPDWGSVEIRYRGQQINREALLRYLISFREHNEFHEQCVERIFTDLMKYCEPQSLTVYARYTRRGGLDINPYRSTEDHQPASVLRMARQ

SEQ ID NO: 50690 - protein, 273 aa, Vibrio ruber
  misc_feature (1)..(273): tr|A0A1R4L8M6|A0A1R4L8M6_9VIBR NADPH-dependent 7-cyano- 7-deazaguanine reductase OS=Vibrio ruber DSM 16370 OX=1 123498 GN=queF_1 PE=3 SV=1
MDTTYSKNLGKKTDYISTYTPQLLDPIPRARGRGNITACDSAAFSGYDLWTGYELSWLNTKGKPMVAVAEFMIPCTSPNLIESKSFKLYLNSLNQTPFASEQAVVETLIQDLSAASGGDVQVKLIPVDETLEIRADKSFTCIDHLDIEISSYAYDEDLLLGATSTNIVEEKLCSHLLKSNCLVTNQPDWGSVYIHYQGAEIDRETLLRYIISFREHNEFHEQCVERIFADIKRCCKPEKLTVFARYTRRGGLDINPFRSDFEEVMLVGRAYRQ

SEQ ID NO: 50691 - protein, 299 aa, Vibrio rumoiensis
  misc_feature (1)..(299): tr|A0A1E5E0H2|A0A1E5E0H2_9VIBR NADPH-dependent 7-cyano- 7-deazaguanine reductase OS=Vibrio rumoiensis 1S-45 OX= 1188252 GN=queF PE=3 SV=1
MTHSTQTKYANAKELQGLTLGQTTQYSHNYDPSLLQAVPRSLNRNDLGLTDAQNLPFVGTDIWTMYELSWLNNKGLPQVAIGDVMLPVTSPNLIESKSFKIYLNSLNQTKFESWQQVQDTIAKDLSQCAGDPVSVELHSLQHYTQQPITTMQGHCIDDQDIEINDYQFDESYLEGAVTDRSISTNQEDPQNHITETLHSHLLKSNCLITNQPDWGSVEIEYTGKQINQEALLRYLVSFREHNEFHEQCVERIFCDIMKYCQPEQLSVYARYTRRGGLDINPFRSTHLKQPQMLTRMARQ

SEQ ID NO: 50692 - protein, 272 aa, Vibrio sagamiensis; identical to SEQ ID NO: 50587
  misc_feature (1)..(272): tr|A0A511QED8|A0A511QED8_9VIBR NADPH-dependent 7-cyano- 7-deazaguanine reductase OS=Vibrio sagamiensis NBRC 104 589 OX=1219064 GN=queF PE=3 SV=1

SEQ ID NO: 50693 - protein, 281 aa, Vibrio sagamiensis; identical to SEQ ID NO: 50588
  misc_feature (1)..(281): tr|A0A511QGN1|A0A511QGN1_9VIBR NADPH-dependent 7-cyano- 7-deazaguanine reductase OS=Vibrio sagamiensis NBRC 104 589 OX=1219064 GN=queF PE=3 SV=1

SEQ ID NO: 50694 - protein, 281 aa, Vibrio scophthalmi
  misc_feature (1)..(281): tr|A0A1E3WNY4|A0A1E3WNY4_9VIBR NADPH-dependent 7-cyano- 7-deazaguanine reductase OS=Vibrio scophthalmi OX=45658 GN=queF PE=3 SV=1
MSKYSNAKELAGLTLGQKTEYASLYNPSLLQPVPRSLNRDDLELGDTLPFHGCDIWTLYELSWLNDKGLPQVAVGDVSIPATSANLIESKSFKLYLNSLNQTRFACWDDVEATLIKDLSHCAGETVSVTLRSVEDYTDTVIVTMAGECIDHQDIEITHYEFDATLLEGAAEQEIVTESLHSHLLKSNCLITNQPDWGSVEIQYHGQKINREALLRYIVSFREHNEFHEQCVERIFTDIMTYCQPEKLTVYARYTRRGGLDINPYRSTEQAQPNHNQRMARQ

SEQ ID NO: 50695 - protein, 281 aa, Vibrio scophthalmi
  misc_feature (1)..(281): tr|A0A1B1NQX0|A0A1B1NQX0_9VIBR NADPH-dependent 7-cyano- 7-deazaguanine reductase OS=Vibrio scophthalmi OX=45658 GN=queF PE=3 SV=1
MSKYSNAKELAGLTLGQKTEYASLYNPSLLQPVPRSLNRDDLELGDTLPFHGCDIWTLYELSWLNDKGLPQVAVGDVSIPATSANLIESKSFKLYLNSLNQTRFTCWDDVEATLIKDLSHCAGETVSVTLRSVEDYTDTVIVTMAGECIDHQDIEITHYEFDASLLEGAAEQEIVTESLHSHLLKSNCLITNQPDWGSVEIQYHGQKINREALLRYIVSFREHNEFHEQCVERIFTDIMTYCQPEKLTVYARYTRRGGLDINPYRSTEQAQPNHNQRMARQ

SEQ ID NO: 50696 - protein, 281 aa, Vibrio shilonii
  misc_feature (1)..(281): tr|A6D8T2|A6D8T2_9VIBR NADPH-dependent 7-cyano-7-deazag uanine reductase OS=Vibrio shilonii AK1 OX=391591 GN=qu eF PE=3 SV=1
MSKYSNAKELSGLTLGQKTEYANHYDATLLQPVPRSLNRDDLELGKTLPFQGCDIWTLYEISWLNAKGLPQVAVGEVSIPATSANLIESKSFKLYLNSYNQTRFATWEQVQSTIATDLSNCAGETVSVKLTPVADFENTKIVGMAGECIDDQDIAIDNYEFDAELLKDAAGDEIVEEALHSHLLKSNCLITNQPDWGSVEIQYQGAKIDREALLRYLVSFREHNEFHEQCVERIFTDLMQYCNPTKLTVYARYTRRGGLDINPYRSNQYQAPEHNARMARQ

SEQ ID NO: 50697 - protein, 281 aa, Vibrio sinaloensis
  misc_feature (1)..(281): tr|E8M9J2|E8M9J2_9VIBR NADPH-dependent 7-cyano-7-deazag uanine reductase OS=Vibrio sinaloensis DSM 21326 OX=945 550 GN=queF PE=3 SV=1
MSKYSDAKELAGLTLGQKTDYANQYDASLLQPVPRSLNRDDLNLGDELPFKGCDIWTLYELSWLNNKGLPQVAVGEVSIPATSANLIESKSFKLYLNSFNQTRFASWEEVEKTLVNDLSQCAGETVSVTVRSVVDYTDSVIVTMEGDCIDEQDIEINSYEFDEALLEGAAKGERVEESLHSHLLKSNCLITNQPDWGSVEIRYSGQQIDREALLRYLVSFREHNEFHEQCVERIFTDIMKYCQPETLTVYARYTRRGGLDINPYRSNQTSEPAHNQRMARQ

SEQ ID NO: 50698 - protein, 281 aa, Vibrio sinaloensis
  misc_feature (1)..(281): tr|A0A0A5I0I8|A0A0A5I0I8_9VIBR NADPH-dependent 7-cyano- 7-deazaguanine reductase OS=Vibrio sinaloensis OX=37909 7 GN=queF PE=3 SV=1
MSKYSDAKELAGLTLGQKTDYSNQYDPSLLQPVPRSLNRDDLNLGDELPFQGCDIWTLYELSWLNEKGLPQVAVGEVSIPATSANLIESKSFKLYLNSFNQTRFSSWDEVENTLIQDLSQCAGETVAVTLRSVVDYTDSVIVSMDGECIDDQDIEITHYDFDETLLQNATDNQVVEESLHSHLLKSNCLITNQPDWGSVEIRYRGNKINREALLRYIVSFREHNEFHEQCVERIFTDIMKFCQPQQLTVYARYTRRGGLDINPYRSNQDAQPAHNQRMARQ

SEQ ID NO: 50699 - protein, 281 aa, Vibrio sp.
  misc_feature (1)..(281): tr|A0A3N9TDZ3|A0A3N9TDZ3_9VIBR NADPH-dependent 7-cyano- 7-deazaguanine reductase OS=Vibrio sp. LJC006 OX=248732 2 GN=queF PE=3 SV=1
MSKYSNSKELEGLTLGKYTEYSTSYDASLLQPVPRKLNRDDINVTEPLPFLGSDVWTLYELSWLNSKGLPQVAVGYVTIPATSANLIESKSFKLYLNSFNQTKFASWEEVHDTLVTDLSNCAGEAVSVEIHSVDDFTHQRIVSMEGTCLDDQDIEVNHYQFDDTLLRNSTVDINVQETVHSHLLKSNCLITNQPDWGSVEITYEGKKINHEALLRYIVSFREHNEFHEQCVERIFTDIMRYCSPEKLTVYARYTRRGGLDINPFRSTESATPSNWLRMARQ

SEQ ID NO: 50700 - protein, 281 aa, Vibrio sp.; identical to SEQ ID NO: 50696
  misc_feature (1)..(281): tr|A0A084TED8|A0A084TED8_9VIBR NADPH-dependent 7-cyano- 7-deazaguanine reductase OS=Vibrio sp. ER1A OX=1517681 GN=queF PE=3 SV=1

SEQ ID NO: 50701 - protein, 273 aa, Vibrio spartinae
  misc_feature (1)..(273): tr|A0A1N6M9R9|A0A1N6M9R9_9VIBR NADPH-dependent 7-cyano- 7-deazaguanine reductase OS=Vibrio spartinae OX=1918945 GN=queF_2 PE=3 SV=1
MDTTYSKNLGKKTDYVSTYTPQLLDPIPRARGRGNITACDSAAFSGYDLWTGYELSWLNSKGKPMVAVAEFMIPCTSPNLIESKSFKLYLNSLNQTSFVSEQELVETLTQDLSATSGGDVQVKLIPVDETLEIRADKSFTCIDDLDIEIDSYEYDEDRLSGATSANIVEEKLCSHLLKSNCLVTNQPDWGSVYIHYQGAEIDRETLLRYIISFREHNEFHEQCVERIFADIKRCCNPEKLTVLARYTRRGGLDINPFRSDFEDVMLVGREYRQ

SEQ ID NO: 50702 - protein, 281 aa, Vibrio spartinae
  misc_feature (1)..(281): tr|A0A1N6M857|A0A1N6M857_9VIBR NADPH-dependent 7-cyano- 7-deazaguanine reductase OS=Vibrio spartinae OX=1918945 GN=queF_1 PE=3 SV=1
MSKYSDTEALADLKLGQDTIYASHYDPSLLQAVPRSLNRDDLHLSEALPFQGCDLWTLYELSWLNTKGLPQVAIGYVSIPATSPNLIESKSFKLYLNSLNQTKFDDWQTVHARLSADLSHCAGEDVTVNLRHVNDFTHQHIITMEGECIDEQDIEIDQYAFNAAYLEQATTETFVEETLHSHLLKSNCLITNQPDWGSVEIHYRGRQINREALLRYLISFREHNEFHEQCVERIFTDLMKYCAPQSLTVYARYTRRGGLDINPYRSTEDNQPASVLRMARQ

SEQ ID NO: 50703 - protein, 281 aa, Vibrio splendidus
  misc_feature (1)..(281): tr|A0A2N7L0W5|A0A2N7L0W5_VIBSP NADPH-dependent 7-cyano- 7-deazaguanine reductase OS=Vibrio splendidus OX=29497 GN=queF PE=3 SV=1
MSKYSDAKELAGLTLGQKTEYSNQYDASLLQPVPRSLNRDDLALNGELPFVGHDIWTMYELSWLNTNGLPQVAVGEVFIPATSQNLIESKSFKLYLNSYNQTQFEDWAQVTERLTQDLSACAGEPVIVNVNSVTDYTNQPIVTMEGDCIDNQDIQITSYDFEASLLEGAAGEQEVEETLHSHLLKSNCLITNQPDWGSVEIAYSGKQIDREALLRYLVSFREHNEFHEQCVERIFTDIMKYCAPSKLTVFARYTRRGGLDINPYRSTEQDRPSHNKRMARQ

SEQ ID NO: 50704 - protein, 281 aa, Vibrio splendidus
  misc_feature (1)..(281): tr|A0A2G4B4P8|A0A2G4B4P8_VIBSP NADPH-dependent 7-cyano- 7-deazaguanine reductase OS=Vibrio splendidus OX=29497 GN=queF PE=3 SV=1
MSKYSDAKELAGLTLGQKTEYSNQYDASLLQPVPRSLNRDDLALNGELPFVGHDIWTMYELSWLNTNGLPQVAVGEVFIPATSQNLIESKSFKLYLNSYNQTQFESWAQVTERLTQDLSACAGEPVVVNVNSVTDYTNQPIVTMEGDCIDNQDIQITSYDFEASLLEGAAGEQKVEETLHSHLLKSNCLITNQPDWGSVEIAYSGKQIDREALLRYLVSFREHNEFHEQCVERIFTDIMKYCAPSKLTVFARYTRRGGLDINPYRSTEQDRPSHNKRMARQ

SEQ ID NO: 50705 - protein, 284 aa, Vibrio superstes
  misc_feature (1)..(284): tr|A0A511QQ63|A0A511QQ63_9VIBR NADPH-dependent 7-cyano- 7-deazaguanine reductase OS=Vibrio superstes NBRC 10315 4 OX=1219062 GN=queF PE=3 SV=1
MSKYSDAKELAGLTLGQKTQYASLYDPELLQAVPRSLNRDDLELGDTLPFKGQDIWTLYELSWLNANGLPQVAVGEVSIPASSPNLIESKSFKLYLNSYNQTKFNDWDAVQEQLVVDLSACAGGKVSVTLSRVQDFNQQPIVDMQGACIDEQDISITAYEFSTDYLKGSLSEESVDEVLHSHLLKSNCLITNQPDWGSVEIRYSGKKINQEALLRYLVSFREHNEFHEQCVERIFTDIMHFCQPKSLSVYARYTRRGGLDINPYRTSLHSESSAPDSTLRLARQ

SEQ ID NO: 50706 - protein, 281 aa, Vibrio tapetis
  misc_feature (1)..(281): tr|A0A2N8ZEJ8|A0A2N8ZEJ8_9VIBR NADPH-dependent 7-cyano- 7-deazaguanine reductase OS=Vibrio tapetis subsp. tapet is OX=1671868 GN=queF PE=3 SV=1
MSKYSNAKELAGLTLGQKTEYSSQYAPSLLQAVPRSLNRDDINLGEVLPFHGVDIWTLYELSWLNEKGLPQVAVGDVTLPATSPNLIESKSFKLYLNSFNQTKFSSWDEVKSALIKDLSACAGEPVEVSIQAVQHYDQQHIVPMNGICIDDQDIEITDYEFDASILQDSTSDDVITESLVSNLLKSNCLITNQPDWGSVMIEYTGPKINQETLLRYLVSFREHNEFHEQCVERIFMDIMQYCHPSSLTVYARYTRRGGLDINPYRSTSTAMPTQNLRLARQ

SEQ ID NO: 50707 - protein, 281 aa, Vibrio tasmaniensis; identical to SEQ ID NO: 50596
  misc_feature (1)..(281): sp|B7VIV4|QUEF_VIBTL NADPH-dependent 7-cyano-7-deazagua nine reductase OS=Vibrio tasmaniensis (strain LGP32) OX =575788 GN=queF PE=3 SV=1

SEQ ID NO: 50708 - protein, 281 aa, Vibrio tasmaniensis; identical to SEQ ID NO: 50596
  misc_feature (1)..(281): tr|A0A2N7I4E1|A0A2N7I4E1_9VIBR NADPH-dependent 7-cyano- 7-deazaguanine reductase OS=Vibrio tasmaniensis OX=2126 63 GN=queF PE=3 SV=1

SEQ ID NO: 50709 - protein, 281 aa, Vibrio thalassae
  misc_feature (1)..(281): tr|A0A240EFQ4|A0A240EFQ4_9VIBR NADPH-dependent 7-cyano- 7-deazaguanine reductase OS=Vibrio thalassae OX=1243014 GN=queF PE=3 SV=1
MSKYSNAKELSGLTLGQKTEYANHYDASLLQPVPRSLNRDDLELGDTLPFQGCDIWTLYEISWLNAKGLPQVAIGEVSIPATSANLIESKSFKLYLNSYNQTRFDSWEQVQTTLATDLSNCAGETVSVTLIPVADFENSKIVGMAGDCIDDQDITIDNYEFDAELLKGAAGDEVVEEALHSHLLKSNCLITNQPDWGSVEIQYQGAKINREALLRYLVSFREHNEFHEQCVERIFTDLMQYYNPTKLTVYARYTRRGGLDINPYRSNQHQAPEHNARMARQ

SEQ ID NO: 50710 - protein, 281 aa, Vibrio toranzoniae
  misc_feature (1)..(281): tr|A0A125P5B4|A0A125P5B4_9VIBR NADPH-dependent 7-cyano- 7-deazaguanine reductase OS=Vibrio toranzoniae OX=11944 27 GN=queF PE=3 SV=1
MSKYSDAKELTGLTLGQKTEYANQYDASLLQPVPRSLNRDDLALNGELPFVGHDIWTMYELSWLNSNGLPQVAVGEVFIPATSPNLIESKSFKLYLNSYNQTQFENWDQVTERLTQDLSACAGETVTVNVNSVTDYTNQPIVTMKGDCIDNQDIKITSYDFEASLLEGSTGEQEVNETLHSHLLKSNCLITNQPDWGSVEIEYSGKQIDREALLRYLVSFREHNEFHEQCVERIFTDIMKHCEPSKLTVFARYTRRGGLDINPYRSTEQDRPSHNKRMARQ

SEQ ID NO: 50711 - protein, 281 aa, Vibrio tubiashii
  misc_feature (1)..(281): tr|F9T4V9|F9T4V9_9VIBR NADPH-dependent 7-cyano-7-deazag uanine reductase OS=Vibrio tubiashii ATCC 19109 OX=1051 646 GN=queF PE=3 SV=1
MSKYSDAKELAGLTLGQKTEYSNQYDASLLQPVPRSLNRDDLNLGDSLPFQGCDIWTLYELSWLNEKGLPQVAIGEVSIPATSANLIESKSFKLYLNSFNQTRFSSWDQVEQTLIKDLSACAGETVSVTVRSVVDYTDSVVVTMDGDCIDEQDIEITSYDFDRTLIQGAATGEVVEESLHSHLLKSNCLITNQPDWGSVEIQYKGKQIDREALLRYLVSFREHNEFHEQCVERIFTDIMEFCQPESLTVYARYTRRGGLDINPYRSNVNSQPSHNQRMARQ

SEQ ID NO: 50712 - protein, 281 aa, Vibrio tubiashii
  misc_feature (1)..(281): tr|A0A0A5K144|A0A0A5K144_9VIBR NADPH-dependent 7-cyano- 7-deazaguanine reductase OS=Vibrio tubiashii OX=29498 G N=queF PE=3 SV=1
MSKYSDAKELAGLTLGQKTEYSNQYDPNLLQPVPRSLNRDDLNLGDALPFQGCDIWTLYELSWLNEKGLPQVAIGEVSIPATSANLIESKSFKLYLNSFNQSRFASWDEVEQTLAKDLSACAGEAVTVTVRCVEDYTDSLIVTMDGECIDEQDIEITSYEFDRNLLAEAASEQMVEETLHSHLLKSNCLITNQPDWGSVEIHYKGKQINRESLLRYLVSFREHNEFHEQCVERIFTDIMEFCQPERLTVYARYTRRGGLDINPYRSNVSRQPNHNQRMARQ

SEQ ID NO: 50713 - protein, 281 aa, Vibrio variabilis
  misc_feature (1)..(281): tr|A0A090SGZ2|A0A090SGZ2_9VIBR NADPH-dependent 7-cyano- 7-deazaguanine reductase OS=Vibrio variabilis OX=990271 GN=queF PE=3 SV=1
MSKYSNAKELSGLTLGQKTDYANQYDASLLQPVPRSLNRDDLELGDSLPFQGCDIWTMYEISWLNANGLPQVAVGEAYIPATSANLIESKSFKLYLNSYNQTRFDSWDEVQSTIAADLSNCAGETVTVKLIPVGDFENTQIVGMKGECIDNQDIRIDSYDFDAALLEGAAGEEVVEEALHSHLLKSNCLITNQPDWGSVEIQYHGAKIDREALLRYLVSFREHNEFHEQCVERIFTDIMAYCKPTELTVYARYTRRGGLDINPYRSNQDSAPAHNLRMARQ

SEQ ID NO: 50714 - protein, 281 aa, Vibrio vulnificus
  misc_feature (1)..(281): sp|Q7MN30|QUEF_VIBVY NADPH-dependent 7-cyano-7-deazagua nine reductase OS=Vibrio vulnificus (strain YJ016) OX=1 96600 GN=queF PE=3 SV=1
MSKYSDAKELAGLTLGKKTDYANQYDPSLLQPVPRSLNRDDLQLGDELPFMGHDIWTLYELSWLNNKGLPQVAVGEVYIPATSANLIESKSFKLYLNSYNQTRFDSWEEVRQRLITDLSHCAGEAVEVAVNSVTHYTQQPIVTMEGECIDEQDIDISSYDFDDRLLEGAAGEEWVTETLHSHLLKSNCLITNQPDWGSVEIRYQGHKIDREKLLRYLVSFREHNEFHEQCVERIFTDLMKYCQPESLTVFARYTRRGGLDINPYRSTEQAKPDHNHRMARQ

SEQ ID NO: 50715 - protein, 281 aa, Vibrio vulnificus
  misc_feature (1)..(281): tr|A0A4Q7IDY1|A0A4Q7IDY1_VIBVL NADPH-dependent 7-cyano- 7-deazaguanine reductase OS=Vibrio vulnificus OX=672 GN =queF PE=3 SV=1
MSKYSDAKELAGLTLGKKTDYANQYDPSLLQPVPRSLNRDDLQLGDELPFMGHDIWTLYELSWLNSKGLPQVAVGEVYIPATSANLIESKSFKLYLNSYNQTRFDSWEEVRQRLITDLSHCAGEAVEVAVNSVTHYTQQPIVTMEGECIDEQDIDISSYDFDDRLLEGAAGEEWVTETLHSHLLKSNCLITNQPDWGSVEIRYQGHKIDREKLLRYLVSFREHNEFHEQCVERIFTDLMKYCQPETLTVFARYTRRGGLDINPYRSTEQAKPDHNHRMARQ

SEQ ID NO: 50716 - protein, 281 aa, Vibrio xiamenensis
  misc_feature (1)..(281): tr|A0A1G8H5L9|A0A1G8H5L9_9VIBR NADPH-dependent 7-cyano- 7-deazaguanine reductase OS=Vibrio xiamenensis OX=86129 8 GN=queF PE=3 SV=1
MSKYSGAKELAGLTLGQKTEYATQYQPSLLQPVPRSLNRDDLNLGADLPFQGCDIWTLYELSWLNSKGLPQVAIGEVAIPATSANLIESKSFKLYLNSFNQTRFDSWQAVEQALIQDLSNCAGETVSVSVKPVSAYTDEPIVTMQGECIDDQDIEIADYQFNPDYLKDAAGPLDVSETLHSHLLKSNCLITNQPDWGSVEICYQGKQINREALLRYIVSFREHNEFHEQCVERIFTDIMTYCQPTQLTVYARYTRRGGLDINPYRSNQQPKPAHNHRMARQ

SEQ ID NO: 50717 - protein, 281 aa, Vibrionales bacterium; identical to SEQ ID NO: 50636
  misc_feature (1)..(281): tr|A0A366XJI8|A0A366XJI8_9GAMM NADPH-dependent 7-cyano- 7-deazaguanine reductase OS=Vibrionales bacterium C3R12 OX=2267228 GN=queF PE=3 SV=1

SEQ ID NO: 50718 - protein, 281 aa, Vibrionales bacterium
  misc_feature (1)..(281): tr|A5L5V5|A5L5V5_VIBBS NADPH-dependent 7-cyano-7-deazag uanine reductase OS=Vibrionales bacterium (strain SWAT- 3) OX=391574 GN=queF PE=3 SV=1
MSKYSDAKELAGLTLGQKTEYSNQYDASLLQPVPRSLNRDDLALNGELPFVGHDIWTMYELSWLNKNGLPQVAVGEVFIPATSPNLIESKSFKLYLNSYNQTQFENWEQVTERLTQDLSACAGETVIVNVNSVTDYTNQPIVTMEGECIDNQDIQITSYDFEASLLEGAAGEQEVEETLHSHLLKSNCLITNQPDWGSVEIAYSGKQIDREALLRYLVSFREHNEFHEQCVERIFTDIMKYCAPSKLTVFARYTRRGGLDINPYRSTEQDSPSHNKRMARQ

SEQ ID NO: 50719 - protein, 144 aa, Victivallales bacterium
  misc_feature (1)..(144): tr|A0A2S0KUI8|A0A2S0KUI8_9BACT NADPH-dependent 7-cyano- 7-deazaguanine reductase OS=Victivallales bacterium CCU G 44730 OX=2094242 GN=queF PE=3 SV=1
MNSEKNRERFRDLTLLSASERNYPNSPDAARLEAFENVYADRDYVIEFDCPEYTSLCPVTGQPDFGHIIVRYVPDKKCIESKSLKLYLYSFRNTNTFHEESVNTILDAVVKTCSPRRAEVIGRFRPRGGIAINVKATYGDKIDE

SEQ ID NO: 50720 - protein, 142 aa, Victivallis vadensis
  misc_feature (1)..(142): tr|A0A2U1BA49|A0A2U1BA49_9BACT NADPH-dependent 7-cyano- 7-deazaguanine reductase OS=Victivallis vadensis OX=172 901 GN=queF PE=3 SV=1
MDKSSKERFDGLTLLSASERNYPTRPEEARLEAFRNVYADRDYIIEFDCPEYTSLCPVTGQPDFGHIILRYVPDKLCIESKSLKLYLYSFRNTNTFHEESVNTILDAVVKTCAPRKAEVIGRFRPRGGIAINVKATYGGAIE

SEQ ID NO: 50721 - protein, 162 aa, Virgibacillus indicus
  misc_feature (1)..(162): tr|A0A265N836|A0A265N836_9BACI NADPH-dependent 7-cyano- 7-deazaguanine reductase OS=Virgibacillus indicus OX=20 24554 GN=queF PE=3 SV=1
MKEQDVSGLTLLGNQGTKYDFDYNPEVLETFENNHPDRDYFVKLNCPEFTTLCPITGQPDFATVYISYIPDVNMVESKALKLYLFSFRNHGGFHEDSMNIIMNDLIKLMDPRYIEVWGKFTPRGGISIDPYCNYGKPGTKFEQMAEHRMMNHDMYPEKIDNR

SEQ ID NO: 50722 - protein, 165 aa, Virgibacillus marismortui
  misc_feature (1)..(165): tr|A5LIG7|A5LIG7_9BACI NADPH-dependent 7-cyano-7-deazag uanine reductase OS=Virgibacillus marismortui OX=79660 GN=mtrA PE=3 SV=1
MASRSNDELTGVTQLGSQGTMYAFDYTPDVLEVFDNKHPGRDYFVKFNCPEFTTLCPKTNQPDFGTVYISYIPDKKMVESKSLKLYLFSFRNHGDFHEDSINIIMNDLIDLMAPRYIEVWGKFTPRGGISIDPYCNYGKAGTKFEKMADQRLMNHDLYPENIDNR

SEQ ID NO: 50723 - protein, 165 aa, Virgibacillus massiliensis
  misc_feature (1)..(165): tr|A0A024QG72|A0A024QG72_9BACI NADPH-dependent 7-cyano- 7-deazaguanine reductase OS=Virgibacillus massiliensis OX=1462526 GN=queF PE=3 SV=1
MSGRSNDELHGVTLLGSQGTNYAFDYTPEVLEVFDNKHPNRNYIVKFNCPEFTTLCPKTGQPDFGTVYISYIPDQKMVESKSLKLYLFSFRNHGDFHEDSMNIIMNDLIHLMEPRYIEVWGKFTPRGGISIDPYCNYGKPGTKFEQMAEHRLLNHDMYPEKIDNR

SEQ ID NO: 50724 - protein, 165 aa, Virgibacillus necropolis
  misc_feature (1)..(165): tr|A0A221MAI6|A0A221MAI6_9BACI NADPH-dependent 7-cyano- 7-deazaguanine reductase OS=Virgibacillus necropolis OX =163877 GN=queF PE=3 SV=1
MEGRRDADLTDLTLLGSQGTTYQFDYTPEVLEAFENKHQKRDYFVKLNCPEFTTLCPKTGQPDFGAVYISYIPDIKMVESKSLKLYLFSFRNHGDFHEDSMNIIMNDLIDLMDPRYIEVWGKFTPRGGISIDPYCNYGKPGTKFEQMAEHRMMNHDLYPEKIDNR

SEQ ID NO: 50725 - protein, 165 aa, Virgibacillus phasianinus
  misc_feature (1)..(165): tr|A0A220U2T7|A0A220U2T7_9BACI NADPH-dependent 7-cyano- 7-deazaguanine reductase OS=Virgibacillus phasianinus O X=2017483 GN=queF PE=3 SV=1
MKGRQDNDLTDLTLLGNQETTYQFDYTPEVLETFDNQHQNRDYFVKLNCPEFTTLCPKTGQPDFGTVYISYIPNIKMVESKSLKLYLFSFRNHGDFHEDSMNIIMNDLIELMEPRFIEVWGKFTPRGGISIDPYCNYGKPGTKFEQMADHRMMNHDLYPEKIDNR

SEQ ID NO: 50726 - protein, 166 aa, Virgibacillus profundi
  misc_feature (1)..(166): tr|A0A2A2I9I9|A0A2A2I9I9_9BACI NADPH-dependent 7-cyano- 7-deazaguanine reductase OS=Virgibacillus profundi OX=2 024555 GN=queF PE=3 SV=1
MSGRGEEQGLKDLTLLGNTKTNYRTDYTPEVLESVDNIHSNRDYFVKFNCPEFTSLCPITGQPDFATMYISYIPDQKIVESKSLKLYLFSFRNHGDFHEDCVNIIMNDLIELLDPRYIEVWGKFTPRGGISIDPWCNYGKPKTKYEDMAMHRLMNHDLNPEKIDNR

SEQ ID NO: 50727 - protein, 165 aa, Virgibacillus salarius; identical to SEQ ID NO: 50722
  misc_feature (1)..(165): tr|A6BMA1|A6BMA1_9BACI NADPH-dependent 7-cyano-7-deazag uanine reductase OS=Virgibacillus salarius OX=447199 GN =mtrA PE=3 SV=1

SEQ ID NO: 50728 - protein, 165 aa, Virgibacillus soli; identical to SEQ ID NO: 44267
  misc_feature (1)..(165): tr|A0A0Q9XWU8|A0A0Q9XWU8_9BACI NADPH-dependent 7-cyano- 7-deazaguanine reductase OS=Virgibacillus soli OX=48028 4 GN=queF PE=3 SV=1

SEQ ID NO: 50729 - protein, 165 aa, Virgibacillus sp.
  misc_feature (1)..(165): tr|A0A268I7P6|A0A268I7P6_9BACI NADPH-dependent 7-cyano- 7-deazaguanine reductase OS=Virgibacillus sp. 7505 OX=2 022548 GN=queF PE=3 SV=1
MAGRNPEEMTDVTLLGNQNNVYDFDYKPEVLETFDNKHTYRDYFVKFNCPEFTTLCPITNQPDFGTVYISYIPDEKMVESKSLKLYLFSFRNHGDFHEDCINIILNDLKELMNPRYIEVWGKFTPRGGISIDPYVNYGRPGTKYEQMADHRMMNHDMYPEKVDNR

SEQ ID NO: 50730 - protein, 166 aa, Viridibacillus sp.
  misc_feature (1)..(166): tr|A0A2N0F0Y4|A0A2N0F0Y4_9BACL NADPH-dependent 7-cyano- 7-deazaguanine reductase OS=Viridibacillus sp. OK051 OX =1884360 GN=queF PE=3 SV=1
MSGRSHEEGLKDLTLLGNQHTQYSFEYAPEVLEAVDNLHSNRDYFVKFNCPEFTSLCPMTHQPDFATMYISYVPDQKLVESKSLKLYLFSFRNHGDFHEDCVNIIMNDLIQLLDPRYIEVWGKFTPRGGLSIDPWCNYGKPGTKYEEMAHFRLMNHDLYPEKIDNR

SEQ ID NO: 50731 - protein, 133 aa, Vitiosangium sp.
  misc_feature (1)..(133): tr|A0A2T4VQS2|A0A2T4VQS2_9DELT NADPH-dependent 7-cyano- 7-deazaguanine reductase OS=Vitiosangium sp. GDMCC 1.13 24 OX=2138576 GN=queF PE=3 SV=1
MPSQPSKDLQTFPNPAPDRDYEIAFDVPEFTCLCPLTGQPDFAKFKIRYVPDQLCVELKSLKLYMWAYRNEGAFHEKVTNTIADDIVRAIQPRKLTVEGDFFVRGGIGTLVTVTHEKKGRGAKAKKSAPARRK

SEQ ID NO: 50732 - protein, 163 aa, Vitreoscilla filiformis
  misc_feature (1)..(163): tr|A0A221KGL0|A0A221KGL0_VITFI NADPH-dependent 7-cyano- 7-deazaguanine reductase OS=Vitreoscilla filiformis OX= 63 GN=queF PE=3 SV=1
MVFFPHAMAHSDELIPAPQQRPVPVNPPSAPSKELYVFPNPAPERDYVIQFQIPEFTCHCPLTGQPDFAHFTIDMVADQLCVELKSLKMYMWSFRNEGAFHEKVTNDILSKIVSVTNPRYARITARWYVRGGIYTNVIAEHRQPGWAGDAVVPAPHLPHATGL

SEQ ID NO: 50733 - protein, 280 aa, Vogesella indigofera
  misc_feature (1)..(280): tr|A0A495BRP1|A0A495BRP1_VOGIN NADPH-dependent 7-cyano- 7-deazaguanine reductase OS=Vogesella indigofera OX=454 65 GN=queF PE=3 SV=1
MMNPSYTPEFSPLGKKVDYQDQYDASLLFPIARQQKRDEVGVAEGALPFAGVDLWTGYEVSWLNARGKPQVAIATFRIPADSPRLIESKSFKLYLNSYNQTRIASWQQVAAQLELDLSNAAGRKVQVSLRSPADFGGERIAELAGDCIDELDIEVSSYAPCPEALRADAANVVSETLTSQLLKSNCLVTGQPDWGSVAISYTGPQIDRETLLRYLIGFRQHNEFHEQCVERIFVDVLRACAPSRLTVYARYTRRGGLDINPWRSNDPAAVAPDNTRTARQ

SEQ ID NO: 50734 - protein, 279 aa, Vogesella sp.
  misc_feature (1)..(279): tr|A0A1C6LJL4|A0A1C6LJL4_9NEIS NADPH-dependent 7-cyano- 7-deazaguanine reductase OS=Vogesella sp. LIG4 OX=11921 62 GN=queF PE=3 SV=1
MTPTYTPEFSPLGKKVDYQDHYDASLLFPIARQQKRDEIGVTADALPFAGVDLWTGYELSWLNGKGKPQVAIATFRIPADSPRLIESKSFKLYLNSYNQTRIDSWQQVAAQLELDLSNAAGAKVVVSLLSPAEFGREQIVELAGESIDELDIAVDNYAPCPDTLKADAANMVSETLTSQLLKSNCLVTGQPDWGSVAISYTGPQIDRETLLRYLIGFRQHNEFHEQCVERIFVDVLRACAPQRLTVYARYTRRGGLDINPWRSNDPAAQTPDNVRTARQ

SEQ ID NO: 50735 - protein, 280 aa, Vogesella sp.
  misc_feature (1)..(280): tr|A0A0J5GDZ8|A0A0J5GDZ8_9NEIS NADPH-dependent 7-cyano- 7-deazaguanine reductase OS=Vogesella sp. EB OX=1526735 GN=queF PE=3 SV=1
MMNPSYTPEFSPLGKKVDYQDQYDASLLFPIARQQKRDEIGVTEDALPFGGVDLWTGYEVSWLNARGKPQVAIATFRIPADSPRLIESKSFKLYLNSYNQTRIASWQQVAAQLELDLSNAAGGKVQVSLLSPADFGRERIVELAGDCIDELDIEVSSYAPCPEALRADAVNVVSETLTSQLLKSNCLVTGQPDWGSVQISYTGPQIDRETLLRYLIGFRQHNEFHEQCVERIFVDVLRACAPSRLTVYARYTRRGGLDINPWRSNDPAAVAPDNTRTARQ

SEQ ID NO: 50736 - protein, 281 aa, Volucribacter psittacicida
  misc_feature (1)..(281): tr|A0A4V2PCL9|A0A4V2PCL9_9PAST NADPH-dependent 7-cyano- 7-deazaguanine reductase OS=Volucribacter psittacicida OX=203482 GN=queF PE=3 SV=1
MTYQHHSLDQLKLGQAHTQYEHHYDPQLLQAVPRHLNRHALGIENRLPFQFGADLWTAFEISWLNQQGLPQVAIGDIQLDFRSQNLIESKSFKLYLNSLNQHKFDSMQTLEKTIAQDLAHCAKGEVKVRLHKLNDFTGQTIHQLQGTCIDEQDIHIENYQFNANYLQDCTIKGQKVEEYLVSHLLKSNCLITQQPDWGSLQIHYIGNKIQAEPLLRYIISFRQHNEFHEQCVERIFHDIMHFARPEKLSVYARYTRRGGLDINPFRSNFEEIPLNLRLARQ

SEQ ID NO: 50737 - protein, 269 aa, Vulcaniibacterium tengchongense
  misc_feature (1)..(269): tr|A0A3N4VE53|A0A3N4VE53_9GAMM NADPH-dependent 7-cyano- 7-deazaguanine reductase OS=Vulcaniibacterium tengchong ense OX=1273429 GN=queF PE=3 SV=1
MTQELPLGRHVDYPREYDAALLFPIARALGRDPLGLDAGAPPFVGEDRWHAYELSWLDGRGKPCVATATITVPAASPRLIESKSLKLYLNSFNATRFADAEAVRARIAADLSQAAGAGVAVAFGLPPVDAAANGTDIDALEIDIDDYGPPNPAHLRADAGAPVEETLSSALLKSNCPVTGQPDWARVRIAYRGPRLDRAGLLRYLVSFRDHAEFHEQCVERIFVDLLRHARPEALSVEARYTRRGGLDINPWRATPGHPRPPVGRDERQ

SEQ ID NO: 50738 - protein, 119 aa, Vulgatibacter incomptus
  misc_feature (1)..(119): tr|A0A0K1PGZ6|A0A0K1PGZ6_9DELT NADPH-dependent 7-cyano- 7-deazaguanine reductase OS=Vulgatibacter incomptus OX= 1391653 GN=queF PE=3 SV=1
MSTKPQKNLDTFPNPKPGRPYEIFFDAPEFTCLCPLTGQPDFAHIKIRYIPDETCVELKSLKLYLWSYRDEGAFHEAVTNKICDDVIAAIDPLFVEVVGDFFVRGGIRTVVTARHEKAK

SEQ ID NO: 50739 - protein, 267 aa, Waddlia chondrophila
  misc_feature (1)..(267): tr|D6YUC7|D6YUC7_WADCW NADPH-dependent 7-cyano-7-deazag uanine reductase OS=Waddlia chondrophila (strain ATCC V R-1470 / WSU 86-1044) OX=716544 GN=queF PE=3 SV=1
MVQVQDSVLGKKTFYKDRYDPSLLFPIVRSDKRKEIGIGTKLPFHGEDVWFGYELSWLNAKGKPAITLAVFTFPCESSHLIESKSFKLYLNSFNQTRFESSDDVLQTLIEDLSKACGMGVGVQFIDRLPQNDFKGISLDLLDIEADTYQVDPSLLKCGGDHVQESIHTNLFKSNCLVTGQPDWASLFIHYQGPHIDHECLLRYIVSYRQHLEFHEQCIERIFIDLMRECCCEKLTVFGKFTRRGGLDINPFRSNFEQSLPHFQTARQ

SEQ ID NO: 50740 - protein, 267 aa, Waddlia chondrophila; identical to SEQ ID NO: 50739
  misc_feature (1)..(267): tr|F8LB92|F8LB92_9BACT NADPH-dependent 7-cyano-7-deazag uanine reductase OS=Waddlia chondrophila 2032/99 OX=765 953 GN=queF PE=3 SV=1

SEQ ID NO: 50741 - protein, 274 aa, Waddliaceae bacterium
  misc_feature (1)..(274): tr|A0A2E3LUK1|A0A2E3LUK1_9BACT NADPH-dependent 7-cyano- 7-deazaguanine reductase QueF OS=Waddliaceae bacterium OX=2026802 GN=CMO81_01215 PE=3 SV=1
MTNQYLLDAPLGKTSEYISEYTPSLLFPIPREGKREEISVFQPLPFKGVDIWNAFEISCLNSKGKPQVYVATFIVPCESPCIFESKSLKLYLNSFNQSIFDTKESLQTTIENDLSATAEAPVQVTLWPLEQGQWIMANRMDGTNIDHLDVEIHDYNVNPELLVTSDEIVEETLSSDLLKSNCLATGQPDWASITIKYKGPQICHSSLLKYIISYRQHSEFHEQCVERIFMDLRHHCQTEELSVYARYTRRGGIDLNPFRSTEAVYPTNHRHFRQ

SEQ ID NO: 50742 - protein, 129 aa, Wenzhouxiangella marina
  misc_feature (1)..(129): tr|A0A0K0XWH3|A0A0K0XWH3_9GAMM NADPH-dependent 7-cyano- 7-deazaguanine reductase OS=Wenzhouxiangella marina OX= 1579979 GN=queF PE=3 SV=1
MPSQPSRELEVFPNPQPDSDYTIRIRIPEFTCLCPKTGQPDFAELHLSYVPDRLCVELKALKNYVWSFREEGAFHEAVTNRILGDLVEATQPRFMRLKAEFNVRGGIYTTVVVEHRAEGWIAPERVDLP

SEQ ID NO: 50743 - protein, 129 aa, Wenzhouxiangella sediminis
  misc_feature (1)..(129): tr|A0A3E1KC00|A0A3E1KC00_9GAMM NADPH-dependent 7-cyano- 7-deazaguanine reductase OS=Wenzhouxiangella sediminis OX=1792836 GN=queF PE=3 SV=1
MAIEASRNLETFPNPQPARDYTIRIRIPEFTCLCPKTGQPDFAELLIEYVPEAECVELKALKGYVWSYRDEGAFHEAVTNRILADLVETVQPRFMRLRAEFNVRGGIYTTVVAEHRAEGWQATQRVDLP

SEQ ID NO: 50744 - protein, 129 aa, Wenzhouxiangella sp.
  misc_feature (1)..(129): tr|A0A372BX91|A0A372BX91_9GAMM NADPH-dependent 7-cyano- 7-deazaguanine reductase OS=Wenzhouxiangella sp. 15181 OX=2301224 GN=queF PE=3 SV=1
MAIEPSRNLETFPNPQPARDYTIRIRIPEFTCLCPKTGQPDFAELLLEYVPEAECVELKALKGYVWSFRNEGAFHEAVTNRILADLVEAVQPRFMRLTAEFNVRGGIYTTVVAEHRVEGWQAPDPVALP

SEQ ID NO: 50745 - protein, 140 aa, Westiellopsis prolifica; identical to SEQ ID NO: 47257
  misc_feature (1)..(140): tr|A0A4V2JNT9|A0A4V2JNT9_9CYAN NADPH-dependent 7-cyano- 7-deazaguanine reductase OS=Westiellopsis prolifica IIC B1 OX=1970206 GN=queF PE=3 SV=1

SEQ ID NO: 50746 - protein, 267 aa, Woeseia oceani
  misc_feature (1)..(267): tr|A0A193LE45|A0A193LE45_9GAMM NADPH-dependent 7-cyano- 7-deazaguanine reductase OS=Woeseia oceani OX=1548547 G N=queF PE=3 SV=1
MKDTLLGRSSDYPDTLTAELLYPVARADGRAALKLGDALPFTGVDLWTAWEMSWLDTAGRPVVAVLSLAVPADSPALIESKSLKLYLNSYAMSRFASADEVANRLREDLGQCVQSTVQVQLQPGGATAGFSELPGICIDREDVVCNRYELDATLLRSGGATVRETLHSHVLRSLCPVTGQPDTGSVMIRYRGPRIDRGALLAYIVSFRRHSDFHELCVERIFSDLQSRCAAEELTVYARYNRRGGIDINPFRSNVDSDAPDLRLWRQ

SEQ ID NO: 50747 - protein, 266 aa, Woeseia sp.
  misc_feature (1)..(266): tr|A0A2E6ECL4|A0A2E6ECL4_9GAMM NADPH-dependent 7-cyano- 7-deazaguanine reductase OS=Woeseia sp. OX=1980636 GN=C MO98_12535 PE=3 SV=1
MLLGIPADYPAEYAPEVLHSVPRADARKVLGIGQALPFHGTDIWNGWELSWIDSNGKPTVGTAHLTVDASSPNIVESKSLKLYLGSFAMTQYHGVADIANVISTDLENLVGLPVKIEIYCGAEPTTSVLSTLPGDCVDNFPLKNADDSVNANALYADGKTVEGALNSHLLRSLCPVTNQPDIGSVLIRYKGPRIDPSSFLSYIVSFRKHHDFHESCIERMFIDIKRVCKTEKLTVHGFYNRRGGIDINPFRSDFENTPQQIRLWRQ

SEQ ID NO: 50748 - protein, 120 aa, Woeseiaceae bacterium
  misc_feature (1)..(120): tr|A0A2D9M0Z8|A0A2D9M0Z8_9GAMM NADPH-dependent 7-cyano- 7-deazaguanine reductase OS=Woeseiaceae bacterium OX=20 26806 GN=queF PE=3 SV=1
  misc_feature (4)..(4): Xaa can be any naturally occurring amino acid
  misc_feature (13)..(13): Xaa can be any naturally occurring amino acid
  misc_feature (41)..(41): Xaa can be any naturally occurring amino acid
  misc_feature (86)..(86): Xaa can be any naturally occurring amino acid
  misc_feature (116)..(116): Xaa can be any naturally occurring amino acid
MPDXPIETFPNPXPERDYEIVIRCPEFTSVCPKTGLPDFGXITITYSPDQRCIELKALKYYLIEYRNRGIFYEAATNQILDDLVAXCQPRRMVVIGEFSVRGGLTTSVSARYVAQXGLDG

SEQ ID NO: 50749 - protein, 160 aa, Wohlfahrtiimonas chitiniclastica
  misc_feature (1)..(160): tr|A0A165HFD3|A0A165HFD3_9GAMM NADPH-dependent 7-cyano- 7-deazaguanine reductase OS=Wohlfahrtiimonas chitinicla stica OX=400946 GN=queF PE=3 SV=1
MSNTEGLTLLGNQKTEYVDQYNPKVLEAFPNSHPDRNTFVKFNCPEFTALCPMTGQPDFATIYISYIPDTKMVESKSLKLYLFSFRNTGSFHEDCVNKMLNDLVDLLDPRYMEIWGKFTPRGGISIDPYVNYGKPNTSWAEFAKTRLVNHDLYPEKVDNR

SEQ ID NO: 50750 - protein, 160 aa, Wohlfahrtiimonas chitiniclastica
  misc_feature (1)..(160): tr|A0A256BV38|A0A256BV38_9GAMM NADPH-dependent 7-cyano- 7-deazaguanine reductase OS=Wohlfahrtiimonas chitinicla stica OX=400946 GN=queF PE=3 SV=1
MSNTEGLTLLGNQKTEYADQYNPKVLEAFPNSHPDRNTFVKFNCPEFTALCPMTGQPDFATIYISYIPDTKMVESKSLKLYLFSFRNTGSFHEDCVNKMLNDLVDLLDPRYMEIWGKFTPRGGISIDPYVNYGKPNTSWAEFAKTRLVNHDLYPEKVDNR

SEQ ID NO: 50751 - protein, 160 aa, Wohlfahrtiimonas sp.
  misc_feature (1)..(160): tr|A0A256C6I3|A0A256C6I3_9GAMM NADPH-dependent 7-cyano- 7-deazaguanine reductase OS=Wohlfahrtiimonas sp. G9077 OX=1980118 GN=queF PE=3 SV=1
MSNTEGLTLLGNQKTEYADQYNPKVLEAFPNSHPDRNTFVKFNCPEFTALCPMTGQPDFATIYISYIPDTKMVESKSLKLYLFSFRNTGSFHEDCVNKMLNDLVDLLDPRYMEIWGKFTPRGGISIDPYVNYGKPNTSWAEFAQTRLVNHDLYPEKVDNR

SEQ ID NO: 50752 - protein, 124 aa, Wolinella succinogenes
  misc_feature (1)..(124): sp|Q7MSY1|QUEF_WOLSU NADPH-dependent 7-cyano-7-deazagua nine reductase OS=Wolinella succinogenes (strain ATCC 2 9543 / DSM 1740 / LMG 7466 / NCTC 11488 / FDC 602W) OX= 273121 GN=queF PE=3 SV=1
MRYGEMEVKNFNPEEIEVWPNRNDRHYTIKITLPEFSCLCPRSGYPDYATVYIEYVPSSLVVELKAIKLYINSFRDRHVSHEDSANEIYDLLYKKLSPKELYLKMDFNPRGNVHTIIEIDSKKN

SEQ ID NO: 50753 - protein, 150 aa, Xanthobacter autotrophicus
  misc_feature (1)..(150): tr|A7INB5|A7INB5_XANP2 NADPH-dependent 7-cyano-7-deazag uanine reductase OS=Xanthobacter autotrophicus (strain ATCC BAA-1158 / Py2) OX=78245 GN=queF PE=3 SV=1
MTDRPLQLGVSAALPASPEEAVLDRVPNPHPDVDYVARFTCPEFTSLCPVTGQPDFAHIVIDYVPDQFLVESKSLKLYLGSFRNHGAFHEDCTVAVGKRLVDLLKPRFLRIAGYWYPRGGIPIDVFWQTGKLAEGVWLPDTGVAPYRGRG

SEQ ID NO: 50754 - protein, 150 aa, Xanthobacter tagetidis
  misc_feature (1)..(150): tr|A0A3L6ZYM2|A0A3L6ZYM2_9RHIZ NADPH-dependent 7-cyano- 7-deazaguanine reductase OS=Xanthobacter tagetidis OX=6 0216 GN=queF PE=3 SV=1
MTEQPLQLGSQTALPPSPDAAVLDRVPNPHPDTDYVARFTCPEFTSLCPVTGQPDFAHLVIDYVPDRFLVESKSLKLYLAAFRNHGAFHEDCTVAIGKRLAGLLEPRFLRIAGYWYPRGGIPIDVFWQTGTLPKGAWLPETGVAPYRGRG

SEQ ID NO: 50755 - protein, 150 aa, Xanthobacteraceae bacterium
  misc_feature (1)..(150): tr|A0A521W156|A0A521W156_9RHIZ NADPH-dependent 7-cyano- 7-deazaguanine reductase OS=Xanthobacteraceae bacterium OX=2021379 GN=queF PE=3 SV=1
MARKPLQLGRPAALPASPARAQLDRVPNPHPETNYLARFTAPEFTTLCPITGQPDFAHLVIDYVPGRWLVESKSLKLYLASFRNHGGFHEDCTISVGQRLATLIKPKWLRIGGYWYPRGGIPIDVFWQTGRLPKDVWVPDQGVSPYRGRG

SEQ ID NO: 50756 - protein, 274 aa, Xanthomonadaceae bacterium
  misc_feature (1)..(274): tr|A0A2M9EGM9|A0A2M9EGM9_9GAMM NADPH-dependent 7-cyano- 7-deazaguanine reductase OS=Xanthomonadaceae bacterium NML95-0200 OX=2032577 GN=queF PE=3 SV=1
MNPNRPETSQLGRETAYPDRYDAGLLFPIPRQSARDAIGIAGDALPFIGFDAWNAYELSWLDARGKPRVAVARITVPADSPNLIESKSFKLYLNSFNAERMASQAALAERLCQDLSAAAGAPVSLQFGLPPMAPIAADSHESIDDIEIDIDDYGPPNPAYLSVSDAIVQQALSSQLLKSNCPVTGQPDWATVIIRYHGARIDPAGLLRYLVSFRNHREFHEQCVERIFIEIMQHCRPQQLSVGARYTRRGGLDINPWRATPGYPPPVAQRDLRQ

SEQ ID NO: 50757 - protein, 274 aa, Xanthomonadaceae bacterium
  misc_feature (1)..(274): tr|A0A2M9DYU9|A0A2M9DYU9_9GAMM NADPH-dependent 7-cyano- 7-deazaguanine reductase OS=Xanthomonadaceae bacterium NML03-0222 OX=2032581 GN=queF PE=3 SV=1
MNPNRPETSQLGRETAYPDRYDAGLLFPIPRQSARDAIGIAGDALPFIGFDAWNAYELSWLDARGKPRVAVARITVPADSPNLIESKSFKLYLNSFNAERMASQAALAERLCQDLSAAAGAPVSLQFGLPPMALIAAESHESIDDIEIDIDDYGPPNPAYLSISDAIVQQALSSHLLKSNCPVTGQPDWATVIIRYHGARIDPAGLLRYLVSFRNHREFHEQCVERIFIEIMQHCRPQQLSVEARYTRRGGLDINPWRATPGYPPPVAQRDLRQ

SEQ ID NO: 50758 - protein, 277 aa, Xanthomonadales bacterium
  misc_feature (1)..(277): tr|A0A1Q4FGW3|A0A1Q4FGW3_9GAMM NADPH-dependent 7-cyano- 7-deazaguanine reductase OS=Xanthomonadales bacterium 6 3-13 OX=1895867 GN=queF PE=3 SV=1
MNPAAHDSPLGKQVAGSAVHDADLLFPIPRAAGRGAMGLAEPLPFHGVDIWNAWELSWLDRRGKPQVAIGEFRIPASSPNLIESKSFKLYLNSLNQTRFADAEAVLAVLLADLSAAAGMPIEVVLLAVDPPRSAPIRRLDGDCIDDLDIDIDQYGPPQSGFLRVDAAAEPVTEMLVSHLLKSNCPVTGQPDWASVQIRYHGKRIDRAGLLRYLVSYRNHDDFHEQCVERIFRDLLARCAPQQLTVHARYTRRGGLDINPWRSNVDAATADNPRQQRQ

SEQ ID NO: 50759 - protein, 275 aa, Xanthomonadales bacterium
  misc_feature (1)..(275): tr|A0A1Q4FR37|A0A1Q4FR37_9GAMM NADPH-dependent 7-cyano- 7-deazaguanine reductase OS=Xanthomonadales bacterium 6 9-70 OX=1895869 GN=queF PE=3 SV=1
MTSAEHSLLGKSVAYRDEYDASLLFPIPRAGKRAELGLSGALPFHGVDIWNAYELSWLDPRGKPVVALAEFRVPAASPNIIESKSFKLYLNTFAQTRLDGADAVAQRLRTDLSAAAGAAVEVRLQTAAGFAQETLHELDGDCIDGVEVDIDDYDAPRPDYLHGDAAGIVEETLVSHLLKSNCPVTGQPDWASLQIRYRGPRIDRAGLLRYLVSFRRHSDFHEQCVERIWCDLHARCAPHYLAVYARYTRRGGLDINPFRSSEAGEAPGNPRGARQ

SEQ ID NO: 50760 - protein, 272 aa, Xanthomonas albilineans
  misc_feature (1)..(272): tr|D2UFP8|D2UFP8_XANAP NADPH-dependent 7-cyano-7-deazag uanine reductase OS=Xanthomonas albilineans (strain GPE PC73 / CFBP 7063) OX=380358 GN=queF PE=3 SV=1
MNTPQDSSLGREVTYPEKYDPALLFPIPRAAARTEIGIDAGALPFFGLDRWHAYELSWLDPRGKPCVATATLHVPCTSPSLIESKSLKLYLNSLNAMRFNSAEALRSCIVTDLSARAGADVAMEFGLPPLETVAQGESLDILDIAIDNYGPPHPEFLFAAADEVVEETLTSALLKSNCPVTGQPDWASLYLRYRGGRIDRAGLLRYLVSFREHAGFHEQCVERIFQDIMSRCHPQSLQVEARYTRRGGLDINPWRATPDVVAPLTFLRDPRQ

SEQ ID NO: 50761 - protein, 271 aa, Xanthomonas alfalfae
  misc_feature (1)..(271): tr|A0A1S1XMJ3|A0A1S1XMJ3_9XANT NADPH-dependent 7-cyano- 7-deazaguanine reductase OS=Xanthomonas alfalfae OX=366 650 GN=queF PE=3 SV=1
MNTPEDSTLGREVAYPSGYDPSLLFPIPRAAGRQAIGLTGELPFIGRDRWHAYELSWLDAQGKPCVATATLHVPCDSPSLIESKSLKLYLNSLNATRFNSAEAVRTRIATDLSTRAGADVAVEFGLPPIDAVGEGESIDALDVSIDDYGPPNAAYLCARAQPAVEEVLTSALLKSNCPVTGQPDWASVTLHYRGAPIDREGLLRYLVSFRDHAEFHEQCVERIFNDVLTQCAPQWLVVEARYTRRGGLDINPLRSSASVPTPLSIFRDLRQ

SEQ ID NO: 50762 - protein, 271 aa, Xanthomonas arboricola
  misc_feature (1)..(271): tr|A0A2S6ZVA5|A0A2S6ZVA5_9XANT NADPH-dependent 7-cyano- 7-deazaguanine reductase OS=Xanthomonas arboricola pv. guizotiae OX=487867 GN=queF PE=3 SV=1
MNTPEDSTLGREVAYPSGYDPSLLFPIPRAAGREAIGLSGALPFIGRDRWHAYELSWLDAHGKPCVATATLHVPHDSPALIESKSLKLYLNSLNATRFNSAEAVRTRIASDLSTRAGADVVVEFGLPPIDAVGEGESIDALDVSIDDYGPPNAAYLAAHAQPVVEEVLTSALLKSNCPVTGQPDWASVTLRYRGAPIDRQGLLRYLVSFRDHAEFHEQCVERIFHDVLLRCAPEWLVVEARYTRRGGLDINPLRSSPSVPTPLSIFRDLRQ

SEQ ID NO: 50763 - protein, 271 aa, Xanthomonas arboricola
  misc_feature (1)..(271): tr|A0A2S7BI30|A0A2S7BI30_9XANT NADPH-dependent 7-cyano- 7-deazaguanine reductase OS=Xanthomonas arboricola OX=5 6448 GN=queF PE=3 SV=1
MNTPEDSTLGREVAYPSGYDPSLLFPIPRAAGREAIGLTGALPFIGRDRWHAYELSWLDAQGKPCVATATLHVPSESPSLIESKSLKLYLNSLNATRFNSAEAVRTRIASDLSTRAGADVAVEFGLPPIDAVGEGESIDALDVSIDDYGPPNAAYLTAHAQPVVEEVLTSALLKSNCPVTGQPDWASVTLRYRGAPIDREGLLRYLVSFRDHAEFHEQCVERIFHDVLLRCAPEWLVVEARYTRRGGLDINPLRSSPSVPTPLSIFRDLRQ

SEQ ID NO: 50764 - protein, 271 aa, Xanthomonas axonopodis
  misc_feature (1)..(271): sp|Q8PFX6|QUEF_XANAC NADPH-dependent 7-cyano-7-deazagua nine reductase OS=Xanthomonas axonopodis pv. citri (str ain 306) OX=190486 GN=queF PE=3 SV=1
MNTPEDSTLGREVAYPSGYDPSLLFPIPRAAGRQAIGLTGDLPFIGRDRWHAYELSWLDAQGKPCVATATLHVPCDSPSLIESKSLKLYLNSLNATRFNSAEAVRTRIATDLSTRAGADVAVEFGLPPIDAVGEGESIDALDLSIDDYGPPNAAYLCAHAQPVVEEVLTSALLKSNCPVTGQPDWASVTLRYRGAPIDREGLLRYLVSFRDHAEFHEQCVERIFNDVLTQCAPQWLVVEARYTRRGGLDINPLRSSASVPTPLSIFRDLRQ

SEQ ID NO: 50765 - protein, 271 aa, Xanthomonas axonopodis; identical to SEQ ID NO: 50764
  misc_feature (1)..(271): tr|M4UFV8|M4UFV8_9XANT NADPH-dependent 7-cyano-7-deazag uanine reductase OS=Xanthomonas axonopodis Xac29-1 OX=1 304892 GN=queF PE=3 SV=1

SEQ ID NO: 50766 - protein, 271 aa, Xanthomonas bromi
  misc_feature (1)..(271): tr|A0A1C3NM99|A0A1C3NM99_9XANT NADPH-dependent 7-cyano- 7-deazaguanine reductase OS=Xanthomonas bromi OX=56449 GN=queF PE=3 SV=1
MNTPEDSTLGREVAYPSGYDPSLLFPIPRAAGREAIGLSGVLPFIGRDRWHAYELSWLDAQGKPCVATATLHVPCESPSLIESKSLKLYLNSLNATRFNSAEAVRTRIATDLSTRAGTDVSVEFGLPPIDVVGEGESIDTLDVSIDDYGPPNAAYLSAHAQPVVEEVLTSALLKSNCPVTGQPDWASVTLRYRGAPIDREGLLRYLVSFRDHAEFHEQCVERMFNDVLTHCAPEWLVVEARYTRRGGLDINPLRRSPSVPTPLSIFRDLRQ

SEQ ID NO: 50767 - protein, 271 aa, Xanthomonas campestris
  misc_feature (1)..(271): sp|Q8P4C5|QUEF_XANCP NADPH-dependent 7-cyano-7-deazagua nine reductase OS=Xanthomonas campestris pv. campestris (strain ATCC 33913 / DSM 3586 / NCPPB 528 / LMG 568 / P 25) OX=190485 GN=queF PE=3 SV=1
MNTPEDSSLGREVAYPSGYDPSLLFPIPRAAGRAAIGLRGALPFVGRDRWHAYELSWLDAHGKPCVATATLHVPCESPALIESKSLKLYLNSLNATRFNSAEAVRARIATDLSTRAGADVSVEFGLPPIDAVGEGESIDALDIAIDDYGPPKADYLATHAGTVVEEVLASALLKSNCPVTGQPDWASVTLRYRGAPIDREGLLRYLVSFRDHADFHEQCVERIFQDLLVRCAPQWLVVEARYTRRGGLDINPVRTSPQMPTPLSIFRDLRQ

SEQ ID NO: 50768 - protein, 271 aa, Xanthomonas campestris
  misc_feature (1)..(271): sp|B0RWU6|QUEF_XANCB NADPH-dependent 7-cyano-7-deazagua nine reductase OS=Xanthomonas campestris pv. campestris (strain B100) OX=509169 GN=queF PE=3 SV=1
MNTPEDSSLGREVAYPSGYDPSLLFPIPRAAGRAAVGLSGALPFVGRDRWHAYELSWLDAHGKPCVATATLHVPCESPALIESKSLKLYLNSLNATRFNSAEAVRARIATDLSTRAGADVSVEFGLPPIDAVGEGESIDALDIAIDDYGPPKADYLATHAGTVVEEVLASALLKSNCPVTGQPDWASVTLRYRGAPIDREGLLRYLVSFRDHADFHEQCVERIFQDLLVRCAPQWLVVEARYTRRGGLDINPVRTSPQMPTPLSIFRDLRQ

SEQ ID NO: 50769 - protein, 271 aa, Xanthomonas cannabis
  misc_feature (1)..(271): tr|A0A0B2CRR4|A0A0B2CRR4_9XANT NADPH-dependent 7-cyano- 7-deazaguanine reductase OS=Xanthomonas cannabis pv. ca nnabis OX=1885894 GN=queF PE=3 SV=1
MNTPEDSTLGREVAYPSGYDPSLLFPIPRAAGRQAIGLTGALPFIGRDRWHAYELSWLDAQGKPCVATATVHVPCDSPSLIESKSLKLYLNSLNATRFNSAEAVRTRIATDLSTRAGADVSVEFGLPPIDAVGEGESIDTLDVSIDDYGPPNADYLRAHAGAAVDEVLTSALLKSNCPVTGQPDWASVTLRYRGAPIDREGLLRYLVSFRDHAEFHEQCVERIFNDVLIRCAPEWLVVEARYTRRGGLDISPLRSSPSVPTPLSIFRDLRQ

SEQ ID NO: 50770 - protein, 271 aa, Xanthomonas citri
  misc_feature (1)..(271): tr|A0A2D2UGZ4|A0A2D2UGZ4_XANCI NADPH-dependent 7-cyano- 7-deazaguanine reductase OS=Xanthomonas citri pv. phase oli var. fuscans OX=473423 GN=queF PE=3 SV=1
MNTPEDSTLGREVAYPSGYDPSLLFPIPRAAGREAIGLTGELPFIGRDRWHAYELSWLDAQGKPCVATATLHVPCDSPSLIESKSLKLYLNSLNATRFNSAEAVRTRIATDLSTRAGADVAVEFGLPPIDAVGEGESIDALDVSIDDYGPPNAAYLCAHAQPVVEEVLTSALLKSNCPVTGQPDWASVTLRYRGAPIDREGLLRYLVSFRDHAEFHEQCVERIFNDVLTQCAPQWLVVEARYTRRGGLDINPLRSSASVPTPLSIFRDLRQ

SEQ ID NO: 50771 - protein, 271 aa, Xanthomonas citri; identical to SEQ ID NO: 50770
  misc_feature (1)..(271): tr|A0A220WCY4|A0A220WCY4_XANCI NADPH-dependent 7-cyano- 7-deazaguanine reductase OS=Xanthomonas citri pv. vigni cola OX=473426 GN=queF PE=3 SV=1

SEQ ID NO: 50772 - protein, 271 aa, Xanthomonas codiaei
  misc_feature (1)..(271): tr|A0A2S7CJ47|A0A2S7CJ47_9XANT NADPH-dependent 7-cyano- 7-deazaguanine reductase OS=Xanthomonas codiaei OX=5646 3 GN=queF PE=3 SV=1
MNTPEDSTLGREVAYPSGYDPSLLFPIPRAAGREAIGLTGALPFIGRDRWHAYELSWLDAQGKPCVATATLHVPCDSPSLIESKSLKLYLNSLNATRFNSAEAVRTRIATDLSTRAGADVVVEFGLPPIDAVGEGESIDALDVSIDDYGPPNAAYLHALAQPAVEEVLTSALLKSNCPVTGQPDWASVSVRYRGAPIDREGLLRYLVSFRDHAEFHEQCVERIFNDVMQRCAPEWLVVEARYTRRGGLDINPLRSSPGLPTPLSIFRDLRQ

SEQ ID NO: 50773 - protein, 271 aa, Xanthomonas cucurbitae
  misc_feature (1)..(271): tr|A0A2S7DQB9|A0A2S7DQB9_9XANT NADPH-dependent 7-cyano- 7-deazaguanine reductase OS=Xanthomonas cucurbitae OX=5 6453 GN=queF PE=3 SV=1
MNTPEESTLGREVAYPSGYDLSLLFPIPRAAGRAAIGLAGALPFIGRDRWHAYELSWLDAHGKPCVATATLHVPCDSPSLIESKSLKLYLNSLNATRFNSAEAVRTRIATDLSTRAGADVVVEFGLPPIDAVGEGESIDALDISIDDYGPPNAAYLHAHAGAAVEEVLTSALLKSNCPVTGQPDWASLSLRYRGAPIDREGLLRYLVSFRDHAEFHEQCVERIFNDLLQRCAPEWLVVEARYTRRGGLDINPLRSSPGVPLPLSIFRDLRQ

SEQ ID NO: 50774 - protein, 271 aa, Xanthomonas cynarae
  misc_feature (1)..(271): tr|A0A2S7BTH2|A0A2S7BTH2_9XANT NADPH-dependent 7-cyano- 7-deazaguanine reductase OS=Xanthomonas cynarae OX=1092 14 GN=queF PE=3 SV=1
MNTPEDSSLGREVAYPSGYDPSLLFPIPRAAGREAIGLTGALPFIGRDRWHAYELGWLDAQGKPCVATATLHVPSDSPSLIESKSLKLYLNSLNATRFNSAEAVRTRIASDLSTRAGADVAVEFGLPPIDAVGEGESIDALDVSIDDYGPPNVAYLSAHAQPIVEEVLTSALLKSNCPVTGQPDWASVTLRYRGAPIDREGLLRYLVSFRDHAEFHEQCVERIFHDVLIRCAPEWLVVEARYTRRGGLDINPLRSSPSVPTPLSIFRDLRQ

SEQ ID NO: 50775 - protein, 271 aa, Xanthomonas dyei
  misc_feature (1)..(271): tr|A0A2S7C336|A0A2S7C336_9XANT NADPH-dependent 7-cyano- 7-deazaguanine reductase OS=Xanthomonas dyei OX=743699 GN=queF PE=3 SV=1
MNTPEESTLGREVAYPSGYDPSLLFPIPRAAGREAIGLTGALPFIGRDRWHAYELSWLDAQGKPCVATATLHVPFDSPSLIESKSFKLYLNSLNATRFNSAEAVRTRIVTDLSTRAGADVSVEFGLPPIDAVGEGESIDTLDVSIDDYGPPNAAYLRAQTAAAVEEVLTSALLKSNCPVTGQPDWASVTLRYRGAPIDREGLLRYLVSFRDHAEFHEQCVERIFNDVLTRCAPEWLVVEARYTRRGGLDINPLRSSPSVPTPLSIFRDLRQ

SEQ ID NO: 50776 - protein, 271 aa, Xanthomonas euvesicatoria
  misc_feature (1)..(271): tr|A0A4U0T333|A0A4U0T333_XANEU NADPH-dependent 7-cyano- 7-deazaguanine reductase OS=Xanthomonas euvesicatoria p v. citrumelonis OX=189396 GN=queF PE=3 SV=1
MNTPEDSTLGREVAYPSGYDPSLLFPIPRAAGRQAIGLTGDLPFIGRDRWHAYELSWLDAQGKPCVATATLHVPCDSPSLIESKSLKLYLNSLNATRFNSAEAVRTRIATDLSTRAGADVAVEFGLPPIDAVGEGESIDALDVSIDDYGPPNAAYLCARAQPAVEEVLTSALLKSNCPVTGQPDWASVTLRYRGAPIDREGLLRYLVSFRDHAEFHEQCVERIFNDVLTQCAPQWLVVEARYTRRGGLDINPLRSSASVPTPLSIFRDLRQ

SEQ ID NO: 50777 - protein, 271 aa, Xanthomonas euvesicatoria; identical to SEQ ID NO: 50761
  misc_feature (1)..(271): tr|A0A2S7E9S9|A0A2S7E9S9_XANEU NADPH-dependent 7-cyano- 7-deazaguanine reductase OS=Xanthomonas euvesicatoria p v. citrumelonis OX=189396 GN=queF PE=3 SV=1

SEQ ID NO: 50778 - protein, 271 aa, Xanthomonas floridensis
  misc_feature (1)..(271): tr|A0A1A9MD86|A0A1A9MD86_9XANT NADPH-dependent 7-cyano- 7-deazaguanine reductase OS=Xanthomonas floridensis OX= 1843580 GN=queF PE=3 SV=1
MNTPEDSTLGREVAYPSGYDPSLLFPIPRAAGREAIGLTGALPFIGRDRWHAYELSWLDAQGKPCVATATLHVPCDSPSLIESKSLKLYLNSLNATRFNSAEAVRTRIATDLSTRAGADVAVEFGLPPIDAVGEGESIDALDISIDDYGPPNAAYLSAHAQPVVEEVLTSALLKSNCPVTGQPDWASVTLRYRGAPIDREGLLRYLVSFRDHAEFHEQCVERIFNDVMLRCAPEWLVVEARYTRRGGLDINPLRSSPSVPMPLSIFRDLRQ

SEQ ID NO: 50779 - protein, 271 aa, Xanthomonas fragariae
  misc_feature (1)..(271): tr|A0A1Y6H516|A0A1Y6H516_9XANT NADPH-dependent 7-cyano- 7-deazaguanine reductase OS=Xanthomonas fragariae OX=48 664 GN=queF PE=3 SV=1
MNTPEDSTLGRETAYPSGYDPSLLFPIPRAAGREAIGLTGALPFIGCDRWHAYELSWLNAHGKPCVATATLHVPSDSPSLIESKSLKLYLNSLNATRFTSAEAVRTRIANDLSTRAGADVSVDFGLPPVDAVGEGESIDTLDVSIDDYGPPNAAYLLAHAQATVEEVLTSALLKSNCPVTGQPDWASVTLRYRGAPIHRDGLLRYLVSFRNHAEFHEQCVERIFNDVLTRCAPEWLVVEARYTRRGGLDINPLRSSPSVPAPLSIFRDLRQ

SEQ ID NO: 50780 - protein, 271 aa, Xanthomonas gardneri; identical to SEQ ID NO: 50774
  misc_feature (1)..(271): tr|F0CD21|F0CD21_9XANT NADPH-dependent 7-cyano-7-deazag uanine reductase OS=Xanthomonas gardneri ATCC 19865 OX= 925777 GN=queF PE=3 SV=1

SEQ ID NO: 50781 - protein, 271 aa, Xanthomonas gardneri; identical to SEQ ID NO: 50774
  misc_feature (1)..(271): tr|A0A0G8LE13|A0A0G8LE13_9XANT NADPH-dependent 7-cyano- 7-deazaguanine reductase OS=Xanthomonas gardneri OX=902 70 GN=queF PE=3 SV=1

SEQ ID NO: 50782 - protein, 271 aa, Xanthomonas hortorum
  misc_feature (1)..(271): tr|V7ZAP4|V7ZAP4_9XANT NADPH-dependent 7-cyano-7-deazag uanine reductase OS=Xanthomonas hortorum pv. carotae st r. M081 OX=863365 GN=yqcD PE=3 SV=1
MNTPEDSSLGREVAYPSGYDPSLLFPIPRAAGREAIGLTGALPFIGRDRWHAYELGWLDAQGKPCVATATLHVPSDSPSLIESKSLKLYLNSLNATRFNSAEAVRTRIASDLSTRAGADVAVEFGLPPIDAVGEGESIDALDVSIDDYGPPNAAYLSAHAQPIVEEVLTSALLKSNCPVTGQPDWASVTLRYRGAPIDREGLLRYLVSFRDHAEFHEQCVERIFHDVLIRCAPEWLVVEARYTRRGGLDINPLRSSPSVPTPLSIFRDLRQ

SEQ ID NO: 50783 - protein, 271 aa, Xanthomonas hortorum; identical to SEQ ID NO: 50782
  misc_feature (1)..(271): tr|A0A2S7E4Q1|A0A2S7E4Q1_9XANT NADPH-dependent 7-cyano- 7-deazaguanine reductase OS=Xanthomonas hortorum pv. he derae OX=453603 GN=queF PE=3 SV=1

SEQ ID NO: 50784 - protein, 272 aa, Xanthomonas hyacinthi
  misc_feature (1)..(272): tr|A0A2S7EVY6|A0A2S7EVY6_9XANT NADPH-dependent 7-cyano- 7-deazaguanine reductase OS=Xanthomonas hyacinthi OX=56 455 GN=queF PE=3 SV=1
MNTPQDSSLGREVAYPSQYDPALLFPIPRAGGRAEIGLDAAPLPFFGLDRWHAYELSWLDAHGKPCVATATLQVPCTSPQLIESKSLKLYLNALNAMRFNSAEAVRACIVTDLSARAGADVTMEFGLPPVDPLGEGDSLDALDIAIDCYGPPRPQFLLAAADDIVEETLSSALLKSNCPVTGQPDWATLCVRYRGGRIDREGLLRYLISFREHAGFHEQCVEQVFHDLLTRCRPQSLQVEARYTRRGGLDINPWRATPDVAEPIAFHRDPRQ

SEQ ID NO: 50785 - protein, 271 aa, Xanthomonas manihotis
  misc_feature (1)..(271): tr|A0A0W7XLD8|A0A0W7XLD8_XANMN NADPH-dependent 7-cyano- 7-deazaguanine reductase OS=Xanthomonas manihotis OX=43 353 GN=queF PE=3 SV=1
MNTPEDSTLGREVAYPSGYDPSLLFPIPRAAGREAIGLVGELPFIGRDRWHAYELSWLDAQGKPCVATATLHVPCDSPSLIESKSLKLYLNSLNATRFNSAEAVRTRIATDLSTRAGADVAVEFGLPPIDAVGEGESIDTLDVSIDDYGPPNAAYLCALAQPVVEEVLTSALLKSNCPVTGQPDWASVTLRYRGAPIDREGLLRYLVSFRDHAEFHEQCVERIFNDVLTQCAPQWLVVEARYTRRGGLDINPLRSSASVPMPLSIFRDLRQ

SEQ ID NO: 50786 - protein, 271 aa, Xanthomonas melonis
  misc_feature (1)..(271): tr|A0A2S7DMP0|A0A2S7DMP0_9XANT NADPH-dependent 7-cyano- 7-deazaguanine reductase OS=Xanthomonas melonis OX=5645 6 GN=queF PE=3 SV=1
MNTPADSTLGREVAYPSGYDPSLLFPIPRAAGRDAIGLAGALPFIGRDRWHAYELSWLDAQGKPCVATATLHVPCDSPSLIESKSLKLYLNSLNATRFNSAEAVRTRIATDLSTRAGADVTVEFGLPPIDTVGEGESIDALDVSIDDYGPPNAGYLRAHAQDVVEQVLTSALLKSNCPVTGQPDWASVTLRYRGAPIDREGLLRYLVSFRDHAEFHEQCVERIFNDVMQRCAPEWLVVEARYTRRGGLDINPLRSSPTVPVPLSIFRDLRQ

SEQ ID NO: 50787 - protein, 271 aa, Xanthomonas nasturtii
  misc_feature (1)..(271): tr|A0A3E1KLL4|A0A3E1KLL4_9XANT NADPH-dependent 7-cyano- 7-deazaguanine reductase OS=Xanthomonas nasturtii OX=18 43581 GN=queF PE=3 SV=1
MNTPEDSTLGREIAYPSGYDPSLLFPIPRAAGREAIGLTDALPFIGRDRWHAYELSWLDAQGKPCVATATVHVPCESPSLIESKSLKLYLNSLNATRFNSAEAVRTRIATDLSTRAGADVSVEFGLPPVDAVGEGESIDTLDVSIDDYGPPNAAYLSAHAQPVVEEVLTSALLKSNCPVTGQPDWASVTLRYRGAPIDREGLLRYLVSFRDHAEFHEQCVERVFNDVLIRCAPEWLVVEARYTRRGGLDINPLRSSPNIPTPLSIFRDLRQ

SEQ ID NO: 50788 - protein, 271 aa, Xanthomonas oryzae
  misc_feature (1)..(271): sp|B2SKC6|QUEF_XANOP NADPH-dependent 7-cyano-7-deazagua nine reductase OS=Xanthomonas oryzae pv. oryzae (strain PXO99A) OX=360094 GN=queF PE=3 SV=1
MNTPEDSTLGREVAYPSGYDPSLLFPIPRAAGREAIGLTGALPFTGRDRWHAYELSWLDAHGKPCVATATLHVPHDSPALIESKSLKLYLNSLNATRFNSAEAVRTRIVTDLSTRAGADVSVEFGLPPIDGVGDGESIDALDVSIDDYGPPNAAYLTAQAQPVVEEVLTSALLKSNCPVTGQPDWASVTLHYRGAPIEREGLLRYLVSFRDHAEFHEQCVERIFHDVLLRCAPEWLVVEARYTRRGGLDINPLRSSLSVPAPLSVFRDLRQ

SEQ ID NO: 50789 - protein, 271 aa, Xanthomonas oryzae
  misc_feature (1)..(271): tr|A0A0C5V507|A0A0C5V507_9XANT NADPH-dependent 7-cyano- 7-deazaguanine reductase OS=Xanthomonas oryzae pv. oryz icola OX=129394 GN=queF PE=3 SV=1
MNTPEDSSLGREVAYPSGYDPSLLFPIPRAAGREAIGLTGALPFTGRDRWHAYELSWLDAHGKPCVATATLHVPHDSPALIESKSLKLYLNSLNATRFNSAEAVRTRIVTDLSTRAGADVSVEFGLPPIDAVGDGESIDALDVSIDDYGPPNAAYLTAQAQPMVEEVLTSALLKSNCPVTGQPDWASVTLHYRGAPIEREGLLRYLVSFRDHAEFHEQCVERIFHDVLLRCAPEWLVVEARYTRRGGLDINPLRSSRSVPVPLSVFRDLRQ

SEQ ID NO: 50790 - protein, 271 aa, Xanthomonas perforans
  misc_feature (1)..(271): tr|A0A0G8Y4W7|A0A0G8Y4W7_9XANT NADPH-dependent 7-cyano- 7-deazaguanine reductase OS=Xanthomonas perforans OX=44 2694 GN=queF PE=3 SV=1
MNTPEDSTLGREVAYPSGYDPSLLFPIPRAAGRQAIGLTGELPFIGRDRWHAYELSWLDAQGKPCVATATLHVPCDSPSLIESKSLKLYLNSLNATRFNSAEAVRTRIATDLSTRAGADVAVEFGLPPIDAVGEGESIDALDVSIDDYGPPNAAYLCARAQPAVEEVLTSALLKSNCPVTGQPDWASVTLRYRGAPIDREGLLRYLVSFRDHAEFHEQCVERIFNDVLTQCAPQWLVVEARYTRRGGLDINPLRSSASVPTPLSIFRDLRQ

SEQ ID NO: 50791 - protein, 271 aa, Xanthomonas phaseoli
  misc_feature (1)..(271): tr|A0A1V9HDW4|A0A1V9HDW4_9XANT NADPH-dependent 7-cyano- 7-deazaguanine reductase OS=Xanthomonas phaseoli pv. sy ngonii LMG 9055 OX=1437878 GN=queF PE=3 SV=1
MNTPEDSTLGREVAYPSGYDPSLLFPIPRAAGREAIGLTGELPFIGRDRWHAYELSWLDAQGKPCVATATLHVPCDSPSLIESKSLKLYLNSLNAIRFNSAEAVRTRIATDLSTRAGADVAVEFGLPPIDAVGEGESIDTLDVSIDDYGPPNAAYLCALAQPVVEEVLTSALLKSNCPVTGQPDWASVTLRYRGAPIDREGLLRYLVSFRDHAEFHEQCVERIFNDVLTQCAPQWLVVEARYTRRGGLDINPLRSSASVPMPLSIFRDLRQ

SEQ ID NO: 50792 - protein, 271 aa, Xanthomonas phaseoli
  misc_feature (1)..(271): tr|A0A1V9H7H5|A0A1V9H7H5_9XANT NADPH-dependent 7-cyano- 7-deazaguanine reductase OS=Xanthomonas phaseoli pv. di effenbachiae OX=92828 GN=queF PE=3 SV=1
MNTPEDSTLGREVAYPSGYDPSLLFPIPRAAGREAIGLVGELPFIGRDRWHAYELSWLDAQGKPCVATATLHVPCDSPSLIESKSLKLYLNSLNATRFNSAEAVRTRIATDLSTRAGADVAVEFGLPPIDAVGEGESVDTLDVSIDDYGPPNAAYLCALAQPVVEEVLTSALLKSNCPVTGQPDWASVTLRYRGAPIDREGLLRYLVSFRDHAEFHEQCVERIFNDVLTQCAPQWLVVEARYTRRGGLDINPLRSSASVPMPLSIFRDLRQ

SEQ ID NO: 50793 - protein, 271 aa, Xanthomonas pisi
  misc_feature (1)..(271): tr|A0A2S7D2L3|A0A2S7D2L3_9XANT NADPH-dependent 7-cyano- 7-deazaguanine reductase OS=Xanthomonas pisi OX=56457 G N=queF PE=3 SV=1
MNTPEESTLGREVAYPSGYDPSLLFPIPRAAGREAIGLTGALPFIGRDRWHAYELSWLDAQGKPCVATATLHVPCESPSLIESKSLKLYLNSLNATRFNSAEAVRTRIATDLSTRAGADVAVEFGLPPIDAVGEGESIDALDVSIDDYGPPNAAYLSAHAQPVVEEVLTSALLKSNCPVTGQPDWASVTLRYRGAPIDREGLLRYLVSFRDHAEFHEQCVERIFSDVLLRCAPEWLVVEARYTRRGGLDINPLRSSPSVPTPLSIFRDLRQ

SEQ ID NO: 50794 - protein, 271 aa, Xanthomonas populi
  misc_feature (1)..(271): tr|A0A2S7ECE2|A0A2S7ECE2_9XANT NADPH-dependent 7-cyano- 7-deazaguanine reductase OS=Xanthomonas populi OX=53414 GN=queF PE=3 SV=1
MNTPEDSSLGREVAYPSGYDPSLLFPIPRAAGRAAIGLTGAVPFIGRDRWHAYELGWLDVQGKPCVATATLHVPSDSPSLIESKSLKLYLNSLNATRFNSAEAVRTRIATDLSTRAGADVAVEFGLPPIDAVGEGESIDALDVSIEDYGPPNAAYLSAHAQPIVEEVLTSALLKSNCPVTGQPDWASVTLRYRGAPIDREGLLRYLVSFRDHAEFHEQCVERIFNDVLIRCAPEWLMVEARYTRRGGLDINPLRRSPSLPTPLSIFRDPRQ

SEQ ID NO: 50795 - protein, 271 aa, Xanthomonas prunicola
  misc_feature (1)..(271): tr|A0A2N3RQ41|A0A2N3RQ41_9XANT NADPH-dependent 7-cyano- 7-deazaguanine reductase OS=Xanthomonas prunicola OX=20 53930 GN=queF PE=3 SV=1
MNTPEESTLGREVAYPSGYDPSLLFPIPRAAGREAIGLTGALPFIGRDRWHAYELSWLDAQGKPCVATATLHVPCDSPSLIESKSLKLYLNSLNATRFNSAEAVRTRIATDLSTRAGADVAVEFGLPPIDAVGEGESIDALDVSIDDYGPPNAAYLSAQAQPVVEEVLTSALLKSNCPVTGQPDWASVTLRYRGAPIDREGLLRYLVSFRDHAEFHEQCVERIFNDVLAQCAPEWLVVEARYTRRGGLDINPLRSSPSVPTPLSIFRDLRQ

SEQ ID NO: 50796 - protein, 272 aa, Xanthomonas sacchari
  misc_feature (1)..(272): tr|A0A2P5Z4Y2|A0A2P5Z4Y2_9XANT NADPH-dependent 7-cyano- 7-deazaguanine reductase OS=Xanthomonas sacchari OX=564 58 GN=queF PE=3 SV=1
MNTPQDSSLGREVAYPSQYDPALLFPIPRAAARTEIGLDPAALPFFGVDRWHAYELSWLDAQGKPCVATATLQVPCASPNLIESKSLKLYLNSLNAMRFNSAEALRSCIVTDLSARAGADVAMEFGLPPMDTLGEGESLDALDIAIDCYGPPRPDFLSAADGEVVEETLTSELLKSNCPVTGQPDWASLHLRYRGGRIDREGLLRYLISFREHAGFHEQCVERIFHDLMTHCRPQSLQVEARYTRRGGLDINPWRATADVAEPLSFLRDLRQ

SEQ ID NO: 50797 - protein, 272 aa, Xanthomonas sacchari
  misc_feature (1)..(272): tr|A0A5D1AAF9|A0A5D1AAF9_9XANT NADPH-dependent 7-cyano- 7-deazaguanine reductase OS=Xanthomonas sacchari OX=564 58 GN=queF PE=3 SV=1
MNTPQDSSLGREVAYPSQYDPALLFPIPRAAARTEIGLDPAALPFFGVDRWHAYELSWLDAQGKPCVATATLHVPCASPNLIESKSLKLYLNSLNAMRFNSAEALRSCIVTDLSARAGADVAMEFGLPPMDTLGEGESLDALDIAIDCYGPPRPDFLSAADGDVVEETLTSELLKSNCPVTGQPDWASLHLRYRGGRIDREGLLRYLISFREHAGFHEQCVERIFHDLMTRCRPQSLQVEARYTRRGGLDINPWRATADVAEPLSFLRDLRQ

SEQ ID NO: 50798 - protein, 271 aa, Xanthomonas sp.
  misc_feature (1)..(271): tr|A0A0Q5J2M7|A0A0Q5J2M7_9XANT NADPH-dependent 7-cyano- 7-deazaguanine reductase OS=Xanthomonas sp. Leaf148 OX= 1736275 GN=queF PE=3 SV=1
MNTPEDSTLGREVAYPSGYDPSLLFPIPRAAGREAIGLTGALPFIGRDRWHAYELSWLDAQGKPCVATATLHVPFDSPSLIESKSLKLYLNSLNATRFNSAEAVRTRIVTDLSTRAGADVSVEFGLPPIDAVGEGESIDTLDVSIDDYGPPNAAYLRAQTAAAVEEMLTSALLKSNCPVTGQPDWASVTLRYRGAPIDREGLLRYLVSFRDHAEFHEQCVERIFNDVLTRCAPEWLVVEARYTRRGGLDINPLRSSPSVPTPLSIFRDLRQ

SEQ ID NO: 50799 - protein, 272 aa, Xanthomonas sp.
  misc_feature (1)..(272): tr|A0A0J6FZ58|A0A0J6FZ58_9XANT NADPH-dependent 7-cyano- 7-deazaguanine reductase OS=Xanthomonas sp. NCPPB 1128 OX=1775876 GN=queF PE=3 SV=1
MNTPQDSSLGREVAYPSQYDPALLFPIPRAAARTEIGLDPAALPFFGLDRWHAYELSWLDAQGKPCVATATLQVPCASPNLIESKSLKLYLNSLNAMRFNSAEALRSCIVTDLSARAGADVAMEFGLPPMDTVGEGESLDALDIAIDCYGPPRPEFLSAADGDVVEETLTSALLKSNCPVTGQPDWASLHLRYRGGRIDREGLLRYLISFREHAGFHEQCVERIFHDLMTRCRPQSLQVEARYTRRGGLDINPWRATADVAEPLSFLRDVRQ

SEQ ID NO: 50800 - protein, 272 aa, Xanthomonas theicola
  misc_feature (1)..(272): tr|A0A2S6ZD32|A0A2S6ZD32_9XANT NADPH-dependent 7-cyano- 7-deazaguanine reductase OS=Xanthomonas theicola OX=564 64 GN=queF PE=3 SV=1
MNTPQDSSLGREVAYPSHYDPALLFPIPRAGGRAEIGLDAAPLPFYGLDRWHAYELGWLDARGKPCIATATLLVPCSSPQLIESKSLKLYLNSLNAMRFNSAEALRTCIVTDLSARTGADATMEFGLPPVDPLGEGDSLDALDIAIDCYGPPRAQFLLAAAEDIVEETLRSELLKSNCPVTGQPDWATLYLRYRGGRIDREGLLRYLVSFREHAGFHEQCVERIFHDLMTRCRPQSLQVEARYTRRGGLDINPWRATPDVAGPIAFHRDPRQ

SEQ ID NO: 50801 - protein, 272 aa, Xanthomonas translucens
  misc_feature (1)..(272): tr|A0A1M4IRW0|A0A1M4IRW0_XANCT NADPH-dependent 7-cyano- 7-deazaguanine reductase OS=Xanthomonas translucens pv. graminis OX=134874 GN=queF PE=3 SV=1
MNTPQDSSLGREVAYPAQYDPALLFPIPRAGGRAEIGLETAPLPFFGLDRWHAYELGWLDAQGKPCVATATLQVPCTSPQLIESKSLKLYLNSLNAMRFNSAEAVRACIVTDLSARAGADVRMEFGLPPVDPLGEGDSLDVLDIAIDCYGPPRPQFLLAAADDIVEETLSSALLKSNCPVTGQPDWATLCVCYRGGRIDREGLLRYLISFREHAGFHEQCVEQIFHDLLIRCRPQSLQVEARYTRRGGLDINPWRATPDVAEPIAFHRDPRQ

SEQ ID NO: 50802 - protein, 272 aa, Xanthomonas translucens
  misc_feature (1)..(272): tr|A0A514EHL8|A0A514EHL8_XANCT NADPH-dependent 7-cyano- 7-deazaguanine reductase OS=Xanthomonas translucens pv. cerealis OX=152263 GN=queF PE=3 SV=1
MNTPQDSSLGREVAYPSQYDPALLFPIPRAGGRAEIGLDAAPLPFFGLDRWHAYELGWLDAQGKPCVATATLQVPCTSPQLIESKSLKLYLNSLNAMRFNSAEAVRACIVSDLSARAGADVTMEFGLPPVDPLGEGDSLDVLDIAIDCYGPPRPQFLFAAADDIVEETLSSALLKSNCPVTGQPDWATLCVRYRGGRIDREGLLRYLISFREHAGFHEQCLEQIFHDLLIRCRPQSLQVEARYTRRGGLDINPWRATPDMAEPIAFHRDPRQ

SEQ ID NO: 50803 - protein, 271 aa, Xanthomonas vasicola
  misc_feature (1)..(271): tr|A0A2P5ZND1|A0A2P5ZND1_XANVA NADPH-dependent 7-cyano- 7-deazaguanine reductase OS=Xanthomonas vasicola OX=564 59 GN=queF PE=3 SV=1
MNTPEDSTLGREVAYPSGYDPSLLFPIPRAAGREAIGLSGDLPFIGRDRWHAYELSWLDAQGKPCVATATLHVPCDSPALIESKSLKLYLNSLNATRFNSAEAVRTRIATDLSTRAGADVAVEFGLPPIDAVGEGESIDALDVSIDDYGPPNAAYLAAHAQPVVEEVLTSALLKSNCPVTGQPDWASVTLRYRGTPIDREGLLRYLVSFRDHAEFHEQCVERIFNDVLTQCAPEWLVVEARYTRRGGLDINPLRSSPSVPTPLSFFRDLRQ

SEQ ID NO: 50804 - protein, 271 aa, Xanthomonas vesicatoria
  misc_feature (1)..(271): tr|F0B7H9|F0B7H9_9XANT NADPH-dependent 7-cyano-7-deazag uanine reductase OS=Xanthomonas vesicatoria ATCC 35937 OX=925775 GN=queF PE=3 SV=1
MNTPEDSALGREVAYPSGYDPSLLFPIPRAAGREAIGLTGALPFIGRDRWHAYELSWLDAQGKPCVATATLHVPCDSPSLIESKSLKLYLNSLNATRFNSAEAVRTRIATDLSTRAGADVSVEFGLPPIDTVGEGESIDTLDITIDDYGPPNAAYLRAQAGSAVEEVLTSALLKSNCPVTGQPDWASVTLRYRGTRIDREGLLRYLVSFRDHAEFHEQCVERIFNDVLTRCAPEWLVVEARYTRRGGLDINPLRSSPSVPMPLSIFRDLRQ

SEQ ID NO: 50805 - protein, 271 aa, Xanthomonas vesicatoria
  misc_feature (1)..(271): tr|A0A1L5QSM3|A0A1L5QSM3_9XANT NADPH-dependent 7-cyano- 7-deazaguanine reductase OS=Xanthomonas vesicatoria OX= 56460 GN=queF PE=3 SV=1
MNTPEDSALGREVAYPSGYDPSLLFPIPRAAGREAIGLTGSLPFIGRDRWHAYELSWLDAQGKPCVATATLHVPCDSPSLIESKSLKLYLNSLNATRFNSAEAVRTRIATDLSTRAGADVSVEFGLPPIDTVGEGESIDTLDITIDDYGPPNAAYLRAQAGSAVEEVLTSALLKSNCPVTGQPDWASVTLRYRGTRIDREGLLRYLVSFRDHAEFHEQCVERIFNDVLTRCAPEWLVVEARYTRRGGLDINPLRSSPSVPMPLSIFRDLRQ

SEQ ID NO: 50806 - protein, 136 aa, Xenococcus sp.
  misc_feature (1)..(136): tr|L8M241|L8M241_9CYAN NADPH-dependent 7-cyano-7-deazag uanine reductase OS=Xenococcus sp. PCC 7305 OX=102125 G N=queF PE=3 SV=1
MSNATENDITKEVKYGERAIAEGELITFPNPRMGRRYKVDISLPEFTCKCPFSGYPDFATIKVTYYPDEKVVELKALKLYINSYRDRYISHEEVINQILDDFVAACDPLEANIVGDFSPRGNVHTVVEVSHVKTGN

SEQ ID NO: 50807 - protein, 277 aa, Xenophilus sp.
  misc_feature (1)..(277): tr|A0A254VLA6|A0A254VLA6_9BURK NADPH-dependent 7-cyano- 7-deazaguanine reductase OS=Xenophilus sp. AP218F OX=20 14876 GN=queF PE=3 SV=1
MNHLTPEHSPLGKTVSYQDQYDPSLLFPIARQTKRQEIGVDEAALPFSGVDIWTGFELSWLNGRGKPQVGIATFRIPATSPRLIESKSFKLYLNSYNQTRMESPDALAAQLARDLSAAAGAEVAVSILLPPAFAAERVRELDGEYIDDLDIEVDRYAPCPDILRADPAAIVSETLCSNLLKSNCLVTGQPDWGSVSIRYTGPKMDREALLRYLIGFRQHNEFHEQCVERIFVDLLRACAPAQLTVYARYTRRGGLDINPWRSNFETPPQDNVRAARQ

SEQ ID NO: 50808 - protein, 281 aa, Xenorhabdus beddingii
  misc_feature (1)..(281): tr|A0A1Y2SLV3|A0A1Y2SLV3_9GAMM NADPH-dependent 7-cyano- 7-deazaguanine reductase OS=Xenorhabdus beddingii OX=40 578 GN=queF PE=3 SV=1
MPLYQDSQALSQLTLGKPTPYRDHYDPTLLQAVPRSMNREPLGLYPENLPFHGADIWTLYELSWLNARGVPQVAIGHVSLDAASENLIESKSFKLYLNSFNQTRFADWETVQKTLQKDLSACAKGDIEVVLQPLHDFSQQPIAEFDGKCIDNQDIEIDDYQFNRDYLNHAATGPVIEETLVSHLLKSNCLITHQPDWGSVMIRYKGPGIDQEKLLRYLVSFRHHNEFHEQCVERIFNDLMTLCAPEKLSVYARYTRRGGLDINPWRSNEPFVPTIGRLARQ

SEQ ID NO: 50809 - protein, 278 aa, Xenorhabdus beddingii
  misc_feature (1)..(278): tr|A0A1Y2SP83|A0A1Y2SP83_9GAMM NADPH-dependent 7-cyano- 7-deazaguanine reductase OS=Xenorhabdus beddingii OX=40 578 GN=queF PE=3 SV=1
MDIKESLTLLGTKTDYIQSYSPELLETLPRSLGRNDIGINSDSLPFQGFDLWTAWEISWLNGKGKPVVAIGEFIIPATSPGLIESKSFKLYLNSFNQTKFETTDDVAHAMKKDLSLIAGQSVDVKLYSHLDGYCHEISQLSGQLLDDLDIEIESYDFDATVLADAASVRNNIVCETLHSNLLKSNCLVTNQPDWGSVIIQYEGAKIDHEKLLRYLISFRTHNEFHEQCVERIYSDIMRYCQPEKLTVFARYTRRGGLDINPFRSNCENTPLTGRLIRQ

SEQ ID NO: 50810 - protein, 281 aa, Xenorhabdus bovienii
  misc_feature (1)..(281): tr|A0A077NVT1|A0A077NVT1_XENBV NADPH-dependent 7-cyano- 7-deazaguanine reductase OS=Xenorhabdus bovienii str. o regonense OX=1398202 GN=queF PE=3 SV=1
MSLYQDNQTLAQLTLGKPTPYRDHYDPTLLQAVPRSMNREPLGLLPDNLPFHGADIWTLYELSWLNSRGVPQVAIGHVSLSAASVNLIESKSFKLYLNSFNQTRFADWDTVQKTLQQDLSVCANGEVNVVLHPLHDFSQQPIAEFEGKCIDNQDIEIDDYQFSRDYLNGAATGSVVDEILVSHLLKSNCLITHQPDWGSVQIRYKGPKIDQEKLLRYLVSFRHHNEFHEQCVERIFNDLIALCAPEKLTVYARYTRRGGLDINPWRSNETFIPETGRLARQ

SEQ ID NO: 50811 - protein, 281 aa, Xenorhabdus bovienii
  misc_feature (1)..(281): tr|A0A077PRQ6|A0A077PRQ6_XENBV NADPH-dependent 7-cyano- 7-deazaguanine reductase OS=Xenorhabdus bovienii str. k raussei Becker Underwood OX=1398204 GN=queF PE=3 SV=1
MSLYQDNQALAQLTLGKPTPYCDHYDPTLLQAVPRSMNREPLGLFPDNLPFHGADIWTMYELSWLNSRGVPQVAIGHVSLSAASVNLVESKSFKLYLNSFNQTRFADWDTVQKTLQQDLSVCANGDVHVVLHPLHDFSQQPIAEFEGKCIDNQDIEIDDYQFSRDYLNDAAAGSVVDEILVSHLLKSNCLITHQPDWGSVQIRYKGPKIDQEKLLRYLVSFRHHNEFHEQCVERIFNDLIALCAPEKLTVYARYTRRGGLDINPWRSNEAFIPETGRLARQ

SEQ ID NO: 50812 - protein, 281 aa, Xenorhabdus budapestensis
  misc_feature (1)..(281): tr|A0A2D0J3K1|A0A2D0J3K1_XENBU NADPH-dependent 7-cyano- 7-deazaguanine reductase OS=Xenorhabdus budapestensis O X=290110 GN=queF PE=3 SV=1
MSLYQNNQTLTELTLGKPTSYCDTYGPSLLQAVPRSMNREPLGLSPDNLPFHGADIWTMYELSWLNSRGVPQVAIGHVSLNATSENLIESKSFKLYLNSFNQTRFTDWETVQKTLQQDLSACAKGDIEVVLYPLHDVNQQPITDFEGKCIDNQDIEINDYEFNRDYLNNAATGPVVEEILVSHLLKSNCLITNQPDWGSVQIRYKGPKIDQEKLLRYLVSFRHHNEFHEQCVERIFNDLIELCGPEKLTVYARYTRRGGLDINPWRSNDTFVPTTGRLARQ

SEQ ID NO: 50813 - protein, 281 aa, Xenorhabdus cabanillasii
  misc_feature (1)..(281): tr|A0A3D9UCQ2|A0A3D9UCQ2_9GAMM NADPH-dependent 7-cyano- 7-deazaguanine reductase OS=Xenorhabdus cabanillasii OX =351673 GN=queF PE=3 SV=1
MSLYQNNQALTELTLGKPTSYCDTYEPSLLQAVPRSMNREPLGLFPDNLPFHGADIWTMYELSWLNSRGVPQVAIGHVSLNAASENLIESKSFKLYLNSFNQTRFTDWETVQKTLQQDLSACAKGDIEVVLHPLHGFNQQPITDFEGKCIDNQDIEIDDYEFNRDYLNNAATGPVVEEILVSHLLKSNCLITNQPDWGSVQIRYKGPKIDQEKLLRYLVSFRHHNEFHEQCVERIFNDLIELCGPEKLTVYARYTRRGGLDINPWRSNDTFVPTTGRLARQ

SEQ ID NO: 50814 - protein, 281 aa, Xenorhabdus cabanillasii
  misc_feature (1)..(281): tr|W1IKS4|W1IKS4_9GAMM NADPH-dependent 7-cyano-7-deazag uanine reductase OS=Xenorhabdus cabanillasii JM26 OX=14 27517 GN=queF PE=3 SV=1
MSLYQNNQALTELTLGKPTSYCDTYEPSLLQAVPRSMNREPLGLFPDNLPFHGADIWTMYELSWLNSRGIPQVAIGHVSLNAASENLIESKSFKLYLNSFNQTRFTDWETVQKTLQQDLSACAKGDIEVVLHPLHGFNQQPITDFEGKCIDNQDIEIDDYEFNRDYLNNAATGPVVEEILVSHLLKSNCLITNQPDWGSVQIRYKGPKIDQEKLLRYLVSFRHHNEFHEQCVERIFNDLIELCGPEKLTVYARYTRRGGLDINPWRSNDTFVPTTGRLARQ

SEQ ID NO: 50815 - protein, 281 aa, Xenorhabdus doucetiae
  misc_feature (1)..(281): tr|A0A068QYU5|A0A068QYU5_9GAMM NADPH-dependent 7-cyano- 7-deazaguanine reductase OS=Xenorhabdus doucetiae OX=35 1671 GN=queF PE=3 SV=1
MSLYQDNQALAQLTLGKPTPYRDNYDPTLLQAVPRSLNREPLGLYPDNLPFHGADIWTMYELSWLNARGVPQVAIGHVSLDAASTNLIESKSFKLYLNSFNQTRFADWETVQKTLQHDLSVCANGKIEVVLHPLHAFSQQPIAEFAGECIDNQDIDIDDYQFNRDYLNQAAIGPVVEETLVSHLLKSNCLITHQPDWGSVMIRYKGAKIDQEKLLRYLVSFRHHNEFHEQCVERIFNDLMALCAPETLTVYARYTRRGGLDINPWRSNEAFVPTTGRLARQ

SEQ ID NO: 50816 - protein, 281 aa, Xenorhabdus eapokensis
  misc_feature (1)..(281): tr|A0A1Q5TPI2|A0A1Q5TPI2_9GAMM NADPH-dependent 7-cyano- 7-deazaguanine reductase OS=Xenorhabdus eapokensis OX=1 873482 GN=queF PE=3 SV=1
MSLYQDNHALSQLTLGKPTPYRDNYDPTLLQAVPRSMNREPLGLFPDSLPFHGADIWTMYELSWLNARGVPQVAIGHVSLDATSENLIESKSFKLYLNSFNQTRFADWETVQKTLQQDLSACANGNIEVALHPLHDFSQQPIGEFAGKCIDNQDIDIDDYQFKRDYLNNAATGPVVEETLVSHLLKSNCLITNQPDWGSVMIRYQGAKIDQEKLLRYLVSFRHHNEFHEQCVERIFNDVMTLCAPEKLTVYARYTRRGGLDINPWRSNEAFIPTTGRLARQ

SEQ ID NO: 50817 - protein, 281 aa, Xenorhabdus ehlersii
  misc_feature (1)..(281): tr|A0A2D0ILS4|A0A2D0ILS4_9GAMM NADPH-dependent 7-cyano- 7-deazaguanine reductase OS=Xenorhabdus ehlersii OX=290 111 GN=queF PE=3 SV=1
MSLYQDNHALSQLTLGKPTPYRDNYDPTLLQAVPRSMNREPLGLFPDNLPFHGADIWTMYELSWLNARGVPQVAIGHVSLDAASENLIESKSFKLYLNSFNQTRFADWETVQKTLQQDLSACANGNIEVVLHPLHDFSQQPIGEFAGKCIDNQDIDIDDYQFNRDYLNNAATGPVVEETLISHLLKSNCLITNQPDWGSVMIRYQGSKIDQEKLLRYLVSFRHHNEFHEQCVERIFNDLMTLCAPEKLTVYARYTRRGGLDINPWRSNEAFIPTTGRLARQ

SEQ ID NO: 50818 - protein, 281 aa, Xenorhabdus hominickii
  misc_feature (1)..(281): tr|A0A2G0QGG5|A0A2G0QGG5_9GAMM NADPH-dependent 7-cyano- 7-deazaguanine reductase OS=Xenorhabdus hominickii OX=3 51679 GN=queF PE=3 SV=1
MSLYQNDQSLAQLTLGKPTPYSDNYDPTLLQAVPRSMNREPLGLFPDNLPFHGADIWTLYELSWLNSRGVPQVAIGHVSLSAASENLIESKSFKLYLNSFNQTRFADWETVQKTLQQDLSACANGDIDVVLYPLHDFNYQSIAKFEGECIDNQDIEIDDYQFNRDYLNNAATGPIVEEALVSHLLKSNCLITNQPDWGTVQIRYKGPKIDQEKLLRYLVSFRHHNEFHEQCVERIFNDIMVLCAPENLTVYARYTRRGGLDINPWRSNEAFIPPTGRLARQ

SEQ ID NO: 50819 - protein, 281 aa, Xenorhabdus innexi
  misc_feature (1)..(281): tr|A0A1N6MT76|A0A1N6MT76_9GAMM NADPH-dependent 7-cyano- 7-deazaguanine reductase OS=Xenorhabdus innexi OX=29010 9 GN=queF PE=3 SV=1
MSLYQDNQALSQLTLGKPTSYCDTYEPALLQAVPRSMNREPLGLYPDNLPFYGADIWTMYELSWLNSRGVPQVAIGHVSLNAASQNLIESKSFKLYLNSFNQTRFADWETVQQTLQRDLSACANGDIEVVLYPLHDFNQQPIADFEGKCIDNQDIEIDDYQFSRDYLNEAATGPVVDEVLVSHLLKSNCLITNQPDWGSVQIRYKGPKIDQEKLLRYLVSFRHHNEFHEQCVERIFNDLMQLCAPEKLTVYARYTRRGGLDINPWRSNDSFVPPTGRLARQ

SEQ ID NO: 50820 - protein, 278 aa, Xenorhabdus innexi
  misc_feature (1)..(278): tr|A0A1N6N0R5|A0A1N6N0R5_9GAMM NADPH-dependent 7-cyano- 7-deazaguanine reductase OS=Xenorhabdus innexi OX=29010 9 GN=queF PE=3 SV=1
MDIKKSITHLGTKTDYIQNYSPALLETLPRSLAREVINIRCEALPFQGFDLWTAWELSWLNSKGKPVVAIGEFTIPATSPGLIESKSFKLYLNSFNQTQFETTDEVIKAMETDLSRTAGQPVAVKLYPHLNGYTHEISQLAGQSLDDLDIEIDGYDFDAAILANAVTTETDKVSETVYSNLLKSNCLVTNQPDWGSVVIRYEGAKINHEKLLRYLISFRTHNEFHEQCVERIYNDIMQYCRPKKLTVFARYTRRGGLDINPFRSNYESAPLTGRLIRQ

SEQ ID NO: 50821 - protein, 281 aa, Xenorhabdus ishibashii
  misc_feature (1)..(281): tr|A0A2D0KES6|A0A2D0KES6_9GAMM NADPH-dependent 7-cyano- 7-deazaguanine reductase OS=Xenorhabdus ishibashii OX=1 034471 GN=queF PE=3 SV=1
MSLYQDNHALSQLTLGKSTPYRDNYDPTLLQAVPRSMNREPLGLFPDNLPFHGADIWTMYELSWLNARGVPQVAIGHVSLDAASENLIESKSFKLYLNSFNQTRFADWETVQKTLQHDLSACANGNIEVVLHPLHDFSQQPIAEFAGKCIDNQDIEISDYQFNRDYLNNAATGPVVEETLVSHLLKSNCLITHQPDWGSVMIRYQGSKIDQEKLLRYLVSFRHHNEFHEQCVERIFNDLMTLCAPEKLTVYARYTRRGGLDINPWRSNEVFIPTTGRLARQ

SEQ ID NO: 50822 - protein, 281 aa, Xenorhabdus japonica
  misc_feature (1)..(281): tr|A0A1I4Z5W3|A0A1I4Z5W3_9GAMM NADPH-dependent 7-cyano- 7-deazaguanine reductase OS=Xenorhabdus japonica OX=533 41 GN=queF PE=3 SV=1
MSLYQDNQALSQLTLGKPTPYRDNYDPTLLQAVPRNMNREPLELFPDNLPFHGADIWTMYELSWLNARGVPQVAIGHVSLDAASENLIESKSFKLYLNSFNQTRFADWETVQKNLQQDLSACANGNIEVVLHPLHDFNQQPIAEFEGKCIDNQDIEIDDYQFSRDYLNNAAIGPVVEETLISHLLKSNCLITHQPDWGSVMIRYKGAKIDQEKLLRYLVSFRHHNEFHEQCVERIFNDLMTLCAPEKLTVYARYTRRGGLDINPWRSNEAFVPTTGRLSRQ

SEQ ID NO: 50823 - protein, 86 aa, Xenorhabdus japonica
  misc_feature (1)..(86): tr|A0A1I5DLW1|A0A1I5DLW1_9GAMM 7-cyano-7-deazaguanine r eductase OS=Xenorhabdus japonica OX=53341 GN=SAMN054215 79_1431 PE=4 SV=1
MDIKKSITHLGTKTDYIQSYSPELLETLPRSLARDIINISSDSLPFQGFDLWTAWELSWLNSKGKPVVAIGEFTIPATSLGQTGLN

SEQ ID NO: 50824 - protein, 86 aa, Xenorhabdus khoisanae
  misc_feature (1)..(86): tr|A0A0J5FME4|A0A0J5FME4_9GAMM QueF_N domain-containing protein OS=Xenorhabdus khoisanae OX=880157 GN=AB204_19 870 PE=4 SV=1
MKIPLIQSKSFKLYLNSFNQTRVADWETVQKTLQQDLSACANGDIEIVLHHLHEFNQQPIAEFAGKCIDNQDIEKAHKGIVLFFSR

SEQ ID NO: 50825 - protein, 278 aa, Xenorhabdus khoisanae
  misc_feature (1)..(278): tr|A0A0J5FVE3|A0A0J5FVE3_9GAMM NADPH-dependent 7-cyano- 7-deazaguanine reductase OS=Xenorhabdus khoisanae OX=88 0157 GN=queF PE=3 SV=1
MDIKKSITHLGTKTDYIQHYSPELLETLPRSLARDIINISSDSLPFQGFDLWTAWELSWLNNKGKPVVAIGEFTIPATSPGLIESKSFKLYLNSFNQTKFETADDVIRAMKKDLSQTAGQPVEVKLYPHLEGYGYEINPLSGQSLDDLDIEIDGYDFDATVLADAASTETDTVSETVHSNLLKSNCLVTNQPDWGSVVIRYEGAKINHEKLLRYLISFRTHNEFHEQCVERIYNDIMHYCRPEKLTVFARYTRRGGLDINPFRSNYESAPLTGRLIRQ

SEQ ID NO: 50826 - protein, 281 aa, Xenorhabdus koppenhoeferi
  misc_feature (1)..(281): tr|A0A1I7FTG7|A0A1I7FTG7_9GAMM NADPH-dependent 7-cyano- 7-deazaguanine reductase OS=Xenorhabdus koppenhoeferi O X=351659 GN=queF PE=3 SV=1
MSLYQDNEALSQLTLGKPTPYKDSYDSTILQAVPRSLNREPLGLYPDNLPFHGADIWTMYELSWLNARGVPQVAVGHVSLNSASENLIESKSFKLYLNSFNQTRFSDWETVQKTLQQDLSACANGDIEVVLYPLHHFSQQPIADFAGECIDNQDIEIDDYQFSRDYLNNAATGSIVEETLVSHLLKSNCLITHQPDWGSVMIRYKGPQIDQEKLLRYLVSFRHHNEFHEQCVERIFNDLMALCVPEKLTVYARYTRRGGLDINPWRSNEEFIPATGRLARQ

SEQ ID NO: 50827 - protein, 281 aa, Xenorhabdus kozodoii
  misc_feature (1)..(281): tr|A0A2D0LCS4|A0A2D0LCS4_9GAMM NADPH-dependent 7-cyano- 7-deazaguanine reductase OS=Xenorhabdus kozodoii OX=351 676 GN=queF PE=3 SV=1
MSLYQDNHALSQLTLGKPTPYRDNYDPTLLQAVPRSMNREPLGLLPDNLPFYGADIWTMYELSWLNARGVPQVAIGHVSLDAASENLIESKSFKLYLNSFNQTRFADWETVQKTLQHDLSACANGKIEVALHPLHTFSQQPIAEFAGKCIDNQDIEIDDYQFSRDYLNHAATGPIVEETLVSHLLKSNCLITHQPDWGSVMIHYQGAKIDQEKLLRYLVSFRHHNEFHEQCVERIFNDLMTLCAPEKLTVYARYTRRGGLDINPWRSNEAFVPATGRLARQ

SEQ ID NO: 50828 - protein, 281 aa, Xenorhabdus mauleonii
  misc_feature (1)..(281): tr|A0A1I3VWJ7|A0A1I3VWJ7_9GAMM NADPH-dependent 7-cyano- 7-deazaguanine reductase OS=Xenorhabdus mauleonii OX=35 1675 GN=queF PE=3 SV=1
MSLYQDNQSLAQLTLGKPTSYCDNYNPTLLQAVPRSMNREPLELFPENLPFHGADIWTMYELSWLNARGVPQVAIGHVSLSADSENLIESKSFKLYLNSFNQTRFADWETVQKTLQQDLSACANGDIEVVLHPLHSFNQQPIAEFAGECIDNQDIEINEYQFNRDYLNNAAIGPVVEETLVSHLLKSNCLITHQPDWGSVMIRYKGAKIDQEKLLRYLVSFRHHNEFHEQCVERIFNDLMMLCAPEKLTVYARYTRRGGLDINPWRSNEEFTPATGRLARQ

SEQ ID NO: 50829 - protein, 278 aa, Xenorhabdus mauleonii
  misc_feature (1)..(278): tr|A0A1I3WYT1|A0A1I3WYT1_9GAMM NADPH-dependent 7-cyano- 7-deazaguanine reductase OS=Xenorhabdus mauleonii OX=35 1675 GN=queF PE=3 SV=1
MDIQKSITHLGKKTDYIQSYSPELLETIPRSLARDVINISSDSLPFQGFDIWTAWELSWLNSKGKPIVAIGEFTIPATSPGLIESKSFKLYLNSFNQTKFETTDDVIKAMQKDLSQIAGEPVEVKLYPHLDGYGHEISQFSGQSLDELDIEINGYDFDATILADSVSTEANIVSETVYSNLLKSNCLVTNQPDWGSVVIRYEGAKINHEKLLRYLISFRTHNEFHEQCVERIYNDVMHYCRPEKLTVFARYTRRGGLDINPFRSNYENAPQTGRLIRQ

SEQ ID NO: 50830 - protein, 281 aa, Xenorhabdus miraniensis
  misc_feature (1)..(281): tr|A0A2D0JRS5|A0A2D0JRS5_9GAMM NADPH-dependent 7-cyano- 7-deazaguanine reductase OS=Xenorhabdus miraniensis OX= 351674 GN=queF_1 PE=3 SV=1
MSLYQDNQALAQLTLGKPTPYRDNYDPTLLQAVPRSMNREPLGLFPESIPFHGADIWTMYELSWLNARGVPQVAIGHVSLDATSENLIESKSFKLYLNSFNQTRFADWETVQKTLQQDLSACANGNIDVVLHPLHNFSQQPIAEFTGKCIDNQDIEIDDYQFSRDYLNNAAIGPIVEETLVSHLLKSNCLITNQPDWGSVMIHYKGARIDQEKLLRYLVSFRHHNEFHEQCVERIFNDLMTLCVPEKLTVYARYTRRGGLDINPWRSNEEFTPAIGRLARQ

SEQ ID NO: 50831 - protein, 278 aa, Xenorhabdus miraniensis
  misc_feature (1)..(278): tr|A0A2D0JKQ9|A0A2D0JKQ9_9GAMM NADPH-dependent 7-cyano- 7-deazaguanine reductase OS=Xenorhabdus miraniensis OX= 351674 GN=queF PE=3 SV=1
MDIKKSITHLGTKTDYIQSYSPELLETLPRSLARDIINISSDSLPFQGFDLWTAWELSWLNSKGKPVVAIGEFTIPATSPGLIESKSFKLYLNSFNQTQFETTDDVIQAMKKDLSQTAGQPVEVKLYPHLEGYGHEISPLSGQSLDDLDIEIDGYDFDAMILADSVSAEAGIVSETLNSNLLKSNCLVTNQPDWGSVVIRYEGAKINHEKLLRYLISFRTHNEFHEQCVERIYNDIMHYCRPEKLTVFARYTRRGGLDINPFRSNYESAPLTGRLIRQ

SEQ ID NO: 50832 - protein, 281 aa, Xenorhabdus nematophila
  misc_feature (1)..(281): tr|N1NNT9|N1NNT9_XENNE NADPH-dependent 7-cyano-7-deazag uanine reductase OS=Xenorhabdus nematophila F1 OX=13061 62 GN=queF PE=3 SV=1
MSLYKDSEALAQLTLGKSTPYKDSYDPTLLQAVPRSLNREPLDLYPDNLPFHGADIWTMYELSWLNARGVPQVAVGHVSLNAASENLIESKSFKLYLNSFNQTRLNDWETVQKTLQQDLSACANGDIDVVLYPLHHFSQQPIDDFAGECIDNQDIEIDDYQFSRDYLNHAATGPIVEETLVSHLLKSNCLITNQPDWGSVMIRYKGTKIDQEKLLRYLVSFRHHNEFHEQCVERIFNDLITLCAPEKLTVYARYTRRGGLDINPWRSNEEFIPATGRLARQ

SEQ ID NO: 50833 - protein, 281 aa, Xenorhabdus nematophila
  misc_feature (1)..(281): tr|A0A0A8NNL5|A0A0A8NNL5_XENNE NADPH-dependent 7-cyano- 7-deazaguanine reductase OS=Xenorhabdus nematophila str . Websteri OX=1437826 GN=queF PE=3 SV=1
MSLYKDSEALAQLTLGKSTLYKDSYDPTLLQAVPRSLNREPLDLYPDNLPFHGADIWTMYELSWLNARGVPQVAVGHVSLNAASENLIESKSFKLYLNSFNQTRLNDWETVQKTLQQDLSACANGDIDVVLYPLHHFSQQPIDDFAGECIDNQDIEIDDYQFSRDYLNHAATGPIVEETLVSHLLKSNCLITNQPDWGSVMIRYKGAKIDQEKLLRYLVSFRHHNEFHEQCVERIFNDLITLCAPEKLTVYARYTRRGGLDINPWRSNEEFIPATGRLARQ

SEQ ID NO: 50834 - protein, 281 aa, Xenorhabdus poinarii
  misc_feature (1)..(281): tr|A0A068R544|A0A068R544_9GAMM NADPH-dependent 7-cyano- 7-deazaguanine reductase OS=Xenorhabdus poinarii G6 OX= 1354304 GN=queF PE=3 SV=1
MSLYQDNQALSQLTLGKPTPYRDNYDPTLLQAVPRSMNREPLGLFPHNLPFHGADIWTLYELSWLNARGVPQVAIGHVSLDSASENLIESKSFKLYLNSFNQTRFADWETVQKTLQHDLSACANGNIEVVLYPLHDFSQQPIAEFTGKCIDHQDIDIDDYQFSRDYLHHAATGAVVEETLVSHLLKSNCLITHQPDWGSVMIRYKGAKIDQEKLLRYLVSFRHHNEFHEQCVERIFNDLMTLCAPETLTVYARYTRRGGLDINPWRSNEAFTPATGRLARQ

SEQ ID NO: 50835 - protein, 281 aa, Xenorhabdus sp.
  misc_feature (1)..(281): tr|A0A2D0L7L7|A0A2D0L7L7_9GAMM NADPH-dependent 7-cyano- 7-deazaguanine reductase OS=Xenorhabdus sp. KJ12.1 OX=1 851571 GN=queF PE=3 SV=1
MSLYQDNQALSQLTLGKPTSYCDTYEPALLQAVPRSMNREPLGLYPDNLPFYGADIWTMYELSWLNSRGVPQVAIGHVSLNAASENLIESKSFKLYLNSFNQTRFADWETVQQTLQRDLSACANGEIDVVLYPLHDFNQQPIADFEGKCIDNQDIEIDDYQFNRDYLNGAATGPVVDEVLVSHLLKSNCLITNQPDWGSVQIRYKGPKIDQEKLLRYLVSFRHHNEFHEQCVERIFNDLMQLCAPEKLTVYARYTRRGGLDINPWRSNDSFVPPTGRLARQ

SEQ ID NO: 50836 - protein, 281 aa, Xenorhabdus sp.
  misc_feature (1)..(281): tr|A0A0M0TAB4|A0A0M0TAB4_9GAMM NADPH-dependent 7-cyano- 7-deazaguanine reductase OS=Xenorhabdus sp. GDc328 OX=7 42178 GN=queF PE=3 SV=1
MSLYQDNHALSQLTLGKPTPYRDNYDPTLLQAVPRSMNREPLELFPDNLPFHGADIWTMYELSWLNARGVPQVAIGHVSLDAASENLIESKSFKLYLNSFNQTRFADWETVQKTLQQDLSACANGNIEVVLHPLHTFSQQPIAEFEGKCIDNQDIDIDDYQFSRNYLNQAATGPVVEETLVSHLLKSNCLITHQPDWGSVMIRYQGPKIDQEKLLRYLVSFRHHNEFHEQCVERIFNDVMTLCAPEKLTVYARYTRRGGLDINPWRSNEAFTPATGRLARQ

SEQ ID NO: 50837 - protein, 281 aa, Xenorhabdus stockiae; identical to SEQ ID NO: 50835
  misc_feature (1)..(281): tr|A0A2D0KST8|A0A2D0KST8_9GAMM NADPH-dependent 7-cyano- 7-deazaguanine reductase OS=Xenorhabdus stockiae OX=351 614 GN=queF PE=3 SV=1

SEQ ID NO: 50838 - protein, 281 aa, Xenorhabdus szentirmaii
  misc_feature (1)..(281): tr|W1IWL3|W1IWL3_9GAMM NADPH-dependent 7-cyano-7-deazag uanine reductase OS=Xenorhabdus szentirmaii DSM 16338 O X=1427518 GN=queF PE=3 SV=1
MSLYQDNEALTQLTLGKPTPYKDSYDPTLLQAVPRSLNREPLELYPDNLPFHGADIWTLYELSWLNARGVPQVAIGHVSLDASSENLIESKSFKLYLNSLNQTRFDNWEAVQKTLQKDLAACANGGIEVVLHPLHNFNQQPIAEFAGECIDNQDIDIDDYQFDRNYLNGAATGPLVEETLVSHLLKSNCLITNQPDWGSVMIHYQGAKINQEKLLRYLVSFRHHNEFHEQCVERIFNDLMTLCSPEKLTVYARYTRRGGLDINPWRSNDVFTPATGRLARQ

SEQ ID NO: 50839 - protein, 278 aa, Xenorhabdus thuongxuanensis
  misc_feature (1)..(278): tr|A0A1Q5TK40|A0A1Q5TK40_9GAMM NADPH-dependent 7-cyano- 7-deazaguanine reductase OS=Xenorhabdus thuongxuanensis OX=1873484 GN=queF PE=3 SV=1
MDIKESLTHLGTKTDYIQNYSPELLETLPRSLAREVINISSDALPFQGFDLWTAWELSWLNSKGKPIVAIGEFTIPATSPGLIESKSFKLYLNSFNQTKFGTTEDVIRAMKKDLSQTAGQPVEVKLYPHLEGYDHEINQFSGQSLDDLDIEINGYDFDATILANAVSTETDIVAETLHSNLLKSNCLVTNQPDWGSVVIRYEGAKINHEKLLRYLISFRTHNEFHEQCVERIYNDIMYYCRPEKLTVFARYTRRGGLDINPFRSNYESAPLTGRLIRQ

SEQ ID NO: 50840 - protein, 281 aa, Xenorhabdus thuongxuanensis
  misc_feature (1)..(281): tr|A0A1Q5U0W7|A0A1Q5U0W7_9GAMM NADPH-dependent 7-cyano- 7-deazaguanine reductase OS=Xenorhabdus thuongxuanensis OX=1873484 GN=queF PE=3 SV=1
MSLYQDNHALSQLTLGKPTPYRDHYDPTLLQAVPRSMNREPLGLFPDNLPFHGADIWTMYELSWLNARGVPQVAIGHVSLDAASENLIESKSFKLYLNSFNQTRFADWETVQKTLQQDLSACANGNIEVVLHPLHDFSQQPIGEFAGKCIDNQDIDIDDYQFNRDYLNNAATGPVVEETLVSHLLKSNCLITNQPDWGSVMIRYQGSKIDQEKLLRYLVSFRHHNEFHEQCVERIFNDLMTLCAPEKLTVYARYTRRGGLDINPWRSNEAFIPTTGRLARQ

SEQ ID NO: 50841 - protein, 281 aa, Xenorhabdus vietnamensis
  misc_feature (1)..(281): tr|A0A1Y2SGG1|A0A1Y2SGG1_9GAMM NADPH-dependent 7-cyano- 7-deazaguanine reductase OS=Xenorhabdus vietnamensis OX =351656 GN=queF PE=3 SV=1
MSLYQNNQALSQLTLGKPTPYCDNYDPTLLQAVPRSMNREPLELFPDNLPFHGADIWTMYELSWLNARGVPQVAIGHISLDAASENLIESKSFKLYLNSFNQTRFADWETVQKTLQQDLSACANGNIEVVLHPLHDFSQQPIAEFEGKCIDNQDIEINDYQFSRDYLNNAAIGPVVEETLVSHLLKSNCLITHQPDWGSVMIHYKGPILDQEKLLRYLVSFRHHNEFHEQCVERIFNDLMTLCAPEKLTVYARYTRRGGLDINPWRSNEAFVPATGRLARQ

SEQ ID NO: 50842 - protein, 275 aa, Xylella fastidiosa
  misc_feature (1)..(275): sp|Q9PAW2|QUEF_XYLFA NADPH-dependent 7-cyano-7-deazagua nine reductase OS=Xylella fastidiosa (strain 9a5c) OX=1 60492 GN=queF PE=3 SV=1
MNTSHYSVLGHAVPYPKAYDPSLLFPISRAVGRAQIGIGVVLPFVGEDRWHAYELSWLDARGKPCVATATFHVPCDSPYLIESKSLKLYLNSFSAEVFNRAEALRLRIAADLSACAGAAVAVEFGLPPVGGGDKEISLDRLNVDIEDYGPPNPDYLSNVAQNLIEEMVEETLTSTLFKSNCPVTGQPDWASVTVRYFGVPIDHEGLLRYFISFRHHAEFHEQCVERIFQDVLQRCSPQCLAVEARYTRRGGLDINPLRTTSEMAWPISVFRDPRQ

SEQ ID NO: 50843 - protein, 275 aa, Xylella fastidiosa
  misc_feature (1)..(275): sp|Q87BP7|QUEF_XYLFT NADPH-dependent 7-cyano-7-deazagua nine reductase OS=Xylella fastidiosa (strain Temecula1 / ATCC 700964) OX=183190 GN=queF PE=3 SV=1
MNTSHYSVLGHTVPYPKVYDPSLLFPISRAVGRTQIGIGVVLPFVGEDRWHAYELSWLDARGKPCVATATFHVPCDSPYLIESKSLKLYLNSFSAEVFNRAEALRLRIAADLSACAGAAVAVEFGLPPVGSGDKEISLDRLNVDIEDYGPPNPDYLSNVAQNLVEEMVEETLTSTLFKSNCPVTGQPDWASVTVRYFGMPIDHEGLLRYFISFRHHAEFHEQCVERIFQDVLQRCAPQCLAVEARYTRRGGLDINPLRTTSEMAWPLSVFRDPRQ

SEQ ID NO: 50844 - protein, 271 aa, Xylella taiwanensis
  misc_feature (1)..(271): tr|Z9JM11|Z9JM11_9GAMM NADPH-dependent 7-cyano-7-deazag uanine reductase OS=Xylella taiwanensis OX=1444770 GN=q ueF PE=3 SV=1
MNTPQYSALGHVVPYPRAYDPSLLFPISRAVARTHIGIGVVLPFVGEDRWHAYELSWLDARGKPCVATATLHVPCDSPCLIESKSLKLYLNSFNAETFDSAEVLRMRIATDVSVCAGAAVTVEFGLPPAVMCHTAMSLDGLNVAMDDYGPPNPDYLSMAAQDFVEETLTSALFKSNCPVTGQPDWASVTVRYFGAPLDHEGLLRYLVSFRNHAAFHEQCVERIFQDVLQRCAPQWLAVEARYTRRGGLDINPLRATPDMASPIPVFRDPRQ

SEQ ID NO: 50845 - protein, 281 aa, Xylophilus ampelinus
  misc_feature (1)..(281): tr|A0A318T0Z0|A0A318T0Z0_9BURK NADPH-dependent 7-cyano- 7-deazaguanine reductase OS=Xylophilus ampelinus OX=540 67 GN=queF PE=3 SV=1
MNIPEHSPLGQSSAYADQYDPSLLFPISRAGKRAEIGVDGAPPFFGADLWTAFELSWLNLRGKPQVALAHVTVPCETHNIVESKSFKLYLNSFNNTRLADAEAVRTRLRADIGEAVWRGAGHQSSVGVKLLLPDAFDREPVHELDGLSLDRLDVECARYTPAPELLTVAADEPEVSEVLVSNLLKSNCLVTGQPDWGSVQIRYSGAPIDQAGLLQYLVSFRNHNEFHEQCVERIFMDIWTRCRPHRLSVYARYTRRGGLDINPLRTSHPQALPANVRTARQ

SEQ ID NO: 50846 - protein, 281 aa, Xylophilus sp.
  misc_feature (1)..(281): tr|A0A0Q4FTA5|A0A0Q4FTA5_9BURK NADPH-dependent 7-cyano- 7-deazaguanine reductase OS=Xylophilus sp. Leaf220 OX=1 735686 GN=queF PE=3 SV=1
MNTPEHSPLGQASAYADQYDPSLLFPIPRAGKRAEIGVDGAPPFFGADLWTAFELSWLNLRGKPQVALAHFTVPCETRNIVESKSFKLYLNSFNNTRLADAEAVRARLRADIGEAVWRGAEHASSIGVKLLMPDAFDREPVHELDGLSLDRLDVECTRYTPAPELLTVAAGEPEVSEVLVSNLLKSNCLVTGQPDWGSVQIRYSGAPIDQAGLLQYLVSFRNHNEFHEQCVERIFMDIWNRCKPHRLSVYARYTRRGGLDINPLRTSHPQALPANTRTARQ

SEQ ID NO: 50847 - protein, 154 aa, Yangia pacifica
  misc_feature (1)..(154): tr|A0A2U8HEB3|A0A2U8HEB3_9RHOB NADPH-dependent 7-cyano- 7-deazaguanine reductase OS=Yangia pacifica OX=311180 G N=queF PE=3 SV=1
MTDSIYSNLKQLGGATVLPASPEEAELERVPNPQADVPYNVRFTAPEFTSLCPMTGQPDFAHLVIDYVPGAWLVESKALKLYLGAFRNHGAFHEDCTISIARRLVDFLEPQWLRIGGYWYPRGGIPIDVFYQTGPMPEGVWIPDQGVPPYRGRG

SEQ ID NO: 50848 - protein, 154 aa, Yangia pacifica
  misc_feature (1)..(154): tr|A0A1I6TR34|A0A1I6TR34_9RHOB NADPH-dependent 7-cyano- 7-deazaguanine reductase OS=Yangia pacifica OX=311180 G N=queF PE=3 SV=1
MTDSIYSNLKQLGGATVLPSSPEAAELERVPNPQADVAYNVRFTAPEFTSLCPMTGQPDFAHLVIDYVPGDWLVESKALKLYLGSFRNHGAFHEDCTISIARRLVDFLDPQWLRIGGYWYPRGGIPIDVFYQTGPMPEGVWIPDQGVPPYRGRG

SEQ ID NO: 50849 - protein, 154 aa, Yangia sp.
  misc_feature (1)..(154): tr|A0A1B1PMA1|A0A1B1PMA1_9RHOB NADPH-dependent 7-cyano- 7-deazaguanine reductase OS=Yangia sp. CCB-MM3 OX=17925 08 GN=queF PE=3 SV=1
MTDSIYSNLKQLGGATVLPASPEEAELERVPNPQADVAYNVRFTAPEFTSLCPMTGQPDFAHLVIDYVPGQWLVESKALKLYLGAFRNHGAFHEDCTISIARRLAEFLDPQWLRIGGYWYPRGGIPIDVFYQTGPMPEGVWIPDQGVPPYRGRG

SEQ ID NO: 50850 - protein, 154 aa, Yangia sp.
  misc_feature (1)..(154): tr|A0A2A3JV13|A0A2A3JV13_9RHOB NADPH-dependent 7-cyano- 7-deazaguanine reductase OS=Yangia sp. SAOS 153D OX=177 9329 GN=queF PE=3 SV=1
MTDSIYSNLKQLGGATVLPASPEEAELERVPNPQADVAYNVRFTAPEFTSLCPMTGQPDFAHLVIDYVPGAWLVESKALKLYLGAFRNHGAFHEDCTISIARRLVGFLEPQWLRIGGYWYPRGGIPIDVFYQTGPIPEGVWIPDQGVPPYRGRG

SEQ ID NO: 50851 - protein, 281 aa, Yersinia aldovae
  misc_feature (1)..(281): tr|A0A0T9TSD9|A0A0T9TSD9_YERAL NADPH-dependent 7-cyano- 7-deazaguanine reductase OS=Yersinia aldovae OX=29483 G N=queF PE=3 SV=1
MSSYQDNKALAQLTLGKPTAYRDHYDATLLQAVPRSMNREPLGLYPDNLPFHGADIWTLYELSWLNSNGLPQVAVGEISLNAKSVNLIESKSFKLYLNSFNQTVFADWESVQATLQQDLAVCAQGEVSVRIFPLDDITDQPIANFSGECLDHQDIRIESYEFSADYLQNSTRQHHVEESLVSHLLKSNCLITHQPDWGSVQIRYRGPQINREALLRYLVSFRHHNEFHEQCVERIFNDIMRFCQPETLSVYARYTRRGGLDINPWRSNTDFVPATGRLARQ

SEQ ID NO: 50852 - protein, 281 aa, Yersinia bercovieri
  misc_feature (1)..(281): tr|A0A2G4U407|A0A2G4U407_YERBE NADPH-dependent 7-cyano- 7-deazaguanine reductase OS=Yersinia bercovieri OX=634 GN=queF PE=3 SV=1
MSEYQDHKALAELTLGKPTAYRDHYDVTLLQAVPRSMNREPLGLYPDNLPFHGADIWTLYELSWLNSNGLPQVAVGEISLNANSVNLIESKSFKLYLNSFNQTVFTNWESVQATLQRDLAACAVGDVSVTLYRLDEITDQPIANFAGECLDQQDIRIDSYEFSADYLQGAAGANHVAESLVSHLLKSNCLITHQPDWGSVQISYSGRQINREALLRYLVSFRHHNEFHEQCVERIFNDIMRFCQPETLSVYARYTRRGGLDINPWRSNTHFVPSVGRLARQ

SEQ ID NO: 50853 - protein, 281 aa, Yersinia enterocolitica
  misc_feature (1)..(281): sp|A1JP94|QUEF_YERE8 NADPH-dependent 7-cyano-7-deazagua nine reductase OS=Yersinia enterocolitica serotype O:8 / biotype 1B (strain NCTC 13174 / 8081) OX=393305 GN=qu eF PE=3 SV=1
MSSYQDHKALAELTLGKPTAYCDHYDVTLLQAVPRSMNREPLGLYPDNLPFHGADIWTLYELSWLNSKGLPQVAIGEISLNADSVNLIESKSFKLYLNSFNQTVFTDWESVRTTLQQDLSACAQGEVSITLYRLDEMTHQPIANFSGECLDEQDLYIDSYEFNADYLQGAAGKNRVTESLVSHLLKSNCLITHQPDWGSVQISYSGPQINREALLRYLISFRHHNEFHEQCVERIFNDIMRFCQPETLSVYARYTRRGGLDINPWRSNTDFVPLTGRLARQ

SEQ ID NO: 50854 - protein, 281 aa, Yersinia enterocolitica
  misc_feature (1)..(281): tr|A0A4U9IYQ2|A0A4U9IYQ2_YEREN NADPH-dependent 7-cyano- 7-deazaguanine reductase OS=Yersinia enterocolitica sub sp. enterocolitica OX=150052 GN=queF PE=3 SV=1
MSSYQDHKALAELTLGKPTAYCDHYDVTLLQAVPRSINREPLGLYPDNLPFHGADIWTLYELSWLNSKGLPQVAIGEISLNADSVNLIESKSFKLYLNSFNQTVFTDWESVRTTLQQDLSACAQGEVSITLYRLDEMTHQPIANFSGECLDEQDLYIDSYEFNADYLQGAAGKNRVTESLVSHLLKSNCLITHQPDWGSVQISYSGPQINREALLRYLISFRHHNEFHEQCVERIFNDIMRFCQPETLSVYARYTRRGGLDINPWRSNTDFVPLTGRLARQ

SEQ ID NO: 50855 - protein, 281 aa, Yersinia entomophaga
  misc_feature (1)..(281): tr|A0A3S6EZZ9|A0A3S6EZZ9_YERET NADPH-dependent 7-cyano- 7-deazaguanine reductase OS=Yersinia entomophaga OX=935 293 GN=queF PE=3 SV=1
MSSYQDHQALAELTLGKPTAYRDHYDAALLQAVPRSMNREPLGLYPDNLPFHGADIWTMYELSWLNANGLPQVAVGEISLNADSVNLIESKSFKLYLNSFNQTPFSDWESVRHTLQQDLSICAQGEVSVTLYKLSDIAGQPIADFHGECLDEQDIRIDNYEFSTDYLKDATGQQIVEETLVSHLLKSNCLITHQPDWGSVQIRYRGPQINREALLRYLVSFRHHNEFHEQCVERIFNDLMRFCQPETLSVYARYTRRGGLDINPWRSNTDFTPSNGRLARQ

SEQ ID NO: 50856 - protein, 281 aa, Yersinia frederiksenii
  misc_feature (1)..(281): tr|A0A0T9QUP4|A0A0T9QUP4_YERFR NADPH-dependent 7-cyano- 7-deazaguanine reductase OS=Yersinia frederiksenii OX=2 9484 GN=queF PE=3 SV=1
MSSYQDHKALAELTLGKPTAYRDHYDVTLLQAVPRSMNREPLGLYPDSLPFHGADIWTLYELSWLNSNGLPQVAVGEISLNADSANLIESKSFKLYLNSFNQTLFADWESVRATLQRDLAACAQGDVSVTLYQLHEITHQPIADFLGECLDQQDIRIDSYEFSADYLQGATTANRVEESLVSHLLKSNCLITHQPDWGSVQISYSGPQINREALLRYLVSFRHHNEFHEQCVERIFNDIMRFCQPETLSVYARYTRRGGLDINPWRSNTDFVPSTGRMARQ

SEQ ID NO: 50857 - protein, 281 aa, Yersinia frederiksenii
  misc_feature (1)..(281): tr|A0A0B6FC96|A0A0B6FC96_YERFR NADPH-dependent 7-cyano- 7-deazaguanine reductase OS=Yersinia frederiksenii Y225 OX=1454377 GN=queF PE=3 SV=1
MSSYQDHEALAELTLGKPTAYRDHYDVTLLQAVPRSMNREPLGLYPDNLPFHGADIWTLYELSWLNSKGLPQVAVGEISLNADSVNLIESKSFKLYLNSFNQTTFTDWENVRTTLQQDLSACAQGDVNVRLYRLDEITHQPIANFTGECLDEQDIRIDSYEFSADYLQGAAGKNHVEENLVSHLLKSNCLITHQPDWGSVQISYSGPQINREALLRYLVSFRHHNEFHEQCVERIFNDIMHFCQPETLSVYARYTRRGGLDINPWRSNTDFVPSTGRLARQ

SEQ ID NO: 50858 - protein, 281 aa, Yersinia hibernica
  misc_feature (1)..(281): tr|A0A481QH18|A0A481QH18_9GAMM NADPH-dependent 7-cyano- 7-deazaguanine reductase OS=Yersinia hibernica OX=23392 59 GN=queF PE=3 SV=1
MSSYQDHKALAQLTLGKPTAYRDHYDVTLLQAVPRSMNREPLGLYPDNLPFHGADIWTLYELSWLNSKGLPQVAVGEISLSADSINLIESKSFKLYLNSFNQTAFTDWESVRGTLQQDLSACAQGDVNVRLYRLDELAHQPIANFSGECLDEQDISIDSYEFSTDYLQGATGKNHVEESLVSHLLKSNCLITHQPDWGSVQISYSGPQINREALLRYLVSFRHHNEFHEQCVERIFNDIMNLCQPKTLSVYARYTRRGGLDINPWRSNTDFLPPTGRLARQ

SEQ ID NO: 50859 - protein, 281 aa, Yersinia intermedia; identical to SEQ ID NO: 50856
  misc_feature (1)..(281): tr|A0A208ZG04|A0A208ZG04_YERIN NADPH-dependent 7-cyano- 7-deazaguanine reductase OS=Yersinia intermedia OX=631 GN=queF PE=3 SV=1

SEQ ID NO: 50860 - protein, 281 aa, Yersinia intermedia
  misc_feature (1)..(281): tr|A0A0U1EPP3|A0A0U1EPP3_YERIN NADPH-dependent 7-cyano- 7-deazaguanine reductase OS=Yersinia intermedia OX=631 GN=queF PE=3 SV=1
MSSYQNHKALAELTLGKPTAYCDHYDATLLQAVPRSMNREPLGLYPDNLPFHGADIWTLYELSWLNSNGLPQVAVGEISLNADSINLIESKSFKLYLNSFNQTIFADKESVRMTLQRDLAACAQGNVSVALYDLDEITGQPISNFNGECLDKQDIRIDSYEFNADYLQGAAGKDHVEESLVSHLLKSNCLITHQPDWGSVQIHYRGPQIDHEALLRYLVSFRHHNEFHEQCVERIFNDIMRFCQPETLTVYARYTRRGGLDINPWRSNTDFVPLTGRLARQ

SEQ ID NO: 50861 - protein, 281 aa, Yersinia kristensenii; identical to SEQ ID NO: 50857
  misc_feature (1)..(281): tr|A0A0T9PR87|A0A0T9PR87_YERKR NADPH-dependent 7-cyano- 7-deazaguanine reductase OS=Yersinia kristensenii OX=28 152 GN=queF PE=3 SV=1

SEQ ID NO: 50862 - protein, 281 aa, Yersinia kristensenii
  misc_feature (1)..(281): tr|A0A2A7TBC5|A0A2A7TBC5_YERKR NADPH-dependent 7-cyano- 7-deazaguanine reductase OS=Yersinia kristensenii OX=28 152 GN=queF PE=3 SV=1
MSSYQDHKALAELTLGKPTAYRDHYDVTLLQAVPRSMNREPLGLYPDNLPFHGADIWTLYELSWLNSKGLPQVAVGEISLNADSANLIESKSFKLYLNSFNQTTFADWESVQTTLQRDLSACAQGDVSVRLYRLDEIAHQPIANFTGECLDQQDIRIDNYEFNADYLHGAAGNHYVKESLVSHLLKSNCLITHQPDWGSVQISYSGPQINREALLRYLVSFRHHNEFHEQCVERIFNDIMHFCRPETLSVYARYTRRGGLDINPWRSNTDFVPSTGRLARQ

SEQ ID NO: 50863 - protein, 281 aa, Yersinia massiliensis
  misc_feature (1)..(281): tr|A0A0T9PMH5|A0A0T9PMH5_9GAMM NADPH-dependent 7-cyano- 7-deazaguanine reductase OS=Yersinia massiliensis OX=41 9257 GN=queF PE=3 SV=1
MSSYQDHKALAELTLGKPTAYHDHYDVTLLQAVPRSMNREPLGLYPDNLPFHGADIWTLYELSWLNSHGLPQVAVGQISLNADSVNLIESKSFKLYLNSFNQTIFADWESVRTTLQRDLATCAMGDVSVTLYQLDEITDQPIANFSGECLDQQDIRIDSYEFSTDYLQGAIGANHVQESLVSHLLKSNCLITHQPDWGSVQISYSGPQINREALLRYLVSFRHHNEFHEQCVERIFNDIMRFCQPDTLSVYARYTRRGGLDINPWRSNTHFVPSTGRLARQ

SEQ ID NO: 50864 - protein, 281 aa, Yersinia massiliensis
  misc_feature (1)..(281): tr|A0A2R4NLM6|A0A2R4NLM6_9GAMM NADPH-dependent 7-cyano- 7-deazaguanine reductase OS=Yersinia massiliensis OX=41 9257 GN=queF PE=3 SV=1
MSSYQDHKALAELTLGKPTAYHDHYDVALLQAVPRSMNREPLGLYPDNLPFHGADIWTLYELSWLNSNGLPQVAVGQISLNADSVNLIESKSFKLYLNSFNQTIFADWESVRTTLQRDLAICAEGDVNVTLYRLDEITDQPIANFSGECLDQQDIRIDSYEFSTDYLQGAISANHVEESLVSHLLKSNCLITHQPDWGSVQISYSGPQINREALLRYLVSFRHHNEFHEQCVERIFNDIMRFCQPDTLSVYARYTRRGGLDINPWRSNTHFVPSTGRLARQ

SEQ ID NO: 50865 - protein, 281 aa, Yersinia mollaretii
  misc_feature (1)..(281): tr|A0A0U1I5P0|A0A0U1I5P0_YERMO NADPH-dependent 7-cyano- 7-deazaguanine reductase OS=Yersinia mollaretii OX=3306 0 GN=queF PE=3 SV=1
MSSYQDHKALAELTLGKPTAYRDHYDVTLLQAVPRSMNREPLGLYPDRLPFHGADIWTLYELSWLNSNGLPQVAVGEISLNANSINLIESKSFKLYLNSFNQTVFVDWESVQATLQRDLAACAAGEVSVRLYRLDEITDQPIANFAGACLDEQDIRIDSYEFHADYLQGAAGANRVEESLVSHLLKSNCLITHQPDWGSVQISYSGPQINREALLRYLVSFRHHNEFHEQCVERIFNDIMRFCQPETLSVYARYTRRGGVDINPWRSNTHFAPPTGRLARQ

SEQ ID NO: 50866 - protein, 281 aa, Yersinia mollaretii
  misc_feature (1)..(281): tr|C4SAR0|C4SAR0_YERMW NADPH-dependent 7-cyano-7-deazag uanine reductase OS=Yersinia mollaretii (strain ATCC 43 969 / DSM 18520 / CIP 103324 / CNY 7263 / WAIP 204) OX= 349967 GN=queF PE=3 SV=1
MSSYQDHKALAELTLGKPTAYRDHYDVTLLQAVPRSMNREPLGLYPDSLPFHGADIWTLYELSWLNSNGLPQVAVGEISLNANSINLIESKSFKLYLNSFNQTVFADWESVQATLQRDLAACAAGRVSVKLYRLDEITDQPIANFAGECLDQQDIRIDSYEFNADYLQGAVGTNRIEESLVSHLLKSNCLITHQPDWGSVQISYSGPQINREALLRYLVSFRHHNEFHEQCVERIFNDIMRFCQPETLSVYARYTRRGGLDINPWRSNSDFVPSTGRLARQ

SEQ ID NO: 50867 - protein, 281 aa, Yersinia nurmii
  misc_feature (1)..(281): tr|A0A0T9LER4|A0A0T9LER4_9GAMM NADPH-dependent 7-cyano- 7-deazaguanine reductase OS=Yersinia nurmii OX=685706 G N=queF PE=3 SV=1
MSSYQDHQALAELTLGKPTAYRDHYDAALLQAVPRSMNREPLGLYPNNLPFHGADIWTMYELSWLNANGLPQVAVGEISLKADSVNLIESKSFKLYLNSFNQTPFSDWESVRQTLQQDLSTCAQGEVSVNLYKLNDLAGQLIADFNGECLDEQDIRIDNYEFSTDYLKNAAGQQIVEETLVSHLLKSNCLITHQPDWGSVQIRYRGPQINREALLRYLVSFRHHNEFHEQCVERIFNDLMRFCQPETLSVYARYTRRGGLDINPWRSNTDFTPSSGRLARQ

SEQ ID NO: 50868 - protein, 281 aa, Yersinia pekkanenii
  misc_feature (1)..(281): tr|A0A0T9P7Y8|A0A0T9P7Y8_9GAMM NADPH-dependent 7-cyano- 7-deazaguanine reductase OS=Yersinia pekkanenii OX=1288 385 GN=queF PE=3 SV=1
MSSYQDHKALAELTLGKPTAYRDHYDVSLLQAVPRSMNREPLGLYPDSLPFHGADIWTLYELSWLNSNGLPQVAVGEISLNADSVNLIESKSFKLYLNSFNQTAFTDWKSVRTTLQRDLAACAQGEVSVTLYSLDEITHQPIANFSGECLEQQDIRIDSYEFSADYLQGAAGTNRVEESLVSHLLKSNCLITHQPDWGSVQINYSGPQIDREALLRYLVSFRHHNEFHEQCVERIFNDIMHFCQPEKLSVYARYTRRGGLDINPWRSNTDFVPSTGRLARQ

SEQ ID NO: 50869 - protein, 281 aa, Yersinia pestis
  misc_feature (1)..(281): sp|Q8ZH75|QUEF_YERPE NADPH-dependent 7-cyano-7-deazagua nine reductase OS=Yersinia pestis OX=632 GN=queF PE=3 S V=1
MSSYQNHKALAELTLGKPTAYCDYYDATLLQAVPRSMNREPLGLYPDNLPFHGADIWTLYELSWLNSNGLPQVAVGEISLNADSINLIESKSFKLYLNSFNQTIFADKESVRMTLQRDLAACAQGNVSVALYDLDEITGQPISNFNGECLDKQDIRIDSYEFNADYLQGAAGKDHVEESLVSHLLKSNCLITHQPDWGSVQIHYRGPQIDHEALLRYLVSFRHHNEFHEQCVERIFNDIMRFCQPETLTVYARYTRRGGLDINPWRSNTDFVPLTGRLARQ

SEQ ID NO: 50870 - protein, 281 aa, Yersinia pestis; identical to SEQ ID NO: 50869
  misc_feature (1)..(281): tr|A0A2U2GV20|A0A2U2GV20_YERPE NADPH-dependent 7-cyano- 7-deazaguanine reductase OS=Yersinia pestis OX=632 GN=q ueF PE=3 SV=1

SEQ ID NO: 50871 - protein, 281 aa, Yersinia pseudotuberculosis; identical to SEQ ID NO: 50869
  misc_feature (1)..(281): sp|B1JQF1|QUEF_YERPY NADPH-dependent 7-cyano-7-deazagua nine reductase OS=Yersinia pseudotuberculosis serotype O:3 (strain YPIII) OX=502800 GN=queF PE=3 SV=1

SEQ ID NO: 50872 - protein, 281 aa, Yersinia pseudotuberculosis; identical to SEQ ID NO: 50869
  misc_feature (1)..(281): tr|A0A3G5KCF4|A0A3G5KCF4_YERPU NADPH-dependent 7-cyano- 7-deazaguanine reductase OS=Yersinia pseudotuberculosis OX=633 GN=queF PE=3 SV=1

SEQ ID NO: 50873 - protein, 281 aa, Yersinia rohdei
  misc_feature (1)..(281): tr|A0A0U1HWG7|A0A0U1HWG7_YERRO NADPH-dependent 7-cyano- 7-deazaguanine reductase OS=Yersinia rohdei OX=29485 GN =queF PE=3 SV=1
MSSYQDHQALAELTLGKPTAYRDSYDATLLQAVPRSMNREPLGLYPDNLPFHGADIWTLYELSWLNNNGLPQVAVGEISLNANSLNLIESKSFKLYLNSFNQTVFADWESVRTTLQQDLAACAQGDVSVTLYHLDEITHQPIANFAGECLDQQDIRIDSYEFSADYLQGATSHNRVEESLVSHLLKSNCLITHQPDWGSVQISYSGPQINREALLRYLVSFRHHNEFHEQCVERIFNDILRFCQPETLSVYARYTRRGGLDINPWRSNTDFLPSTGRLARQ

SEQ ID NO: 50874 - protein, 281 aa, Yersinia ruckeri
  misc_feature (1)..(281): tr|A0A085U304|A0A085U304_YERRU NADPH-dependent 7-cyano- 7-deazaguanine reductase OS=Yersinia ruckeri OX=29486 G N=queF PE=3 SV=1
MSSYQDHQALAKLTLGKPTDYRDHYDATLLQAVPRSMNREPLGLYPDNLPFHGADIWTLYELSWLNANGLPQVAVGEISLNADSINLIESKSFKLYLNSFNQTQFSDWESVRQTLQQDLAHCAQGEVNVSLYTLDQIAGQPIANFTGHCLDEQDIRIDHYEFSTDYLKNAVGNQIVEETLVSHLLKSNCLITHQPDWGSVQICYRGPQINPEALLRYLISFRHHNEFHEQCVERIFNDLMRFCHPETLSVYARYTRRGGLDINPWRSNTTFNPSTGRLARQ

SEQ ID NO: 50875 - protein, 281 aa, Yersinia similis
  misc_feature (1)..(281): tr|A0A0T9PN69|A0A0T9PN69_9GAMM NADPH-dependent 7-cyano- 7-deazaguanine reductase OS=Yersinia similis OX=367190 GN=queF PE=3 SV=1
MSSYQNHKALAELTLGKPTAYCDHYNATLLQAVPRSMNREPLGLYPDNLPFHGADIWTLYELSWLNSNGLPQVAVGEISLNADSINLIESKSFKLYLNSFNQTVFADKESVRMTLQRDLATCAQGNVSVALYDLDEITGQPIANFNGECLDKQDIRIDSYEFNADYLQGAAGKDHVEESLVSHLLKSNCLITHQPDWGSVQIHYCGPQIDHKALLRYLVSFRHHNEFHEQCVERIFNDIMRFCQPETLTVYARYTRRGGLDINPWRSNTDFVPLTGRLARQ

SEQ ID NO: 50876 - protein, 281 aa, Yersinia wautersii; identical to SEQ ID NO: 50860
  misc_feature (1)..(281): tr|A0A0E8XH33|A0A0E8XH33_9GAMM NADPH-dependent 7-cyano- 7-deazaguanine reductase OS=Yersinia wautersii OX=13416 43 GN=queF PE=3 SV=1

SEQ ID NO: 50877 - protein, 281 aa, Yersiniaceae bacterium
  misc_feature (1)..(281): tr|A0A2N5EN36|A0A2N5EN36_9GAMM NADPH-dependent 7-cyano- 7-deazaguanine reductase OS=Yersiniaceae bacterium 2016 Iso3 OX=2060066 GN=queF PE=3 SV=1
MSSYQEHQALQKLTLGKPTAYQDHYDATLLQAVPRSMNREPLGLYPDNLPFHGADIWTLYELSWLNAKGLPQVAVGDVRLNAASLNLVESKSFKLYLNSFNQTRFASWDEVQETLQRDLTACAQGDVQVTLFRLDEVEGQPISRFEGECIDDQEIEIDNYQFSTDVLAQATCGEPVEETLVSHLLKSNCLITHQPDWGSVQIHYRGNRLDREALLRYLVSFRHHNEFHEQCVERIFNDLMHFFRPEKLAVYARYTRRGGLDINPWRANFNFDPAAGRLVRQ

SEQ ID NO: 50878 - protein, 281 aa, Yersiniaceae bacterium
  misc_feature (1)..(281): tr|A0A2N5DX88|A0A2N5DX88_9GAMM NADPH-dependent 7-cyano- 7-deazaguanine reductase OS=Yersiniaceae bacterium 2016 Iso4 OX=2060068 GN=queF PE=3 SV=1
MSSYQEHQALQKLTLGKPTAYQDHYDASLLQAVPRSMNREPLGLYPDNLPFHGADIWTLYELSWLNAKGLPQVAVGDVRLNAGSLNLVESKSFKLYLNSFNQTRFADWDEVQATLQRDLAHCAQGEVQVTLFRLNEVEGQPISRFEGDCIDDQDIEIDNYQFSTDVLAQAAGGEPVEETLVSHLLKSNCLITHQPDWGSVQIHYRGNRIDREALLRYLVSFRHHNEFHEQCVERIFNDLMRFFRPEKLAVYARYTRRGGLDINPWRANFAFEPAAGRLVRQ

SEQ ID NO: 50879 - protein, 281 aa, Yokenella regensburgei
  misc_feature (1)..(281): tr|A0A2X2QV34|A0A2X2QV34_9ENTR NADPH-dependent 7-cyano- 7-deazaguanine reductase OS=Yokenella regensburgei OX=1 58877 GN=queF PE=3 SV=1
MSSYENHQALSGLTLGKATDYRDIYDASLLQGVPRSLNRDPLGLHADSLPFHGADIWTLYELSWLNARGLPQVAVGHVELSDRTVNLIESKSFKLYLNSFNQTRFASQEEVRDTLERDLSACAQGKVSVALYQLDEIEGQPIAHFHGTCIDNQDIEIDNYQFSTDYLENAASGKVVEETLVSHLLKSNCLITHQPDWGSVQVQYRGPKIDREKLLRYLVSFRHHNEFHEQCVERIFNDIQRLCQPETLSVYARYTRRGGLDINPWRTNTDFVPATGRLVRQ

SEQ ID NO: 50880 - protein, 281 aa, Yokenella regensburgei
  misc_feature (1)..(281): tr|A0A484WPZ1|A0A484WPZ1_9ENTR NADPH-dependent 7-cyano- 7-deazaguanine reductase OS=Yokenella regensburgei OX=1 58877 GN=queF PE=3 SV=1
MSSYENHQALSGLTLGKATDYRDIYDASLLQGVPRSLNRDPLGLHADSLPFHGADIWTLYELSWLNARGLPQVAVGHVELSDRTVNLIESKSFKLYLNSFNQTRFASLEEVRDTLERDLSACAQGKVSVALYQLDEIEGQPIAHFHGTCIDNQDIEIDNYQFSTDYLENAASGKVVEETLVSHLLKSNCLITHQPDWGSVQIQYRGPKIDREKLLRYLVSFRHHNEFHEQCVERIFNDIQRLCQPETLSVYARYTRRGGLDINPWRTNTNFVPATGRLVRQ

SEQ ID NO: 50881 - protein, 154 aa, Yoonia maritima
  misc_feature (1)..(154): tr|A0A2T0VT85|A0A2T0VT85_9RHOB NADPH-dependent 7-cyano- 7-deazaguanine reductase OS=Yoonia maritima OX=1435347 GN=queF PE=3 SV=1
MSDDIYSNLKQLGGATVMPATPEEAELERVPNPQADVAYNVRFTAPEFTSLCPMTGQPDFAHLVIDYVPGAWLIESKSLKLFLGSFRNHGAFHEDCTVSIARRLAEFLEPQWLRIGGYWYPRGGIPIDVFWQTGAMPEGVWIPDQGVPPYRGRG

SEQ ID NO: 50882 - protein, 153 aa, Yoonia sediminilitoris
  misc_feature (1)..(153): tr|A0A2T6KC25|A0A2T6KC25_9RHOB NADPH-dependent 7-cyano- 7-deazaguanine reductase OS=Yoonia sediminilitoris OX=1 286148 GN=queF PE=3 SV=1
METIYSDLKQLGGQSDLPSSPEAAELERVSNPQAGVDYCVRFTAPEFTSLCPMTGQPDFAHLVIDYVPAEFLVESKSLKLFLGSFRNHGAFHEDCTISIARRLVDFLNPQWLRIGGYWYPRGGIPIDVFWQTGSMPQGVWIPDQGVPSYRGRG

SEQ ID NO: 50883 - protein, 155 aa, Yoonia vestfoldensis
  misc_feature (1)..(155): tr|A0A1Y0E7A7|A0A1Y0E7A7_9RHOB NADPH-dependent 7-cyano- 7-deazaguanine reductase OS=Yoonia vestfoldensis OX=245 188 GN=queF PE=3 SV=1
MSNEDIYKNLTMLGGQTTLPKTPEEAVLERVPNPQAGTDYAVRFTAPEFTSLCPMTGQPDFAHIVLDYVPGDWLVESKSLKLFLGSFRNHGAFHEDCTVTIGKRLIESLAPKWLRVGGYWYPRGGIPIDVFFQTGAQPSGVWIPDQGVPTYRGRG

SEQ ID NO: 50884 - protein, 160 aa, Youngiibacter fragilis
  misc_feature (1)..(160): tr|V7I720|V7I720_9CLOT NADPH-dependent 7-cyano-7-deazag uanine reductase OS=Youngiibacter fragilis 232.1 OX=994 573 GN=queF PE=3 SV=1
MGMEKDLSLLGNKDVTYRFDYTPEVLETFINKHQDNDYFVKFNCPEFTSLCPITGQPDFATIYISYVPDVNMVESKSLKLYLFSFRNRGDFHEDCMNIIMKDLIRIMDPKYIEVWGKFTPRGGISIDPYCNYGKKGTRWEAVADRRLEEHDMYPEKVDNR

SEQ ID NO: 50885 - protein, 154 aa, Youngimonas vesicularis
  misc_feature (1)..(154): tr|A0A4S3M8K1|A0A4S3M8K1_9RHOB NADPH-dependent 7-cyano- 7-deazaguanine reductase OS=Youngimonas vesicularis OX= 1294297 GN=queF PE=3 SV=1
MTKTDVSGLSQLGQNTAQPTSPEEAQLERVPAGHAGTDYVVRFTAPEFTSICPMTGQPDFAHIVIDYIPGDWLVESKSLKLYLHSFRNHGAFHEDCTIDIAKRLVDLLAPKWLRIGAYWYPRGGIPIDVFWQTGPAPEGVWIPDQGVATYRGRG

SEQ ID NO: 50886 - protein, 156 aa, Zavarzinia compransoris
  misc_feature (1)..(156): tr|A0A317E3V3|A0A317E3V3_9PROT NADPH-dependent 7-cyano- 7-deazaguanine reductase OS=Zavarzinia compransoris OX= 1264899 GN=queF PE=3 SV=1
MTTPDPTATELSLLGHAAGLPASPAAAVLERIANPHPGTAYLVRFVCPEFTSLCPVTGQPDFAHLVIDYVPGDWLVESKALKLFLGAFRNHGAFHEACTVEIGKRLVDLLAPAWLRIGGYWYPRGGIPIDVFYATGTPPEGLWLPDQGVPPYRGRG

SEQ ID NO: 50887 - protein, 155 aa, Zavarzinia sp.
  misc_feature (1)..(155): tr|A0A317EBL7|A0A317EBL7_9PROT NADPH-dependent 7-cyano- 7-deazaguanine reductase OS=Zavarzinia sp. HR-AS OX=221 1142 GN=queF PE=3 SV=1
MTTSHETTTLNQLGHPTAQAEGPDSALLEKVPNPQAGVRYLIRFVCPEFTSVCPVTGQPDFAHLVIDYVPRDFIVESKSLKLFLGSFRNHGAFHEDCTVRIARRLVDLLDPEWLRIGGYWYPRGGIPIDVFYATGAPPEGLWLPDQGVPPYRGRG

SEQ ID NO: 50888 - protein, 124 aa, Zetaproteobacteria bacterium
  misc_feature (1)..(124): tr|A0A2M7WVF5|A0A2M7WVF5_9PROT NADPH-dependent 7-cyano- 7-deazaguanine reductase OS=Zetaproteobacteria bacteriu m CG_4_9_14_3_um_filter_53_7 OX=1974119 GN=queF PE=3 SV =1
MSEKLGAVINKPTRYLETFENPNPERDYHIRIDSPEFTCLCPKTGQPDFAEIKLDYIPDGLCVELKSLKLYYWSFRDEGHFHEQVTNMIANDLIKLLDPRQIKVTAVFNVRGGVYTTVEVEHSK

SEQ ID NO: 50889 - protein, 122 aa, Zetaproteobacteria bacterium
  misc_feature (1)..(122): tr|A0A2A5FCY3|A0A2A5FCY3_9PROT NADPH-dependent 7-cyano- 7-deazaguanine reductase OS=Zetaproteobacteria bacteriu m OX=2026807 GN=queF PE=3 SV=1
MGDQPTTIASKTLEVFPNPNPERDYHIKIDSPEFTCLCPKTGQPDFAEIKIDYIPDVFCVELKSLKLYYWSFRDEGHFHEQVTNMMASDLIEAMNPRYLKVTAIFNVRGGVYTTVEVEHRQA

SEQ ID NO: 50890 - protein, 143 aa, Zhizhongheella caldifontis
  misc_feature (1)..(143): tr|A0A2S5SUZ8|A0A2S5SUZ8_9BURK NADPH-dependent 7-cyano- 7-deazaguanine reductase OS=Zhizhongheella caldifontis OX=1452508 GN=queF PE=3 SV=1
MPPNPPSAPSKELHVFPNPSPKRDYVIQFQIPEFTCHCPLTGQPDFAHFTIDCIADKLCIELKSLKMYMWSYRNEGAFHEKVTNDILDDIVKAIDPRFLRITAKWYVRGGIYTNVVVEHRKKGWKPQPRIELPQHPAENGLLG

SEQ ID NO: 50891 - protein, 276 aa, Zhongshania aliphaticivorans
  misc_feature (1)..(276): tr|A0A127M5P8|A0A127M5P8_9GAMM NADPH-dependent 7-cyano- 7-deazaguanine reductase OS=Zhongshania aliphaticivoran s OX=1470434 GN=queF PE=3 SV=1
MSEQLSHGPLGEQVDYPSQYDPSCLHPIVRQAGRDGLGLGDVLPFGGVDIWNAYELSCLNEQGKPLVACAEFRVPAQSPNIIESKSFKLYLNSFNQTRLSGLDAMAEMLRHDLSLAAGAEVQVAIYCPEDWPANYSIALPRGECIDGLDICPDSYQPSPSLLSANTGNVIEETLYSHLLRSRCPVTSQPDWASIEISYRGPRINQEGLLAYLVSFREHDDFHEQCVEQIFSDISRYCAPVRLTVYARYLRRGGLDINPWRSNDDLASPENRRGARQ

SEQ ID NO: 50892 - protein, 278 aa, Zhongshania sp.
  misc_feature (1)..(278): tr|A0A3N0CVT6|A0A3N0CVT6_9GAMM NADPH-dependent 7-cyano- 7-deazaguanine reductase OS=Zhongshania sp. DSW25-10 OX =2304603 GN=queF PE=3 SV=1
MSDHKIHGPLGEKVTYPDQYDPTCLHAIPRQQGRGELGIDSAKPLPFSGVDIWNAYELSWLNASGKPVVACAEFRFAAGSPNIIESKSFKLYLNSFNQTRIADLDILKRALERDLSLASGAAVELSLFTADRWEEAYGVSCPEGECLDDLDICPTSYTPNSDLLVVENTEICSEHLYSNLLRSRCPVTSQPDWASVEIRYTGPKIQRESLLAYIVSFREHDEFHEHCVERIFSDISKRCQPEYLSVYARYTRRGGLDINPWRCSDKSLTPNNTRGVRQ

SEQ ID NO: 50893 - protein, 278 aa, Zhongshania sp.
  misc_feature (1)..(278): tr|A0A2S4HEW3|A0A2S4HEW3_9GAMM NADPH-dependent 7-cyano- 7-deazaguanine reductase OS=Zhongshania sp. ZX-21 OX=20 67667 GN=queF PE=3 SV=1
MSDHKSHGPLGEKVTYPDQYDPTCLHAIPRQQGRGELGIDSAKSLPFSGVDIWNAYELSWLNASGKPVVACAEFRFAAGSPNIIESKSFKLYLNSFNQTRIADLDILKRALERDLSLASGAAVELSLFTADRWEDAYGVSCPEGECLDDLDICPTSYSPNSDLLVVENTEICSEHLYSNLLRSRCPVTSQPDWASVEIRYTGPKIQRESLLAYIVSFREHDEFHEHCVERIFSDISKRCQPKYLSVYARYTRRGGLDINPWRSSDKSLTPNNTRGVRQ

SEQ ID NO: 50894 - protein, 283 aa, Zobellella denitrificans
  misc_feature (1)..(283): tr|A0A291HRJ2|A0A291HRJ2_9GAMM NADPH-dependent 7-cyano- 7-deazaguanine reductase OS=Zobellella denitrificans OX =347534 GN=queF PE=3 SV=1
MTPEQKYQNSQALDALPLGKQSSYVCEYDPAQLQPVPRSLNRDDLGLEAGALPFGGEDLWNLYELSWLNNKGKPVVAMGEVHIPATSTNLIESKSFKLYLNSFNQSRFDSLEEVADLLTRDLSLCAQGQVKVRLYELAAAPAQFGVLPGDCIDDLDVEIDRYQPDESLLADAIEEEEVQETLHSHLLKSNCLVTGQPDWGSVMIRYQGPRIRREALLRYLVSFRQHNEFHEQCVERIFMDLMHHCRPKELTVYARYTRRGGLDINPYRSNVAGKAANVRLLRQ

SEQ ID NO: 50895 - protein, 283 aa, Zobellella denitrificans
  misc_feature (1)..(283): tr|A0A231MYQ4|A0A231MYQ4_9GAMM NADPH-dependent 7-cyano- 7-deazaguanine reductase OS=Zobellella denitrificans OX =347534 GN=queF PE=3 SV=1
MTPEQKYQNSQALDALPLGKQSSYVCEYDPAQLQPVPRSLNRDDLGLEAGALPFGGEDLWNLYELSWLNNKGKPVVAMGEVHIPATSTNLIESKSFKLYLNSFNQSRFDSLEEVADLLTRDLSLCAQGQIKVRLYELAAAPAQFGVLPGDCIDDLDVEIDRYQPDESLLADAIEEEEVQETLHSHLLKSNCLVTGQPDWGSVMIRYQGPRIRREALLRYLVSFRQHNEFHEQCVERIFMDLMHHCRPKELTVYARYTRRGGLDINPYRSNVAGKAANVRLLRQ

SEQ ID NO: 50896 - protein, 283 aa, Zobellella endophytica
  misc_feature (1)..(283): tr|A0A2P7R7M1|A0A2P7R7M1_9GAMM NADPH-dependent 7-cyano- 7-deazaguanine reductase OS=Zobellella endophytica OX=2 116700 GN=queF PE=3 SV=1
MTPEQKYQQSQALDALPLGKHSSYVCEYDAGQLQPVPRSLNRDDLGLTADNLPFGGEDLWNLYELSWLTPRGKPVVAMGEVHIPATSVNLIESKSFKLYLNSFNQSKFDSMDEVADILTRDLSLCAEGRVRVRLYELGAAPAQFGVMPGDCIDDLDIEIDRYQPDDSLLNDATEPLEVHETLHSHLLKSNCLVTGQPDWGSVMIRYQGPKIRRDALLRYLVSFRQHNEFHEQCVERIFMDLMQHCRPRELTVYARYTRRGGLDINPYRSNVAGKAANVRLLRQ

SEQ ID NO: 50897 - protein, 283 aa, Zobellella taiwanensis
  misc_feature (1)..(283): tr|A0A2P7R6M0|A0A2P7R6M0_9GAMM NADPH-dependent 7-cyano- 7-deazaguanine reductase OS=Zobellella taiwanensis OX=3 47535 GN=queF PE=3 SV=1
MTPEQKYQQSQALDALPLGKQSSYVCEYDPGQLQPVPRSLNRDDLGLSADALPFAGEDLWNLYELSWLNARGKPVVAMGEVRIPASSANLIESKSFKLYLNSFNQSRFDSLEDVSERLTRDLSACAQGRVGVKLFELAVAPAQFGLLPGDCIDQLDIDIDRYQPDAALLQGATEPEEVNETLHSHLLKSNCLVTGQPDWGSVMIRYQGPRIRREALLRYLVAFRQHNEFHEQCVERIFMDLLTHCRPKELTVYARYTRRGGLDINPYRSNVAGKAANVRLARQ

SEQ ID NO: 50898 - protein, 277 aa, Zoogloea ramigera
  misc_feature (1)..(277): tr|A0A4Y4CZH2|A0A4Y4CZH2_ZOORA NADPH-dependent 7-cyano- 7-deazaguanine reductase OS=Zoogloea ramigera OX=350 GN =queF PE=3 SV=1
MSTAPEASPLGKAVAYAEHYDPALLFPIPRQGKRAEIGIAEGALPFVGEDIWNAYELSWLDPRGKPVVALAHFIVPATSPNLIESKSLKLYLNSFNQTRLAGVDELVATLTRDLSAAAGAPVLVHVAPLSTRPQRPMGYPKGILLDGLEIDVDLYTPEPALLSADTSRAPVTETLYSHLLKSNCLVTGQPDWAMLVVRYTGAPIDREGLLRYIISFRQHNEFHEQCVERVFVDILRQCQPSALSVFARYTRRGGLDINPYRRTPGTAVPAPFAEIRQ

SEQ ID NO: 50899 - protein, 284 aa, Zoogloeaceae bacteirum
  misc_feature (1)..(284): tr|A0A2S0QUU3|A0A2S0QUU3_9RHOO NADPH-dependent 7-cyano- 7-deazaguanine reductase OS=Zoogloeaceae bacteirum Par- f-2 OX=2080469 GN=queF PE=3 SV=1
MNNSMQPAPHGAESSPLGRAVTYRDTYAPELLFPIDRQLKRDELGIAANALPFIGADLWNAYELSWLNPRGKPVVALGHIEVPADSPRLVESKSLKLYLNAFNQTRFDSAEAVAATVRADLSAAVGAAVNVTVFPLAASTVRSFGLPDGVCVDELDIEIDTYQPTPEFLRTGCRSRVVEETLYSHLLKSNCLVTGQPDWGMVAVRYRGAAIDRAGLLRYIVSFRSHNEFHEQCVERMFCDIMARCAPQALLVWARYTRRGGLDINPWRGTPGSGSPGNFMEVRQ

SEQ ID NO: 50900 - protein, 134 aa, Zooshikella ganghwensis
  misc_feature (1)..(134): tr|A0A4P9VID5|A0A4P9VID5_9GAMM Uncharacterized protein OS=Zooshikella ganghwensis OX=202772 GN=B9G39_01465 PE= 4 SV=1
MKHSQIKALLAYHTESSIFTNQSILQAVYCGVKNRPTIILSDLKVRSLSARNKEPYTAIFTVEYQPNEYFLELISFEKYLASFEGLTTYLEQLTDVIYSNIFDAIKPKNLKVEQQRTTFQGYSATIIIDSNRQG

SEQ ID NO: 50901 - protein, 278 aa, Zooshikella ganghwensis
  misc_feature (1)..(278): tr|A0A4P9VSL1|A0A4P9VSL1_9GAMM NADPH-dependent 7-cyano- 7-deazaguanine reductase OS=Zooshikella ganghwensis OX= 202772 GN=queF PE=3 SV=1
MSNNDILKKLPLGQTTEYVCHYKPDLLHPVPRQLNRTEIGVKDEALPFHGEDLWTLYELSWLNAKGKPCVATGEVRINASTPHLIESKSFKLYLNSFNQTQFDSLEEVTSTLQRDLSACAGGAVTVQIHPLSDASLQMAELDGTLLDELDISVNHYELNPALLENTTSNTVVSETLHSHLLKSNCLVTGQPDWGSVQIHYQGPQIDREALLRYIISFRQHQEFHEQCVERIFVDIQRYCAPEKLSVFARYTRRGGLDINPFRSNFEAAPTTSLRLIRQ

SEQ ID NO: 50902 - protein, 282 aa, Zymobacter palmae
  misc_feature (1)..(282): tr|A0A348HCM2|A0A348HCM2_9GAMM NADPH-dependent 7-cyano- 7-deazaguanine reductase OS=Zymobacter palmae OX=33074 GN=queF PE=3 SV=1
MKTQSELLVDAPLGHESAYPEQYDASLLFPIDRMPQRRPLGIVDAAALPFVGVDEWQAFEISWLEPSGRPNVRIGRFTLPAQSPNLIESKSWKLYLNSFNQTAFVSEDEVVARMTRDLSAAAGAPVSVELLSVEASSLAGQAMPGECLDDLDVAIKHYTPTPELLTKASEEIVEETVYSHLLKSNCPVTGQPDWGAVVIRYRGPRMARDGLLAYLISYRQHQDFHEHCVERIFVDIMSRIAPESLVVSARYVRRGGLDINPTRATPDHALTALPAWPRLIRQ

SEQ ID NO: 50903 - protein, 147 aa, Zymomonas mobilis
  misc_feature (1)..(147): tr|A0A542VZS0|A0A542VZS0_ZYMMB NADPH-dependent 7-cyano- 7-deazaguanine reductase OS=Zymomonas mobilis OX=542 GN =queF PE=3 SV=1
MQTTHLGKTSPLPQSPEQATLDYVPNPRQGKNYLIRFAIPEFTSLCPVTGQPDFAHLVIDYVPDKLIVESKSLKLFLGSFRNHRAFHEDCTVGIGEKLFTEMKAQWLRIGGYWYPRGGIPIDVFWQSGTPPQDLWLPEQGVPPYRGR

SEQ ID NO: 50904 - protein, 147 aa, Zymomonas mobilis
  misc_feature (1)..(147): sp|Q5NQQ4|QUEF_ZYMMO NADPH-dependent 7-cyano-7-deazagua nine reductase OS=Zymomonas mobilis subsp. mobilis (str ain ATCC 31821 / ZM4 / CP4) OX=264203 GN=queF PE=3 SV=1
MQTTHLGKNSPIPQSPEEASLDYVPNPRQGKNYLIRFAIPEFTSLCPVTGQPDFAHLVIDYVPDKLIVESKSLKLFLGSFRNHRAFHEDCTVGIGEKLFTEMKAQWLRIGGYWYPRGGIPIDVFWQSGAAPQDVWLPEQGVPPYRGR

SEQ ID NO: 50905 - protein, 282 aa, Escherichia coli; identical to SEQ ID NO: 43531
  misc_feature (1)..(282): sp|Q46920|QUEF_ECOLI NADPH-dependent 7-cyano-7-deazagua nine reductase OS=Escherichia coli (strain K12) OX=8333 3 GN=queF PE=1 SV=1

SEQ ID NO: 50906 - protein, 282 aa, Escherichia coli; identical to SEQ ID NO: 49709
  misc_feature (1)..(282): sp|B1LQY7|QUEF_ECOSM NADPH-dependent 7-cyano-7-deazagua nine reductase OS=Escherichia coli (strain SMS-3-5 / SE CEC) OX=439855 GN=queF PE=3 SV=1

SEQ ID NO: 50907 - protein, 350 aa, Abditibacterium utsteinense
  misc_feature (1)..(350): tr|A0A2S8ST91|A0A2S8ST91_9BACT Queuine tRNA-ribosyltran sferase OS=Abditibacterium utsteinense OX=1960156 GN=tg t PE=3 SV=1
MKFTVLKTRGAARAGILELPHGIIETPVFMPVGTLASVKAMLPHEMEQLGAQIILNNAFHLHLRPGAEVVKQAGGLHNFQNWHRPILTDSGGFQVFSLAKIRKITDEGVHFQSPVDGSKHFFTPESVIELEETLGPDIGMILDDVIALPATYDQTALAMRRSVAWAKRAANHRKRQDQSIFGIIQGGTHEELRKESAQATREIGFDGYAIGGLAVGETAEEMDAMVELTAALLPENQPRYLMGVGTPRDLKAGVERGVDMFDCVLPTRLARHNVGITEHENINFLKSKHKFDFSPLDPTCECPTCRNYTRAYIHHLCKCGEISGARLLTMHNLWFYQTWMRKLRNWILEG

SEQ ID NO: 50908 - protein, 381 aa, Abiotrophia defectiva
  misc_feature (1)..(381): tr|W1Q515|W1Q515_ABIDE Queuine tRNA-ribosyltransferase OS=Abiotrophia defectiva ATCC 49176 OX=592010 GN=tgt PE =3 SV=1
MTKPAVWYELIKEEKHTGARLGILHTPHGSFPTPMYMPVGTLATIKGLSPEELKEMGADVVLANTYHLWLRPGEDLVAEAGGLHKFMNWDKGILTDSGGFQVFSLSDMRKITEEGVHFRNHINGEKLFLSPEKAIHIENQLGADIIMSFDECPPFDQSYDYVKRSIERTTRWAERGLRAHQRPQDQALFGILQGAGYKDLRLAHAQDMIAMDFPGYSIGGLSVGESKEEMNEVLDYLTPVMPKHKPRYLMGVGSPDSLIDGVIRGVDMFDCVLATRIARNGTCMTSQGRLVVKNAQYARDFRPIDEKCDCYTCKHYSRAYIRHLIKCDEIFGLRLASIHNVHFLLNLMKQVRYHIENDSLLDFRQAFFEEYGYSKANARNF

SEQ ID NO: 50909 - protein, 381 aa, Abiotrophia sp.
  misc_feature (1)..(381): tr|A0A1F1LP91|A0A1F1LP91_9LACT Queuine tRNA-ribosyltran sferase OS=Abiotrophia sp. HMSC24B09 OX=1581061 GN=tgt PE=3 SV=1
MTKPAVWYELIKEEKHTGARLGILHTPHGSFPTPMYMPVGTLATIKGLSPEELKGMGADVVLANTYHLWLRPGEDLVAEAGGLHKFMNWDKGILTDSGGFQVFSLSDMRKITEEGVHFRNHINGEKLFLSPEKAIHIENQLGADIIMSFDECPPFDQSYDYVKRSIERTTRWAERGLRAHQRPQDQALFGILQGAGYKDLRLAHAQDMIAMDFPGYSIGGLSVGESKEEMNEVLDYLTPVMPKHKPRYLMGVGSPDSLIDGVIRGVDMFDCVLATRIARNGTCMTSQGRLVVKNAQYARDFRPIDEKCDCYTCKHYSRAYIRHLIKCDEIFGLRLASIHNVYFLLNLMKQVRYHIENDSLLDFRQAFFEEYGYSKANARNF

SEQ ID NO: 50910 - protein, 405 aa, Absiella dolichum
  misc_feature (1)..(405): tr|A8RFR3|A8RFR3_9FIRM Queuine tRNA-ribosyltransferase OS=Absiella dolichum DSM 3991 OX=428127 GN=tgt PE=3 SV= 1
MTNYKNNNTFSFEITKRIPGKLGRAGIIHTPHGDIKTPAFMCVGTRGEVRFLSMEDLESVQAQAMLSNGYHLRNTSVEIAQAGGLAKWSGWNGPTLTDSGGFQVMSLGSGIGKVVSMDREDEVINADPKDRLAHVMEDGVRFFDPFTNQEDFIGPEESMQIQCRIGADIHMAYDELTSLADSYEYNVEALARTERWAQRSIDEHKKHRDDLGYRQSLYGVLQGGRWEDLRRSTAKKLAQMEFDGYGLGGAFLKESLGEILRWCCEELPENKPRHLLGLSHPDDILIGTEMGADTFDCVAPTREARHGRIYARHGYYNLQKCQDSPLPLDEGCDCPTCRSGWTRGELRKLWKSEDNSVRQQYYNLASIHNLRFIIRLTEDARAAILNGTFPEFKAEFLKNYYPNRK

SEQ ID NO: 50911 - protein, 405 aa, Absiella dolichum; identical to SEQ ID NO: 50910
  misc_feature (1)..(405): tr|A0A415PI94|A0A415PI94_9FIRM Queuine tRNA-ribosyltran sferase OS=Absiella dolichum OX=31971 GN=tgt PE=3 SV=1

SEQ ID NO: 50912 - protein, 406 aa, Absiella sp.
  misc_feature (1)..(406): tr|A0A372ST28|A0A372ST28_9FIRM Queuine tRNA-ribosyltran sferase OS=Absiella sp. AM09-45 OX=2291993 GN=tgt PE=3 SV=1
MTTYKNNNTFSFEITKRIPGKLGRAGIIHTPHGDIKTPAFMAVGTNGAVRFMSMEDLNAVNAQAMLSNGYHLRNISPEIAEKGGLAAWSGWDGPTLTDSGGFQVMSLGSGCGKVVSMKREQGVVNADPKERLAHVSEDGVQFHDPFTDQEDFIGPEESMQIQCRIGADIHMAYDELTSLADSYEYNVEALARTERWAQRSLDEHKKLCDQLGYHQSLYGVLQGGRWEDLRRSTAKKFAEMDFDGYGLGGAFLKESLGEILRWCCEELPENKPRHLLGLSHPDDILIGTEMGADTFDCVAPTREARHGKLYTKYGPFNLAKFSNSTELIDEHCDCPTCKAGWTRGALRELWKSPDLEKKRQYYNLSSIHNLRFIVRLTEETRAAIENGTFEEYKAEFLQNYYHTNAK

SEQ ID NO: 50913 - protein, 406 aa, Absiella sp.
  misc_feature (1)..(406): tr|A0A417JZT0|A0A417JZT0_9FIRM Queuine tRNA-ribosyltran sferase OS=Absiella sp. AM27-20 OX=2292277 GN=tgt PE=3 SV=1
MTAYKNNNTFSFEITKRIPGKLGRAGIIHTPHGDIKTPAFMAVGTNGAVRFMSMEDLNAVNAQAMLSNGYHLRNISPEIAEKGGLAAWSGWDGPTLTDSGGFQVMSLGSGCGKVVSMKREQGVVNADPKERLAHVSEDGVQFHDPFTDQEDFIGPEESMQIQCRIGADIHMAYDELTSLADSYEYNVEALARTERWAQRSLDEHKKLCDQLGYHQSLYGVLQGGRWEDLRRSTAKKFAEMDFDGYGLGGAFLKESLGEILRWCCEELPENKPRHLLGLSHPDDILIGTEMGADTFDCVAPTREARHGKLYTKYGPFNLAKFSNSTELIDEHCDCPTCKAGWTRGALRELWKSPDLEKKRQYYNLSSIHNLRFIIRLTEETRAAIENGTFEEYKAEFLQNYYHTNTK

SEQ ID NO: 50914 - protein, 365 aa, Abyssibacter profundi
  misc_feature (1)..(365): tr|A0A363UNW0|A0A363UNW0_9GAMM Queuine tRNA-ribosyltran sferase OS=Abyssibacter profundi OX=2182787 GN=tgt PE=3 SV=1
MSFVCLQTDGGARRGRLTTQHGVIETPIFMPVGTYGTVKAMTPEELDSLGASIILGNTFHLMLRPGEQVVQALGGLHGFMHWDGPILTDSGGFQVWSLTELRKLTEQGVVFRSPVNGDRVELTPERSIQVQHALGSDIVMQFDECTAYPATEAEAAESMRLSLRWADRCRQAHADNPNLLFGIVQGGMHADLRRESLAGLETVGFDGYAIGGLSVGETREERLHVLETLSPLMPADRPRYLMGVGTPRDLIEGIDRGVDMFDCVMPTRNARNGHLFTSGGIVRIRNARHREDPAPLDADCSCYTCQHYSRAYLYHLNRCNEILGARLNTIHNLHFYLDLMRRAREAIEQGRWAGFRDGELKRWAD

SEQ ID NO: 50915 - protein, 382 aa, Abyssicoccus albus
  misc_feature (1)..(382): tr|A0A3N5C768|A0A3N5C768_9STAP Queuine tRNA-ribosyltran sferase OS=Abyssicoccus albus OX=1817405 GN=tgt PE=3 SV =1
MAAITYEHIKTCKQSGARLGKVHTPHGTFETPIFMPVGTLATVKTMSPEELLQVGSQIILSNTYHLWLRPGSDIIKEAGGLHKFMNWDHPILTDSGGFQVFSLSDMRKIEEEGVHFRHHLNGSKLFLSPEKAMDIQHDLGSDIMMSFDECPPFPAEYDYVKQSIERTTRWAHRGLEHHIKSGHDKHQALFGIVQGGEYEALRTQSAKELVAMDFSGYSIGGLSVGEPKDIMYRMLEHTTPLLPFHKPRYLMGVGSPDALIEGVIRGIDMFDCVLPTRIARNGTTMTSNGRVVVKKEQYARDFTPLDESCDCYTCKNYTKAYLRHLIKTDEILGLRLTSIHNLYFLLKLMENVRQAIREDRLLDFKEEFFEQYGLNVENPKNF

SEQ ID NO: 50916 - protein, 374 aa, Acaryochloris marina
  misc_feature (1)..(374): tr|B0C6Z6|B0C6Z6_ACAM1 Queuine tRNA-ribosyltransferase OS=Acaryochloris marina (strain MBIC 11017) OX=329726 G N=tgt PE=3 SV=1
MSNQFRFECHQHCSQTQARVGTFYTPHGPVDTPRFMPVGTLANVKTLTPAQLQETGAQMILANTYHLHLQPGESIVEQAGGLHRFMSWSGPILTDSGGFQVFSLSDMRSIAEEGVSFRSPRDGQMIYLSPETSMAIQNALGADVIMAFDECPSYPASRDAIQAATERTQRWLARCVKAHDRSDQALFGIVQGGTFADLRQAAARSVVEFDLPGYAIGGVSVGEPPELIEKIVKVTTPLLPVHKPRYLMGVGTYREMVQAIAAGIDLFDCVIPTRLARHGNALVAGERWNLKNNRFREDFTPLDSACPCYTCQNFTRAYISHLLRSRELLAYTLLSIHNITELIGFTQRIRQAILDDQFQQIFGTWLFSSDTQLD

SEQ ID NO: 50917 - protein, 335 aa, Acaryochloris sp.
  misc_feature (1)..(335): tr|A0A2W1JXF1|A0A2W1JXF1_9CYAN Queuine tRNA-ribosyltran sferase OS=Acaryochloris sp. RCC1774 OX=1764569 GN=tgt_ 1 PE=3 SV=1
MPVGTLANVKTVTPDQLQGTGAQMILANTYHLHLQPGEGIVERAGGLHRFMGWSGPILTDSGGFQVFSLSDMRSIEESGVSFRSPRDGQVIHLSPERAIAIQNALGADVIMAFDECAPYPASREAIENAADRTTRWLERCIKAHERADQALFGIVQGGTYLDLRQKSARSLVEFDLPGYAIGGVSVGEPPELIEKIVQATTPLLPKDKPRYLMGVGTYREMAQAIAAGIDLFDCVIPTRLARHGNALVRGERWNLKNNRFRKDFTPLDSDCPCYACQTFTRAYLSHLLRSRELLAYTLLSIHNITELVGFTQKIRQAIIQGTFAQDFRNWLQPAK

SEQ ID NO: 50918 - protein, 371 aa, Accumulibacter phosphatis
  misc_feature (1)..(371): tr|C7RRX9|C7RRX9_ACCPU Queuine tRNA-ribosyltransferase OS=Accumulibacter phosphatis (strain UW-1) OX=522306 GN =tgt PE=3 SV=1
MNFQLLASDGAARCGRLTLTHGTVDTPAFMPVGTYGTVKAMTPRDLTATGAQICLGNTFHLWLRPGLEVIAAHGGLHRFMGWNGPILTDSGGFQVFSLGALRKISEEGVRFQSPVNGDRLFLTPEESMRIQHVLNSDIAMILDECTPYPADHAVAAASMCLSLRWARRSRDRHDEIGNANALFGIVQGGMYEDLRDESLAALIDIGFAGFAIGGLSVGEPKDDMARILAHTAPRLPQDRPRYLMGVGTPEDLVAAVGAGIDMFDCVLPTRNARNGHFFTRYGDIRIRNACHKSDPRPLDASCECYTCRNFSRAYLHHLNRTGEILGAHLGTLHNLHYYQVLMHELRKAIASGTLASTVSAFQRARAQPTTA

SEQ ID NO: 50919 - protein, 378 aa, Acetanaerobacterium elongatum
  misc_feature (1)..(378): tr|A0A1H0BDF2|A0A1H0BDF2_9FIRM Queuine tRNA-ribosyltran sferase OS=Acetanaerobacterium elongatum OX=258515 GN=t gt PE=3 SV=1
MYKLIKKDGKARRGEFTTVHGTVQTPAFMNVATAGAIKGGISSYDLKNLKCQVELCNTYHLHLRPGDTLIREMGGLHRFIGWAGPILTDSGGFQVFSLAQLRKIKEEGVTFQSHIDGRKIFMGPEESMRIQSNLGSTIAMAFDECVENPAPYEYSKKSCDRTERWLYRCKDEMTRLNALHDTINPNQMLFGINQGCVYEDLRVQHMESIVKLDLDGYAIGGLAVGEPAVDMYRIISTVEPYMPADKPRYLMGVGTPVNIIEAVSRGVDLFDCVMPSRNARHGHMFTFNGIVNIINAKYTNDERPIAEDCDCPVCKNHSRAYIRHLFKANEMLGMRLAVMHNLYFYNTLMERIREAIEEGTFEQFKERYVPILDKRCKD

SEQ ID NO: 50920 - protein, 378 aa, Acetatifactor muris
  misc_feature (1)..(378): tr|A0A2K4ZDF0|A0A2K4ZDF0_9FIRM Queuine tRNA-ribosyltran sferase OS=Acetatifactor muris OX=879566 GN=tgt PE=3 SV =1
MRYRILKQEGRAKRAELETVHGTVQTPLFMNVGTVAAIKGAVATSDLEQIKTQVELSNTYHLHVRPGDKIIRQLGGLHKFMSWDRPILTDSGGFQVFSLAGLRKIKEEGVYFRSHIDGRKIFMGPEESMQIQSNLGSTIAMAFDECAPSRADRSYVQASVDRTARWLERCKKEMARLNSLEDTINREQLLFGINQGAIYPDIRIEHAKRISEMELDGYAVGGLAVGETHEEMYHILDQVVPFLPKDKPAYLMGVGTPANILEGVERGIDFFDCVYPTRNGRHGHLYTNQGKINLFNAKYELDDRPIEEGCGCPACRRYSRAYIRHLLKAKEMLGMRLCVLHNLYFYNTMMEEIRDALDEGRFAEYKKRKLTGINPLDQ

SEQ ID NO: 50921 - protein, 376 aa, Acetitomaculum ruminis
  misc_feature (1)..(376): tr|A0A1I0VMQ4|A0A1I0VMQ4_9FIRM Queuine tRNA-ribosyltran sferase OS=Acetitomaculum ruminis DSM 5522 OX=1120918 G N=tgt PE=3 SV=1
MFEIKNIDGCAKSGIFKTVHGDIKTPVFMNVGTAAAIKGAVSTVDLKNINTQVELSNTYHLHVRPGDKIVKEMGGLHKFMNWDRPILTDSGGFQVFSLAKLRKIKEEGVYFNSHVDGRKIFMGPEESMQIQSNLASTIAMAFDECPSSMADREYVKKSVDRTTRWLIRCKNEIERLNSLEDTINKNQMLFGINQGAIFDDIRIEHAKEISDLNLDGYAIGGLAVGESHEEMYHVIEKVVPYLPSNKPVYLMGVGTPSNILEAVERGVDFFDCVYPSRNGRHGHVYTNHGKLNLLNKKYELDQRPIEEGCGCEACTHFTRGYIRHLLKAKEMLGMRLCVLHNLYFYNNMMEEIRQAIDNNEFAAYKKRKIDGFNAGE

SEQ ID NO: 50922 - protein, 377 aa, Acetivibrio ethanolgignens
  misc_feature (1)..(377): tr|A0A0V8QEK3|A0A0V8QEK3_9FIRM Queuine tRNA-ribosyltran sferase OS=Acetivibrio ethanolgignens OX=290052 GN=tgt PE=3 SV=1
MYKLLCKDGDAKRGEFVTVHGTIQTPVFMNVGTAAAIKGAVSTMDLQQLKTQVELSNTYHLHVRPGDRVVKQLGGLHKFMVWDKPILTDSGGFQVFSLAGLRKIKEEGVYFNSHIDGRKIFMGPEESMQIQSNLASTIAMAFDECPPHPATREYMHNSVDRTTRWLRRCQIEMKRLNSLEDTINKKQMLFGINQGGTFEDIRIEHAKRISDMNLDGYALGGLAVGESHEEMYHIIEKTVPYLPLEKPTYLMGVGTPANILEAVERGVDFFDCVYPARNGRHGHAYTNHGKMNLMNARYELDDRPIEEGCQCPACRTYSRAYIRHLLKAKEMLGLRLLVMHNLYFYNTMMGEIREAIEQGRFKEYKKNKLAGFAEGDN

SEQ ID NO: 50923 - protein, 371 aa, Acetoanaerobium noterae
  misc_feature (1)..(371): tr|A0A1T5CKY3|A0A1T5CKY3_9FIRM Queuine tRNA-ribosyltran sferase OS=Acetoanaerobium noterae OX=745369 GN=tgt PE= 3 SV=1
MSAIRYELIKTCKQSGARLGKIYTPHGVIDTPIFMPVGTQATVKSMTPEELKVMDARIILSNTYHLYMRPGHELIEKAGGLHKFMNWDRAILTDSGGFQVFSLGPLRKIVEEGVHFRSHLDGSKHFISPEKAIEIQNSLGADIIMSFDECAPYPSEYNYVKKSLERTTRWAKRGKEAHKYPEKQALFGIVQGGMYKDLRTQSANELMEIDFPGYSIGGLSVGEPKPIMYDVLEHTTPLLPKDKPRYLMGVGSPDDLIEGVIRGVDMFDCVLPTRIARNGTAMTSQGKVVVRNATYQEDFTPLDPNCNCYTCKNYSRAYIRHLVKANEILASRLITNHNLHFLLNLMHEVRTAIKEDRLLDFKKDFYSKYGL

SEQ ID NO: 50924 - protein, 371 aa, Acetoanaerobium sticklandii; identical to SEQ ID NO: 50923
  misc_feature (1)..(371): tr|E3PRC8|E3PRC8_ACESD Queuine tRNA-ribosyltransferase OS=Acetoanaerobium sticklandii (strain ATCC 12662 / DSM 519 / JCM 1433 / NCIMB 10654) OX=499177 GN=tgt PE=3 SV =1

SEQ ID NO: 50925 - protein, 387 aa, Acetobacter aceti
  misc_feature (1)..(387): tr|A0A0D6MS34|A0A0D6MS34_ACEAC Queuine tRNA-ribosyltran sferase OS=Acetobacter aceti NBRC 14818 OX=887700 GN=tg t PE=3 SV=1
MSSTFRWICESTDGLARAGTLHTAHGPVQTPTFMPVGTAGTVKAMTMDAVRSTGAGIVLGNTYHLMLRPGAERVKQLGGLHKFMDWSGPILTDSGGFQVMSLGALRKLDQDGVTFQSHIDGSKHRLDPQRSTDIQHALDATITMCFDECPALPAAPEAIAASMRMSMRWAARSREAFIQREGYGQFGIVQGGTEPELRAESVKALTDIGFEGYAIGGLAVGEGQELMFSTLDVTTPLMPNDKPRYLMGVGTPDDLLGSVMRGVDMFDCVMPTRAGRTARAYTERGHINLRNARFALDARPLSPHCDCLACTRHSRAYLHHLFRADEILGPMLLTWHNLAYYQRLMRGIRAAIVDGTLSAHAEHLRAEWQAGDWSEDEVPQPLIPPVA

SEQ ID NO: 50926 - protein, 387 aa, Acetobacter aceti
  misc_feature (1)..(387): tr|A0A1U9KJD5|A0A1U9KJD5_ACEAC Queuine tRNA-ribosyltran sferase OS=Acetobacter aceti OX=435 GN=tgt PE=3 SV=1
MSSTFRWICESTDGQARAGTLHTAHGPVQTPTFMPVGTAGTVKAMTMDAVRSTGAGIVLGNTYHLMLRPGAERVKRLGGLHKFMDWSGPILTDSGGFQVMSLGALRKLDQDGVTFQSHIDGSKHRLDPQRSTDIQHALDATITMCFDECPALPAAPEAIAASMRMSMRWAARSREAFIQREGYGQFGIVQGGTEPELRAESVKALTDIGFEGYAIGGLAVGEGQELMFSTLDVTTPLMPNDKPRYLMGVGTPDDLLGSVMRGVDMFDCVMPTRAGRTARAYTERGHINLRNARFALDARPLSPHCDCLACTRHSRAYLHHLFRADEILGPMLLTWHNLAYYQRLMRGIRAAIVDGTLEAHAAHLRAEWQAGDWSEDEVPQPLIPPVA

SEQ ID NO: 50927 - protein, 386 aa, Acetobacter ascendens
  misc_feature (1)..(386): tr|A0A1D8QY69|A0A1D8QY69_9PROT Queuine tRNA-ribosyltran sferase OS=Acetobacter ascendens OX=481146 GN=tgt PE=3 SV=1
MTRFNWTCESTDGAARAGMLHTAHGPVATPTFMPVGTVGTVKAMTMDAVRSTGAGIVLGNTYHLMLRPGAERIRALGGLHKFMDWSGPILTDSGGFQVMSLGALRRLDQDGVTFRSHIDGSEHRLTPESSTDIQHALDATITMCFDECPALPAPPEAIAASMRLSMRWAARSRQAYVQREGYGQFGIVQGGTEPELRAESVKALTDIGFEGYAIGGLAVGEGQELMFATLDTTTPIMPQDKPRYLMGVGTPNDLLGSVQRGVDMFDCVMPTRAGRTARAYTERGTLNLRNARHATDARPISPHCNCLACSRHSRAYLHHLFRANEILGPMLLTWHNIAYYQRLMREIRQAIVEKRLDALAATLRAEWAAEDWTEDEMPQPTIPPVP

SEQ ID NO: 50928 - protein, 386 aa, Acetobacter ascendens
  misc_feature (1)..(386): tr|A0A1Y0UWK0|A0A1Y0UWK0_9PROT Queuine tRNA-ribosyltran sferase OS=Acetobacter ascendens OX=481146 GN=tgt PE=3 SV=1
MTRFNWTCESTDGAARAGMLHTAHGPVATPTFMPVGTVGTVKAMTMDAVRSTGAGIVLGNTYHLMLRPGAERIRALGGLHKFMDWSGPILTDSGGFQVMSLGALRRLDQDGVTFRSHIDGSEHRLTPESSTDIQHALDATITMCFDECPALPAPPEAIAASMRLSMRWAARSRQAYVQREGYGQFGIVQGGTEPELRAESVKALTDIGFEGYAIGGLAVGEGQELMFATLDTTTPIMPQDKPRYLMGVGTPDDLLGSVQRGVDMFDCVMPTRAGRTARAYTERGTLNLRNARHATDARPISPHCNCLACSRHSRAYLHHLFRANEILGPMLLTWHNIAYYQRLMREIWQAIVEKRLDALAATLRAEWAAEDWTEDEMPQPTIPPVP

SEQ ID NO: 50929 - protein, 386 aa, Acetobacter cerevisiae
  misc_feature (1)..(386): tr|A0A149UV63|A0A149UV63_9PROT Queuine tRNA-ribosyltran sferase OS=Acetobacter cerevisiae OX=178900 GN=tgt PE=3 SV=1
MSRFHWTCESTDGAARAGTLHTAHGPVATPTFMPVGTVGTVKAMTMDAVRSTGAGIVLGNTYHLMLRPGAERIRALGGLHRFMDWSGPILTDSGGFQVMSLGALRKLDQDGVTFRSHIDGSYHRLTPEISTDIQHALDATITMCFDECPALPAPPETIAASMRMSMRWAARSREAFVQRTGYGQFGIVQGGTEQDLRAESVKALTDIGFEGYAIGGLAVGEGQELMFATLDTTVPVMPQNAPRYLMGVGTPDDLLGSVQRGVDMFDCVMPTRAGRTARAYTERGTLNLRNARHATDARPISPDCDCLACSRHSRAYLHHLFRANEILGPMLLTWHNIAYYQRLMRQIREAIIEGRLDELATTLRANWAAEDWTEDEMPQPAIPPVP

SEQ ID NO: 50930 - protein, 386 aa, Acetobacter cerevisiae
  misc_feature (1)..(386): tr|A0A149QEN5|A0A149QEN5_9PROT Queuine tRNA-ribosyltran sferase OS=Acetobacter cerevisiae OX=178900 GN=tgt PE=3 SV=1
MSRFHWTCESTDGAARAGMLHTAHGPVATPTFMPVGTVGTVKAMTMDAVRSTGAGIVLGNTYHLMLRPGAERIRALGGLHRFMDWSGPILTDSGGFQVMSLGALRKLDQDGVTFRSHIDGSYHRLTPEISTDIQHALDATITMCFDECPALPAPPETIAASMRMSMRWAARSREAFVQRTGYGQFGIVQGGTEQDLRAESVKALTDIGFEGYAIGGLAVGEGQELMFATLDTTVPVMPQNAPRYLMGVGTPDDLLGSVQRGVDMFDCVMPTRAGRTARAYTERGTLNLRNARHATDARPISPDCDCLACSRHSRAYLHHLFRANEILGPMLLTWHNIAYYQRLMRQIREAIVEGRLDELATTLRANWAAEDWTEDEMPQPTIPPVP

SEQ ID NO: 50931 - protein, 386 aa, Acetobacter cibinongensis
  misc_feature (1)..(386): tr|A0A1Z5YZE0|A0A1Z5YZE0_9PROT Queuine tRNA-ribosyltran sferase OS=Acetobacter cibinongensis OX=146475 GN=tgt P E=3 SV=1
MSRFHWTCESTDGAARAGTLHTAHGPVATPTFMPVGTVGTVKAMTMDAVRSTGAGIVLGNTYHLMLRPGAERVQQLGGLHKFMDWSGPILTDSGGFQVMSLGPLRKLDQDGVTFKSHIDGSTHRLTPESSTDIQHKLDATITMCFDECPALPAPVETIAKSMRLSMKWAERSRQAFIQREGYGQFGIVQGGTEADLRAESVKALTDIGFEGYAIGGLAVGEGQELMFSTLNTTVPLMPQSAPRYLMGVGTPDDLLGSVMRGVDMFDCVMPTRAGRTARAYTERGTLNLRNARHAGDARPISPHCDCLACTRHSRAYLHHLFRANEILGPMLLTWHNIAYYQRLMRQIREAILEKRLEALALQLRAEWAAEDWSEDEMPQPVIPPVP

SEQ ID NO: 50932 - protein, 386 aa, Acetobacter cibinongensis; identical to SEQ ID NO: 50931
  misc_feature (1)..(386): tr|A0A0D6N1U7|A0A0D6N1U7_9PROT Queuine tRNA-ribosyltran sferase OS=Acetobacter cibinongensis 4H-1 OX=1231339 GN =tgt PE=3 SV=1

SEQ ID NO: 50933 - protein, 386 aa, Acetobacter fabarum
  misc_feature (1)..(386): tr|A0A269XYF0|A0A269XYF0_9PROT Queuine tRNA-ribosyltran sferase OS=Acetobacter fabarum OX=483199 GN=tgt PE=3 SV =1
MSRFHWTCESTDGAARAGMLHTAHGPVATPTFMPVGTVGTVKAMTMDAVRSTGAGIVLGNTYHLMLRPGAARVRALGGLHRFMDWSGPILTDSGGFQVMSLGALRRLDQDGVTFRSHIDGSEHRLTPESSTGIQHDLDATITMCFDECPALPAPPEAIAASMRLSMRWAARSREAYVQRTGYGQFGIVQGGTETDLRAESVKALTDIGFEGYAIGGLAVGEGQELMFATLDTTTPLMPQDKPRYLMGVGTPDDLLGSVQRGVDMFDCVMPTRAGRTARAYTERGTLNLRNARHATDARPISPHCDCLACTRHSRAYLHHLFRANEILGPMLLTWHNIAYYQRLMRQIRQAIMDKNLEATAARMRSEWAAQDWTEDEMPQPHIPPIP

SEQ ID NO: 50934 - protein, 386 aa, Acetobacter ghanensis
  misc_feature (1)..(386): tr|A0A0U5F1G8|A0A0U5F1G8_9PROT Queuine tRNA-ribosyltran sferase OS=Acetobacter ghanensis OX=431306 GN=tgt PE=3 SV=1
MSRFHWTCESTDGAARAGMLHTAHGPVATPTFMPVGTVGTVKAMTMDAVRSTGAGIVLGNTYHLMLRPGAARVRALGGLHRFMDWSGPILTDSGGFQVMSLGALRRLDQDGVTFRSHIDGSEHRLTPESSTGIQHDLDATITMCFDECPALPAPPEAIAASMRLSMRWAARSREAYVQRTGYGQFGIVQGGTETDLRTESVKALTDIGFEGYAIGGLAVGEGQELMFATLDTTTPIMPADKPRYLMGVGTPDDLLGSVQRGVDMFDCVMPTRAGRTARAYTERGTLNLRNARHATDARPISPHCDCLACSRHSRAYLHHLFRANEILGPMLLTWHNIAYYQRLMRQIRQAIMDKNLDATAATMRAEWAAQDWTEDEMPQPLIPPIP

SEQ ID NO: 50935 - protein, 386 aa, Acetobacter indonesiensis
  misc_feature (1)..(386): tr|A0A252ATE1|A0A252ATE1_9PROT Queuine tRNA-ribosyltran sferase OS=Acetobacter indonesiensis OX=104101 GN=tgt P E=3 SV=1
MTRFNWTCESTDGAARAGMLHTAHGPVATPTFMPVGTVGTVKAMTMDAVRSTGAGIVLGNTYHLMLRPGAERVRQLGGLHKFMDWSGPILTDSGGFQVMSLGALRKLDQDGVTFKSHIDGSAHRLTPESSTDIQHALDATITMCFDECPALPAAPDAIAKSMRLSMRWAARSREAFVQREGYGQFGIVQGGTESDLRAESVKALTNIGFEGYAIGGLAVGEGQELMFATLDTTVPLMPQTAPRYLMGVGTPDDLLGSVMRGVDMFDCVMPTRAGRTARAYTERGTLNLRNARHANDARPISPHCDCLACSRHSRAYLHHLFRANEILGPMLLTWHNIAYYQRLMRQIREAIVEGRLAALATHLRAEWAAEDWTEDEMPQPVIPPVA

SEQ ID NO: 50936 - protein, 386 aa, Acetobacter indonesiensis
  misc_feature (1)..(386): tr|A0A0D6N795|A0A0D6N795_9PROT Queuine tRNA-ribosyltran sferase OS=Acetobacter indonesiensis 5H-1 OX=1231340 GN =tgt PE=3 SV=1
MTRFNWTCERTDGAARAGMLHTAHGPVATPTFMPVGTVGTVKAMTMDAVRSTGAGIVLGNTYHLMLRPGAERVRQLGGLHKFMDWSGPILTDSGGFQVMSLGALRKLDQDGVTFKSHIDGSAHRLTPESSTDIQHALDATITMCFDECPALPAAPDVIAKSMRLSMRWAARSREAFVQREGYGQFGIVQGGTESDLRAESVKALTDIGFEGYAIGGLAVGEGQELMFATLDTTVPLMPQTAPRYLMGVGTPDDLLGSVMRGVDMFDCVMPTRAGRTARAYTERGTLNLRNARHANDARPISPHCDCLACSRHSRAYLHHLFRANEILGPMLLTWHNIAYYQRLMRQIREAIVEGRLAALATHLRAEWAAEDWTEDEMPQPVIPPVA

SEQ ID NO: 50937 - protein, 386 aa, Acetobacter malorum
  misc_feature (1)..(386): tr|A0A087PPV2|A0A087PPV2_9PROT Queuine tRNA-ribosyltran sferase OS=Acetobacter malorum OX=178901 GN=tgt PE=3 SV =1
MSRFHWTCESTDGAARAGMLHTAHGPVATPTFMPVGTVGTVKAMTMDAVRSTGAGIVLGNTYHLMLRPGAERIRALGGLHRFMDWSGPILTDSGGFQVMSLGALRKLDQDGVTFRSHIDGSYHRLTPESSTDIQHALDATITMCFDECPALPAPPETIAASMRMSMRWAARSREAFVQRTGYGQFGIVQGGTEQDLRAESVKALTDIGFEGYAIGGLAVGEGQELMFATLDTTVPVMPQNAPRYLMGVGTPDDLLGSVQRGVDMFDCVMPTRAGRTARAYTERGTLNLRNARHATDARPISPDCDCLACSRHSRAYLHHLFRANEILGPMLLTWHNIAYYQRLMRQIREAIIEGRLDDLATTLRANWAAEDWTEDEMPQPAIPPVP

SEQ ID NO: 50938 - protein, 386 aa, Acetobacter malorum
  misc_feature (1)..(386): tr|A0A149RTQ3|A0A149RTQ3_9PROT Queuine tRNA-ribosyltran sferase OS=Acetobacter malorum OX=178901 GN=tgt PE=3 SV =1
MSRFHWTCESTDGAARAGMLHTAHGPVATPTFMPVGTVGTVKAMTMDAVRSTGAGIVLGNTYHLMLRPGAERIRALGGLHRFMDWSGPILTDSGGFQVMSLGALRKLDQDGVTFRSHIDGSYHRLTPESSTEIQHALDATITMCFDECPALPAPPETIAASMRMSMRWAARSREAFVQRTGYGQFGIVQGGTEQDLRAESVKALTDIGFEGYAIGGLAVGEGQELMFATLDTTVPVMPQNAPRYLMGVGTPDDLLGSVQRGVDMFDCVMPTRAGRTARAYTERGTLNLRNARHATDARPISPDCDCLACSRHSRAYLHHLFRANEILGPMLLTWHNIAYYQRLMRQIREAIIEGRLDELATTLRANWAAEDWTEDEMPQPVIPPVP

SEQ ID NO: 50939 - protein, 386 aa, Acetobacter nitrogenifigens
  misc_feature (1)..(386): tr|A0A511X749|A0A511X749_9PROT Queuine tRNA-ribosyltran sferase OS=Acetobacter nitrogenifigens DSM 23921 = LMG 23498 OX=1120919 GN=tgt PE=3 SV=1
MTAFNWRCEAVDGRARAGVLETAHGPVATPTFMPVGTVGTVKAMTMDAVRSTGAGIVLGNTYHLMLRPGAERVRALGGLHRMMDWPGPILTDSGGFQVMSLGALRKLDQDGVTFQSHIDGSKHRLDPERSTAIQHALDATITMCFDECPALPAQADAIAASMRLSMRWAARSREAFVQREGYGQFGIVQGGVEPELRAESAKALCDIGFEGYAIGGLAVGEGQELMFATLDVTTPLLPGDKPRYLMGVGTPDDLLGGVERGVDMFDCVMPTRAGRTARAYTERGTLNLRNARFATDARPISPDCDCLACSRHSRAYLHHLFRADEILGPMLLTWHNLAYYQRMMRGLRTAIVAGDLAAHGAALRAAWAQGDWTEEEWPQPSIPPVS

SEQ ID NO: 50940 - protein, 388 aa, Acetobacter oeni
  misc_feature (1)..(388): tr|A0A511XMV1|A0A511XMV1_9PROT Queuine tRNA-ribosyltran sferase OS=Acetobacter oeni OX=304077 GN=tgt PE=3 SV=1
MKSDTFRWICESTDGAARAGRLQTAHGPVETPTFMPVGTAGTVKAMTMDAVRSTGAGIVLGNTYHLMLRPGAERVRALGGLHRFMDWPGPILTDSGGFQVMSLGALRKLDQDGVTFQSHIDGSKHRLDPERSTVIQHALDATITMCLDECPALPAAPEAIAASMRMSMRWAARSREAFVARPGYGQFGIVQGGTEPELRAESVKALTDIGFEGYAVGGLAVGEGQALMFSTLDVTTPLMPVDAPRYLMGVGTPDDLLGAVERGIDMFDCVMPTRAGRTARAYTERGTLNLRNARFAEDARPLSPHCDCLACSRHSRAYLHHLFRTNEILAPMLLTWHNLAYYQRLMRGIRMAIVDGTLSAHGAHLRAEWAMEDWSEDEMPQPVIPPVP

SEQ ID NO: 50941 - protein, 386 aa, Acetobacter okinawensis
  misc_feature (1)..(386): tr|A0A252BYA9|A0A252BYA9_9PROT Queuine tRNA-ribosyltran sferase OS=Acetobacter okinawensis OX=1076594 GN=tgt PE =3 SV=1
MSRFHWTCESTDGAARAGMLHTAHGPVATPTFMPVGTVGTVKAMTMDAVRSTGAGIVLGNTYHLMLRPGAARVRALGGLHRFMDWSGPILTDSGGFQVMSLGALRRLDQDGVTFRSHIDGSEHRLTPESSTGIQHDLDATITMCFDECPALPAPPEAIAASMRLSMRWAARSREAYVQRTGYGQFGIVQGGTETDLRAESVKALTDIGFEGYAIGGLAVGEGQELMFATLDSTTPIMPTDKPRYLMGVGTPDDLLGSVQRGVDMFDCVMPTRAGRTARAYTERGTLNLRNARHATDARPISPHCDCLACTRHSRAYLHHLFRANEILGPMLLTWHNIAYYQRLMRQIRQAIVDKNLDATAARMRAEWAAQDWTEDEMPQPLIPPIP

SEQ ID NO: 50942 - protein, 386 aa, Acetobacter orientalis
  misc_feature (1)..(386): tr|A0A252A353|A0A252A353_9PROT Queuine tRNA-ribosyltran sferase OS=Acetobacter orientalis OX=146474 GN=tgt PE=3 SV=1
MSRFHWTCESTDGAARAGMLHTAHGPVATPTFMPVGTVGTVKAMTMDAVRSTGAGIVLGNTYHLMLRPGAERVQQLGGLHKFMDWSGPILTDSGGFQVMSLGALRKLDQDGVTFKSHIDGSTHRLTPESSTDIQHKLDATITMCFDECPALPAAPEAIAASMRLSMRWAARSREAFIPRAGYGQFGIVQGGTETDLRAESVKALTDIGFEGYAIGGLAVGEGQELMFSTLDTTVPLMPTNAPRYLMGVGTPDDLLGSVMRGVDMFDCVMPTRAGRTARAYTERGTLNLRNARHANDARPISPHCDCLACTHHSRAYLHHLFRANEILGPMLLTWHNIAYYQRLMRQIRAAILEGQLEALATRLRAEWAAEDWTEDEMPQPHIPPVA

SEQ ID NO: 50943 - protein, 386 aa, Acetobacter orientalis
  misc_feature (1)..(386): tr|A0A252BFP9|A0A252BFP9_9PROT Queuine tRNA-ribosyltran sferase OS=Acetobacter orientalis OX=146474 GN=tgt PE=3 SV=1
MSRFHWTCESTDGAARAGMLHTAHGPVATPTFMPVGTVGTVKAMTMDAVRSTGAGIVLGNTYHLMLRPGAERVQQLGGLHKFMDWSGPILTDSGGFQVMSLGALRKLDQDGVTFKSHIDGSTHRLTPESSTDIQHKLDATITMCFDECPALPAAPEAIAASMRLSMRWATRSREAFIPRAGYGQFGIVQGGTETDLRAESVKALTDIGFEGYAIGGLAVGEGQELMFSTLDTTVPLMPTNAPRYLMGVGTPDDLLGSVMRGVDMFDCVMPTRAGRTARAYTERGTLNLRNARHANDARPISPHCDCLACTRHSRAYLHHLFRANEILGPMLLTWHNIAYYQRLMRQIRAAILEGQLEALATRLRAEWAAEDWTEDEMPQPHIPPVA

SEQ ID NO: 50944 - protein, 386 aa, Acetobacter orleanensis
  misc_feature (1)..(386): tr|A0A4Y3TR62|A0A4Y3TR62_9PROT Queuine tRNA-ribosyltran sferase OS=Acetobacter orleanensis OX=104099 GN=tgt PE= 3 SV=1
MSRFHWTCESTDGAARAGMLHTAHGPVATPTFMPVGTVGTVKAMTMDAVRSTGAGIVLGNTYHLMLRPGAERVRALGGLHRFMDWSGPILTDSGGFQVMSLGALRKLDQDGVTFRSHIDGSYHRLTPEISTDIQHALDATITMCFDECPALPAPPETIAASMRLSMRWAARSREAFVQRTGYGQFGIVQGGTEPDLRAESVKALTDIGFEGYAIGGLAVGEGQALMFGTLDTTVPAMPQNAPRYLMGVGTPDDLLGSVQRGVDMFDCVMPTRAGRTARAYTERGTLNLRNARHATDARPISPDCDCLACSRHSRAYLHHLFRANEILGPMLLTWHNIAYYQRLMRQIRAAIVEGRLDELATTLRANWAAEDWTEDEMPQPVIPPVP

SEQ ID NO: 50945 - protein, 386 aa, Acetobacter pasteurianus
  misc_feature (1)..(386): tr|A0A1A0DE03|A0A1A0DE03_ACEPA Queuine tRNA-ribosyltran sferase OS=Acetobacter pasteurianus OX=438 GN=tgt PE=3 SV=1
MTRFNWTCESTDGAARAGMLHTAHGPVATPTFMPVGTVGTVKAMTMDAVRSTGAGIVLGNTYHLMLRPGAERIRALGGLHKFMDWSGPILTDSGGFQVMSLGALRRLDQDGVTFRSHIDGSEHRLTPESSTDIQHALDATITMCFDECPALPAPPEAIAASMRLSMRWAARSRQAYVQREGYGQFGIVQGGTEPELRAESVKALTDIGFEGYAIGGLAVGEGQELMFATLDTTTPIMPQDKPRYLMGVGTPDDLLGSVQRGVDMFDCVMPTRAGRTARAYTERGTLNLRNARHATDARPISPHCDCLACSRHSRAYLHHLFRANEILGPMLLTWHNIAYYQRLMRQIRQAIVEKRLDALATTLRAEWAAEDWTEDEMPQPTIPPVP

SEQ ID NO: 50946 - protein, 386 aa, Acetobacter pasteurianus
  misc_feature (1)..(386): tr|S6DB74|S6DB74_ACEPA Queuine tRNA-ribosyltransferase OS=Acetobacter pasteurianus 386B OX=1266844 GN=tgt PE=3 SV=1
MTRFNWTCESTDGAARAGMLHTAHGPVATPTFMPVGTVGTVKAMTMDAVRSTGAGIVLGNTYHLMLRPGAERIRALGGLHKFMDWSGPILTDSGGFQVMSLGALRRLDQDGVTFRSHIDGSEHRLTPESSTDIQHALDATITMCFDECPALPAPPEAIAASMRLSMRWAARSRQAYVQREGYGQFGIVQGGTEPELRAESVKALTDIGFEGYAIGGLAVGEGQELMFATLDTTTPIMPQDKPRYLMGVGTPDDLLGSVQRGVDMFDCVMPTRAGRTARAYTERGTLNLRNARHATDARPISPYCDCLACSRHSRAYLHHLFRANEILGPMLLTWHNIAYYQRLMRQIRQAIVEKRLDALATTLRAEWAAEDWTEDEMPQPTIPPVP

SEQ ID NO: 50947 - protein, 386 aa, Acetobacter peroxydans
  misc_feature (1)..(386): tr|A0A4Y3TVK5|A0A4Y3TVK5_9PROT Queuine tRNA-ribosyltran sferase OS=Acetobacter peroxydans OX=104098 GN=tgt PE=3 SV=1
MTRFHWTCESTDGAARAGTLHTAHGPVATPTFMPVGTVGTVKAMTMDAVRSTGAGIVLGNTYHLMLRPGAERVRALGGLHRFMDWPGPILTDSGGFQVMSLGALRRLDQDGVTFRSHIDGSEHRLTPERSTAIQHALDATITMCFDECPALPAPPEAIAASMRLSMRWAARSREAYVQREGYGQFGIVQGGTEPELRAESIKALTDVGFEGYAIGGLAVGEGQALMFATLEATTPLMPQDKPRYLMGVGTPDDLLGGVMRGVDMFDCVMPTRAGRTARAYTERGTLNLRNARHAADARPISPHCDCLACTRHGRAYLHHLFRANEILGPMLLTWHNIAYYQRLMRQMREAIGTGTLQSLADILRAGWEASDWTEDEMPQPAIPLAP

SEQ ID NO: 50948 - protein, 386 aa, Acetobacter persici
  misc_feature (1)..(386): tr|A0A252ALX4|A0A252ALX4_9PROT Queuine tRNA-ribosyltran sferase OS=Acetobacter persici OX=1076596 GN=tgt PE=3 S V=1
MSRFHWTCESTDGAARAGMLHTAHGPVATPTFMPVGTVGTVKAMTMDAVRSTGAGIVLGNTYHLMLRPGAERVRALGGLHRFMDWSGPILTDSGGFQVMSLGALRKLDQDGVTFRSHIDGSYHRLTPESSTDIQHALDATISMCFDECPALPAPPETIAASMRMSMRWAARSREAFVQRTGYGQFGIVQGGTEPDLRAESVKALTDIGFEGYAIGGLAVGEGQELMFATLDTTVPAMPHTAPRYLMGVGTPDDLLGSVQRGVDMFDCVMPTRAGRTARAYTERGTLNLRNARHATDARPISPDCDCLACSRHSRAYLHHLFRANEILGPMLLTWHNIAYYQRLMRQIRAAIVEGRLDELATTLRANWAAEDWTEDEMPQPAIPPVP

SEQ ID NO: 50949 - protein, 386 aa, Acetobacter persici
  misc_feature (1)..(386): tr|A0A1U9LE23|A0A1U9LE23_9PROT Queuine tRNA-ribosyltran sferase OS=Acetobacter persici OX=1076596 GN=tgt PE=3 S V=1
MSRFHWTCESTDGAARAGMLHTAHGPVATPTFMPVGTVGTVKAMTMDAVRSTGAGIVLGNTYHLMLRPGAERVRALGGLHRFMDWSGPILTDSGGFQVMSLGALRKLDQDGVTFRSHIDGSYHRLTPESSTDIQHALDATITMCFDECPALPAPPETIAASMRMSMRWAARSREAFVQRTGYGQFGIVQGGTEPDLRAESVKALTDIGFEGYAIGGLAVGEGQELMFATLDTTVPAMPHTAPRYLMGVGTPDDLLGSVQRGVDMFDCVMPTRAGRTARAYTERGTLNLRNARHATDARPISPDCDCLACSRHSRAYLHHLFRANEILGPMLLTWHNIAYYQRLMRQIRAAIVEGRLDELATTLRANWAAEDWTEDEMPQPAIPPVP

SEQ ID NO: 50950 - protein, 386 aa, Acetobacter pomorum
  misc_feature (1)..(386): tr|A0A346DX52|A0A346DX52_9PROT Queuine tRNA-ribosyltran sferase OS=Acetobacter pomorum OX=65959 GN=tgt PE=3 SV= 1
MTRFNWTCESTDGAARAGMLHTAHGPVATPTFMPVGTVGTVKAMTMDAVRSTGAGIVLGNTYHLMLRPGAERIRALGGLHKFMDWSGPILTDSGGFQVMSLGALRRLDQDGVTFRSHIDGSEHRLTPESSTDIQHALDATITMCFDECPALPAPPEAIAASMRLSMRWAARSRQAYVQREGYGQFGIVQGGTEADLRAESVKALTDIGFEGYAIGGLAVGEGQELMFATLDTTTPIMPQDKPRYLMGVGTPDDLLGSVQRGVDMFDCVMPTRAGRTARAYTERGTLNLRNARHATDARPISPHCDCLACSRHSRAYLHHLFRANEILGPMLLTWHNIAYYQRLMRQIRQAIVEKRLDALATALRAEWAAEDWTEDEMPQPAIPTVP

SEQ ID NO: 50951 - protein, 386 aa, Acetobacter pomorum
  misc_feature (1)..(386): tr|A0A2G4RB87|A0A2G4RB87_9PROT Queuine tRNA-ribosyltran sferase OS=Acetobacter pomorum OX=65959 GN=tgt PE=3 SV= 1
MTRFNWTCESTDGAARAGMLHTAHGPVATPTFMPVGTVGTVKAMTMDAVRSTGAGIVLGNTYHLMLRPGAERIRALGGLHKFMDWPGPILTDSGGFQVMSLGALRRLDQDGVTFRSHIDGSEHRLTPESSTDIQHALDATITMCFDECPALPAPPEAIAASMRLSMRWAARSRQAYVQREGYGQFGIVQGGTEPELRAESVKALTDIGFEGYAIGGLAVGEGQELMFATLDTTTPIMPQDKPRYLMGVGTPDDLLGSVQRGVDMFDCVMPTRAGRTARAYTERGTLNLRNARHATDARPISPYCDCLACSRHSRAYLHHLFRANEILGPMLLTWHNIAYYQRLMRQIRQAIVEKRLDALATTLRAEWAAEDWTEDEMPQPSLPPVP

SEQ ID NO: 50952 - protein, 386 aa, Acetobacter senegalensis
  misc_feature (1)..(386): tr|A0A0U5EZM8|A0A0U5EZM8_9PROT Queuine tRNA-ribosyltran sferase OS=Acetobacter senegalensis OX=446692 GN=tgt PE =3 SV=1
MTRFNWTCESMDGNARAGTLHTAHGPVATPTFMPVGTVGTVKAMTMDAVRSTGAGIVLGNTYHLMLRPGAERVRQLGGLHKFMDWSGPILTDSGGFQVMSLGALRKLDQDGVTFKSHIDGSTHRLTPESSTDIQHALDATITMCFDECPALPAPPEIIAKSMRLSMRWAARSREAFVHREGYGQFGIVQGGTETDLRAESVKALTDIGFEGYAIGGLAVGEGQELMFATLDTTVPLMPQNAPRYLMGVGTPDDLLGSVMRGVDMFDCVMPTRAGRTARAYTERGTLNLRNARHAGDARPISPHCDCLACSRHSRAYLHHLFRANEILGPMLLTWHNIAYYQRLMRQIRQAILEGRLETLATQLRAEWAAEDWTEDEMPQPVIPPVP

SEQ ID NO: 50953 - protein, 386 aa, Acetobacter senegalensis
  misc_feature (1)..(386): tr|A0A149TVX8|A0A149TVX8_9PROT Queuine tRNA-ribosyltran sferase OS=Acetobacter senegalensis OX=446692 GN=tgt PE =3 SV=1
MTRFNWTCESTDGNARAGTLHTAHGPVATPTFMPVGTVGTVKAMTMDAVRSTGAGIVLGNTYHLMLRPGAERVRQLGGLHKFMDWSGPILTDSGGFQVMSLGALRKLDQDGVTFKSHIDGSTHRLTPESSTDIQHALDATITMCFDECPALPAPPEIIAKSMRLSMRWAARSREAFVHREGYGQFGIVQGGTETDLRAESVKALTDIGFEGYAIGGLAVGEGQELMFATLDTTVPLMPQNAPRYLMGVGTPDDLLGSVMRGVDMFDCVMPTRAGRTARAYTERGTLNLRNARHAGDARPISPHCDCLACSRHSRAYLHHLFRANEILGPMLLTWHNIAYYQRLMRQIRQAILEGRLETLATQLRAEWAAEDWTEDEMPQPVIPPVP

SEQ ID NO: 50954 - protein, 386 aa, Acetobacter sp.
  misc_feature (1)..(386): tr|A0A252BSU1|A0A252BSU1_9PROT Queuine tRNA-ribosyltran sferase OS=Acetobacter sp. DsW_063 OX=1514894 GN=tgt PE =3 SV=1
MTAFNWRCEAVDGRARAGVLETAHGPVATPTFMPVGTVGTVKAMTMDAVRSTGAGIVLGNTYHLMLRPGAERVRALGGLHRMMDWPGPILTDSGGFQVMSLGALRKLDQDGVTFQSHIDGSKHRLDPERSTAIQYVLDATITMCFDECPALPAEAEAIAASMRLSMRWAARSREAFVQREGYGQFGIVQGGVEPELRAESAKALCDIGFEGYAIGGLAVGEGQELMFATLDVTTPLLPGDKPRYLMGVGTPDDLLGGVERGVDMFDCVMPTRAGRTARAYNERGTLNLRNARFATDARPISPDCDCLACSRHSRAYLHHLFRADEILGPMLLTWHNLAYYQRMMRGLRAAIIAGDLAAHGAALRAAWAQGDWTEDEWPQPSIPPVP

SEQ ID NO: 50955 - protein, 386 aa, Acetobacter sp.
  misc_feature (1)..(386): tr|A0A5C1YQI7|A0A5C1YQI7_9PROT Queuine tRNA-ribosyltran sferase OS=Acetobacter sp. KACC 21233 OX=2592655 GN=tgt PE=3 SV=1
MTRFHWTCESTDGAARAGTLHTAHGPVQTPTFMPVGTVGTVKAMTMDAVRSTGAGIVLGNTYHLMLRPGAERVRALGGLHRFMDWSGPILTDSGGFQVMSLGALRKLDQDGVTFRSHIDGSEHRLTPESSTDIQHALDATITMCFDECPALPAPPEAIAASMRLSMRWAARSREAYVQREGYGQFGIVQGGTEADLRAESVAALTNIGFEGYAIGGLAVGEGQELMFATLDTTTPLMPQDKPRYLMGVGTPDDLLGSVMRGVDMFDCVMPTRAGRTARAYTERGTLNLRNARHATDSRPISPHCDCLACTRHSRAYLHHLFRSNEILGPMLLTWHNLAYYQRLMRQIRQAIVQGQLNTLAQTLRAGWQAEDWTEDEMPQPAIPPVP

SEQ ID NO: 50956 - protein, 386 aa, Acetobacter syzygii
  misc_feature (1)..(386): tr|A0A270BW59|A0A270BW59_9PROT Queuine tRNA-ribosyltran sferase OS=Acetobacter syzygii OX=146476 GN=tgt PE=3 SV =1
MSRFHWTCESTDGAARAGMLHTAHGPVATPTFMPVGTVGTVKAMTMDAVRSTGAGIVLGNTYHLMLRPGAARVKALGGLHRFMDWSGPILTDSGGFQVMSLGALRRLDQDGVTFRSHIDGSEHRLTPESSTAIQHDLDATITMCFDECPALPAPPEAIAASMRLSMRWAARSREAYVPRAGYGQFGIVQGGTEADLRAESVKALTDIGFEGYAIGGLAVGEGQALMFATLDTTTPIMPQDKPRYLMGVGTPDDLLGSVQRGVDMFDCVMPTRAGRTARAYTERGTLNLRNARHATDARPISPHCDCLACTRHSRAYLHHLFRANEILGPMLLTWHNIAYYQRLMRQIRQAIMDRNLNDTAAAMRAEWAAQDWTEDEMPQPFIPPVP

SEQ ID NO: 50957 - protein, 386 aa, Acetobacter tropicalis; identical to SEQ ID NO: 50953
  misc_feature (1)..(386): tr|A0A291PDJ3|A0A291PDJ3_9PROT Queuine tRNA-ribosyltran sferase OS=Acetobacter tropicalis OX=104102 GN=tgt PE=3 SV=1

SEQ ID NO: 50958 - protein, 386 aa, Acetobacter tropicalis
  misc_feature (1)..(386): tr|A0A0C9LH97|A0A0C9LH97_9PROT Queuine tRNA-ribosyltran sferase OS=Acetobacter tropicalis OX=104102 GN=tgt PE=3 SV=1
MTRFNWTCESTDGNARAGTLHTAHGPVATPTFMPVGTVGTVKAMTMDAVRSTGAGIVLGNTYHLMLRPGAERVRQLGGLHKFMDWSGPILTDSGGFQVMSLGALRKLDQDGVTFKSHIDGSTHRLTPESSTDIQHALDATITMCFDECPALPAPPEIIAKSMRLSMRWAARSREAFVHREGYGQFGIVQGGTETNLRAESVKALTDIGFEGYAIGGLAVGEGQELMFATLDTTVPLMPQNAPHYLMGVGTPDDLLGSVMRGVDMFDCVMPTRAGRTARAYTERGTLNLRNARHAGDARPISPHCDCLACSRHSRAYLHHLFRANEILGPMLLTWHNIAYYQRLMRQIRQAILEGRLETLATQLRAEWAAEDWTEDEMPQPVIPSVS

SEQ ID NO: 50959 - protein, 394 aa, Acetobacteraceae bacterium
  misc_feature (1)..(394): tr|A0A327M9D5|A0A327M9D5_9PROT Queuine tRNA-ribosyltran sferase OS=Acetobacteraceae bacterium DB1506 OX=2230885 GN=tgt PE=3 SV=1
MTLSWTCAATDGAARRGVLRTAHGAVETPVFMPVGTAGTVKAMTADAVRATGARMVLGNTYHLMLRPGAERVARLGGLHRMMDWQGPILTDSGGFQVMSLAALREMDEQGVTFRSHLDGSRHRLTPERSVEIQRLLGADVTMCLDECTPFPASEAVAAESMRRSMRWAARCREAFVPRPGHGLFGIVQGSTYPALRAESVAALAATGFEGYAVGGLAVGEGQPAMFAVLDCTLPLLPASAPRYLMGVGTPSDILGAVRRGIDMFDCVIPTRSGRTGRAYTSRGVLNLRNAKHAEDPRPLDPACPCPACTRHSRAYLHHLIKAAEMLGPMLLTWHNIQYYQDLTRGLREAISAGRLAAHCAAVEAGWAAGDALPEDNIGDDPAAAALAEDRETPA

SEQ ID NO: 50960 - protein, 404 aa, Acetobacteraceae bacterium
  misc_feature (1)..(404): tr|A0A4P7WAH8|A0A4P7WAH8_9PROT Queuine tRNA-ribosyltran sferase OS=Acetobacteraceae bacterium OX=1909293 GN=tgt PE=3 SV=1
MTLKNNTPPWPDFTPCDKFQWVSEKQDGKARAGWLHTAHGKVPTPIFMPVGTCATVKGMTPAMLRSTGAGIILGNVYHLMLRPTPERVQKLGGLHQMMNWAGPILTDSGGFQVMSLGKLAKVKEEGVTFQSHIDGSRHFLSPERSTDIQFMLDADISMVLDECPALPATKARLESSMECSLRWAQRSRDAFKKRPGYGQFGIVQGGTEKDLRERSAEGLKKIGFEGYAVGGLAVGEPQELMFSTLDYTLPFLPTEAPRYLMGVGTPQDMLGAIERGIDMFDCVMPSRAGRTARAYTERGYINLRNARFAEDPRPLTPYEEGPLKNVSRAYLHHLFKCQEMLGAMFLTLHNLAYYQRLMQQIRRAIISQNLAETASYLREEWLKGDWEMSEWNTPVPPPIDPMPL

SEQ ID NO: 50961 - protein, 373 aa, Acetobacterium bakii
  misc_feature (1)..(373): tr|A0A0L6U710|A0A0L6U710_9FIRM Queuine tRNA-ribosyltran sferase OS=Acetobacterium bakii OX=52689 GN=tgt PE=3 SV =1
MSEFRYELIKECKDTGARLGKIHTKRGVINTPIFMPVGTQATVKSLTSEDLVAMDANIILGNTYHLYLRPGQEIMEKAGGLHKFMNWDRPILTDSGGFQVFSLNDLRKITEAGVEFISHIDGSKHFMTPEKAIDMQNSIGADIIMCFDECAPAGADYDYTKKSLEMTTRWAKRCKDAHKRPEDQALFGIVQGGMYEDLRAQSVKELTEIDFPGYSIGGLSVGEPKDVMYRMLDVTVPLLPKDKPRYLMGVGSLDALFEGVIRGVDMFDCVLQSRIARNGTAFTSHGKVVIRNATYKEDFTPVDSECDCFVCRNYTRAYIRHLIKCNEILGARLLTYHNLYFTLVTMKRIREAIMNDNLLAYKESFFEKYGIAK

SEQ ID NO: 50962 - protein, 246 aa, Acetobacterium sp.
  misc_feature (1)..(246): tr|A0A351HYD8|A0A351HYD8_9FIRM Queuine tRNA-ribosyltran sferase (Fragment) OS=Acetobacterium sp. OX=1872094 GN= tgt PE=3 SV=1
TPEKAIDMQNSIGADIIMCFDECAPAGADYEYTKKSMEMTTRWARRCKEAHKRPEDQALFGIVQGGMFADLRAQSVEQLTDIGFPGYSIGGLSVGEPKDVMYKMLDATTPLLPKDKPRYLMGVGSLDALFEGTIRGIDMFDCVLQSRIARNGTAFTSHGKVVVRNATYKEDFTPVDPECDCFVCRNYTRAYIRHLIKTNEILGARLLTYHNLYFTLVTMKKIRQAIMDDNLLAYKEAFFEKFGITE

SEQ ID NO: 50963 - protein, 373 aa, Acetobacterium sp.
  misc_feature (1)..(373): tr|A0A231NUN2|A0A231NUN2_9FIRM Queuine tRNA-ribosyltran sferase OS=Acetobacterium sp. MES1 OX=1899015 GN=tgt PE =3 SV=1
MSEFRYELIKECKDTGARLGKIHTKRGVINTPIFMPVGTQATVKSLSSEDLVEMDANIILGNTYHLYLRPGQEIMDKAGGIHKFMNWNRPVLTDSGGFQVFSLNDLRKITEDGVEFISHLDGSRHFMTPEKAIDMQNSIGADIIMCFDECAPAGADYEYTKKSMEMTTRWARRCKEAHKRPEDQALFGIVQGGMFADLRAQSVEQLTDIGFPGYSIGGLSVGEPKDVMYKMLDATTPLLPKDKPRYLMGVGSLDALFEGTIRGIDMFDCVLQSRIARNGTAFTSHGKVVVRNATYKEDFTPVDPECDCFVCRNYTRAYIRHLIKTNEILGARLLTYHNLYFTLVTMKKIRQAIMDDNLLAYKEAFFEKFGITE

SEQ ID NO: 50964 - protein, 373 aa, Acetobacterium wieringae; identical to SEQ ID NO: 50963
  misc_feature (1)..(373): tr|A0A1F2PKJ0|A0A1F2PKJ0_9FIRM Queuine tRNA-ribosyltran sferase OS=Acetobacterium wieringae OX=52694 GN=tgt PE= 3 SV=1

SEQ ID NO: 50965 - protein, 373 aa, Acetobacterium woodii
  misc_feature (1)..(373): tr|H6LEI4|H6LEI4_ACEWD Queuine tRNA-ribosyltransferase OS=Acetobacterium woodii (strain ATCC 29683 / DSM 1030 / JCM 2381 / KCTC 1655 / WB1) OX=931626 GN=tgt PE=3 SV= 1
MSEFRYELIKECKDTGARLGKIHTARGIINTPIFMPVGTQATVKSLSSEDLVEMDANIILGNTYHLYLRPGQEIMEKAGGIHQFMNWKRPVLTDSGGFQVFSLNDLRKITEEGVEFISHLDGSRHFMTPEKAIDMQNSIGADIIMCFDECAPAGADYEYTKKSMEMTTRWAKRCKEAHKRPEDQALFGIVQGGMFEDLRAQSVKELTEIDFPGYSIGGLSVGEPKDVMYRMLDATVPLLPKDKPRYLMGVGSLDALFEGTIRGIDMFDCVLQSRIARNGTAFTSHGKVVVRNATYKEDFSPVDPECDCFVCRNYTRAYIRHLIKTNEILGARLLTYHNLYFTLVTMKKIRQAIMDDNLLAYKEAFFKKFGIAE

SEQ ID NO: 50966 - protein, 376 aa, Acetobacteroides hydrogenigenes
  misc_feature (1)..(376): tr|A0A4V2RQV4|A0A4V2RQV4_9BACT Queuine tRNA-ribosyltran sferase OS=Acetobacteroides hydrogenigenes OX=979970 GN =tgt PE=3 SV=1
MKFDLTATDLHSKARAGVITTDHGQIHTPIFMPVGTVATVKGVFHRDLKDEIKAEIILGNTYHLYLRPGLDVLKAAGGLHKFSAWDRPILTDSGGYQVFSLAENRKLTNEGCTFRSHIDGSKHMFTPENVMDIQRVIGADIIMAFDECPPGTATYEYAKKSLDLTQGWLGRCIKRFDETEGLYGYSQTLFPIVQGCVYPDLRRKAAEHAAALDREGYAIGGLAVGEPAEKMYEMIEVVNEILPSTKPRYLMGVGTPVNILEGISRGVDMFDCVMPTRNGRNGMLFTSEGIINIRNLKWRDDFSPIDPNGSAFVDTTYTKAYLRHLFISDEMLGAQIASMHNLAFYLWLVRESRAHILAGDFAQWKEMMVPKLSVRL

SEQ ID NO: 50967 - protein, 371 aa, Acetohalobium arabaticum
  misc_feature (1)..(371): tr|D9QVI7|D9QVI7_ACEAZ Queuine tRNA-ribosyltransferase OS=Acetohalobium arabaticum (strain ATCC 49924 / DSM 55 01 / Z-7288) OX=574087 GN=tgt PE=3 SV=1
MTFEYTLQKESTDTKARCGEFTTPHGKIETPVFMPVGTKATVKTMSPEELEEIDTQIILGNTYHLYLRPGHDLIEEAGGLHEFMNWNGPILTDSGGFQVFSLADRREISEEGVEFQSHLDGSKEFISPEKSIEIQMGLGADIIMAFDECPAHSAEKEYIKESLELTTRWAKRCQQAHTRDDQALFGIIQGGMHRDLREQSAEEITALDFPGYAIGGLSVGESKELMHEVLDYAPDLLPADKPRYLMGVGTPQDLFEGVMRGIDMFDCVFPTRIARNGAVFTSQGRITIRNATYKRQFTSLDPECDCYVCQNYTRAYIRHLIKRNEILGLRLTTYHNLYFLNDLMAKMRQAIFAEELFEFRENFYRKYGLEL

SEQ ID NO: 50968 - protein, 376 aa, Acetomicrobium hydrogeniformans
  misc_feature (1)..(376): tr|A0A0T5XBT7|A0A0T5XBT7_9BACT Queuine tRNA-ribosyltran sferase OS=Acetomicrobium hydrogeniformans ATCC BAA-185 0 OX=592015 GN=tgt PE=3 SV=1
MGRDKLFSYEIIAECPHTGARAGKFYTTHGVIEMPCFMPVGTQATVKAMAPFELEALGARIILGNAYHLYLRPGVDVIEKAGGLHAFMGWDRAILTDSGGFQVFSLASLRRVSDEGVEFQSHLDGSKHFLTPALVMAIEEAIGSDIAMCFDECTTYPITEEGAKEATLRTIKWAGLCKKAHSRRDQALFGIVQGSVFLSLREYCCHALVDMDFPGYAIGGLAVGEPKALMHEVLELLNKFLPKTKPRYLMGVGHPLDMVEGIARGVDMFDCVLPTRNARNGSVLTSMGKLNVRKKELKEDFSPLDPNCSCYVCRNFSRAYIRHLHKAGEILASRLCTWHNLHFMLDLARKARRAIIDGTFPDLLEHCREVFGDEAD

SEQ ID NO: 50969 - protein, 374 aa, Acetomicrobium mobile
  misc_feature (1)..(374): tr|I4BV11|I4BV11_ACEMN Queuine tRNA-ribosyltransferase OS=Acetomicrobium mobile (strain ATCC BAA-54 / DSM 1318 1 / JCM 12221 / NGA) OX=891968 GN=tgt PE=3 SV=1
MKDFFNYEVIAECPHTRARVARMSTPHGIIETPCFMPVGTQATVKAMAPFELEMLGARIILSNAYHLYLRPGVDIIEKAGGLHGFMGWDRAILTDSGGFQVFSLASLRNVSDDGVEFQSHLDGSRHFLTPASVMAVEESLGSDIAMCFDECTSYPISEEDARRATLRTIRWAMLCKQSHSRPDQALFGIIQGSVFPELRRLCGEALVDMDFPGYGIGGLAVGEPKRMMYDVLELMDQLLPRSKPRYLMGVGHPLDMVEAIALGVDMFDCVLPTRNARNGSVLTSRGMLNVRRQELKDDLSPLDPKCNCYVCKNFSRAYIRHLHKAGEILASRLCTWHNLHFMLELAREARRTIVDGSFPRLLEYCRKVFGDETD

SEQ ID NO: 50970 - protein, 376 aa, Acetomicrobium thermoterrenum
  misc_feature (1)..(376): tr|A0A1H3DDL8|A0A1H3DDL8_9BACT Queuine tRNA-ribosyltran sferase OS=Acetomicrobium thermoterrenum DSM 13490 OX=1 120987 GN=tgt PE=3 SV=1
MGRDKLFSYEIIAECPHTGARAGKFYTTHGVIEMPCFMPVGTQATVKAMAPFELEALGARIILGNAYHLYLRPGVDVIEKAGGLHAFMGWDRAILTDSGGFQVFSLASLRRVSDEGVEFQSHLDGSKHFLTPALVMAIEEAIGSDIAMCFDECTTYPITEEGAKEATLRTIKWAGLCKKAHSRRDQALFGIVQGSVFLSLREYCCHALVDMDFPGYAIGGLAVGEPKALMHEVLELLNKFLPKTKPRYLMGVGHPLDMVEGIARGVDMFDCVLPTRNARNGSVLTSMGKLNVRRKELKEDFSPLDPNCSCYVCRNFSRAYIRHLHKAGEILASRLCTWHNLHFMLDLARKARRAIIDGTFPDLLEHCREVFGDEAD

SEQ ID NO: 50971 - protein, 421 aa, Acetonema longum
  misc_feature (1)..(421): tr|F7NND1|F7NND1_9FIRM Queuine tRNA-ribosyltransferase (Fragment) OS=Acetonema longum DSM 6540 OX=1009370 GN=A LO_18105 PE=3 SV=1
SGLSALMFYLWFDIICISYASYQTKRVGQDVLHFTNPRCFASLWEAVFLAAIQYELIKQCSHTGARAGRLHTPHGTFDTPIFMPVGTQGTVKAMSPHELKEMGAGIILGNTYHLFLRPGHDLVAEAGGLHSFINWDRGILTDSGGFQVFSLGDLRKITEEGVAFRSHLDGSKQFLSPEKSMEVQMALGSDIVMAFDECVPYPAEYDYAKQSTERTTRWAERCREAFCGGNRQGLFGIVQGGMYKDLRSQSVRELVSLDFPGYAVGGLSVGESKPLMYEMLEHTVPQLPSGKPRYLMGVGTPDCLVEGVLYGIDMFDCVFPTRVARNGTVMTHTGRLVVKNAEFARDFRPIDEHCGCYTCRNFTRAYIRHLFKAEEILGLRLTTIHNLYFLLQFMRDMRQAILEDRFVAFRDNFRAGYELAR

SEQ ID NO: 50972 - protein, 438 aa, Acetothermus autotrophicum
  misc_feature (1)..(438): tr|H5SRG2|H5SRG2_ACEAU Queuine tRNA-ribosyltransferase OS=Acetothermus autotrophicum OX=1446466 GN=tgt PE=3 SV =1
MPRPLYFAALHSDPHLRARCGVLQTPHGAIQTPSFVAVGTQATVKAVGPDDLKKIGIQVLIANTYHLHLRPGEDVIAQLGGLHRFMGWDGPIMTDSGGFQAFSLGAAIEHGVGKIASIFPDEIEAAARGGHLSKARHGQSLVKITEEGIEFRSHLDGSPQKFTPENTIEIQKKLGADMIFVLDECTSPLHDYEYTKRAMERTHRWAVRALEYFRNNLTSWPPSRHGKGELPSPLRGGDGGEVWSGRQALFGIVQGGAYRDLREQSAKFISALDFDGIGIGGSVGRSKDDLYKVLDWTIPLLPEEKPRHLLGIGEIEDIFHAVARGVDLFDCVAPTRMARNGALWVKDSENFRINITNAIYKTDPRPIAEGCACYTCQNFSRAYLHHLFLAKEILAMRLATIHNLYFLESLMRQIRQAIRDHALIELAASWGIDLGNLT

SEQ ID NO: 50973 - protein, 369 aa, Acholeplasma axanthum
  misc_feature (1)..(369): tr|A0A449BEU8|A0A449BEU8_ACHAX Queuine tRNA-ribosyltran sferase OS=Acholeplasma axanthum OX=29552 GN=tgt PE=3 S V=1
MSIKFEVLHVCKQSGARLGKLTTPHGVFETPFFMPVGTQATVKTLTVDEVKEVSEGLILGNTYHLWLQPGNEIVRKHGGIRGFMKWDGALLTDSGGFQVFSLSSLRKITEEGVHFRHHKNGAKLFMSPEDSIKVQEDLAADIIMSFDECPPPYETYEYMKDSIERTIRWAKRGKDALTTDQALFGIVQGGLNKELRQHCAEELIKLDFPGYSIGGLSVGETKEEMYEITKFLNPILPFDKPRYLMGVGAPEDLIMNVINGVDMFDCVLPSRNARHGSIFTTEGKVNIKNKKYEDDMEPIDKGLNTPVNNYTKSYLRHLFKAEEYLGMRLMTYQNLAYLKHLMGEIRNAIKEDRLLDYLEEMKEKTNYFK

SEQ ID NO: 50974 - protein, 369 aa, Acholeplasma brassicae
  misc_feature (1)..(369): tr|U4KSZ2|U4KSZ2_9MOLU Queuine tRNA-ribosyltransferase OS=Acholeplasma brassicae OX=61635 GN=tgt PE=3 SV=1
MAIRYELLHTCKQSGARYGLLHTPHGTFETPIFMPVGTQATVKTLTPEEIKEVSDGLILGNTYHLWLQPGDDIIKAHGGIRGFMKWDGALLTDSGGFQVFSLNSIRKIKEEGVYFRHHKNGDMLFLSPEKAIEIQENLGADIIMSFDECPPHDATYDYMKDSIERTLRWAKRGKDAHKTDQALFGIIQGGLDDELRLYSAKKTIELDFPGYSIGGLSVGESKEEMYRILDLLKPVMPTDKPRYLMGVGSPDDLVEGVIRGVDMFDCVLPTRNARHGTAFTTEGKIQIRNKRFEMDFSPLDPGLITPISKYSKSYVRHLFKAEEILGMRIMTYQNLAFLKHLMSEIRQAIKEDRLLDFKEEFFKKYGYSK

SEQ ID NO: 50975 - protein, 371 aa, Acholeplasma hippikon
  misc_feature (1)..(371): tr|A0A449BIX3|A0A449BIX3_9MOLU Queuine tRNA-ribosyltran sferase OS=Acholeplasma hippikon OX=264636 GN=tgt PE=3 SV=1
MIKYEVLHICKQSGARLGRLTTPHGVFETPLFMPVGTLATVKTLTPEEIREVSEGLILGNTYHLWQQPGNDIVKAHGGIRGFMKWDGALLTDSGGFQVFSLAKLRDIKEEGVTFKHHKSGAPLFLSPEIAIKIQEDLGADIIMSFDECPPPYESYEYQKKSVERTIRWAKRGKEALTTDQALFGIVQGGLNKDLREFCAKELAKLDFPGYSIGGLSVGETKAEMYEMTKFLNPILPFDKPRYLMGVGAPEDLLENVINGVDMFDCVLPTRNARHGTAFTTYGKVQVKAQKFERDMNPLDPGLETSISKYSKSYIRHLFKAEEILGQRMLTIQNLAYLKYLMSEIRQAIKEDRLLDFKKEFYAKTNYPEVKY

SEQ ID NO: 50976 - protein, 377 aa, Acholeplasma laidlawii
  misc_feature (1)..(377): tr|A9NG43|A9NG43_ACHLI Queuine tRNA-ribosyltransferase OS=Acholeplasma laidlawii (strain PG-8A) OX=441768 GN=t gt PE=3 SV=1
MEGGFILISYEVLHVCKQSGARLGKLTTSHGVFETPIFMPVGTLATVKTLTVEEIKEVSEGLILANTYHLWQQPGEDIVKDHGGIRGFMKWDGALLTDSGGFQVFSLAKLRDIKEEGVHFKHHKSGAPLFLGPEDAIRIQEDLGADIIMSFDECPPPYESYEYMKDSVERTIRWAKRGKEALKTDQALFGIVQGGLNKELRTHCAEELIKLDFPGYSIGGLSVGETKAEMYEMTRHLNPILPFNKPRYLMGVGAPEDLLENVINGVDMFDCVLPTRNARHGTALTTTGKVTIKNKQFERDMSSLDPNLQSSVSKYSKSYIRHLFKAEEQLGQRLVTIQNLAYLKHLMAEIRQAIKEDRLLDFKKEFYERTNYPKVSY

SEQ ID NO: 50977 - protein, 377 aa, Acholeplasma laidlawii; identical to SEQ ID NO: 50976
  misc_feature (1)..(377): tr|A0A553II18|A0A553II18_ACHLA Queuine tRNA-ribosyltran sferase OS=Acholeplasma laidlawii OX=2148 GN=tgt PE=3 S V=1

SEQ ID NO: 50978 - protein, 371 aa, Acholeplasma oculi
  misc_feature (1)..(371): tr|A0A061AAI3|A0A061AAI3_9MOLU Queuine tRNA-ribosyltran sferase OS=Acholeplasma oculi OX=35623 GN=tgt PE=3 SV=1
MIQYELLHICKQSGARLGRLTTPHGVFETPIFMPVGTLATVKTLSPSEIREVSEGLILSNTYHLWQQPGNDIVKKHGGIRGFMNWDGALLTDSGGFQVFSLSKIRDIKEEGVHFKHHKSGAPLFLSPEDAIKIQEDLGADIIMSFDECPPPYETDAYMKDSVERTIRWAKRGKDALTTDQALFGIVQGGLNQDLRKYCAEELIKLDFPGYSIGGLSVGETKKEMYEMTRFLNPIMPQNKPRYLMGVGSPEDLLENVINGIDMFDCVLPTRNARHGTALTTVGKITIKNKKFESDMSPLDPNLSTSISPYTKSYIRHLFKAEESFGQRILSIQNLAYLKHLMKEIRQAIKEDRLLDFKKEFYEKTNYEQVRY

SEQ ID NO: 50979 - protein, 371 aa, Acholeplasma palmae
  misc_feature (1)..(371): tr|U4KRU2|U4KRU2_ACHPJ Queuine tRNA-ribosyltransferase OS=Acholeplasma palmae (strain ATCC 49389 / J233) OX=13 18466 GN=tgt PE=3 SV=1
MSIKFEITHICKQSGARLGKLTTPHGVFETPIFMPVGTLATVKTLTPEEIKEVSEGLILGNTYHLWQQPGEQLVKKHGGIRGFMNWDGALLTDSGGFQVFSLAKMRDIKEEGVYFKHHKSGAPLFLSPEKAIEIQEALGADIIMSFDECPPPYETTDYMKKSVERTLRWAKRGKDALTTDQALFGIVQGGLDKEIRKYCAEKLAEMDFPGYSIGGLSVGETKEEMYEMTEYLNDIIPKNKPRYLMGVGAPEDLVENVINGVDMFDCVLPTRIARHGTALTTEGKVVIKNNIYAEDFSSIDPNLKTPVSKYTKSYLRHLFKANEILGMRLISYQNLAYLKHLMAEIRQAIKEDRLLDFKEEFYKKTNYPKVR

SEQ ID NO: 50980 - protein, 367 aa, Acholeplasma sp.
  misc_feature (1)..(367): tr|R5HC32|R5HC32_9MOLU Queuine tRNA-ribosyltransferase OS=Acholeplasma sp. CAG:878 OX=1262686 GN=tgt PE=3 SV=1
MKIKYELLKNDNKARHGKLYTNYGVFETPMFMPVGTLANVKTLTPEELKAMNSAVILSNTYHLWLRPGADVIEKAGGLHKFMNYDGPILTDSGGFQVFSLAKPKDITEEGVKFKSHIDGSNLFLTPEISIQVQNKLDSDIAMSFDECIPYPATYEYAKKSTERTLRWAKRGKEVFNNPRQSLFGIVQGGEYQDLREYSAKETVKIGFDGYSIGGTSVGEDKTTMYKMIEDGIRYIPLDKPRYLMGVGDPIDIIEGVIRGIDMFDCVLPTRIARHGNAFTRHGKINLKNAKYKEDFTPIEDCDCYTCKNYTKAYIRHLITCNETLGGRLLSIHNIRFLIRLVEELRVAIDENRVLEYREEFIKNYTNK

SEQ ID NO: 50981 - protein, 372 aa, Acholeplasmataceae bacterium
  misc_feature (1)..(372): tr|A0A350R8M2|A0A350R8M2_9MOLU Queuine tRNA-ribosyltran sferase OS=Acholeplasmataceae bacterium OX=1898209 GN=t gt PE=3 SV=1
MMSIKFEVLHVCKQSGARLGRLTTPHGVFETPFFMPVGTQATVKTLTPEEIKEVSEGLILGNTYHLWLQPGADIVADHGGIRGFMKWDGALLTDSGGFQVFSLTDMRKITEEGVHFKHHKNGSSLFMSPEDSIKVQEKLGADIIMSFDECPPPYATYEYMKDSVERTLRWAKRGKEALSTDQALFGIVQGGLNKELRQYSAEELIKMDFPGYSIGGLSVGETKHEMYEMTKFLNPILPFDKPRYLMGVGAPDDLVENVINGVDMFDCVLPTRIARHGTALTTEGKIVIKNQTYEKDMRPLDPLLYTHVSKYTRSYIRHLFKGEEILGMRLVTYQNLAYLKHLMQEIRQAIKEDRLLDFKEEMKKKTNYFKSR

SEQ ID NO: 50982 - protein, 399 aa, Acholeplasmatales bacterium
  misc_feature (1)..(399): tr|A0A3D4MKZ6|A0A3D4MKZ6_9MOLU Queuine tRNA-ribosyltran sferase OS=Acholeplasmatales bacterium OX=2053494 GN=tg t PE=3 SV=1
MSAISYELKHVCKQTGARYGILHTPHGDFETPIFMPVGTKATVKTLTPEEIEQVSDGLILGNTYHLWLQPGDELIKQAGGIRGFMKWDHALLTDSGGFQVFSLAKIRKITEEGVNFRHHKSGAPLFMSPEISIGIQNNLGADIIMSFDECPPFHASREYMANSVERTLRWAKRGYDAHKCKDSQALFGIVQGGPFLDIRKHCLEELENLDFPGYSIGGLAVGESKKEMYDVLNFMKDILPANKPRYLMGVGSPDDLVVGSMMGVDMFDCVAATRIARHGTALTHKGKLLLKNKAHYASFIPLDEKCDCYVCKKYTRSYIHHLIKAEEILGMRLLSYHNLYFLKSLMADIRQAIKEDRLKDFQEEFFKEFGYAHLEDIMSGKVNEGTMKLKDQIKITGEE

SEQ ID NO: 50983 - protein, 370 aa, Acholeplasmatales bacterium
  misc_feature (1)..(370): tr|A0A348NIM2|A0A348NIM2_9MOLU Queuine tRNA-ribosyltran sferase OS=Acholeplasmatales bacterium OX=2053494 GN=tg t PE=3 SV=1
MPFSFDVLRASRETKARIGVLHTAHGDFETPIFMPVGTQATVKTLDPRETMEVSDGLILGNTYHLWLQPGEAIVKAHGGIRGFMNWPGGLLTDSGGYQVFSLSKIRKIKEEGVEFRHHLSGEKLFMTPEDSIRVQNDLGADIIMSFDECPPFDATYDYMKKSVERTIRWAARGKAAHARQDEQALFGIVQGGPHRDLRESCAAELQKIGFPGYAIGGLAIGESKDEMYAVLAYMDDILPKDKPRYLMGVGSPDDLILGAMNGVDMFDCVLPTRIARHGTAMTSEGKVVIKNKEYETDMGPLDPDCDCHVCKTYTRSYLRHLFKADEILGLRLITYHNLAFLKKLMHAIRTAIKEDRLVAFKDAFFARYYH

SEQ ID NO: 50984 - protein, 366 aa, Achromatium sp.
  misc_feature (1)..(366): tr|A0A0M1JK71|A0A0M1JK71_9GAMM Queuine tRNA-ribosyltran sferase OS=Achromatium sp. WMS3 OX=1604836 GN=tgt PE=3 SV=1
MTAQDGNARRANLILPKGVIETPAFMPIGTYGAVKGLTSEELELSGAQIILSNTFHLYLRPGMEVIKKFQGLHNFMNWQHPILTDSGGFQVYSLGRLRKITEQGVWFQSPIDGQRIFMGPEESIAIQRDLGSNIVMIFDECTPYPANFETTRQSMELSLRWAKRSHEAHINNTASLFGIVQGGMFPTLRKQSLAGLQDIGFDGYAIGGLSVGESATERLKILDALVTELPWDKPRYLMGVGTPDDLVEAVKRGIDMFDCVLPTRNARHGYLFTHQGTIRIRNARYRNDEKPLDSLCDCITCRQYSRAYLHHLDKTQEILGIRLNTLHNLYYYQTLMRELREAIEQNLLVSYIDKFYQMRTAASHAS

SEQ ID NO: 50985 - protein, 363 aa, Achromatium sp.
  misc_feature (1)..(363): tr|A0A0M1JCM7|A0A0M1JCM7_9GAMM Queuine tRNA-ribosyltran sferase OS=Achromatium sp. WMS2 OX=1604835 GN=tgt PE=3 SV=1
MIAQDGLARAGRLSLPIGCVDTPAFMPVGTYGAVKGVTPDEIAKAGARIILSNTLHLSLRPGVEIVRAHGGLHKFMGWPYGILTDSGGFQVFSLGKLRNISEQGVTFRSPIDGRQVFMGPEESIAIQHALGANIIMIFDECTPYPADLKTASQSMELSLRWAERSRRAHGENSAALFGIVQGGMFNELREQSLESLVNIGFDGYAIGGLSVGEPAHERWKILDNLATKLPPNYPHYLMGVGTPEDIVESVQRGMDLFDCVLPTRNARHGYLFTHSGIIRLRNSSYKTDQRPLDPICDCDTCKNYSRAYLHHLDRTKEILGIRLNTLHNVHYYQSLMRDLRKAIGQGQLTQFVTDFYQMRKSEL

SEQ ID NO: 50986 - protein, 378 aa, Achromobacter agilis
  misc_feature (1)..(378): tr|A0A446CY17|A0A446CY17_9BURK Queuine tRNA-ribosyltran sferase OS=Achromobacter agilis OX=1353888 GN=tgt PE=3 SV=1
MTGLNFELLATDGGARRGRITLNHGVVETPIFMPVGTYGSVKAMLPHELKEIGSQIVLGNTFHLWLRPGTEIMEKHGGLHGFMQWDKPILTDSGGFQVFSLQGMRKITEEGVKFASPIDGARLFLTPEESMRIQRSLNSDIVMVFDECTPYEIDGRPATVEEAARSMRMSLRWARRSREEFDRLGNPNALFGIVQGGMYESLRDESLAGLQEIGFHGYAIGGLSVGEPKEDMMRILAHVTPKLPAQAPRYLMGVGTPEDLVEGVSRGVDMFDCVMPTRNARNGWLFTRYGDVKIRNAKYRDDTRPLDPSCSCHTCANFSRAYLHHLQRANEITGARLNTLHNLHFYLTIMKEMREAIAEGRFDAWRAQFAADRKRGVD

SEQ ID NO: 50987 - protein, 378 aa, Achromobacter aloeverae
  misc_feature (1)..(378): tr|A0A4Q1HDJ3|A0A4Q1HDJ3_9BURK Queuine tRNA-ribosyltran sferase OS=Achromobacter aloeverae OX=1750518 GN=tgt PE =3 SV=1
MNGLNFELLATDGAARRGRMTLNHGVVETPIFMPVGTYGSVKAMLPHELKDVGAQIVLGNTFHLWLRPGNDIMRKHGGLHGFMGWDKPILTDSGGFQVFSLQGMRKITEEGVKFASPIDGARLFLTPEESMAIQRALNSDIAMVFDECTPYEIDGRAATPEEAAKSMRMSLRWARRSRDAFDKLENPNALFGIVQGGMYENLRDESLAGLVDIGFHGYAIGGLSVGEPKEDMLRILTHVAPRLPVNAPRYLMGVGTPEDLVDGVARGIDMFDCVMPTRNARNGWLFTRYGDVKIRNARYRDDTRPLDPSCGCHTCGHFSRAYLHHLQRANEITGARLNTLHNLHFYLNLMDEMRGAIAAGTFQAWREQFAADRARGVD

SEQ ID NO: 50988 - protein, 378 aa, Achromobacter arsenitoxydans
  misc_feature (1)..(378): tr|H0F7G7|H0F7G7_9BURK Queuine tRNA-ribosyltransferase OS=Achromobacter arsenitoxydans SY8 OX=477184 GN=tgt PE =3 SV=1
MTGLNFELLATDGGARRGRITLNHGVVETPIFMPVGTYGSVKAMMPHELKEIGSQIVLGNTFHLWLRPGTEIMEKHGGLHGFMQWDKPILTDSGGFQVFSLQGMRKITEEGVKFASPIDGARLFLTPEESMRIQRSLNSDIVMVFDECTPYEIDGRPATVEEAARSMRMSLRWARRSREEFDRLGNPNALFGIVQGGMYESLRDESLAGLQDIGFHGYAIGGLSVGEPKEDMMRILAHVTPKLPAQAPRYLMGVGTPEDLVEGVSRGVDMFDCVMPTRNARNGWLFTRFGDVKIRNAKYRDDTRPLDPSCGCHTCGTFSRAYLHHLQRANEITGARLNTLHNLHFYLTIMKEMREAIAEGRFDAWRAQFAADRARGVD

SEQ ID NO: 50989 - protein, 378 aa, Achromobacter denitrificans
  misc_feature (1)..(378): tr|A0A3R9GMZ1|A0A3R9GMZ1_ACHDE Queuine tRNA-ribosyltran sferase OS=Achromobacter denitrificans OX=32002 GN=tgt PE=3 SV=1
MTGLNFELLATDGGARRGRITLNHGVVETPIFMPVGTYGSVKAMLPHELKEIGSQIVLGNTFHLWLRPGTEIMEKHGGLHGFMQWDKPILTDSGGFQVFSLQGMRKITEEGVKFASPIDGARLFLTPEESMRIQRSLNSDIVMVFDECTPYEIDGRPATVEEAARSMRMSLRWARRSREEFDRLGNPNALFGIVQGGMYEALRDESLAGLQEIGFHGYAIGGLSVGEPKEDMMRILAHVTPKLPAQAPRYLMGVGTPEDLVEGVSRGVDMFDCVMPTRNARNGWLFTRFGDVKIRNAKYRDDTRPLDPSCGCHTCANFSRAYLHHLQRANEITGARLNTLHNLHFYLTIMKEMREAIAEGRFDAWRAQFAADRARGVD

SEQ ID NO: 50990 - protein, 378 aa, Achromobacter insolitus
  misc_feature (1)..(378): tr|A0A162NUP2|A0A162NUP2_9BURK Queuine tRNA-ribosyltran sferase OS=Achromobacter insolitus OX=217204 GN=tgt PE= 3 SV=1
MTGLNFELLATDGGARRGRITLNHGVVETPIFMPVGTYGSVKAMLPHELKEIGSQIVLGNTFHLWLRPGTEIMEKHGGLHGFMQWDKPILTDSGGFQVFSLQGMRKITEEGVKFASPIDGARLFLTPEESMRIQRSLNSDIVMVFDECTPYEIDGRPATVEEAARSMRMSLRWARRSREEFDRLQNPNALFGIVQGGMYEALRDESLAGLQEIGFHGYAIGGLSVGEPKEDMMRILAHVTPKLPAQAPRYLMGVGTPEDLVEGVSRGVDMFDCVMPTRNARNGWLFTRFGDVKIRNAKYRDDTRPLDPSCGCHTCANFSRAYLHHLQRANEITGARLNTLHNLHFYLTIMKEMREAIAEGRFDAWRAQFAADRARGVD

SEQ ID NO: 50991 - protein, 378 aa, Achromobacter insuavis
  misc_feature (1)..(378): tr|F7SVZ4|F7SVZ4_9BURK Queuine tRNA-ribosyltransferase OS=Achromobacter insuavis AXX-A OX=1003200 GN=tgt PE=3 SV=1
MTGLNFELLATDGGARRGRITLNHGVVETPIFMPVGTYGSVKAMMPHELKDIGAQIVLGNTFHLWLRPGTEIMEKHGGLHGFMQWDKPILTDSGGFQVFSLQGMRKITEEGVKFASPIDGARLFLTPEESMRIQRSLNSDIVMVFDECTPYEIDGRPATVEEAARSMRMSLRWARRSREEFDKLENPNALFGIVQGGMYESLRDESLAGLQDIGFHGYAIGGLSVGEPKEDMMRILAHVTPKLPAQAPRYLMGVGTPEDLVEGVSRGVDMFDCVMPTRNARNGWLFTRFGDVKIRNAKYRDDTRPLDPSCACHTCANFSRAYLHHLQRANEITGARLNTLHNLHFYLTIMKEMREAIAEGRFDAWRAQFAADRARGVE

SEQ ID NO: 50992 - protein, 378 aa, Achromobacter marplatensis
  misc_feature (1)..(378): tr|A0A366FGM8|A0A366FGM8_9BURK Queuine tRNA-ribosyltran sferase OS=Achromobacter marplatensis OX=470868 GN=tgt PE=3 SV=1
MTGLNFELLATDGGARRGRITLNHGVVETPIFMPVGTYGSVKAMMPHELKEIGSQIVLGNTFHLWLRPGTEIMEKHGGLHGFMQWDKPILTDSGGFQVFSLQGMRKITEEGVKFASPIDGARLFLTPEESMRIQRSLNSDIVMVFDECTPYEIDGRPATVEEAARSMRMSLRWARRSREEFDRLGNPNALFGIVQGGMYEALRDESLAGLQDIGFHGYAIGGLSVGEPKEDMMRILAHVTPKLPAQAPRYLMGVGTPEDLVEGVSRGVDMFDCVMPTRNARNGWLFTRFGDVKIRNAKYRDDTRPLDPSCTCHTCANFSRAYLHHLQRANEITGARLNTLHNLHFYLTIMKEMREAIAEGRFDAWRAQFAADRARGIE

SEQ ID NO: 50993 - protein, 378 aa, Achromobacter marplatensis
  misc_feature (1)..(378): tr|J4QXF3|J4QXF3_9BURK Queuine tRNA-ribosyltransferase OS=Achromobacter marplatensis OX=470868 GN=tgt PE=3 SV= 1
MTGLNFELLATDGGARRGRITLNHGVVETPIFMPVGTYGSVKAMMPHELKEIGSQIVLGNTFHLWLRPGTEIMEKHGGLHGFMQWDKPILTDSGGFQVFSLQGMRKITEEGVKFASPIDGARLFLTPEESMRIQRSLNSDIVMVFDECTPYEIDGRPATVEEAARSMRMSLRWARRSREEFDRLGNPNALFGIVQGGMYEALRDESLAGLQDIGFHGYAIGGLSVGEPKEDMMRILAHVTPKLPAQAPRYLMGVGTPEDLVEGVSRGVDMFDCVMPTRNARNGWLFTRFGDVKIRNAKYRDDTRPLDPSCACHTCANFSRAYLHHLQRANEITGARLNTLHNLHFYLTIMKEMREAIAEGRFDAWRAQFAADRARGIE

SEQ ID NO: 50994 - protein, 378 aa, Achromobacter piechaudii
  misc_feature (1)..(378): tr|D4XHX5|D4XHX5_9BURK Queuine tRNA-ribosyltransferase OS=Achromobacter piechaudii ATCC 43553 OX=742159 GN=tgt PE=3 SV=1
MTGLNFELLATDGGARRGRITLNHGVVETPIFMPVGTYGSVKAMMPHELKEIGSQIVLGNTFHLWLRPGTEIMEKHGGLHGFMQWDKPILTDSGGFQVFSLQGMRKITEEGVKFASPIDGARLFLTPEESMRIQRSLNSDIVMVFDECTPYEIDGRPATVEEAARSMRMSLRWARRSRDEFDRLGNPNALFGIVQGGMYESLRDESLAGLQDIGFHGYAIGGLSVGEPKEDMMRILAHVTPKLPAQAPRYLMGVGTPEDLVEGVSRGVDMFDCVMPTRNARNGWLFTRFGDVKIRNAKYRDDTRPLDPSCACHTCSNFSRAYLHHLQRANEITGARLNTLHNLHFYLTIMQEMREAIAEGRFDAWRAQFAADRARGIE

SEQ ID NO: 50995 - protein, 378 aa, Achromobacter piechaudii; identical to SEQ ID NO: 50994
  misc_feature (1)..(378): tr|A0A0L6HTC3|A0A0L6HTC3_9BURK Queuine tRNA-ribosyltran sferase OS=Achromobacter piechaudii OX=72556 GN=tgt PE= 3 SV=1

SEQ ID NO: 50996 - protein, 378 aa, Achromobacter pulmonis
  misc_feature (1)..(378): tr|A0A2N8KGK0|A0A2N8KGK0_9BURK Queuine tRNA-ribosyltran sferase OS=Achromobacter pulmonis OX=1389932 GN=tgt PE= 3 SV=1
MTGLNFELLATDGGARRGRITLNHGVVETPIFMPVGTYGSVKAMLPHELKEIGSQIVLGNTFHLWLRPGTQIMEKHGGLHGFMQWDKPILTDSGGFQVFSLQGMRKITEEGVKFASPIDGARLFLTPEESMRIQRSLNSDIVMVFDECTPYEIDGRPATVEEAARSMRMSLRWARRSRDEFDRLGNPNALFGIVQGGMYESLRDESLAGLQDIGFHGYAIGGLSVGEPKEDMMRILAHVTPRLPQHAPRYLMGVGTPEDLVEGVARGVDMFDCVMPTRNARNGWLFTRYGDVKIRNAKYRDDTRPLDPSCGCHTCANFSRAYLHHLQRANEITGARLNTLHNLHFYLTIMQEMREAIAEGRFEAWRARFAADRARGVD

SEQ ID NO: 50997 - protein, 378 aa, Achromobacter ruhlandii
  misc_feature (1)..(378): tr|A0A1D8IEQ2|A0A1D8IEQ2_9BURK Queuine tRNA-ribosyltran sferase OS=Achromobacter ruhlandii OX=72557 GN=tgt PE=3 SV=1
MTGLNFELLATDGGARRGRITLNHGVVETPIFMPVGTYGSVKAMMPHELKEIGSQIVLGNTFHLWLRPGTEIMEKHGGLHGFMQWDKPILTDSGGFQVFSLQGMRKITEEGVKFASPIDGARLFLTPEESMRIQRSLNSDIVMVFDECTPYEIDGRPATVEEAARSMRMSLRWARRSREEFDRLQNPNALFGIVQGGMYESLRDESLAGLQDIGFHGYAIGGLSVGEPKEDMMRILAHVTPKLPAQAPRYLMGVGTPEDLVEGVSRGVDMFDCVMPTRNARNGWLFTRFGDVKIRNAKYRDDTRPLDPSCACHTCANFSRAYLHHLQRANEITGARLNTLHNLHFYLSIMKEMREAIAEGRFEAWRAQFAADRARGVE

SEQ ID NO: 50998 - protein, 378 aa, Achromobacter ruhlandii
  misc_feature (1)..(378): tr|A0A2M9GVF3|A0A2M9GVF3_9BURK Queuine tRNA-ribosyltran sferase OS=Achromobacter ruhlandii OX=72557 GN=tgt PE=3 SV=1
MTGLNFELLATDGGARRGRITLNHGVVETPIFMPVGTYGSVKAMMPHELKEIGSQIVLGNTFHLWLRPGTEIMEKHGGLHGFMQWDKPILTDSGGFQVFSLQGMRKITEEGVKFASPIDGARLFLTPEESMRIQRSLNSDIVMVFDECTPYEIDGRPATVEEAARSMRMSLRWARRSREEFDRLQNPNALFGIVQGGMYESLRDESLAGLQDIGFHGYAIGGLSVGEPKEDMMRILAHVTPKLPAQAPRYLMGVGTPEDLVEGVSRGVDMFDCVMPTRNARNGWLFTRFGDVKIRNAKYRDDTRPLDPSCACHTCANFSRAYLHHLQRANEITGARLNTLHNLHFYLTIMKERREAIAEGRFEAWRAQFAADRARGVE

SEQ ID NO: 50999 - protein, 375 aa, Achromobacter sp.
  misc_feature (1)..(375): tr|A0A0M7MP47|A0A0M7MP47_9BURK Queuine tRNA-ribosyltran sferase OS=Achromobacter sp. ATCC35328 OX=1806490 GN=tg t PE=3 SV=1
MKFELDTTDGRARRGRLVFDRGVVETPCFMPVGTYGTVKGMTPEEVEATGAQIILGNTFHLWLRPGQEIMKLHGDLHDFMQWKGPILTDSGGFQVFSLGDIRKITEQGVHFRNPINGDPIFLDPEKSMEIQYDLGSDIVMIFDECTPYPADWDYAKRSMEMSLRWAKRSRERFDSLGNKNALFGIIQGSVYEDLRDISVKGLVDIGFDGYAVGGLAVGEPKADMHRILEHVCPQIPADKPRYLMGVGKPEDLVEGVRRGIDMFDCVMPTRNARNGHLFVTDGVVKIRNAKYKSDTGPLDPECDCYTCRNYSRAYLHHLDRCNEILGARLNTIHNLRYYQRLMAGLRKAIEEGKLESFVTDFYQRQGREVPPLNVD

SEQ ID NO: 51000 - protein, 378 aa, Achromobacter sp.
  misc_feature (1)..(378): tr|A0A0Q8B1J8|A0A0Q8B1J8_9BURK Queuine tRNA-ribosyltran sferase OS=Achromobacter sp. Root565 OX=1736564 GN=tgt PE=3 SV=1
MTGLNFELLATDGGARRGRITLNHGVVETPIFMPVGTYGSVKAMMPHELKEVGSQIVLGNTFHLWLRPGTEIMEKHGGLHGFMQWDKPILTDSGGFQVFSLQGMRKITEEGVKFASPIDGARLFLTPEESMRIQRSLNSDIVMVFDECTPYEIDGRPATVEEAARSMRMSLRWARRSRDEFDRLGNPNALFGIVQGGMYESLRDESLAGLQDIGFHGYAIGGLSVGEPKEDMMRILAHVTPKLPVQAPRYLMGVGTPEDLVEGVSRGVDMFDCVMPTRNARNGWLFTRFGDVKIRNAKYRDDTRPLDPSCSCHTCGNFSRAYLHHLQRANEITGARLNTLHNLHFYLTIMKEMREAIAEGRFDAWRAQFAADRARGIE

SEQ ID NO: 51001 - protein, 378 aa, Achromobacter spanius
  misc_feature (1)..(378): tr|A0A448C1D7|A0A448C1D7_9BURK Queuine tRNA-ribosyltran sferase OS=Achromobacter spanius OX=217203 GN=tgt PE=3 SV=1
MTGLNFELLATDGGARRGRVTLNHGVVETPIFMPVGTYGSVKAMMPHELKEIGSQIVLGNTFHLWLRPGTDIMEKHGGLHGFMQWDKPILTDSGGFQVFSLQGMRKITEEGVKFASPIDGARLFLTPEESMRIQRSLNSDIVMVFDECTPYEIDGRPATVEEAARSMRMSLRWARRSRDEFDRLGNPNALFGIVQGGMYESLRDESLAGLQDIGFHGYAIGGLSVGEPKEDMMRILAHVTPKLPAQAPRYLMGVGTPEDLVEGVSRGVDMFDCVMPTRNARNGWLFTRFGDVKIRNAKYRDDTRPLDPSCTCHTCANFSRAYLHHLQRANEITGARLNTLHNLHFYLTIMKEMREAIAEGRFDAWRAQFAADRARGIE

SEQ ID NO: 51002 - protein, 378 aa, Achromobacter spanius
  misc_feature (1)..(378): tr|A0A2S5GJI6|A0A2S5GJI6_9BURK Queuine tRNA-ribosyltran sferase OS=Achromobacter spanius OX=217203 GN=tgt PE=3 SV=1
MTGLNFELLATDGGARRGRITLNHGVVETPIFMPVGTYGSVKAMMPHELKEIGSQIVLGNTFHLWLRPGTDIMEKHGGLHGFMQWDKPILTDSGGFQVFSLQGMRKITEEGVKFASPIDGARLFLTPEESMRIQRSLNSDIVMVFDECTPYEIDGRPATVEEAARSMRMSLRWARRSRDEFDRLGNPNALFGIVQGGMYESLRDESLAGLQDIGFHGYAIGGLSVGEPKEDMMRILAHVTPKLPAQAPRYLMGVGTPEDLVEGVSRGVDMFDCVMPTRNARNGWLFTRFGDVKIRNAKYRDDTRPLDPSCGCHTCGNFSRAYLHHLQRANEITGARLNTLHNLHFYLTIMQEMREAIGQGRFDAWRAQFAADRARGIE

SEQ ID NO: 51003 - protein, 378 aa, Achromobacter xylosoxidans
  misc_feature (1)..(378): tr|E3HRH1|E3HRH1_ACHXA Queuine tRNA-ribosyltransferase OS=Achromobacter xylosoxidans (strain A8) OX=762376 GN= tgt PE=3 SV=1
MTGLNFELLATDGGARRGRITLNHGVVETPIFMPVGTYGSVKAMMPHELKEIGSQIVLGNTFHLWLRPGTEIMEKHGGLHGFMQWDKPILTDSGGFQVFSLQGMRKITEEGVKFASPIDGARLFLTPEESMRIQRSLNSDIVMVFDECTPYEIDGRPATVEEAARSMRMSLRWARRSREEFDRLQNPNALFGIVQGGMYEALRDESLAGLQEIGFHGYAIGGLSVGEPKEDMMRILAHVTPKLPAQAPRYLMGVGTPEDLVEGVSRGVDMFDCVMPTRNARNGWLFTRFGDVKIRNAKYRDDTRPLDPSCGCHTCANFSRAYLHHLQRANEITGARLNTLHNLHFYLTIMKEMREAIAEGRFDAWRAQFAADRERGIE

SEQ ID NO: 51004 - protein, 376 aa, Acidaminobacter hydrogenoformans
  misc_feature (1)..(376): tr|A0A1G5RY20|A0A1G5RY20_9FIRM Queuine tRNA-ribosyltran sferase OS=Acidaminobacter hydrogenoformans DSM 2784 OX =1120920 GN=tgt PE=3 SV=1
MAIQFELIKTCKQSGARLGRLHTPHGVIDTPIFMPVGTQATVKAMTPEELEDMEAQIILSNTYHLFLRPGHELVEKAGGLHKFMNWKHPILTDSGGFQVFSLGDLRKITEEGVEFRSHLDGAKHFLSPERAIEIENALGADIIMAFDECAPYPADKEYVKKSLERTTRWAARCKAAHKKPEQQALFGIVQGGMYPDLRKQSAEEITEIGFPGYAIGGLSVGEPKPMMYEVLEQTIPYLPEDKPRYLMGVGSPDDLLEGVLRGVDMFDCVLPTRIARNGTAMTSVGKVVIKNAKHFDDFTPLDPNCDCYTCRNYTKAYLRHLYKADEILSSRLMSYHNLYFLIELMKNVRKAIMEDRLLDFKDEFFEKYGYTVKESE

SEQ ID NO: 51005 - protein, 379 aa, Acidaminococcaceae bacterium
  misc_feature (1)..(379): tr|A0A351EA19|A0A351EA19_9FIRM Queuine tRNA-ribosyltran sferase OS=Acidaminococcaceae bacterium OX=2049052 GN=t gt PE=3 SV=1
MHAVTYELLKEDSRSKARRGRLHTPHGTFETPMFMPVGTQATVKTLSPEELYDMGSQVILANTYHLFLRPGSDLVRKAGGLHRFMNYRRGMLTDSGGFQVFSLGAMRKITEEGVLFRSHIDGSKQFLSPEVSMHVQEDLGADIAMAFDECIPYPSDEAYTKRSTDRTLRWAERCLAAHTREDQAVFGIVQGGMFPDLRRENALALQELDFAGYGIGGLSVGEPKPVMYEILDRTTDFMDKQKARYLMGVGTPDCLVEGINLGVDMFDCVFPTRVARNGTAMTGRGRLVIRNAVYAEDFRPIDEHCRCYTCRNFSRAYIRHLFKAEETFGLRLLSIHNLHFLLDFVRQIREAIEAGAFPEFRRHFWDNWEEKDARPADLL

SEQ ID NO: 51006 - protein, 374 aa, Acidaminococcaceae bacterium
  misc_feature (1)..(374): tr|A0A3D2QCE3|A0A3D2QCE3_9FIRM Queuine tRNA-ribosyltran sferase OS=Acidaminococcaceae bacterium OX=2049052 GN=t gt PE=3 SV=1
MHAVTYELLKEDSRSKARRGRLHTPHGTFETPMFMPVGTQATVKTLSPEELYDMGSQVILANTYHLFLRPGSDLVRKAGGLHRFMNYRRGMLTDSGGFQVFSLGAMRKITEEGVLFRSHIDGSKQFLSPEVSMHVQEDLGADIAMAFDECIPYPSDEAYTKRSTDRTLRWAERCLAAHTREDQAVFGIVQGGMFPDLRRENALALQELDFAGYGIGGLSVGEPKPVMYEILDRTTDFMDKQKARYLMGVGTPDCLVEGINLGVDMFDCVLATRIARNGSVFTNRGRVVIKNAKYARDFGPMDETCDCYACTHFSRAYIRHLFNAKEITGGRLASIHNLRFLLRMMEEIRQAIAEDRLLDYRKEFYERYDLTKNF

SEQ ID NO: 51007 - protein, 373 aa, Acidaminococcus fermentans
  misc_feature (1)..(373): tr|A0A1I5J4Z7|A0A1I5J4Z7_ACIFE Queuine tRNA-ribosyltran sferase OS=Acidaminococcus fermentans OX=905 GN=tgt PE= 3 SV=1
MHSVYFELIKEDPRSGARLGKLHTPHGTFDTPMFMPVGTQATVKTLTPEELYAMHSQVILSNTYHLFLRPGTELVRKAGGLHKFMNYKRGMLTDSGGFQVFSLGEMRKITEEGVMFRSHLDGSRQFLNPEVATKAQEDLGADIIMAFDECIPYPADHGYAKQSTERTTRWARRCLEAKTREDQGLFGIIQGGMYPDLREYSAKAITDMDFAGFAIGGLSVGEPHPLMYDILDKTTRHMPKDKARYLMGVGTPDCLVEGVNLGVDMFDCVYPTRVARNGTAMLPTGRLVVRNAQYAEDWRPIDEHCDCYTCRNFSRAYIRHLFKAEEILALRLLSIHNLHFLLKFAEDMRTAIANDTFPEFRAAFLENYETTRR

SEQ ID NO: 51008 - protein, 373 aa, Acidaminococcus fermentans; identical to SEQ ID NO: 51007
  misc_feature (1)..(373): tr|D2RLD1|D2RLD1_ACIFV Queuine tRNA-ribosyltransferase OS=Acidaminococcus fermentans (strain ATCC 25085 / DSM 20731 / VR4) OX=591001 GN=tgt PE=3 SV=1

SEQ ID NO: 51009 - protein, 374 aa, Acidaminococcus intestini
  misc_feature (1)..(374): tr|C0WEF4|C0WEF4_9FIRM Queuine tRNA-ribosyltransferase OS=Acidaminococcus intestini OX=187327 GN=tgt PE=3 SV=1
MHAVYFELIKEDPRSGARLGKLHTPHGTFDTPMFMPVGTQATVKTLTPEELYDMKSQVILSNTYHLFLRPGTELIRKAGGIHRFMNYERGMLTDSGGFQVFSLGAIRKITEDGVTFRSHIDGSKQFLSPEVAMKAQEDIGADIIMAFDECIPYPADFDYAKKSTERTTRWAKRCLAAKTRDDQGLFGIVQGGMYPELRKYSAEALSELDFAGMAIGGLSVGEPHELMYDILGKTTQYLPKNKARYLMGVGTPDCLVEGVNLGVDMFDCVYPTRVARNGTAMVRSGRLVLKNLEFREDFRPIEEGCDCYTCRHFSRAYIRHLFKSEELLAMRLLSIHNLRFLLKFAEDMRSAIANDTFPEFRAAFLDQYQRTSRR

SEQ ID NO: 51010 - protein, 374 aa, Acidaminococcus intestini; identical to SEQ ID NO: 51009
  misc_feature (1)..(374): tr|G4Q517|G4Q517_ACIIR Queuine tRNA-ribosyltransferase OS=Acidaminococcus intestini (strain RyC-MR95) OX=56881 6 GN=tgt PE=3 SV=1

SEQ ID NO: 51011 - protein, 373 aa, Acidaminococcus sp.
  misc_feature (1)..(373): tr|R7LYX7|R7LYX7_9FIRM Queuine tRNA-ribosyltransferase OS=Acidaminococcus sp. CAG:542 OX=1262687 GN=tgt PE=3 S V=1
MHSVYFELIKEDPRSGARLGKLHTPHGTFDTPMFMPVGTQATVKTLTPEELYAMHSQVILSNTYHLFLRPGTELVRKAGGLHKFMNYKRGMLTDSGGFQVFSLGEMRKITEEGVMFRSHLDGSRQFLNPEVATKAQEDLGADIIMAFDECIPYPADHGYAKQSTERTTRWARRCLEAKTREDQGLFGIIQGGMYPDLREYSAKAITDMDFAGFAIGGLSVGEPHPLMYDILDKTTRHMPKDKARYLMGVGTPDCLVEGVNLGVDMFDCVYPTRVARNGTAMLPTGRLVVRNAQYAEDWRPIDEHCDCYTCRNFSRAYIRHLFKAEEILALRLLSIHNLHFLLKFAEDMRKAIANDTFPEFRAAFLENYETTRR

SEQ ID NO: 51012 - protein, 373 aa, Acidaminococcus sp.
  misc_feature (1)..(373): tr|A0A415EKE9|A0A415EKE9_9FIRM Queuine tRNA-ribosyltran sferase OS=Acidaminococcus sp. AM05-11 OX=2291997 GN=tg t PE=3 SV=1
MRQVYFELIKEDPRSGARLGKLHTPHGTFDTPMFMPVGTQATVKTLTPEELYAMNSQVILSNTYHLFLRPGTELVKKAGGLHKFMNYNRGMLTDSGGFQVFSLGEMRKITEEGVMFRSHLDGSKQFLNPEVATKAQEDLGADVIMAFDECIPYPADHAYAKQSTERTTRWAKRCLDAKTRDDQGLFGIIQGGMYPDLREYSAKAITSMDFDGFAIGGLSVGEPHPLMYDILGKTTQWMPKDKARYLMGVGTPDCLVEGVNLGVDMFDCVYPTRVARNGTAMLPTGRLVVRNAAYMEDFRPIDENCDCYTCRHFSRAYIRHLFKAEEILALRLLSIHNLHFLLKFAENMRKAIANDTFPEFRAAFLENYNTTGR

SEQ ID NO: 51013 - protein, 360 aa, Acidibacillus ferrooxidans
  misc_feature (1)..(360): tr|A0A101XNZ4|A0A101XNZ4_9BACL Queuine tRNA-ribosyltran sferase OS=Acidibacillus ferrooxidans OX=1765683 GN=tgt PE=3 SV=1
MARRGRLSTPHAVIETPVFMPVGTQATVKTLSPEEVMQTGASIILSNTYHLHLRPGEEIVREAGGLHRFMNWPRALLTDSGGYQVFSLSSKRKITEEGVHFRSHISGAPLFIGPEESIAIQNALGADIIMAFDECPPYPATREYVADSLARTTRWAKRCQTVHGRTEDQALFGIVQGGMFRDLRARAAEEITALDFPGYALGGLSVGEEKPLMYEMVEFTTPFLPKDRPRYLMGVGSPDDLFEGVLRGIDMFDCVLPTRIARNGTVFTSRGKLVLKNAANARDYTPLDEACDCYVCKNYSRAYIRHLLKAEETFGIRLTSYHNVHFLVTLMAQIRTAIEEDRLLALRKTFFENYGYQVEG

SEQ ID NO: 51014 - protein, 360 aa, Acidibacillus ferrooxidans
  misc_feature (1)..(360): tr|A0A162TDP0|A0A162TDP0_9BACL Queuine tRNA-ribosyltran sferase OS=Acidibacillus ferrooxidans OX=1765683 GN=tgt PE=3 SV=1
MARRGRLTTPHAVIETPVFMPVGTQATVKTLSPEEVMQTGASIILSNTYHLHLRPGEEIVREAGGLHRFMNWPRALLTDSGGFQVFSLSSTRKITEQGVHFRSHISGAPLFIGPEESIAIQNALGADIIMAFDECPPYPATREYVSDSLARTTRWAKRCQTAHERTDDQALFGIVQGGMFRDLRARAAEEITALDFPGYALGGLSVGEEKPLMYEMVEFTTPFLPKDRPRYLMGVGSPDDLFEGVLRGIDMFDCVLPTRIARNGTVFTSRGKLVLKNASNARDYSPLDEACDCYVCKNYSRAYIRHLLKAEETFGIRLTSYHNVHFLVTLMAQIRAAIEEGRLLALRKTFFENYGYQVEG

SEQ ID NO: 51015 - protein, 377 aa, Acidibacillus sulfuroxidans
  misc_feature (1)..(377): tr|A0A2U3DB65|A0A2U3DB65_9BACL Queuine tRNA-ribosyltran sferase OS=Acidibacillus sulfuroxidans OX=1765684 GN=tg t PE=3 SV=1
MSALSFELLKTSSDSLARRGRIRTLHATIETPVFMPVGTQATVKTLSPEELMDIGAHIILSNTYHLHLRPGEDVIQGAGGLHKFMNWPRAILTDSGGFQVFSLSTLRKISEEGVEFRSHISGEKRFLSPERSIQVQNALGADIIMAFDECPPYPADREYVLASLLRTTRWAKRSLVAHERSEEQALFGIVQGGMEIDLRRQAAEELVELDFPGYAIGGLSVGEPKPLMNEVLEHTTPFLPQNKPRYLMGVGAPDDLFEGVMRGVDMFDCVLPTRIARNGTVFTASGKLVVRNAANAKDYAPLDEKCDCYVCKNYSRAYIRHLLKAEETFGIRLTSYHNVYFLVKLMEKIRASIENGTFLALRKQFYDAYGYNRDAMC

SEQ ID NO: 51016 - protein, 257 aa, Acidiferrobacter sp.
  misc_feature (1)..(257): tr|A0A2D7VN30|A0A2D7VN30_9GAMM Queuine tRNA-ribosyltran sferase (Fragment) OS=Acidiferrobacter sp. OX=1872107 G N=CL386_08970 PE=3 SV=1
MKYKLFHTDGNARRGQIETSRGVIDTPAFMPVGTVGSVRSVSPQEVAGTGAQIILGNTFHLMLRPGTEIINLHGSLHDFMGWSGPILTDSGGFQVWSLANKKDIREEGVTFRSPVDGSTVFLDPETSMEVQKALGSDIVMCFDECTTYPATMDEARQSMDLSLRWAERCRRYPLAAGQALFGIAQGGMHETLRLEALDHLQSIGFDGYALGGLSVGEPKEDMLRILDTVTTAMPADQPRYLMGVGKPEDLIAGVAAG

SEQ ID NO: 51017 - protein, 388 aa, Acidiferrobacter sp.
  misc_feature (1)..(388): tr|A0A2Z3R1T6|A0A2Z3R1T6_9GAMM Queuine tRNA-ribosyltran sferase OS=Acidiferrobacter sp. SPIII_3 OX=1281578 GN=t gt PE=3 SV=1
MSLVPFIELGRDGRARACRLSLAHGVVATPSFMPVGTYGAVKGMSPAEVAGSGAAIVLGNTFHLMERPGLEVIAAHGGLHGFMGWQGPILTDSGGFQVFSLAALRKVTEQGVAFRSPRDGRPLMLTPELAMGAQATLRSDIAMVFDECTPHPASFSEARASMELSLRWAERSRAAYDGPGALFGIVQGGLYEDLREISARGLVAVGFDGYALGGLSVGESKDDMYRLVTRCAPLLPADRPRYLMGVGTPEDIVTAVSAGIDLFDCVLPTRNARNGWLFTRTGVVKIRNSGYARDLGPVDPECRCHTCTHTTRSYLHHLQRSGEMLGARLATLHNLTYYGDLMAGLRAAILAGKLEEFVDSFYRTRHKRPPRALGGLPEDEAAATTITA

SEQ ID NO: 51018 - protein, 388 aa, Acidiferrobacter thiooxydans
  misc_feature (1)..(388): tr|A0A1C2G1V6|A0A1C2G1V6_9GAMM Queuine tRNA-ribosyltran sferase OS=Acidiferrobacter thiooxydans OX=163359 GN=tg t PE=3 SV=1
MSLVPFIELGRDGRARACQLSLAHGVVATPSFMPVGTYGAVKGMSPAEVAGSGAAIVLGNTFHLMERPGLEVIAAHGGLHGFMGWQGPILTDSGGFQVFSLAALRKVSEQGVAFRSPRDGRPLMLTPELAMAAQATLRSDIAMVFDECTPHPASFGEARASMELSGRWAERSRAAYDGPGALFGIVQGGLYEDLREMSARALVGVGFDGYALGGLSVGESKGDMYRLVTHCAPLLPADRPRYLMGVGTPEDIVTAVSAGIDLFDCVLPTRNARNGWLFTRTGVVKIRNSGYARDLGPVDPECRCHTCTHTTRSYLHHLQRSGEMLGARLATLHNLTYYGDLMAGLRAAILAGTLEEFVDSFYRTRHKRPPRALGGLPEDETAAITTTV

SEQ ID NO: 51019 - protein, 371 aa, Acidiferrobacteraceae bacterium
  misc_feature (1)..(371): tr|A0A2E6P2Q2|A0A2E6P2Q2_9GAMM Queuine tRNA-ribosyltran sferase OS=Acidiferrobacteraceae bacterium OX=2024893 G N=tgt PE=3 SV=1
MKFEIVKSDGYARRGKLFLRHGLVETPAFMPVGTQAAVRSVSPQEVKDSNSQIVLGNTFHLMLRPGSDLIRAHGGLHNFMGWDNPILTDSGGFQVWSLATNRKLDESGVLFKSPITGEKVFLNPEKSIDVQIDLNSDIAMVFDECTTYPITKEDAAISMERSMRWAKRCKMHHDNAGQALFGIAQGSVYQDLRTQSLGALTEIGFDGYALGGLAVGEGLEEMYGILDSITPLMPWNQPRYLMGVGKPENIVVAVKYGIDMFDCVIPTRNARNGWLYTSTGIVKIRNAENRTNLEPIDQECPCPACLNYSRSYIRHLLTIGETLGLRLCTLHNLYFFQRLMSEIRHAIACGNYDLFVKQFFEKRGDKSHFVA

SEQ ID NO: 51020 - protein, 369 aa, Acidiferrobacteraceae bacterium
  misc_feature (1)..(369): tr|A0A2D6K7Z1|A0A2D6K7Z1_9GAMM Queuine tRNA-ribosyltran sferase OS=Acidiferrobacteraceae bacterium OX=2024893 G N=tgt PE=3 SV=1
MKYYIKNREGAARRGRLLFERGVVNTPAFMPVGTYGTVKAMTPEELRQVGAEIILGNTFHLMLRPGVEVIGEHGGLHDFMHWEGPILTDSGGFQVWSLAEQRKISDKGVTFRSPVDGAKIFLGPEESMTVQQALGADIIMQFDECTPYPAEKKAVQSSMERSLHWAERCKAAHGSHPSALFGIVQGGMHTALRRQSLRELTDIGFDGYALGGLSVGEPKHHMYRMLRGIAHQLPESAPRYLMGVGRPEDIVYAVACGIDMFDCVMPTRNARNGWLFTSQGVIKIRNSVYAHDRAPLDPRCNCYTCQHYSRSYLRHLQQTNEILGARLATIHNLCHYQSLMAEIRKSLESGDFAAFAIDYLDRFKITFPE

SEQ ID NO: 51021 - protein, 372 aa, Acidihalobacter ferrooxidans
  misc_feature (1)..(372): tr|A0A1P8UGZ5|A0A1P8UGZ5_9GAMM Queuine tRNA-ribosyltran sferase OS=Acidihalobacter ferrooxidans OX=1765967 GN=t gt PE=3 SV=1
MRFERLAQDGAARRGRLIFPRGEVETPAFMPVGTYGTVKAMTPEELEGLGAQIVLGNTFHLMLRPGTEIIALHGDLHGFMHWERPILTDSGGFQVFSLAKLRKLSETGVTFRSPVNGDRIELTPERSMAVQRALGSDIVMSFDECTPFPATQTQAADSMRLSMRWAQRSRDAHGDNPSALFGIVQGGMYAELRLESAASLREIGFDGYAIGGLAVGEPADVREAVLDYTVPVLPEDRPRYLMGVGTPEDIVEAVRRGVDMFDCVIPTRNARNGFLYTRTGVMRIRNAKYAHDTRPIDERCDCYTCRHYSRAYLRHLDKCGEILGARLNTIHNLYRYQALMREIRDAIAAGSFRAWADGFYAERNAHDASAVP

SEQ ID NO: 51022 - protein, 371 aa, Acidihalobacter prosperus
  misc_feature (1)..(371): tr|A0A1A6C7U3|A0A1A6C7U3_9GAMM Queuine tRNA-ribosyltran sferase OS=Acidihalobacter prosperus OX=160660 GN=tgt P E=3 SV=1
MKFDLLTRDGAARRGRLTFERGTVETPAFMPVGTYGTVKGMTPEELESLGAEIVLGNTFHLMLRPGTEIIARHGDLHGFMHWERPILTDSGGFQVFSLAKLRKLSEEGVSFRSPVNGDKVMLTPERSMAVQRALGSDIVMVFDECTPYPATEDEAAASMRLSLRWAARSREAHGDSSSALFGIVQGGMYEALRLESAAGLRAIGFDGYAIGGLAVGEPADERLRTLEFTLPALPADRPRYLMGVGTPEDIVESVLRGVDMFDCVIPTRNARNGFLYTRSGVMRIRNARYADDTRPLEEGCECYTCRNYSRAYLRHLDKCGEILGARLNTIHNLHYYQTLMRELREAIAQGRLAAYVDEFRALRAKPGGAVP

SEQ ID NO: 51023 - protein, 371 aa, Acidihalobacter prosperus
  misc_feature (1)..(371): tr|A0A1D8K7B6|A0A1D8K7B6_9GAMM Queuine tRNA-ribosyltran sferase OS=Acidihalobacter prosperus OX=160660 GN=tgt P E=3 SV=1
MKFDLLTRDGAARRGRLTFERGTVETPAFMPVGTYGTVKGMTPEELEGLGAEIVLGNTFHLMLRPGTEIIARHGDLHGFMHWERPILTDSGGFQVFSLAKLRKLSEEGVSFRSPVNGDKVMLTPERSMAVQRALGSDIVMVFDECTPYPATEDEAAASMRLSLRWAARSREAHGDSTSALFGIVQGGMYEALRLESAAGLQAIGFDGYAIGGLAVGEPAEERLRTLEFTLPALPADRPRYLMGVGTPEDIVESVLRGVDMFDCVIPTRNARNGFLYTRSGVMRIRNARYADDTRPLEEGCECYTCRNYSRAYLRHLDKCGEILGARLNTIHNLHYYQTLMRELREAIAAGCLDEYVSAFRALRANPGDAVP

SEQ ID NO: 51024 - protein, 369 aa, Acidimicrobiaceae bacterium
  misc_feature (1)..(369): tr|A0A2E7Q854|A0A2E7Q854_9ACTN Queuine tRNA-ribosyltran sferase OS=Acidimicrobiaceae bacterium OX=2024894 GN=tg t PE=3 SV=1
  misc_feature (167)..(167): Xaa can be any naturally occurring amino acid
MKAVSEVIATDGEARLSEVTLAGGKFQTPCFMPVGTRGAVKHLSSSDMKDLNAEIILGNTYHLMLRPGSDLIRESGGLAKFASWDGLTLTDSGGYQIFSLQPKVDDLGATFRSIYDGSSHHLTPELASTTQADLGADIQMVLDVCSALPAEKNILKEAVDRTALWAXRGREAFLLHPEAQERQSQFGIVQGGTDISLRIESTQRTLQVGFDGYAIGGLSVGEGRSEMLDPVSSVTELLPKDQPRYFMGLGDPAGLVEVVGRGVDMFDCVLPTRLARHGTVLTSEGRINLRNAKFIADERPLDPSFENSPASNWSRSYLRHLLVTEEPTAPRILTLHNLAWMFEFVTQLRKSIIEGEFQKFRKETLEIWG

SEQ ID NO: 51025 - protein, 369 aa, Acidimicrobiaceae bacterium
  misc_feature (1)..(369): tr|A0A2E8BDV0|A0A2E8BDV0_9ACTN Queuine tRNA-ribosyltran sferase OS=Acidimicrobiaceae bacterium OX=2024894 GN=tg t PE=3 SV=1
MKAIFHEEATCDGARAGQVDTPGGSFTTPCFMPVGTRGAVRHLSSKDLGDLGAEVVLANTYHLMLRPGVEVVRDLGGLRGFTGWQGLSLTDSGGYQIFSLQPRVDDVGAEFRSTYDGSIHKLTPEGAAGVQADLGADIQMVLDVCSALPATDAIVRQAVDRTSAWAVRGRKAFLDHPDAQQRQCQFGIVQGGTNVALRTESAQRTLEVGFDGYAIGGLSVGETRDEMLDPVSAVTTVLPADQPRYFMGLGDPAGLVEVVGRGVDMFDCVLPTRHARHGTVLTSSGKLNLRNARFATDDDPLDPGFPTSPAAPWSRAYLRHLLMTDEPTGRRLLSLHNLAWLLGFVDRLRSSISEGRFAQFRAETLEVWG

SEQ ID NO: 51026 - protein, 364 aa, Acidimicrobiales bacterium
  misc_feature (1)..(364): tr|A0A2A5YVU7|A0A2A5YVU7_9ACTN Queuine tRNA-ribosyltran sferase OS=Acidimicrobiales bacterium MED-G01 OX=198626 3 GN=tgt PE=3 SV=1
MSLSFELLASDHQARRGRIHTSRGSIETPVFMPVGTRGAVIHLDQRDYKELDIEVVLGNTYHLMLRPGAQIIEDLGGLHSFASWDGHMLTDSGGFQVMSLNDNVKIDDDGVTFTSIYDGSKVRFTPEDAVSTQEQLGADIQMALDVCPALPSSQDTVVKAMERTHDWASRAKSVHRLTDQALFGIVQGGIDPRLRTRSAKHMASLDFPGYGIGGLSVGESHGEMMPALNAAAIELPEDRPRYLMGVGDPARIVDAIGSGIDMFDCVLPTRLARHGTVLTSSGKLNLRNAKHARDDQPLDPANPMSNSFSRAYLRHLIQVKEPTAARIATMHNLWFLLDLVKQARRAIEDGTYDSFRLKILETWA

SEQ ID NO: 51027 - protein, 382 aa, Acidimicrobiales bacterium
  misc_feature (1)..(382): tr|A0A2W6CCP9|A0A2W6CCP9_9ACTN Queuine tRNA-ribosyltran sferase OS=Acidimicrobiales bacterium OX=2201156 GN=tgt PE=3 SV=1
MILQLKVDATDGAARVGRLQTPRGSFAVPAFMPVGTRGSVRAVSSADMENLGAEVMLANTYHLMLRPGVDVVAGLGGLHAFTSWPGHLLTDSGGYQVYSLGPKVDDDGVTFRSVYDGSSHRLTPEGAVRIQEQLGADIQMVLDVCPALPSPPDVLRLAVERTADWAARAKLAHRRDGQALFGIVQGGTDEALRAESARRTVELDFEGYGIGGLAVGEGPEARLAALASAVTELPTDRPRYLMGVGDPVGLVEAVAMGVDLFDCVAPTRWARHGRVLTGEGPLQLRNAVFRCDPGPLDPDCRCVTCSRWSRAYLRHLLMVGEPSALRLLSLHNLAWTLNLMESVGEAVRTGTLGSLRRQVASVWDAARSGSRPRGRGSVTRRG

SEQ ID NO: 51028 - protein, 378 aa, Acidimicrobiia bacterium
  misc_feature (1)..(378): tr|A0A431IE18|A0A431IE18_9ACTN Queuine tRNA-ribosyltran sferase OS=Acidimicrobiia bacterium OX=2080302 GN=tgt P E=3 SV=1
MKLTIDVEHRDGRARTGTVHTARGAFRTPLFMPVATRGSIRALMTHELTGLAAADGTRAEVLLANTYHLMLRPGAEVVADLGGLAAFSGWDGLTLTDSGGYQVFSLGPKLHDGGAEFRSTYDGSTHLLTPEGAVATQELLGADIQMVLDVCAALPSSRAALRDALETTASWAARARAAHRRTGDQALFGIVQGGTETDLRAESAQRTVELDFDGYAVGGLSVGETREEMLPALDAALEHLPVDQPRYLMGVGDPLSIVEAVARGVDMFDCVLPTRLARHGTLLTDAGRLNIKRAEFARSEDPIDPNCPCPTCATYSRGYLRHLTAVGEPAAASLCTVHNLTWMLGLVARIRAAIAAGRLDGLRAEVAGVWSGSGPGLG

SEQ ID NO: 51029 - protein, 371 aa, Acidimicrobiia bacterium
  misc_feature (1)..(371): tr|A0A0R2QPB4|A0A0R2QPB4_9ACTN Queuine tRNA-ribosyltran sferase OS=Acidimicrobiia bacterium BACL6 MAG-120910-bi n40 OX=1655586 GN=tgt PE=3 SV=1
MFPVQFTTDAVDGNARAGTAVTHRGSYTTPCFMPVGTRGAIKYLSASDYEELGAQIVLGNTYHLMLRPGAQTVSAMGGLGAFAGWKGLTLTDSGGFQVFSLSPDVDDDGVTFKSTYDGSRHRYTPESAVQTQQLLGADIQMVLDVCPPLPSPAHVVRLALERTSSWAQRAVLTHTRTDQSLFGIVQGGIDVNLRAESAARTAELNFDGYGIGGLSVGESRQEMLPALEAALAHLPLDRPRYLMGVGDPASLVEAVHLGVDQFDCVLQTRLGRHGTALTSQGRVNLKRSEFTLSNDPIDSSCLCSVCTRHTRGYIRHLFQVGEPTASRLVSMHNIAWTLSLMEKMRNAVIAGRFAALRQEILAVWGNAASLG

SEQ ID NO: 51030 - protein, 378 aa, Acidimicrobium ferrooxidans
  misc_feature (1)..(378): tr|C7LYS5|C7LYS5_ACIFD Queuine tRNA-ribosyltransferase OS=Acidimicrobium ferrooxidans (strain DSM 10331 / JCM 15462 / NBRC 103882 / ICP) OX=525909 GN=tgt PE=3 SV=1
MRPSFRIDATDGTARAGTLTLRHGLVPTPVFMPVATRGMVRLVPPATLHELGVSLLLANTYHLALRPGADVVAALGGLSAFTGFGGPMLTDSGGFQVMSLGGTVDDDGVTFRSTYDGRRVRLTPEGVVELEERFGVDIAMVLDVCTMLPAERAALQVAMVRTTEWARRAAAARRDEAQALFGIVQGGSEEDLRREHASQIAEIGFDGYGIGGLAVGESAPATLAAVAAALERLPADRPRYLMGVGDPYLIAHAVELGVDAFDCVAPTRLARHGIALTSQGRLALRPSRWLGSDEPVDPRCGCSTCRTVPRGLVAHLLRVDAHSAGALLSVHNLSFQLGLLRDLRAAIRAGTLAGLVRALDEVWAPSWRSARTEAAPDR

SEQ ID NO: 51031 - protein, 372 aa, Acidimicrobium sp.
  misc_feature (1)..(372): tr|A0A0R2QJU8|A0A0R2QJU8_9ACTN Queuine tRNA-ribosyltran sferase OS=Acidimicrobium sp. BACL27 MAG-120823-bin4 OX =1655564 GN=tgt PE=3 SV=1
MFAVKFRETARDQSARAGIATTHRGEYETPCFMPVGTRGAIRHLSAQDYEELGARIVLGNTYHLMLRPGAQVVSDLGGLGAFAGWKGLTLTDSGGFQVFSLNPDVDDEGVSFRSTYDGSMHRFTPEKAVVTQQLLGADIQMVLDVCASLPATDDVIKLALKRTSNWAARAKAAHTRSDQSLFGIVQGGIDPVLRQESAKITANLEFDGYGIGGLSVGETREEMLVALSAAIEHLPKDRPRYLMGVGDPASLVEAVNLGVDQFDCVMQTRIGRHGTALTSVGKLNITRAEFATSQDPIDLQCSCPVCKRHTRGYIRHLFQVNEPTAARLVSIHNIAFTLNLMTQMRDAIANGVFSSLRKSLLAVWADTANDKA

SEQ ID NO: 51032 - protein, 367 aa, Acidimicrobium sp.
  misc_feature (1)..(367): tr|A0A0R2PJJ6|A0A0R2PJJ6_9ACTN Queuine tRNA-ribosyltran sferase OS=Acidimicrobium sp. BACL17 MAG-120924-bin0 OX =1655565 GN=tgt PE=3 SV=1
MFPVEFSQVAQDGQARAGVATTHRGTYSTPCFMPVGTRGAIKYLSAQDYEQLGAQIVLGNTYHLMLRPGAELIARFGGLGAFAGWNGLTLTDSGGFQVFSLNPDVDDEGVTFKSTYDGSMHRFTPESAVHTQQLLGADIQMVLDVCPPLPSPPHVVRTALERTSMWAARARDAHERHDQSLFGIVQGGIDINMRAESAERTATLQFDGYGIGGLSVGETREEMVPALQAAITHLPANRPRYLMGVGDPASLVEAVNLGVDQFDCVLQTRLGRHGTALTSAGRVNLKRAEFTESDDPIDATCSCMVCTRHSRGYIRHLFQVGEPTASRLVSIHNVAWTISLMDQMRRSIIDGSFAQLRQDILAIWGTT

SEQ ID NO: 51033 - protein, 376 aa, Acidiphilium cryptum
  misc_feature (1)..(376): tr|A5FY69|A5FY69_ACICJ Queuine tRNA-ribosyltransferase OS=Acidiphilium cryptum (strain JF-5) OX=349163 GN=tgt PE=3 SV=1
MTGFAFHNLGQDGAARRGRLVTAHGTAETPAFMAVGTAGTVKAMTADAVRATGTEIVLGNTYHLMLRPGAERVRALGGLHRMMDWPGIILTDSGGFQVMSLAKLRKIDEVGVTFRSHLDGSAHHLTPESSTAIQNALDATITMAFDECTPFPATHEQAAASMRLSMRWAERSRAAFEPRPGYGQFGIVQGSVFADLRAESAAALTGLGFEGYAIGGLAVGEGQQAMFDTLDVTTPLLPTDRPRYLMGVGTPDDLLGSIARGVDMFDCVMPTRAGRTGRAFTSRGILNLRNARFAAEDRPLDPACPCLACARHSRAYLHHLFRCDEMLGPMLLTTHNLSYYQTVMRGAREAIEAGRFAAYAAATRDAWSQGDDRHTL

SEQ ID NO: 51034 - protein, 376 aa, Acidiphilium multivorum; identical to SEQ ID NO: 51033
  misc_feature (1)..(376): tr|F0IY74|F0IY74_ACIMA Queuine tRNA-ribosyltransferase OS=Acidiphilium multivorum (strain DSM 11245 / JCM 8867 / NBRC 100883 / AIU301) OX=926570 GN=tgt PE=3 SV=1

SEQ ID NO: 51035 - protein, 372 aa, Acidiphilium rubrum
  misc_feature (1)..(372): tr|A0A1N6RP61|A0A1N6RP61_ACIRU Queuine tRNA-ribosyltran sferase OS=Acidiphilium rubrum OX=526 GN=tgt PE=3 SV=1
MTEFAFTLLGQDGAARRGRITTAHGTAQTPAFMAVGTAGTVKAMTADQVRATGSEIVLGNTYHLMLRPGADRVAALGGLHRMMDWPGIILTDSGGFQVMSLAKLRKLDEIGVTFRSHIDGSAHHLTPESSTAIQHKLDATITMAFDECTPFPATPDEAAASMRLSMRWAARSRAAFTPRPGYAQFGIVQGGIYPDLRAESAAALTALGFEGYAIGGLAVGEGQPAMFETLDATTPLLPATSPRYLMGVGTPDDLLGAIERGVDMFDCVMPTRAGRTGRAYTARGVFNLRNARFGDDATPLDPACTCTLCTRHSAAYLHHLFRCEEMLGPMLLTGHNLTYYQALMHGARTAIEQHRFAAYAAAARDGWRQTHD

SEQ ID NO: 51036 - protein, 376 aa, Acidiphilium sp.
  misc_feature (1)..(376): tr|A0A257R8Q1|A0A257R8Q1_9PROT Queuine tRNA-ribosyltran sferase OS=Acidiphilium sp. 20-67-58 OX=1970291 GN=tgt PE=3 SV=1
MTGFAFHNLGQDGAARRGRLITAHGTAETPAFMAVGTAGTVKAMTADAVRATGTEIVLGNTYHLMLRPGAERVRALGGLHRMMDWPGIILTDSGGFQVMSLAKLRKIDEVGVTFRSHLDGSAHHLTPESSTAIQNALDATITMAFDECTPFPATHEEAAASMRLSMRWAERSRAAFEPRPGYGQFGIVQGSVFADLRAESAAALTGLGFEGYAIGGLAVGEGQQAMLDTLDVTTPLLPTDRPRYLMGVGTPDDLLGSIARGVDMFDCVMPTRAGRTGRAFTSRGILNLRNARFAAEDRPLDPACHCLACARHSRAYLHHLFRCDEMLGPMLLTTHNLSYYQTVMRGAREAIEAGRFAAYAAATRDAWSQGDDRHTL

SEQ ID NO: 51037 - protein, 370 aa, Acidiphilium sp.
  misc_feature (1)..(370): tr|R7FXQ2|R7FXQ2_9PROT Queuine tRNA-ribosyltransferase OS=Acidiphilium sp. CAG:727 OX=1262689 GN=tgt PE=3 SV=1
MEKFYFETIKQDSETGARAGVLHTPHGDIETPVYMPVGTQATVKGVYPRDLKEAGSQIILANTYHLFMRPGDEIVKSAGGLHKFMNWDKPILTDSGGFQVFSLAKLNDIKDEGVTFSSNVDGSKHFVTPEKAIDIENNLGADIIMAFDQCSEYGASYEKSKTAMYRTLNWLDRCYNHHKNENQALFPIVQGNVFKDLRATSLKETVPYAKYGIGIGGLSVGEPKELMYDVMDSMLPNYPTNVPRYLMGVGSPDCLLEGVMRGIDMFDCVLATRIARNGTAMTSRGKVVVRNGKYKEDFTPLDPECDCYCCKNYTKAYLRHVINVNEMMGGMLLSLHNITFLHNLMKGIRKSILGGYFKDFRKEFYEKYGE

SEQ ID NO: 51038 - protein, 397 aa, Acidipila dinghuensis
  misc_feature (1)..(397): tr|A0A4Q1SKS7|A0A4Q1SKS7_9BACT Queuine tRNA-ribosyltran sferase OS=Acidipila dinghuensis OX=1560006 GN=tgt PE=3 SV=1
MSLDFQILHAAGEARRATMRLPHAAVETPVFMPVGTVASVKALPQHFLEELDARIILGNTYHLYLRPGHELVQRMGGLHRFMSWDRAMLTDSGGFQVFSLNELRKVTDDGVEFRSHLDGSKHFFSPEHSMAVQIALGADICMAFDECTEYPADYARARKSLDTTLRWAERSKTYFDAHRHERPWDLHIAGTELRGMDHSGTGLRGEGPDGFAGLQPNLFGIVQGGMYKDLRRESAERLVEMDFPGYAIGGLSVGEPRDLTLEVIAETLPYLPKDKPRYVMGVGFPDEIVEYAKMGVDMMDCVLPTRAARHGMLFTSEGRLNMKNKQFAEDQGPVDPECDCPTCRRYTRAYLRHLMVAHEPLAATLNTLHNLAFYLRTMAKVREEITRAGGAAAPVAG

SEQ ID NO: 51039 - protein, 371 aa, Acidipila rosea
  misc_feature (1)..(371): tr|A0A4R1L3D5|A0A4R1L3D5_9BACT Queuine tRNA-ribosyltran sferase OS=Acidipila rosea OX=768535 GN=tgt PE=3 SV=1
MNRVSLHFEILNSGAAGRRGTLTLPHGQVETPAFMPVGTAASVKALPQHFLEELDARIILGNTYHLYLRPGHELIRRMGGLHRFMSWPRALLTDSGGFQVFSLNELRKVTEEGVRFRSHLDGSSHFFSPEHSMDVQIALGSDIAMAFDECLEYPADRERARKSLDLTMRWAARSKAHFDAHKHEAPWVDELEQTPNLFGIVQGGMFADLRRESAERLVEMDFPGYAIGGLSVGEPRELTREIIADTLPLLPADKPRYVMGVGYPDEIVEYAKMGVDMMDCVLPTRAARHGLLFTSEGRLNIKNRRFAEDQGPLDPECSCPVCQRYSRAYLRHLMAAQEPLAAVLNTLHNLAFYLMTMRRVREELAGSVPSI

SEQ ID NO: 51040 - protein, 379 aa, Acidipila sp.
  misc_feature (1)..(379): tr|A0A372ING7|A0A372ING7_9BACT Queuine tRNA-ribosyltran sferase OS=Acidipila sp. 4G-K13 OX=2303751 GN=tgt PE=3 SV=1
MSLAFQIHAESGAARRATMMLPHAAVETPVFMPVGTVGSVKAVPQHLLEELDARIILGNTYHLYLRPGHELVRRMGGLHRFMSWERAILTDSGGFQVFSLNELRKVTEEGVAFRSHIDGSSHFFSPEHSMDVQVALGSDIAMAFDECTEYPADYARARKSLDLTLRWAQRSRDHFEAHKHERPWSEGFEGKMPSLFGIVQGGMYPDLRRESAERLVEMDFPGYAIGGLSVGEPRELTREIIAATLPLLPKDKPRYVMGVGYPDEIVEYAAMGVDMMDCVLPTRAARHGLLFTSEGRLNIKNRRFAEDQGPADPKCDCLVCRRYSRAYLRHLMTAQEPLAAVLNTLHNLAFYLGTMRRVRERIEAGLPVTDLKMEASQSA

SEQ ID NO: 51041 - protein, 401 aa, Acidipila sp.
  misc_feature (1)..(401): tr|A0A3P0X738|A0A3P0X738_9BACT Queuine tRNA-ribosyltran sferase OS=Acidipila sp. EB88 OX=2305226 GN=tgt PE=3 SV =1
MSLLFEVAATSPAGGRRGRMHLPHGTVETPVFMPVGTAATVKAVPQDTLETLGTDEAVAAGEQPGAGIILGNTYHLYLRPGHEAIQRMGGLHRFMSWDRPLLTDSGGYQVFSLSALRKISEEGVRFSSHLDGSKHMFSPEHSMAVQLALGSDIAMAFDECLEYPADEARARASLELTMRWAARSLAYWEAHKHEAPWWSADASGRRRPGPVVAPEARPSLFGIVQGGMYPSMRREAAERMVAMDFPGYAIGGLAVGEPRERTLEIIAATLPYLPADKPRYVMGVGYPEEIAEYARMGVDMMDCVLPTRAGRHGLLFTSEGRLNIKNRRFAEDQGPADPECGCPVCRRYTRAYLRHLFAAGEPLAATLNSVHNLAFYLETMRCVRAELAASRTHEMERSLSS

SEQ ID NO: 51042 - protein, 420 aa, Acidipropionibacterium acidipropionici
  misc_feature (1)..(420): tr|A0A142KDQ5|A0A142KDQ5_9ACTN Queuine tRNA-ribosyltran sferase OS=Acidipropionibacterium acidipropionici OX=17 48 GN=tgt PE=3 SV=1
MSPMPFGFDVTSTLDNGLGRTGTIHTPHGDIETPAFIVVGTKASVKAVLPESVAELGAQAVLANAYHLFLQPGPDLIDEAGGLGRFMNWSAPTFTDSGGFQVLSLGAGFKKTLAMDVSQLTEADVIAADADRKAMVDDDGVTFRSPLNGDLHRFTPEFSMSIQHRLGADIMFAFDELTTLMNTRPYQEEALERTRRWAARCLAEHRRLTGERAGKPYQALFGVIQGAQYEDLRRKACRDLAAMESEGQGFDGFGIGGAIEKKNLGRIVGWCAEELPEDRPRHLLGISEPDDLFAACRAGADTFDCVNPSRVARNAAIYTADGRYNVNTAPFRADFGPLEPGCDCYTCTHYSRAYLHHLFKAKELLANTLATIHNERWTVRLVDDIRAAMRGGDLDALEAEFMGRWNAHGGRLVRRAQVQG

SEQ ID NO: 51043 - protein, 417 aa, Acidipropionibacterium acidipropionici
  misc_feature (1)..(417): tr|K7SIX8|K7SIX8_ACIA4 Queuine tRNA-ribosyltransferase OS=Acidipropionibacterium acidipropionici (strain ATCC 4875 / DSM 20272 / JCM 6432 / NBRC 12425 / NCIMB 8070) OX=1171373 GN=tgt PE=3 SV=1
MPFGFDVTSTLDNGLGRTGTIHTPHGDIETPAFIVVGTKASVKAVLPESVAELGAQAVLANAYHLFLQPGPDLIDEAGGLGRFMNWSAPTFTDSGGFQVLSLGAGFKKTLAMDVSQLTEADVIAADADRKAMVDDDGVTFRSPLNGDLHRFTPEFSMSIQHRLGADIMFAFDELTTLMNTRPYQEEALERTRRWAARCLAEHRRLTGERAGKPYQALFGVIQGAQYEDLRRKACRDLAAMESEGQGFDGFGIGGAIEKKNLGRIVGWCAEELPEDRPRHLLGISEPDDLFAACRAGADTFDCVNPSRVARNAAIYTADGRYNVNTAPFRADFGPLEPGCDCYTCTHYSRAYLHHLFKAKELLANTLATIHNERWTVRLVDDIRAAMRGGDLDALEAEFMGRWNAHGGRLVRRAQVQG

SEQ ID NO: 51044 - protein, 438 aa, Acidipropionibacterium jensenii
  misc_feature (1)..(438): tr|A0A4V1IAY4|A0A4V1IAY4_9ACTN Queuine tRNA-ribosyltran sferase OS=Acidipropionibacterium jensenii OX=1749 GN=t gt PE=3 SV=1
MPLGFDITSRLDNGLGRTGTIHTPHGDIQTPAFVVVGTKATVKAMLPETVAQLGAQAVLANAYHLFLQPGPELIDEAGGLGRFMNWTGPTFTDSGGFQVLSLGAGFKKTLAMDVADLTEADVIAADADRKAMVDDDGVTFRSPLNGDLHRFTPEVSMGIQHHLGADIMFAFDELTTLMNTRGYQQEALERTRRWALRCLAEHRRLTEERTGKPYQALFGVIQGAQYEDLRRTACRDLAAMEVDGQRFDGFGIGGAIEKQNLGRIVGWCAQELPENRPRHLLGISEPDDLFAACRAGADTFDCVNPSRVARNAAIYTVDGRYNVNTARFRRDLGPLEPGCDCYTCTHYSRAYLHHLFKAREMLANTLATIHNERWTVRLVDSIRSAMASGQLDDLETEFMGRWNAHGGRLPAPRSASVGAAGSVGSAAAAAAGAGGAKE

SEQ ID NO: 51045 - protein, 438 aa, Acidipropionibacterium jensenii
  misc_feature (1)..(438): tr|A0A3S4V5F8|A0A3S4V5F8_9ACTN Queuine tRNA-ribosyltran sferase OS=Acidipropionibacterium jensenii OX=1749 GN=t gt PE=3 SV=1
MPLGFDMTSRLDNGLGRTGTIHTPHGDIQTPAFVVVGTKATVKAMLPETVAQLGAQAVLANAYHLFLQPGPELIDEAGGLGRFMNWTGPTFTDSGGFQVLSLGAGFKKTLAMDVADLTEADVIAADADRKAMVDDDGVTFRSPLNGDLHRFTPEVSMGIQHHLGADIMFAFDELTTLMNTRGYQQEALERTRRWALRCLAEHRRLTEERTGKPYQALFGVIQGAQYEDLRRTACRDLAAMEVDGQRFDGFGIGGAIEKQNLGRIVGWCAQELPENRPRHLLGISEPDDLFAACRAGADTFDCVNPSRVARNAAIYTVDGRYNVNTARFRRDLGPLEPGCDCYTCTHYSRAYLHHLFKAREMLANTLATIHNERWTVRLVDSIRSAMASGQLDDLETEFMGRWNAHGGRLPAPRSASVGAAGSVGSAAAAAAGAGGAKE

SEQ ID NO: 51046 - protein, 417 aa, Acidipropionibacterium virtanenii
  misc_feature (1)..(417): tr|A0A344UUX3|A0A344UUX3_9ACTN Queuine tRNA-ribosyltran sferase OS=Acidipropionibacterium virtanenii OX=2057246 GN=tgt PE=3 SV=1
MPFGFDVTSTLGNGLGRTGVIRTPHGDIETPAFIVVGTKASVKAVLPESVAQLGAQAVLANAYHLFLQPGPDLVDEAGGLGRFMNWPGPTFTDSGGFQVLSLGAGFKKTLAMDVSQLTPADVIAADADRKAMVDDDGVTFRSPLNGDLHRFTPEVSMGIQHRLGADVMFAFDELTTLMNTRPYQEEALERTRRWAARCLAEHRRLTEARPGRPYQALFGVIQGAQFEDLRRTACRDLARMEAGGRGFDGFGIGGAIEKKNLGRIVGWCASELPDDRPRHLLGISEPDDLFAACRAGADTFDCVNPSRVARNAAIYTAEGRYNVNTAPFRRDFGPLEDGCDCYTCTHYSRAYLHHLFKAKELLANTLATIHNERWTVRLVDDIRAAMRAGELDGFEAEFMGRWNANGGRLVRRAPAQN

SEQ ID NO: 51047 - protein, 374 aa, Acidisarcina polymorpha
  misc_feature (1)..(374): tr|A0A2Z5FYY9|A0A2Z5FYY9_9BACT Queuine tRNA-ribosyltran sferase OS=Acidisarcina polymorpha OX=2211140 GN=tgt PE =3 SV=1
MYLPHAAVQTPVFMPVGTQATVKAIPQHLLEELGAQIILGNTYHLYLRPGHEVIRRLGGLHQFMSWPRALLTDSGGFQVFSLSELRKVTEEGVRFRSHLDGSSHFFSPEHSMDVQIALGADIVMAFDECTEYPADFGRARKSLDLTLCWAQRSKDHFHAHQHERPWAENFAGQNQSLFGIVQGGMFPELRREAAERLVEMDFPGYAIGGLSVGEPRTLTREIIEATLPFLPATKPRYVMGVGYPEEIVEYAAMGVDMMDCVLPTRAARHGLLFTSEGRLNIKNRRFAEDQGPLDPECGCMVCSRYSRAYLRHLFVAQEVLGSVLNTVHNLAYYLDTMESVRDAIELGTLPALVARVRARSTGGASSETERPGSQ

SEQ ID NO: 51048 - protein, 375 aa, Acidisphaera rubrifaciens
  misc_feature (1)..(375): tr|A0A0D6P4T8|A0A0D6P4T8_9PROT Queuine tRNA-ribosyltran sferase OS=Acidisphaera rubrifaciens HS-AP3 OX=1231350 GN=tgt PE=3 SV=1
MRLTWDAAARDGAARAGTLRTAHGDVPTPTFMPVGTAGTVKAMTADAVRATGAGIVLGNTYHLMLRPGAERVAALGGLHRFMDWPGPILTDSGGFQVMSLSKLREIDAGGVTFQSHLDGSRHRLTPARAMDIQHKLDATITMVLDECTPWPATEEQAGASLALSMRWAAEARVAFVARPGYGLFGIVQGGTYPHLRAQSVEALTAIGFDGYAVGGLAVGEGQALMFATLDVTVPLLPGDAPRYLMGVGTPDDLVGAVTRGIDMFDCVIPTRAGRTARAFVPEGTLNLRNARHAGADVPLQDGCPCPACTRHSRAYLHHLFRAGEMLGPMLLTWHNLTYYQALMRGMRDAILDGRFAGHAAALRAGWRRPDETDDP

SEQ ID NO: 51049 - protein, 371 aa, Acidithiobacillales bacterium
  misc_feature (1)..(371): tr|A0A0S8BK35|A0A0S8BK35_9PROT Queuine tRNA-ribosyltran sferase OS=Acidithiobacillales bacterium SG8_45 OX=1703 383 GN=tgt PE=3 SV=1
MKFELQQADGAARRGQLVFDRGTVQTPAFMPVGTYGTVKAMTPEELRTAGAEIVLGNTFHLMLRPGTDVIAAHGDLHDFMHWSGPILTDSGGFQVWSLGKLRKITEEGVRFQSPVDGKRIFMGPEESMAVQQALGADIIMIFDECTAFPATEPEARASMELSLRWAERSKLAHGDHSSALFGIIQGGMYEHLRDISLTGLKQIGFDGYAIGGLSVGEPKEDMLRVLSHLEPQMPREHPRYLMGVGTPEDIVEAVRRGIDMFDCVMPTRNARNGWLFTSEGVVKIRNARYERDTAPLDPDCDCYTCQNYSRAYLRHLHRCNEILGARLNTIHNLHYYQRLMRDLRAAIAAKGLDDFVEKFYGKRRLKNDKPA

SEQ ID NO: 51050 - protein, 389 aa, Acidithiobacillales bacterium
  misc_feature (1)..(389): tr|A0A0S8L431|A0A0S8L431_9PROT Queuine tRNA-ribosyltran sferase OS=Acidithiobacillales bacterium SM1_46 OX=1703 384 GN=tgt PE=3 SV=1
MKFELIGSCGAARRGRLRLARGTVQTPAFMPVGTYGTVKAMTPEELRETGAEIILGNTFHLMLRPGVEVIRAHGDLHRFMHWEGPILTDSGGFQVWSLDRLRKVTEQGVRFQSPVDGSRIFMGPEESIAVQHALGADIVMIFDECTPHPATEAETRGSMELSLRWAERSKLAHGKHDSALFGIVQGGMYEHLRDISLTGLKQIGFDGYAIGGLSVGESKADMFRILSHLAPRMPVDRPRYLMGVGTPEDLVEAVRRGVDMFDCVLPTRNARNGWLYTHDGHVKILNSRYAADTGPIDPQCDCYTCRHYSRAYLRHLQRANEILGARLATIHNLHYYQSLMRGLREAISSETLDDFVEKFYRMRPKNSEAPGTAADSAASTSIPSNRGTS

SEQ ID NO: 51051 - protein, 375 aa, Acidithiobacillus caldus
  misc_feature (1)..(375): tr|A0A060A0R7|A0A060A0R7_ACICK Queuine tRNA-ribosyltran sferase OS=Acidithiobacillus caldus (strain ATCC 51756 / DSM 8584 / KU) OX=637389 GN=tgt PE=3 SV=1
MTFFERLAQDGAARRGRLHFDRGSVETPAFMPVGTYGTVKAVTPEELRETGAEIILGNTFHLFLRPGLEVIETLGGLHGMMHWDGPILTDSGGFQVFSLGALRRLSEAGVRFRAPVDGRPVFLGPEESMDIQRRLGSDIAMVFDECTPHPATWDEARASMELSLRWAARSRAAYAGPGQIFGIVQGGMYGDLRRRSLAGLKALDFPGLALGGLSVGESKAEMLAVLDDILPQMPQDKPRYLMGVGLPEDLVEGVWRGVDMFDCVLPTRNARNGWLFTRHGVLKLRNARYERDVLPPDPECRCYTCRHYSRAYLRHLQRSQEILGARLNTIHNLHYYQELMAGMRQAIELGRLAVFRRDFYAARGSEAPKVSQVLS

SEQ ID NO: 51052 - protein, 375 aa, Acidithiobacillus caldus; identical to SEQ ID NO: 51051
  misc_feature (1)..(375): tr|A0A1E7YLD4|A0A1E7YLD4_9PROT Queuine tRNA-ribosyltran sferase OS=Acidithiobacillus caldus OX=33059 GN=tgt PE= 3 SV=1

SEQ ID NO: 51053 - protein, 371 aa, Acidithiobacillus ferridurans
  misc_feature (1)..(371): tr|A0A2Z6IEI6|A0A2Z6IEI6_9PROT Queuine tRNA-ribosyltran sferase OS=Acidithiobacillus ferridurans OX=1232575 GN= tgt PE=3 SV=1
MSIFELLARDGAARRGIIRLPRGTVQTPAFMPVGTYGTVKAMSPEELKTLGAEIILGNTFHLFLRPGLEVVSAVGGLHRMMHWDRPILTDSGGFQVFSLGALRKLTEAGVQFRAPTDGHMVFLGPEESMQIQATLGSDIAMVFDECTPHPASYEEARVSMELSLRWAARSHAAYAGPGKLFGIVQGGMYADLRQRSLAGLQRLDFPGLAIGGLSVGESKVEMMQVLDDLMPHMPADRPRYLMGVGTPEDLVEGVRRGVDMFDCVMPTRNARNGWLFTRDGILKLRNARYEKDVLPPDPACACYTCQNYSRAYLRHLQRSHEILGARLNTLHNLHYYQELIMGLREAIAAGRLDAYADDFYRRRRAGSLVGA

SEQ ID NO: 51054 - protein, 371 aa, Acidithiobacillus ferrivorans
  misc_feature (1)..(371): tr|A0A1B9BX47|A0A1B9BX47_9PROT Queuine tRNA-ribosyltran sferase OS=Acidithiobacillus ferrivorans OX=160808 GN=t gt PE=3 SV=1
MSIYQLLARDGAARRGVLRLPRGNIQTPAFMPVGTYGTVKAMSPEELKTLGAEIILGNTFHLFLRPGLEVISAVGGLHKMMHWDRPILTDSGGFQVFSLGALRKLTEAGVQFRAPTDGHKVFLGPEESMQIQAALGSDIAMVFDECTPHPATYAEARVSMELSLRWAARSRAAYAGPGQLFGIVQGGMYGDLRQRSLAGLQRLDFPGLAIGGLSVGESKAEMMQVLEDLMPQMPADRPRYLMGVGTPEDLVEGVCRGVDMFDCVMPTRNARNGWLFTRDGILKLRNARYEKDALPPDPQCACYTCQNYSRAYLRHLQRSHEILGARLNTLHNLHYYQELMAGLRDAIAAGRVGAFTDDFYRRRRAGSLVDA

SEQ ID NO: 51055 - protein, 371 aa, Acidithiobacillus ferrivorans
  misc_feature (1)..(371): tr|A0A1E7XUJ1|A0A1E7XUJ1_9PROT Queuine tRNA-ribosyltran sferase OS=Acidithiobacillus ferrivorans OX=160808 GN=t gt PE=3 SV=1
MSIYQLLARDGAARRGVLRLPRGNIQTPAFMPVGTYGTVKAMSPEELKTLGAEIILGNTFHLFLRPGLEVISAVGGLHKMMHWDRPILTDSGGFQVFSLGALRKLTEAGVQFRAPTDGHKVFLGPEESMQIQAALGSDIAMVFDECTPHPATYAEARVSMELSLRWAARSRAAYAGPGQLFGIVQGGMYGDLRQRSLAGLQQLDFPGLAIGGLSVGESKAEMMQVLEDLMPQMPADRPRYLMGVGTPEDLVEGVCRGVDMFDCVMPTRNARNGWLFTRDGILKLRNARYEKDALPPDPQCACYTCQNYSRAYLRHLQRSHEILGARLNTLHNLHYYQELMAGLRDAIAAGRVGAFTDDFYRRRRAGSLVDA

SEQ ID NO: 51056 - protein, 371 aa, Acidithiobacillus ferrooxidans
  misc_feature (1)..(371): sp|B7J4R9|TGT_ACIF2 Queuine tRNA-ribosyltransferase OS= Acidithiobacillus ferrooxidans (strain ATCC 23270 / DSM 14882 / CIP 104768 / NCIMB 8455) OX=243159 GN=tgt PE=3 SV=1
MSIFQLLARDGAARRGTIRLPRGTVQTPAFMPVGTYGTVKAMSPEELKTLGAEIILGNTFHLFLRPGLEVISAVGGLHRMMHWDRPILTDSGGFQVFSLGALRKLTEAGVQFRAPTDGHMVFLGPEESMQIQAALGSDIAMVFDECTPHPASYEEARVSMELSLRWAARSHAAYAGPGELFGIVQGGMYADLRRRSLAGLQRLDFPGLAIGGLSVGESKVEMMQVLDDLMPHMPADRPRYLMGVGTPEDLVEGVRRGVDMFDCVMPTRNARNGWLFTRDGVLKLRNARYEKDVLPPDPACACYTCQNYSRAYLRHLQRSHEILGARLNTLHNLHYYQELMAGLREAIAAGRLDAYADDFYRRRRAGSLVGA

SEQ ID NO: 51057 - protein, 371 aa, Acidithiobacillus ferrooxidans; identical to SEQ ID NO: 51056
  misc_feature (1)..(371): sp|B5EK08|TGT_ACIF5 Queuine tRNA-ribosyltransferase OS= Acidithiobacillus ferrooxidans (strain ATCC 53993) OX=3 80394 GN=tgt PE=3 SV=1

SEQ ID NO: 51058 - protein, 369 aa, Acidithiobacillus sp.
  misc_feature (1)..(369): tr|A0A2I1DKW5|A0A2I1DKW5_9PROT Queuine tRNA-ribosyltran sferase OS=Acidithiobacillus sp. SH OX=187490 GN=tgt PE =3 SV=1
MGIYELLGEDGAARRGIVHLPRGDIQTPAFMPVGTYGTVKAMAPEELKALGADIILGNTFHLFLRPGLEVISALGGLHQMMHWDRPILTDSGGFQVFSLGALRKLREAGVEFRAPSDGHKVFLGPEESMQIQTVLGSDIAMVFDECTPHPATYAEARTSMELSMRWAARSRRAYQGPGQLFGIVQGGMFADLRRRSLEGLQKLDFPGLAVGGLSVGESKAEMMQVLEDLMPWMPKDRPRYLMGVGTPEDLVEGVFRGVDMFDCVMPTRNARNGWLFTRDGILKLRNARYEKDPLPPDPECSCYTCKNYSRAYLRHLQRSQEILGARLNTQHNLHYYQDLMAGLREAIMQGRLNAFRREFYERRGTQFPQ

SEQ ID NO: 51059 - protein, 379 aa, Acidithiobacillus sp.
  misc_feature (1)..(379): tr|A0A3M8RNX5|A0A3M8RNX5_9PROT Queuine tRNA-ribosyltran sferase OS=Acidithiobacillus sp. CJ-2 OX=1867749 GN=tgt PE=3 SV=1
MNILRILAEQGAARRGLLQLPRGTIQTPAFMPVGTYGTVKAMTPEELKTLGAEIILGNTFHLFLRPGLEVISALGGLHRMMHWDAPILTDSGGFQVFSLGPLRRLSEAGVRFRAPSDGRAVFLGPEESMAIQGALGSDIAMVFDECTPHPATWDEARASMELSLRWAARSQAAYAGPGQLFGIVQGGMYADLRQRSLEGLVKLDFPGYAIGGLSVGEGKAEMLQVLDDLLPQMPRDRPRYLMGVGTPEDIVAAVQRGVDMFDCVLPTRNARNGWLYTRNGILKLRNARYEKDPLPPDPDCACYTCRNYSRAYLRHLQRSHEILGARLNTLHNLHYYQELMAGLRQAISAGRLDAFVADFHRRYGVADAGASVSGSLADA

SEQ ID NO: 51060 - protein, 371 aa, Acidithiobacillus thiooxidans
  misc_feature (1)..(371): tr|A0A1C2IWT1|A0A1C2IWT1_ACITH Queuine tRNA-ribosyltran sferase OS=Acidithiobacillus thiooxidans OX=930 GN=tgt PE=3 SV=1
MGIFECLARDGAARRGIVHLPRGDIQTPAFMPVGTYGTVKAMAPEELKAIGADIILGNTFHLFLRPGLEVITALGGLHKMMHWDRPILTDSGGFQVFSLGALRKLREAGVEFRAPTDGHKVFLGPEESMQIQAVLGSDIAMVFDECTPHPATYEEARVSMELSLRWAARSRRAYQGPGQLFGIVQGGMYGDLRQRSLEGLQKLDFPGLAVGGLSVGESKAEMTEVLENLMPQMPTDRPRYLMGVGTPEDLVEGVYRGVDMFDCVMPTRNARNGWLFTRNGILKLRNASYEKDPLPPDPECSCYTCRNYSRAYLRHLQRSHEILGARLNTQHNLYYYQELMAGLREAIVQGRLEAFRKEFYQRRTASSLIDA

SEQ ID NO: 51061 - protein, 371 aa, Acidithiobacillus thiooxidans
  misc_feature (1)..(371): tr|A0A543Q413|A0A543Q413_ACITH Queuine tRNA-ribosyltran sferase OS=Acidithiobacillus thiooxidans ATCC 19377 OX= 637390 GN=tgt PE=3 SV=1
MGIFECLARDGAARRGIVHLPRGDIQTPAFMPVGTYGTVKAMAPEELKAIGADIILGNTFHLFLRPGLEVITALGGLHKMMHWDRPILTDSGGFQVFSLGALRKLREAGVEFRAPTDGHKVFLGPEESMHIQAVLGSDIAMVFDECTPHPATYEEARVSMELSLRWAARSRRAYQGPGQLFGIVQGGMYGDLRQRSLEGLQKLDFPGLAVGGLSVGESKAEMMEVLENLMPQMPADRPRYLMGVGTPEDLVEGVYRGVDMFDCVMPTRNARNGWLFTRNGILKLRNASYEKDPLPPDPECSCYTCSNYSRAYLRHLQRSHEILGARLNTQHNLHYYQELMAGLREAIVQGRLEAFRKEFYQRRTASSLIDA

SEQ ID NO: 51062 - protein, 371 aa, Acidithrix ferrooxidans
  misc_feature (1)..(371): tr|A0A0D8HG02|A0A0D8HG02_9ACTN Queuine tRNA-ribosyltran sferase OS=Acidithrix ferrooxidans OX=1280514 GN=tgt PE =3 SV=1
MVDDLKGALSFSVGDTHNGSRRGTVKLNRGSFSTPIFMPVGTRGTIKAAIANDIAAIGFEVILGNTYHLMLRPGVEVIDALGGLGRFSGWKRSMLTDSGGFQVMSLGATFSDGGATFRSIYDGSIHDVTPEKAVWLQEMIGADIAMVLDVCTNLPASRDEIKRAMDLTHSWALRARFAKHRQDQAQFGIVQGGSEVDLRSESAKFISDVGFEGIALGGLAVGESRDDMLRAIDAVVPHLPPDKPRYLMGVGDPIGVVEAIARGIDMFDCVAPSRVARHGVAMTFSGKMHMRNQKYVRDESPIEPGCPCVACANFPRALIRHLVSVGEPTGGSLLTLHNLTFMYRLIEGSRNAISTKTLGEYIKSIYAAWGN

SEQ ID NO: 51063 - protein, 388 aa, Acidobacteria bacterium
  misc_feature (1)..(388): tr|A0A1F2R4R8|A0A1F2R4R8_9BACT Queuine tRNA-ribosyltran sferase OS=Acidobacteria bacterium RIFCSPLOWO2_02_FULL_ 64_15 OX=1797181 GN=tgt PE=3 SV=1
MSEAPFAFRVTHTDGRARRGVMTTPHGEVATPAFMPVGTQGAVKGVTHRDLEDLGAEILLSNTYHLYLRPGADLIARRGGLHRFIGWSRPILTDSGGYQVFSLAARRTIDEAGARFRSHLDGSEHHLTPEKATDLQAELGSDIAMVFDECLAHPSDLATTRQSMERTVRWARRARDRFLTLREGAVAGVAVTNPYQAQFGIVQGGIYSDLREQSARETVSIGFEAYAIGGLSVGEPAETMYDTVSQTCVYLPADRPRYLMGAGTPEDLVEAVARGIDLFDCVLPTRNARNGQLFTSRGRINIGNARYSEDDGPPDPACSCYTCRTHSRAYLRHLFQAGEIAAATLNTLHNLHFYLDTLRRIREAIAFGRFESFGRDFEQSLSRQRQDL

SEQ ID NO: 51064 - protein, 367 aa, Acidobacteria bacterium
  misc_feature (1)..(367): tr|A0A1Q7NBN1|A0A1Q7NBN1_9BACT Queuine tRNA-ribosyltran sferase OS=Acidobacteria bacterium 13_1_40CM_3_65_5 OX= 1803450 GN=tgt PE=3 SV=1
MTTAHGAVETPAFMPVGTQGAVKGVTHRDLESLGAEILLSNTYHLYLRPGDDLIARRGGLHRFIGWTRPILTDSGGYQVFSLAARRTIDDQGAHFRSHLDGSAHSLTPEKATDIQAQLGSDIAMVLDECLAHPSDAAAARQSMQRTLRWAGRARDRFLALRDGLVPDVIVSNPGQAQFGIVQGSVFPELREESARHTVDVGFEAYAIGGLSVGEPIDVMYDIVSQTTPCLPADRPRYLMGTGTPADLVEAVARGIDLFDCVLPTRNARNGQLFTSEGRINIKNARYAEDDRPPDPACSCYTCRTSSRAYLRHLFLAGEINASTLNTLHNLNFYLDTLRRIRDAIVFGRFESFRLAFHQSLSCQPHDS

SEQ ID NO: 51065 - protein, 376 aa, Acidobacteriales bacterium
  misc_feature (1)..(376): tr|A0A1Q3QWZ0|A0A1Q3QWZ0_9BACT Queuine tRNA-ribosyltran sferase OS=Acidobacteriales bacterium 59-55 OX=1895690 GN=tgt PE=3 SV=1
MGLTFQVDRTDAGGGRRGRLMLPHGVVETPVFMPVGTAASVKAVEQGVLEAMGSDGRGAEIILANTYHLYLRPGHELIARTGGVHRFMSWERPMLTDSGGFQVFSLSSLRKVTPDGAEFRSHLDGSKHFFSPEHSMDVQIALGADVMMVFDECVEHPATYERTRDSMALTHAWAQRSKDHFELHKERVPWFQQRDGATQSLFGIVQGGMYADLRRESAERLVEMDLPGYAIGGLAVGEPREVTREMIALTLEWLPKDKPRYVMGVGYPDEIEEYARMGVDMMDCVLPTRAGRHGLLFMREEVGGPVVRMNIKRKEYAEDARPIDESCGCMVCRRYSRAYLRHLFVSGEALGLTLNSVHNLAFYLDTMQRVRRDLAG

SEQ ID NO: 51066 - protein, 378 aa, Acidobacteriales bacterium
  misc_feature (1)..(378): tr|A0A1Q7CJ94|A0A1Q7CJ94_9BACT Queuine tRNA-ribosyltran sferase OS=Acidobacteriales bacterium 13_2_20CM_2_55_5 OX=1803469 GN=tgt PE=3 SV=1
MSLRFQVESTHEAARVGRLITPHGEVETPVFMPVGTLASVKGVSQDILEELDVQILLGNTYHLYLRPGIDQIRSLGGLHRFMAWPRPILTDSGGFQVFSLNELRKVSEDEVTFRSHLDGSSHSFSPESAMEAQIGLGADIIMAFDECTEYPAPPERARQSMELTLRWAKRSKNYIEEHKQMVPWFQNDDRVSEGQHQALFGIVQGGMDHALRKESVERTVEIGFPGYAIGGLSVGEPRSLTREVVEATVEHLPADKPRYLMGVGTPEEIVEYASLGIDMMDCVLPTRAARHGLLFTSEGKISIKQARYASDQAPLDTNCACRVCARYSRAYLRHLYASNEVLAQVLNTIHNLSFYLDTMRRVRHSIALGKRACFLSGV

SEQ ID NO: 51067 - protein, 378 aa, Acidobacteriia bacterium
  misc_feature (1)..(378): tr|A0A321LVF9|A0A321LVF9_9BACT Queuine tRNA-ribosyltran sferase OS=Acidobacteriia bacterium AA117 OX=2169412 GN =tgt PE=3 SV=1
MTLPFTIQSQAGSARLGQFTTAHGIVETPVFMPVGTLGSVKGVPQDTLEELGAQIILGNTYHLYLRPGHQLVRSLGGLHRFMSWERALLTDSGGFQVFSLSELRKITEDGVNFRSHLDGSSHLFTPERSIEIQIALGADIIMAFDECTEHPAEYRRTRESMEMTLRWARRCKDYFEAHKSEAPWHSSEKPQHQALFGIIQGGMYAGLRRESAERTVEIDFPGYAIGGLSVGESREKTREMIAAALEILPEDKPRYVMGVGYPEEIVQYAAMGVDMMDCVLPTRAARHGLLFTSEGRLNIKNTRFAHDQGPPDPACKCKACSRYSRAYLRHLFVAGEPLAGVLNTIHNLAYYLDTMRAVRHAIHLGDLSGIQSGSVSMA

SEQ ID NO: 51068 - protein, 403 aa, Acidobacteriia bacterium
  misc_feature (1)..(403): tr|A0A317IYN3|A0A317IYN3_9BACT Queuine tRNA-ribosyltran sferase OS=Acidobacteriia bacterium OX=2081523 GN=tgt P E=3 SV=1
MHANGPCKADHNPGRGPTSHPRVQSKLRITFELLAECPQTRARAGLLHTPHGTIETPVFMPVGTQATVKGLTQRDLAGELGVQILLANTYHLFLRPGHELIRRLGGLHTFMSWPNAILTDSGGFQVFSLSGLRKITDEGVVFQSHLDGDLHSFTPESTVDVQLALGSDILMMLDECPEYPVSHEYARTSMERTVRWARQAMAHYRRHATDPSRQALFPIVQGSMFPDLRRACAEALVELEAEGYAIGGLSVGEPRPLSMEMVEAAESILPRSRPRYAMGVGMPAELPEYVARGVDMMDCVLPSRNARNGYLFTSQGRVIIKHARYKDDPAPVDENCRCYTCSGYSRAYLRHLFQSGEILYAVLATRHNLQRYLDIMRQIRQAILSGSFPECLRTFRSASPDAE

SEQ ID NO: 51069 - protein, 392 aa, Acidobacterium capsulatum
  misc_feature (1)..(392): tr|C1F9J7|C1F9J7_ACIC5 Queuine tRNA-ribosyltransferase OS=Acidobacterium capsulatum (strain ATCC 51196 / DSM 1 1244 / JCM 7670 / NBRC 15755 / NCIMB 13165 / 161) OX=24 0015 GN=tgt PE=3 SV=1
MAAARVAAAFICRSPESITIDKVSLTFNIHHTTEAGGRRATMQLPHAAVETPVFMPVGTVATVKAVPQHILEELEAQIILGNTYHLYLRPGHEAIRRLGGLHRFMSWERAILTDSGGFQVFSLSELRKVTENGVEFRSHLDGGRHFFSPEHSMDVQIALGSDIAMAFDECTEYPAEYARARSSLDLTLRWAERSKRHFDAHKYERPWDERFAGQTPNLFGIVQGGMYLDLRRESAERLVEMDFPGYAIGGLSVGEPRERTREVIEATLPLLPKDKPRYVMGVGYPDEIAEYARMGVDMMDCVLPTRAARHGLLFTSEGRMNIKNRQYAEDQNPPDVHCGCMVCRRYTRAYLRHLMAAQEPLSAVLNSIHNLAFYLNTMREVREEMSRAAAAQ

SEQ ID NO: 51070 - protein, 374 aa, Acidobacterium sp.
  misc_feature (1)..(374): tr|A0A2G4JET3|A0A2G4JET3_9BACT Queuine tRNA-ribosyltran sferase OS=Acidobacterium sp. OX=1872119 GN=tgt PE=3 SV =1
MFTLTHTDGSARRGHLTTAHGVIQTPAFMPVGTQGAVKALTAQHLEDVGAEIILGNTYHLYLRPGDELIARRGGLHKFIGWSRPMLTDSGGYQVFSLSDRRKVEEQGVHFRSHHDGSAHLLTPEKAVEIQANLGSDIAMVLDECPALPSTEAIIDTSLELTARWARRCRNRFLELKGEGKGHAQFGIVQGGTFQELRQKSAQLTVSIGFDGYAIGGLSVGEPNETMYQVVEQTVPFLPSGQARYLMGVGTPIDLLEAVARGIDMFDCVMPTRNARNGQLFTSEGPLNIKNARFAEDDGPVDPACGCYTCRRFSRAYLRHLFMAGEMTGGTLNTLHNLSFYLDTMRRIREAIAFGRFEDLRQGFHRTFTRRALIS

SEQ ID NO: 51071 - protein, 370 aa, Acidobacterium sp.
  misc_feature (1)..(370): tr|A0A3D4VPD4|A0A3D4VPD4_9BACT Queuine tRNA-ribosyltran sferase OS=Acidobacterium sp. OX=1872119 GN=tgt PE=3 SV =1
MSLTFNIHHTTEAGGRRATMQLPHAAVETPVFMPVGTVATVKAVPQHILEELEAQIILGNTYHLYLRPGHEAIRRLGGLHRFMSWERAILTDSGGFQVFSLSELRKVTENGVEFRSHLDGGRHFFSPEHSMDVQIALGSDIAMAFDECTEYPAEYARARSSLDLTLRWAERSKRHFDAHKYERPWDERFAGQTPNLFGIVQGGMYLDLRRESAERLVEMDFPGYAIGGLSVGEPRERTREVIEATLPLLPKDKPRYVMGVGYPDEIAEYARMGVDMMDCVLPTRAARHGLLFTSEGRMNIKNRQYAEDQNPPDVHCGCMVCRRYTRAYLRHLMAAQEPLSAVLNSIHNLAFYLNTMREVREEMSRAAAAQ

SEQ ID NO: 51072 - protein, 375 aa, Acidocella aminolytica
  misc_feature (1)..(375): tr|A0A0D6PLC4|A0A0D6PLC4_9PROT Queuine tRNA-ribosyltran sferase OS=Acidocella aminolytica 101 = DSM 11237 OX=11 20923 GN=tgt PE=3 SV=1
MTTPDFSFTLAGQDGQARAGLIATAHGKVPTPTFMAVGTAGTVKAMTADAVRATGAKIVLGNTYHLMLRPTAERVARLGGLHKMMDWPGPILTDSGGFQIMSLAKLRKLEEKGVTFRSHIDGTPYELTPERSTEIQHLLDSTITMQLDECTKFPATHKEAMDSMELSIRWAKRSRDAFVKRPGYGQFGIMQGNVYEDLRRHSAAALVDLDFEGYAIGGLAVGEGQAVMFEVLDYCTDFLPAQKPRYLMGVGTPDDLLGAVARGVDMFDCVMPTRAGRTARAFTSNGIFNMRNARFQDDSRPLDENCTCLCCTRHTRAYLHHLFRCEEMLGPMLLTIHNLTYYQNVMQGARAAILNKEYDAYCADVRGNWQRGPDA

SEQ ID NO: 51073 - protein, 371 aa, Acidocella sp.
  misc_feature (1)..(371): tr|A0A257Q7Z5|A0A257Q7Z5_9PROT Queuine tRNA-ribosyltran sferase OS=Acidocella sp. 20-57-95 OX=1970301 GN=tgt PE =3 SV=1
MKFSYDLQATDGAARAGMLHTAHGDVPTPTFMAVGTAGTVKAMTADAVRATGAKIVLGNTYHLMLRPTAERVARLGGLHKMMDWPGPILTDSGGFQVMSLAKLRKMDEEGVTFRSHLDGSKHFLSPERSMEIQYLLDATITMVLDECTPFPATHDEAAISMRMSSRWAKRSRTAFVAREGYGQFGIVQGGVYEDLRLESADALRALNFEGYAIGGLAVGEGQEMMFATLDVTTPHLPADKPRYLMGVGTPDDLLGSVARGVDMFDCVMPTRAGRTARGFTSKGIFNLRNARFIDDGRPLDENCTCLGCTRHTRAYLHHLFRAEEILGPMLLTIHNLTYYQSLMQGARTAIVAQTYDAYCASTRAGWAAGDD

SEQ ID NO: 51074 - protein, 371 aa, Acidocella sp.
  misc_feature (1)..(371): tr|A0A258LCE5|A0A258LCE5_9PROT Queuine tRNA-ribosyltran sferase OS=Acidocella sp. 35-58-6 OX=1970306 GN=tgt PE= 3 SV=1
MTFSYKLHASDGAARAGTLHTAHGEVPTPTFMAVGTAGTVKAMTADAVRATGAKIVLGNTYHLMLRPTAERVARLGGLHKMMDWPGPILTDSGGFQIMSLAKLRKMTEEGVTFQSHTDGSKHFLSPERSMEIQHLLDATITMVLDECTPFPATHDEAAISMRMSTRWAKRSRTAFIEREGYGQFGIVQGGIYEDLRLESAEALRALNFEGYAIGGLAVGEGQAMMFATLDVTTPHLPTDKPRYLMGVGTPDDLLGSVARGVDMFDCVMPTRAGRTARAFTSKGIFNLRNARFIDDGRPLDETCGCLGCRRHTRAYLHHLFRCEEILGPMLLTIHNLTYYQSLMQGARAAILAQNFESYCADTRAGWAAGDD

SEQ ID NO: 51075 - protein, 354 aa, Acidomonas methanolica
  misc_feature (1)..(354): tr|A0A023D713|A0A023D713_ACIMT Queuine tRNA-ribosyltran sferase OS=Acidomonas methanolica NBRC 104435 OX=123135 1 GN=tgt PE=3 SV=1
MPVGTVGTVKGMTMDAVRSTGAGIVLGNTYHLMLRPGAERVRKMGGLHRMMDWPGPILTDSGGFQVMSLGALRKLDADGVTFNSHIDGSTHRLTPESSTRIQHALNATITMCFDECPALPATPERLAESMELSMRWAARSREAFVPREGYGQFGIVQGGTERDLRARSVRALTEIGFEGYAIGGLAVGEGQELMFATLDFTTPLLPERQARYLMGVGTPDDLLGGVERGVDMFDCVMPTRAGRTARAYTERGTLNLRNARHADDLRPLSPHCDCLACTRHSRAYLHHLFRAEEMLGPTLLTWHNLAYYQRLMRTIRAAILDGTLPDLAPRLRAHWAAGDWTEDEFPQPIPPPVP

SEQ ID NO: 51076 - protein, 390 aa, Acidovorax anthurii
  misc_feature (1)..(390): tr|A0A328YWK8|A0A328YWK8_9BURK Queuine tRNA-ribosyltran sferase OS=Acidovorax anthurii OX=78229 GN=tgt PE=3 SV= 1
MLQFELLAADPDSHARRGTLTLNHGVVQTPIFMPVGTYGTVKGVMPRSLHDMGAQIILGNTFHLWMRPGLDVMQSFGGLHGFEQWNKPILTDSGGFQVWSLGAMRKITEEGVHFASPVNGDKLFMSPEVSMQIQTVLNSDIVMQLDECTPYETNGHKTTEAEARKSMEMSLRWARRSQDEFHRLDNPNALFGIVQGGMFKHLRQESLERLVEMDFPGYAVGGVSVGEPKDEMLDIMAHTPHRLPAHKPRYLMGVGTPEDLVQGVAEGVDMFDCVMPTRNARNGTIFTRHGDLKIRNARHKADHQPLDPTCTCHACAGTEGVAWADGGRGGFSRAYLHHLDRCGEMLGPMLTTIHNLHYYLNLMREIREALDAGRFTEFRRRFAADRARGV

SEQ ID NO: 51077 - protein, 425 aa, Acidovorax avenae
  misc_feature (1)..(425): tr|F0Q7S6|F0Q7S6_ACIAP Queuine tRNA-ribosyltransferase OS=Acidovorax avenae (strain ATCC 19860 / DSM 7227 / JC M 20985 / NCPPB 1011) OX=643561 GN=tgt PE=3 SV=1
MSFLLGAGRRAAKRGAAAGQCSAGAQAAVWDNRPIMLQFELLATDPASHARRGTLTLNHGVVQTPIFMPVGTYGTVKGVMPRSLHEMGAQIILGNTFHLWMRPGLDVMQGFGGLHGFEQWNKPILTDSGGFQVWSLGAMRKITEEGVHFASPVNGDKLFMSPEVSMQIQTTLNSDIVMQLDECTPYETKGHKTTEAEARKSMEMSLRWARRSQDEFHRLGNPNALFGIVQGGMYKNLRQESLERLVEMDFPGYAVGGVSVGEPKDEMLDIMAHTPHRLPAHKPRYLMGVGTPEDLVQGVADGVDMFDCVMPTRNARNGTIFTRHGDLKIRNARHKADHQPLDPTCTCHACAGTEGVAWADGGRGGFSRAYLHHLDRCGEMLGPMLTTVHNLHYYLNLMREIRESLDAGRFGEFRVRFAADRARGV

SEQ ID NO: 51078 - protein, 390 aa, Acidovorax avenae
  misc_feature (1)..(390): tr|A0A2R4ER25|A0A2R4ER25_9BURK Queuine tRNA-ribosyltran sferase OS=Acidovorax avenae subsp. avenae OX=80870 GN= tgt PE=3 SV=1
MLQFELLATDPASHARRGTLTLNHGVVQTPIFMPVGTYGTVKGVMPRSLHEMGAQIILGNTFHLWMRPGLDVMQSFGGLHGFEQWNKPILTDSGGFQVWSLGAMRKITEEGVHFASPVNGDKLFMSPEVSMQIQTTLNSDIVMQLDECTPYETKGHKTTEAEARKSMEMSLRWARRSQDEFHRLGNPNALFGIVQGGMYKNLRQESLERLVEMDFPGYAVGGVSVGEPKDEMLDIMAHTPHRLPAHKPRYLMGVGTPEDLVQGVADGVDMFDCVMPTRNARNGTIFTRHGDLKIRNARHKADHQPLDPTCTCHACAGTEGVAWADGGRGGFSRAYLHHLDRCGEMLGPMLTTVHNLHYYLNLMREIRESLDAGRFGEFRTRFAADRARGV

SEQ ID NO: 51079 - protein, 390 aa, Acidovorax caeni
  misc_feature (1)..(390): tr|A0A1I7GMG9|A0A1I7GMG9_9BURK Queuine tRNA-ribosyltran sferase OS=Acidovorax caeni OX=343013 GN=tgt PE=3 SV=1
MLQFDLLKTDPGSHARRGRLTLNHGPVETPIFMPVGTYGTVKGVMPQSLHDMGAQIILGNTFHLWMRPGLDVMRSFGGLHGFEQWHKPILTDSGGFQVWSLGPMRKITEEGVHFASPVNGDKLFMSPEVSMQIQTVLNSDIVMQLDECTPYETKGHLTTEREARQSMEMSRRWALRSKAEFERLENPNALFGIVQGGMFENLRQESLEALVEMDFPGYAVGGVSVGEPKDEMLRIMAHTPHRLPAHKPRYLMGVGTPEDLVEGVAQGVDMFDCVMPTRNARNGTIFTRHGDLKIRNARHREDHQPLDPTCTCHACAGKDGVAWADGGRGGFSRAYLHHLDRCGEMLGPMLTTIHNLHYYLNLMREIREALDAGTFAQFRARFKTDRARGV

SEQ ID NO: 51080 - protein, 390 aa, Acidovorax carolinensis
  misc_feature (1)..(390): tr|A0A240TVB7|A0A240TVB7_9BURK Queuine tRNA-ribosyltran sferase OS=Acidovorax carolinensis OX=553814 GN=tgt PE= 3 SV=1
MLQFDLLTTDPTSHARRGTLTLNHGVVQTPIFMPVGTYGTVKGVMPQSLHDMGAQIILGNTFHLWMRPGQEVMQSFGGLHGFEKWDKPILTDSGGFQVWSLGAMRKITEEGVHFASPVNGDKLFMSPEVSMQIQTTLNSDIVMQLDECTPYETKGHLTTEREARQSMEMSLRWAQRSKDEFARLENPNALFGIVQGGMFENLRAESLERLVAMDFPGYAVGGVSVGEPKDEMLRIMAHTPHLLPAHKPRYLMGVGTPEDLVEGVAQGVDMFDCVMPTRNARNGTLFTRFGDLKIRNARHKTDHQPLDTTCSCHACAGSAGVPWNEGGRGGFSRAYLHHLDRCGEMLGPMLTTIHNLHYYLNLMREVREALEAGQFAQFRAQFKADQARGV

SEQ ID NO: 51081 - protein, 390 aa, Acidovorax carolinensis
  misc_feature (1)..(390): tr|A0A240UGM6|A0A240UGM6_9BURK Queuine tRNA-ribosyltran sferase OS=Acidovorax carolinensis OX=553814 GN=tgt PE= 3 SV=1
MLQFDLLTTDPTSHARRGTLTLNHGVVQTPIFMPVGTYGTVKGVMPQSLHDMGAQIILGNTFHLWMRPGQEVMQSFGGLHGFEKWDKPILTDSGGFQVWSLGAMRKITEEGVHFASPVNGDKLFMSPEVSMQIQTTLNSDIVMQLDECTPYETKGHLTTEREARQSMEMSLRWAQRSKDEFARLENPNALFGIVQGGMFENLRAESLERLVAMDFPGYAVGGVSVGEPKDEMLRIMAHTPHRLPAHKPRYLMGVGTPEDLVEGVAQGVDMFDCVMPTRNARNGTLFTRFGDLKIRNARHKTDHQPLDTTCSCHACAGSAGVPWSEGGRGGFSRAYLHHLDRCGEMLGPMLTTIHNLHYYLNLMREVREALDAGQFAQFRAQFKADRARGV

SEQ ID NO: 51082 - protein, 425 aa, Acidovorax cattleyae
  misc_feature (1)..(425): tr|A0A1H0UNQ7|A0A1H0UNQ7_9BURK Queuine tRNA-ribosyltran sferase OS=Acidovorax cattleyae OX=80868 GN=tgt PE=3 SV =1
MSFLLGAGRRAAERGAAADQCSAGAQAAVWDNRPIMLQFELLATDPASHARRGALTLNHGVVQTPIFMPVGTYGTVKGVMPRSLHEMGAQVILGNTFHLWMRPGLDVMQSFGGLHGFEQWNKPILTDSGGFQVWSLGAMRKITEEGVTFASPVNGDKLFMSPEVSMQIQTTLNSDIVMQLDECTPYETKGHKTTEAEARKSMEMSLRWARRSQDEFHRLGNPNALFGIVQGGMYKHLRQESLERLVEMDFPGYAVGGVSVGEPKDEMLDIMAHTPHRLPAHKPRYLMGVGTPEDLVQGVADGVDMFDCVMPTRNARNGTIFTRHGDLKIRNARHKTDHQPLDPTCTCHACAGTEGVAWADGGRGGFSRAYLHHLDRCGEMLGPMLTTVHNLHYYLNLMREIRESLDAGRFGEFRSRFAADRARGV

SEQ ID NO: 51083 - protein, 390 aa, Acidovorax cavernicola
  misc_feature (1)..(390): tr|A0A3A1W4J5|A0A3A1W4J5_9BURK Queuine tRNA-ribosyltran sferase OS=Acidovorax cavernicola OX=1675792 GN=tgt PE= 3 SV=1
MLNFELLKTDPDSHARRATLTLNHGKVQTPIFMPVGTYGTVKGVMPRSLEEMGAQIILGNTFHLWMRPGLDVMASFGGLHQFEKWDKPILTDSGGFQVWSLGAMRKISEEGVKFASPVNGDKLFLTPEVSMQIQTILNSDIVMQFDECTPYDTKGHITTEAEARVSMELSLRWAKRCQAEFARLSNPNALFGIVQGGMFENLREESLAALVDMDFPGYAIGGVSVGEPKEEMLHIMGHTPHRLPANKPRYLMGVGTPEDLVQGVADGVDMFDCVMPTRNARNGTLFTRFGDLKMRNARHKSDPQPIDPSCTCHACAGTSGVSWNDGGREGFSRAYLHHLDRCGEMLGPMLTTIHNLHYYLNLMTEIRAALDAGTFTAFRAQFKSDRARGV

SEQ ID NO: 51084 - protein, 390 aa, Acidovorax citrulli
  misc_feature (1)..(390): sp|A1TVN0|TGT_ACIAC Queuine tRNA-ribosyltransferase OS= Acidovorax citrulli (strain AAC00-1) OX=397945 GN=tgt P E=3 SV=1
MLQFELLATDPASHARRGTLTLNHGVVQTPIFMPVGTYGTVKGVMPRSLHEMGAQIILSNTFHLWMRPGLDVMQSFGGLHGFEQWNKPILTDSGGFQVWSLGAMRKITEEGVHFASPVNGDKLFMSPEVSMQIQTVLNSDIVMQLDECTPYETKGHKTTEAEARKSMEMSLRWARRSQDEFHRLGNPNALFGIVQGGMYKNLRQESLERLVEMDFPGYAVGGVSVGEPKDEMLDIMAHTPHRLPAHKPRYLMGVGTPEDLVQGVADGVDMFDCVMPTRNARNGTIFTRFGDLKIRNARHKADHQPLDPTCTCHACAGTEGVAWADGGRGGFSRAYLHHLDRCGEMLGPMLTTVHNLHYYLNLMREIRESLDAGRFGEFRARFAADRAQGV

SEQ ID NO: 51085 - protein, 394 aa, Acidovorax delafieldii
  misc_feature (1)..(394): tr|A0A561XC82|A0A561XC82_ACIDE Queuine tRNA-ribosyltran sferase OS=Acidovorax delafieldii OX=47920 GN=tgt PE=3 SV=1
MRPIMLQFDLLKTDPSSHARRGQLTLNHGVVQTPIFMPVGTYGTVKGVMPRSLHDMGAQIILGNTFHLWMRPGLDVMQSFGGLHGFEKWDKPILTDSGGFQVWSLGAMRKITEEGVTFASPVNGDKLFMSPEVSMQIQTTLNSDIVMQLDECTPYETKGHKTTEAEARKSMEMSLRWAKRSQDEFHRLNNPNALFGIVQGGMFKNLRQESLERLVEMDFPGYAVGGVSVGEPKDEMLDIMAHTPHRLPAHKPRYLMGVGTPEDLVQGVADGVDMFDCVMPTRNARNGTMFTRFGDLKIRNARHKADHKPMDTSCTCYACAGSSGVSWDNGGREGFSRAYLHHLDRCGEMLGPMLTTVHNLHYYLNLMREVRESLEAGTFAQFRAQFKANRARGV

SEQ ID NO: 51086 - protein, 390 aa, Acidovorax delafieldii
  misc_feature (1)..(390): tr|C5TBQ5|C5TBQ5_ACIDE Queuine tRNA-ribosyltransferase OS=Acidovorax delafieldii 2AN OX=573060 GN=tgt PE=3 SV= 1
MLQFDLLTTDPASHARRGTLTLNHGVVQTPIFMPVGTYGTVKGVMPQSLHDMGAQIILGNTFHLWMRPGLDVMQSFGGLHGFEQWNKPILTDSGGFQVWSLGAMRKITEEGVHFASPVNGDKLFMSPEVSMQIQTTLNSDIVMQLDECTPYETKGHLTTEREARQSMEMSLRWARRSQDEFHRLNNPNALFGIVQGGMYENLRAESLDRLVEMDFPGYAIGGVSVGEPKDEMLRIMAHTPHRLPAHKPRYLMGVGTPEDLVEGVAQGVDMFDCVMPTRNARNGTLFTRFGDLKIRNARHKADHQPLDTTCTCHACAGSAGVPWDQGGRGGFSRAYLHHLDRCGEMLGPMLTTIHNLHYYLNLMREVREALDAGQFAAFRAQFKADRARGV

SEQ ID NO: 51087 - protein, 390 aa, Acidovorax ebreus
  misc_feature (1)..(390): sp|B9MGI1|TGT_ACIET Queuine tRNA-ribosyltransferase OS= Acidovorax ebreus (strain TPSY) OX=535289 GN=tgt PE=3 S V=1
MLKFEILATDTSSHARRGTLTLNHGVVQTPIFMPVGTYGTVKGVMPRSLREMGAQIILGNTFHLWMRPGLDVMQSFGGLHGFEQWDKPILTDSGGFQVWSLGSMRKITEEGVHFASPVNGDKLFMSPEVSMQIQTTLNSDIVMQLDECTPYETNGHKTTEAEARKSMEMSRRWAVRSKNEFERLGNPNALFGIVQGGMYKNLRQESLEALVEMDFPGYAVGGVSVGEPKDEMLDIMAHTPHRLPAHKPRYLMGVGTPEDLVEGVAQGVDMFDCVMPTRNARNGTLFTRYGDLKIRNARHKTDHQPLDPSCTCHACAGTEGVSWNDGGRGGFSRAYLHHLDRCGEMLGPMLTTIHNLHYYLNLMREVREALDAGQFGAFRARFKAERARGV

SEQ ID NO: 51088 - protein, 390 aa, Acidovorax kalamii
  misc_feature (1)..(390): tr|A0A235EKM4|A0A235EKM4_9BURK Queuine tRNA-ribosyltran sferase OS=Acidovorax kalamii OX=2004485 GN=tgt PE=3 SV =1
MLQFELLKTDPSSHARRGQLTLNHGVVQTPIFMPVGTYGTVKGVMPRSLHDMGAQIILGNTFHLWMRPGLDVMQSFGGLHGFEKWDKPILTDSGGFQVWSLGAMRKITEEGVTFASPVNGDKLFMSPEVSMQIQTTLNSDIVMQLDECTPYETKGHKTTEAEARKSMEMSLRWAKRSQDEFHRLNNPNALFGIVQGGMYKNLRQESLERLVEMDFPGYAVGGVSVGEPKDEMLDIMAHTPHRLPAHKPRYLMGVGTPEDLVQGVADGVDMFDCVMPTRNARNGTMFTRFGDLKIRNARHKADHKPMDTSCTCYACAGSSGVSWDNGGREGFSRAYLHHLDRCGEMLGPMLTTVHNLHYYLNLMREVRESLEAGTFAQFRAQFKADRARGV

SEQ ID NO: 51089 - protein, 429 aa, Acidovorax konjaci
  misc_feature (1)..(429): tr|A0A1I1YBX7|A0A1I1YBX7_9BURK Queuine tRNA-ribosyltran sferase OS=Acidovorax konjaci OX=32040 GN=tgt PE=3 SV=1
MLSSLGGPGAERGADRGIRRGADQCRAVRARAVWDNRPIMLQFELLATDPGSHARRGTLTLNHGVVQTPIFMPVGTYGTVKGVMPRSLHEMGAQIILGNTFHLWMRPGLDVMQSFGGLHGFEQWDKPILTDSGGFQVWSLGAMRKITEEGVQFASPVNGDKLFMSPEVSMQIQTVLNSDIVMQLDECTPYETNGHKTTEAEARKSMEMSLRWARRSQDEFRRLENPNALFGIVQGGMFKHLRQESLERLVEMDFPGYAVGGVSVGEPKDEMLDIMAHTPHRLPAHKPRYLMGVGTPEDLVQGVAEGVDMFDCVMPTRNARNGTIFTRHGDLKIRNARHKADHQPLDPTCTCHACAGTEGVAWADGGRGGFSRAYLHHLDRCGEMLGPMLTTVHNLHYYLNLMREVREALDAGRFGEFRQRFAADRARGI

SEQ ID NO: 51090 - protein, 390 aa, Acidovorax radicis
  misc_feature (1)..(390): tr|A0A561CAA7|A0A561CAA7_9BURK Queuine tRNA-ribosyltran sferase OS=Acidovorax radicis OX=758826 GN=tgt PE=3 SV= 1
MLQFDLLTTDPTSHARRGTLTLNHGVVQTPIFMPVGTYGTVKGVMPQSLHDMGAQIILGNTFHLWMRPGLDVMESFGGLHGFEQWNKPILTDSGGFQVWSLGAMRKITEEGVTFASPVNGDKLFMSPEVSMQIQTTLNSDIVMQLDECTPYETKGHLTTEREARQSMEMSLRWARRSQDEFHRLNNPNALFGIVQGGMYENLRAESLERLVEMDFPGYAVGGVSVGEPKDEMLRIMAHTPHLLPTHKPRYLMGVGTPEDLVEGVAQGVDMFDCVMPTRNARNGTMFTRYGDLKIRNARHKSDHQPLDTSCTCHACAGKSGVSWEAGGREGFSRAYQHHLDRCGEMLGPMLTSIHNLHYYLNLMREVREALDAGTFAQFRAKFKADRARGV

SEQ ID NO: 51091 - protein, 390 aa, Acidovorax soli
  misc_feature (1)..(390): tr|A0A1H4AS43|A0A1H4AS43_9BURK Queuine tRNA-ribosyltran sferase OS=Acidovorax soli OX=592050 GN=tgt PE=3 SV=1
MLQFDLLKTDPTSHARRGQLTLNHGVVQTPIFMPVGTYGTVKGVMPQSLHDMGAQIILGNTFHLWMRPGQEVMQSFGGLHAFEKWDKPILTDSGGFQVWSLGAMRKITEEGVHFASPVNGDKLFMSPEVSMQIQTTLNSDIVMQLDECTPYETKGHLTTEAEARKSMEMSLRWAQRSKDEFARLNNPNALFGIVQGGMYENLRAESLERLVEMDFPGYAVGGVSVGEPKDEMLRIMAHTPHLLPAHKPRYLMGVGTPEDLVEGVAQGVDMFDCVMPTRNARNGTLFTRFGDLKIRNARHKTDHQPLDTTCSCHACAGSAGVPWNEGGRAGFSRAYLHHLDRCGEMLGPMLTTIHNLHYYLNLMREVRAALEAGQFAQFRAQFKTDRARGV

SEQ ID NO: 51092 - protein, 394 aa, Acidovorax sp.
  misc_feature (1)..(394): tr|A0A495I0V8|A0A495I0V8_9BURK Queuine tRNA-ribosyltran sferase OS=Acidovorax sp. 94 OX=2135633 GN=tgt PE=3 SV= 1
MPPIMLQFDLLKTDPSSHARRGTLTLNHGVVQTPIFMPVGTYGTVKGVMPRSLHDMGAQIILGNTFHLWMRPGLDVMQSFGGLHGFEKWDKPILTDSGGFQVWSLGAMRKITEEGVTFASPVNGDKLFMSPEVSMQIQTTLNSDIVMQLDECTPYETKGHKTTEAEARKSMEMSLRWAKRSRDEFERLQNPNALFGIVQGGMFKNLRQESLEHLVEMDFPGYAVGGVSVGEPKDEMLDIMAHTPHRLPAHKPRYLMGVGTPEDLVQGVADGVDMFDCVMPTRNARNGTMFTRFGDLKIRNARHKADHKPMDTSCTCYACAGSSGVSWDDGGREGFSRAYLHHLDRCGEMLGPMLTTVHNLHYYLNLMREVRVSLDAGTFAEFRARFKTERARGV

SEQ ID NO: 51093 - protein, 390 aa, Acidovorax sp.
  misc_feature (1)..(390): sp|A1WCK2|TGT_ACISJ Queuine tRNA-ribosyltransferase OS= Acidovorax sp. (strain JS42) OX=232721 GN=tgt PE=3 SV=1
MLKFEILATDTSSHARRGKLTLNHGVVQTPIFMPVGTYGTVKGVMPRSLREMGAQIILGNTFHLWMRPGLDVMQSFGGLHGFEQWDKPILTDSGGFQVWSLGSMRKITEEGVHFASPVNGDKLFMSPEVSMQIQTTLNSDIVMQLDECTPYETNGHKTTEAEARKSMEMSRRWAVRSKNEFERLGNPNALFGIVQGGMYKNLRQESLEALVEMDFPGYAVGGVSVGEPKDEMLDIMAHTPHRLPAHKPRYLMGVGTPEDLVEGVAQGVDMFDCVMPTRNARNGTLFTRYGDLKIRNARHKTDHQPLDPSCTCHACAGTEGVSWNDGGRGGFSRAYLHHLDRCGEMLGPMLTTIHNLHYYLNLMREVREALDAGQFGAFRARFKAERARGV

SEQ ID NO: 51094 - protein, 390 aa, Acidovorax temperans
  misc_feature (1)..(390): tr|A0A543L8C5|A0A543L8C5_9BURK Queuine tRNA-ribosyltran sferase OS=Acidovorax temperans OX=80878 GN=tgt PE=3 SV =1
MLQFDLLKTDPSSHARRGKLTLNHGVVQTPIFMPVGTYGTVKGVMPQSLHDMGAQIILGNTFHLWMRPGLDVMQSFGGLHGFEKWDKPILTDSGGFQVWSLGAMRKITEEGVHFASPVNGDKLFMSPEVSMQIQTTLNSDIVMQLDECTPYETKGHLTTEAEARKSMEMSLRWAKRSRDEFQRLENPNALFGIVQGGMYKNLRQESLERLVEMDFPGYAVGGVSVGEPKDEMLDIMAHTPHRLPAHKPRYLMGVGTPEDLVQGVAEGVDMFDCVMPTRNARNGTIFTRYGDLKIRNARHKADHQPLDTSCTCHACAGKDGVAWDQGGRGGFSRAYLHHLDRCGEMLGPMLTTIHNLHYYLNLMREVREALDAGTFSQFRAQFKADRARGV

SEQ ID NO: 51095 - protein, 390 aa, Acidovorax temperans
  misc_feature (1)..(390): tr|A0A0D7K8P6|A0A0D7K8P6_9BURK Queuine tRNA-ribosyltran sferase OS=Acidovorax temperans OX=80878 GN=tgt PE=3 SV =1
MLQFDLLKTDPSSHARRSKLTLNHGVVQTPIFMPVGTYGTVKGVMPQSLHDMGAQIILGNTFHLWMRPGLDVMQSFGGLHGFEKWDKPILTDSGGFQVWSLGAMRKITEEGVHFASPVNGDKLFMSPEVSMQIQTTLNSDIVMQLDECTPYETKGHLTTEAEARKSMEMSLRWAKRSKDEFERLGNPNALFGIVQGGMYKNLRQESLEALVAMDFPGYAVGGVSVGEPKDEMLDIMAHTPHRLPAHKPRYLMGVGTPEDLVQGVAEGVDMFDCVMPTRNARNGTIFTRYGDLKIRNARHKADHQPLDTSCTCHACAGKDGVAWDQGGRGGFSRAYLHHLDRCGEMLGPMLTTIHNLHYYLNLMREVREALDAGTFSQFRAQFKADRARGV

SEQ ID NO: 51096 - protein, 390 aa, Acidovorax valerianellae
  misc_feature (1)..(390): tr|A0A1G7CTP5|A0A1G7CTP5_9BURK Queuine tRNA-ribosyltran sferase OS=Acidovorax valerianellae OX=187868 GN=tgt PE =3 SV=1
MLQFDLLTTDPTSHARRGTLTLNHGVVQTPIFMPVGTYGTVKGVMPQSLHDMGAQIILGNTFHLWMRPGLDVMQSFGGLHKFEQWNKPILTDSGGFQVWSLGAMRKITEEGVHFASPVNGDKLFMSPEVSMQIQTTLNSDIVMQLDECTPYETKGHLTTEREARTSMEMSLRWAQRSKDEFNRLNNPNALFGIVQGGMFENLRAESLERLVEMDFPGYAVGGVSVGEPKDEMLRIMAHTPHRLPAHKPRYLMGVGTPEDLVEGVAQGVDMFDCVMPTRNARNGTIFTRYGDLKLRNARHKADHQPLDATCTCHACAGAEGVAWDQGGRGGFSRAYLHHLDRCGEMLGPMLTTIHNLHYYLNLMREVRESLDAGRFGEFRQQFAADRARGV

SEQ ID NO: 51097 - protein, 390 aa, Acidovorax wautersii
  misc_feature (1)..(390): tr|A0A1I2EWG9|A0A1I2EWG9_9BURK Queuine tRNA-ribosyltran sferase OS=Acidovorax wautersii OX=1177982 GN=tgt PE=3 SV=1
MLQFDLLKTDPTSHARRGTLTLNHGVVQTPIFMPVGTYGTVKGVMPQSLHDMGAQIILGNTFHLWMRPGLDVMQSFGGLHGFEQWNKPILTDSGGFQVWSLGAMRKITEEGVTFASPVNGDKLFMSPEVSMQIQTTLNSDIVMQLDECTPYETQGRKTTEAEARKSMEMSRRWAVRSKNEFERLGNPNALFGIVQGGMFPHLREESLQALVEMDFPGYAVGGVSVGEPKDEMLEIMAHTPHRLPANKPRYLMGVGTPEDLVQGVADGVDMFDCVMPTRNARNGTIFTRYGDLKLRNARHKTDHQPLDPTCTCHACAGKDGVAWADGGRGGFSRAYLHHLDRCGEMLGPMLTTIHNLHYYLNLMREIREALDAGSFAQFRQQFAADRARGV

SEQ ID NO: 51098 - protein, 376 aa, Acinetobacter albensis
  misc_feature (1)..(376): tr|A0A1C4GXU0|A0A1C4GXU0_9GAMM Queuine tRNA-ribosyltran sferase OS=Acinetobacter albensis OX=1673609 GN=tgt PE= 3 SV=1
MKFEKLGQSGRARRGRLTLEHGVIETPVFMPVGTYGTVKGMLPRDIEDIKAQIILGNTFHLYLRPGLDVIREHGGLHKFMKWNKPILTDSGGFQVFSLGAMRKIKEDGVTFRSPIDGSKVFLSPEISMDIQHTLNSDIVMIFDECTPYPATHEEAQKSLQLSLRWAKRCKTQHHEVLKNKNALFGIIQGGMYEDLRDESLNGLKEIDFDGFAIGGLSVGEPKEEMIKVLDYLPVKMPEEKPRYLMGVGKPEDIVEAIRRGVDMFDCVMPTRNARNGHYFVTDGLVRIRNAKFRHDQSPLDPHCDCYTCQNFTRAYLFHLEKCGEMLGSMLGTIHNLRYYQRFTQDIRDALDNGTFDAYVHDFYARRGLEVPPCPED

SEQ ID NO: 51099 - protein, 375 aa, Acinetobacter apis
  misc_feature (1)..(375): tr|A0A217EHQ3|A0A217EHQ3_9GAMM Queuine tRNA-ribosyltran sferase OS=Acinetobacter apis OX=1229165 GN=tgt PE=3 SV =1
MKFEKLAQSGRARRGRLTLAHGVVETPIFMPVGTYGTVKGMLPRDIKEIEAQIILGNTFHLYLRPGLEVIKEHGGLHQFMKWDKPILTDSGGFQVFSLGAMRKIKEEGVTFRSPIDGSKVFLSPEISMEIQQTLNSDIVMIFDECTPYPATHAQAQDSLQLSLRWAKRCKTAHVNNANPNALFGIIQGGMYEDLRDESLKGLLDIDFDGYAIGGLSVGEPKDEMIKVLDYLPAKMPEDKPRYLMGVGKPEDIVEAVRRGVDMFDCVMPTRNARNGHYFVTDGLVRIRNSKYRHDQGPLDPHCDCYTCQNFTRAYLYHLEKCGEMLASMLGTIHNLRYYLRLTESMRDALDAGTFDAFVEDFYQRRGLSVPPCPTE

SEQ ID NO: 51100 - protein, 377 aa, Acinetobacter baumannii
  misc_feature (1)..(377): tr|A0A158LZ69|A0A158LZ69_ACIBA Queuine tRNA-ribosyltran sferase OS=Acinetobacter baumannii NIPH 190 OX=1217640 GN=tgt PE=3 SV=1
MKFEKLGQSGRARRGRLTLEHGVVETPVFMPVGTYGTVKGMLPRDIEDIQAQIILGNTFHLYLRPGLEVIKQHGGLHDFIKWNKPILTDSGGFQVFSLGAMRKIKEEGVTFRSPIDGSKVFLSPEISMEIQHVLNSDIVMIFDECTPYPATHEEAQKSLQLSLRWAKRCKTHHHDELKNKNALFGIIQGGMYEDLRDESLNGLLEIGFDGYAIGGLSVGEPKEEMIKVLDYLPNKMPHDKPRYLMGVGKPEDIVEAVRRGVDMFDCVMPTRNARNGHYFVTDGLVRIRNSKYRHDQGPLDPHCDCYTCKNFTRAYLFHLEKCGEMLASMLGTIHNLRYYQRLTEGMRDALDNGTFDEFVQDFYARRGLEVPPCPVDE

SEQ ID NO: 51101 - protein, 377 aa, Acinetobacter baumannii
  misc_feature (1)..(377): sp|B7I976|TGT_ACIB5 Queuine tRNA-ribosyltransferase OS= Acinetobacter baumannii (strain AB0057) OX=480119 GN=tg t PE=3 SV=1
MKFEKLGQSGRARRGRLTLEHGVVETPVFMPVGTYGTVKGMLPRDIEDIQAQIILGNTFHLYLRPGLEVIKQHGGLHDFIKWNKPILTDSGGFQVFSLGAMRKIKEEGVTFRSPIDGSKVFLSPEISMEIQHVLNSDIVMIFDECTPYPATHEEAQKSLQLSLRWAKRCKAHHHDELKNKNALFGIIQGGMYEDLRDESLNGLLEIGFDGYAIGGLSVGEPKEEMIKVLDYLPNKMPHDKPRYLMGVGKPEDIVEAVRRGVDMFDCVMPTRNARNGHYFVTDGLVRIRNSKYRHDQGPLDPHCDCYTCKNFTRAYLFHLEKCGEMLASMLGTIHNLRYYQRLTEGMRDALDNGTFDEFVQDFYARRGLEVPPCPVDE

SEQ ID NO: 51102 - protein, 386 aa, Acinetobacter baylyi
  misc_feature (1)..(386): sp|Q6FEJ4|TGT_ACIAD Queuine tRNA-ribosyltransferase OS= Acinetobacter baylyi (strain ATCC 33305 / BD413 / ADP1) OX=62977 GN=tgt PE=3 SV=1
MFFRLDLESCMKFEKLGQSGRARRGRLTLAHGVVETPVFMPVGTYGTVKGMLPRDIEEIQAQIILGNTFHLYLRPGLEVIKEHGGLHEFIKWDKPILTDSGGFQVFSLGAMRKIKEEGVTFRSPIDGSKVFLSPEISMEIQQVLNSDIVMIFDECTPYPATHEEAQKSLQLSLRWAKRCKTHHHEQLNNTNALFGIIQGGMYEDLRDESLNGLLEIGFDGYAIGGLSVGEPKEEMIKVLDYLPAKMPEDKPRYLMGVGKPEDIVEAVRRGVDMFDCVMPTRNARNGHYFVTDGLVRIRNSKYRHDQSPLDPHCDCYTCKNFTRAYLYHLEKCGEMLASMLGTIHNLRYYQRLTQGIRDALEQGTFDEFVTDFYTRRGLDVPPAPVD

SEQ ID NO: 51103 - protein, 376 aa, Acinetobacter beijerinckii
  misc_feature (1)..(376): tr|N9E4W2|N9E4W2_9GAMM Queuine tRNA-ribosyltransferase OS=Acinetobacter beijerinckii CIP 110307 OX=1217648 GN= tgt PE=3 SV=1
MKFEKLGQSGRARRGRLTLEHGVVETPVFMPVGTYGTVKGMLPRDIEEIQAQIILGNTFHLYLRPGLEVIKEHGGLHEFIRWDKPILTDSGGFQVFSLGAMRKIKEEGVTFRSPIDGSKVFLSPEISMEIQHVLNSDIVMIFDECTPYPATHEEAQKSLQLSLRWAKRCKTHHHDGLKNKNALFGIIQGGMYEDLRDESLTGLLEVGFDGYAIGGLSVGEPKEEMIKVLDYLPNKMPADKPRYLMGVGKPEDIVEAVRRGVDMFDCVMPTRNARNGHYFVTDGLVRIRNSRYRHDQGPLDPHCDCYTCKNFSRAYLYHLEKCGEMLASMLGTIHNLRYYQRLTQGMRDALDNGTFDEYVQDFYARRGLEVPPCPED

SEQ ID NO: 51104 - protein, 376 aa, Acinetobacter beijerinckii
  misc_feature (1)..(376): tr|N9FD72|N9FD72_9GAMM Queuine tRNA-ribosyltransferase OS=Acinetobacter beijerinckii ANC 3835 OX=1217649 GN=tg t PE=3 SV=1
MKFEKLGQSGRARRGRLTLEHGVVETPVFMPVGTYGTVKGMLPRDIEEIQAQIILGNTFHLYLRPGLEVIKEHGGLHEFIRWDKPILTDSGGFQVFSLGAMRKIKEEGVTFRSPIDGSKVFLSPEISMEIQHVLNSDIVMIFDECTPYPATHEEAQKSLQLSLRWAKRCKTHHHDELKNKNALFGIIQGGMYEDLRDESLTGLLEVGFDGYAIGGLSVGEPKEEMIKVLDYLPNKMPADKPRYLMGVGKPEDIVEAVRRGVDMFDCVMPTRNARNGHYFVTDGLVRIRNSRYRHDQGPLDPHCDCYTCKNFSRAYLYHLEKCGEMLASMLGTIHNLRYYQRLTQGMRDALDNGTFDEYVQDFYARRGLEVPPCPED

SEQ ID NO: 51105 - protein, 376 aa, Acinetobacter bereziniae
  misc_feature (1)..(376): tr|N8YVR6|N8YVR6_ACIBZ Queuine tRNA-ribosyltransferase OS=Acinetobacter bereziniae NIPH 3 OX=1217651 GN=tgt PE =3 SV=1
MKFEKLGQSGRARRGRLTLAHGVVETPVFMPVGTYGTVKGMLPRDIEDIQAQIILGNTFHLYLRPGLDVIREHGGLHEFMKWGKPILTDSGGFQVFSLGAMRKIKEEGVTFRSPIDGSKVFLSPEISMDIQHTLNSDIVMIFDECTPYPATHEEAQKSLQLSLRWAKRCKTQHHDVLKNKNALFGIIQGGMYEDLREESLNGLKEIDFDGFAIGGLSVGEPKEEMIKVLDYLPAKMPADKPRYLMGVGKPEDIVEAIRRGVDMFDCVMPTRNARNGHYFVTDGLVRIRNSQYRHDQRPLDPHCDCYTCTNFTRAYLFHLEKCGEMLGSMLGTIHNLRYYQRFTQDIRDALDQGTFDEYVTDFYQRRGLEVPPCPVD

SEQ ID NO: 51106 - protein, 376 aa, Acinetobacter bereziniae; identical to SEQ ID NO: 51105
  misc_feature (1)..(376): tr|A0A0A8TP59|A0A0A8TP59_ACIBZ Queuine tRNA-ribosyltran sferase OS=Acinetobacter bereziniae OX=106648 GN=tgt PE =3 SV=1

SEQ ID NO: 51107 - protein, 376 aa, Acinetobacter bohemicus
  misc_feature (1)..(376): tr|A0A1I6UM46|A0A1I6UM46_9GAMM Queuine tRNA-ribosyltran sferase OS=Acinetobacter bohemicus OX=1435036 GN=tgt PE =3 SV=1
MKFEKLGQSGRARRGRLTLEHGVIETPVFMPVGTYGTVKGMLPRDIEDIKAQIILGNTFHLYLRPGLDVIREHGGLHEFMKWNKPILTDSGGFQVFSLGAMRKIKEDGVTFRSPIDGSKVFLSPEISMDIQHTLNSDIVMIFDECTPYPATHEEAQKSLQLSLRWAKRCKTQHHDVLKNRNALFGIIQGGMYEDLRNESLNGLKEIDFDGFAIGGLSVGEPKEEMIKVLDYLPAQMPEDKPRYLMGVGKPEDIVEAIRRGVDMFDCVMPTRNARNGHYFVTDGLVRIRNAKYRHDQSPLDSECDCYTCQNFTRAYLFHLEKCGEMLGSMLGTIHNLRYYQRFTQDIRDALDNGTFDAYVHDFYARRGLDVPPCPED

SEQ ID NO: 51108 - protein, 376 aa, Acinetobacter bohemicus; identical to SEQ ID NO: 51107
  misc_feature (1)..(376): tr|N8P4N0|N8P4N0_9GAMM Queuine tRNA-ribosyltransferase OS=Acinetobacter bohemicus ANC 3994 OX=1217715 GN=tgt P E=3 SV=1

SEQ ID NO: 51109 - protein, 375 aa, Acinetobacter boissieri
  misc_feature (1)..(375): tr|A0A1G6GID4|A0A1G6GID4_9GAMM Queuine tRNA-ribosyltran sferase OS=Acinetobacter boissieri OX=1219383 GN=tgt PE =3 SV=1
MKFEKLGQSGRARRGRLTLEHGVVETPIFMPVGTYGTVKGMLPRDIEDIEAQIILGNTFHLYLRPGLEVIKEHGGLHEFMKWNKPILTDSGGFQVFSLGAMRKIKEEGVTFRSPIDGSKVFLSPEISMEIQQTLNSDIVMIFDECTPYPATHEQAQTSLQLSLRWAKRCKTAHTENKNPNALFGIIQGGMYEDLRDESLKGLLDIDFDGYAIGGLSVGEPKEEMIKVLDYLPHKMPEDKPRYLMGVGKPEDIVEAVRRGVDMFDCVMPTRNARNGHYFVTDGLVRIRNSQYRHDQKPLDPHCDCYTCKNFTRAYLYHLEKCGEMLASMLGTIHNLRYYLRLTEAIRNALDDDTFDAFVTDFYTRRGLEVPPCPID

SEQ ID NO: 51110 - protein, 376 aa, Acinetobacter bouvetii
  misc_feature (1)..(376): tr|A0A4Q7ATJ9|A0A4Q7ATJ9_9GAMM Queuine tRNA-ribosyltran sferase OS=Acinetobacter bouvetii OX=202951 GN=tgt PE=3 SV=1
MKFEKLGQSGRARRGRLTLAHGVVETPVFMPVGTYGTVKGMLPRDIEEIKAQIILGNTFHLYLRPGLEVIQEHGGLHEFMKWDKPILTDSGGFQVFSLGAMRKIKEEGVTFRSPIDGSKVFLSPEISMDIQKTLNSDIVMIFDECTPYPATHEEAQKSLQLSLRWAKRCKTHHHDEINNTNALFGIIQGGMYEDLRDESLNGLLDIGFDGYAIGGLSVGEPKEEMIKVLDYLPAKMPEDKPRYLMGVGKPEDIVEGIRRGVDMFDCVMPSRNARNGHYFVTDGLVRIRNAKYRHDQSSLDADCDCYTCTNFTRAYLFHLEKCGEMLGSMLGTIHNLRYYQRFTQDIRDALDNGTFDEFVQDFYARRGLEVPPCPQD

SEQ ID NO: 51111 - protein, 376 aa, Acinetobacter bouvetii
  misc_feature (1)..(376): tr|N9C761|N9C761_9GAMM Queuine tRNA-ribosyltransferase OS=Acinetobacter bouvetii DSM 14964 = CIP 107468 OX=112 0925 GN=tgt PE=3 SV=1
MKFEKLGQSGRARRGRLTLAHGVVETPVFMPVGTYGTVKGMLPRDIEEIKAQIILGNTFHLYLRPGLEVIQEHGGLHEFMKWDKPILTDSGGFQVFSLGAMRKIKEEGVTFRSPIDGSKVFLSPEISMDIQKTLNSDIVMIFDECTPYPATHEEAQKSLQLSLRWAKRCKTHHHDEINNTNALFGIIQGGMYEDLRDESLNGLLDIGFDGYAIGGLSVGEPKEEMIKVLDYLPVKMPEDKPRYLMGVGKPEDIVEGIRRGVDMFDCVMPSRNARNGHYFVTDGLVRIRNAKYRHDQSPLDADCDCYTCTNFTRAYLFHLEKCGEMLGSMLGTIHNLRYYQRFTQDIRDALDNGTFDEFVQNFYARRGLEVPPCPQD

SEQ ID NO: 51112 - protein, 376 aa, Acinetobacter brisouii
  misc_feature (1)..(376): tr|V2VRA2|V2VRA2_9GAMM Queuine tRNA-ribosyltransferase OS=Acinetobacter brisouii CIP 110357 OX=1341683 GN=tgt PE=3 SV=1
MKFEKLTQSGRARRGRLTLEHGVVETPVFMPVGTYGTVKGMLPRDIEEIQAQIILGNTFHLYLRPGLEVIKAHGGLHDFIKWNKPILTDSGGFQVFSLGAMRKIKEEGVTFRSPIDGSKVFLSPEISMEIQHTLNSDIVMIFDECTPYPATHDEAQKSLQLSLRWAKRCKTHHHDKLNNKNALFGIIQGGMYEDLRDESLNGLLEIDFDGYAIGGLSVGEPKEEMIKVLDYLPNKMPADKPRYLMGVGKPEDIVEAVRRGVDMFDCVMPTRNARNGHYFVTDGLVRIRNSKYRHDQSPLDPHCDCYTCQNFTRAYLFHLEKCGEMLASMLGTIHNLRYYQRLTQAMRDALDAGTFDAFVEDFYQRRGLEVPACPAD

SEQ ID NO: 51113 - protein, 377 aa, Acinetobacter calcoaceticus
  misc_feature (1)..(377): tr|A0A0A8XI10|A0A0A8XI10_ACICA Queuine tRNA-ribosyltran sferase OS=Acinetobacter calcoaceticus OX=471 GN=tgt PE =3 SV=1
MKFEKLGQSGRARRGRLTLEHGVVETPVFMPVGTYGTVKGMLPRDIEDIQAQIILGNTFHLYLRPGLEVIKEHGGLHNFIKWDKPILTDSGGFQVFSLGAMRKIKEEGVTFRSPIDGSKVFLSPEISMEIQQVLNSDIVMIFDECTPYPATHEEAQKSLQLSLRWAKRCKTHHHDELKNKNALFGIIQGGMYEDLRDESLNGLLEIGFDGYAIGGLSVGEPKDEMIKVLDYLPSKMPQDKPRYLMGVGKPEDIVEAVRRGVDMFDCVMPTRNARNGHYFVTDGLVRIRNSKYRHDQSPLDPHCDCYTCKNFTRAYLFHLEKCGEMLASMLGTIHNLRYYQRLTEGMRDALENGTFDEFVQDFYARRGLEVPPCPVDE

SEQ ID NO: 51114 - protein, 377 aa, Acinetobacter calcoaceticus; identical to SEQ ID NO: 51113
  misc_feature (1)..(377): tr|N9EUD1|N9EUD1_ACICA Queuine tRNA-ribosyltransferase OS=Acinetobacter calcoaceticus ANC 3680 OX=1217653 GN=t gt PE=3 SV=1

SEQ ID NO: 51115 - protein, 377 aa, Acinetobacter calcoaceticus
  misc_feature (1)..(377): tr|A0A2S4SYM9|A0A2S4SYM9_9GAMM Queuine tRNA-ribosyltran sferase OS=Acinetobacter calcoaceticus/baumannii comple x sp. ABNIH27 OX=2080673 GN=tgt PE=3 SV=1
MKFEKLGQSGRARRGRLTLEHGVVETPVFMPVGTYGTVKGMLPRDIEDIQAQIILGNTFHLYLRPGLEVIKQHGGLHDFIKWNKPILTDSGGFQVFSLGAMRKIKEEGVTFRSPIDGSKVFLSPEISMEIQHVLNSDIVMIFDECTPYPATHEEAQKSLQLSLRWAKRCKTHHHDELKNKNALFGIIQGGMYEDLRDESLNGLLEVGFDGYAIGGLSVGEPKEEMIKVLDYLPNKMPQDKPRYLMGVGKPEDIVEAVRRGVDMFDCVMPTRNARNGHYFVTDGLVRIRNSKYRHDQGPLDPHCDCYTCKNFTRAYLFHLEKCGEMLASMLGTIHNLRYYQRLTEGMRDALDNGTFDEFVQDFYARRGLEVPPCPVDE

SEQ ID NO: 51116 - protein, 376 aa, Acinetobacter celticus
  misc_feature (1)..(376): tr|A0A1C3CUD3|A0A1C3CUD3_9GAMM Queuine tRNA-ribosyltran sferase OS=Acinetobacter celticus OX=1891224 GN=tgt PE= 3 SV=1
MKFEKLGQSGRARRGRLTLAHGVVETPVFMPVGTYGTVKGMLPRDIEDIKAQIILGNTFHLYLRPGLEVIQEHGGLHEFMKWNKPILTDSGGFQVFSLGAMRKIKEEGVTFRSPIDGSKVFLSPEISMDIQKTLNSDVVMIFDECTPYPATHEEAQKSLQLSLRWAKRCKTQHHDVLENTNALFGIIQGGMYEDLREESLKGLLEIGFDGYAIGGLSVGEPKEEMIKVLDYLPVQMPEDKPRYLMGVGKPEDVVEGIRRGVDMFDCVMPSRNARNGHYFVTDGLVRIRNAKYRHDQSPLDPHCDCYTCTNFTRAYLFHLEKCGEMLGSMLGTIHNLRYYQRFTQEIRDALDNGTFDDFVQDFYTRRGLEVPPCPQD

SEQ ID NO: 51117 - protein, 376 aa, Acinetobacter colistiniresistens
  misc_feature (1)..(376): tr|N9R389|N9R389_9GAMM Queuine tRNA-ribosyltransferase OS=Acinetobacter colistiniresistens OX=280145 GN=tgt PE =3 SV=1
MKFEKLGQSGRARRGRLTLEHGVVETPVFMPVGTYGTVKGMLPRDIEEIQAQIILGNTFHLYLRPGLEVIKEHGGLHEFIQWDKPILTDSGGFQVFSLGAMRKIKEEGVTFRSPIDGSKVFLSPEISMEIQHVLNSDIVMIFDECTPYPATHEEAQKSLQLSLRWAKRCKTHHHDALKNKNALFGIIQGGMYEDLRDESLKGLLEVGFDGYAIGGLSVGEPKEEMIKVLDYLPNKMPQDKPRYLMGVGKPEDIVEAVRRGVDMFDCVMPTRNARNGHYFVTDGLVRIRNSKYRHDKGPLDPHCDCYTCKNFTRAYLYHLEKCGEMLASMLGTIHNLRYYQRLTQGMRDALDNGTFDEYVQDFYARRGLEVPACPED

SEQ ID NO: 51118 - protein, 376 aa, Acinetobacter colistiniresistens
  misc_feature (1)..(376): tr|S3TGE4|S3TGE4_9GAMM Queuine tRNA-ribosyltransferase OS=Acinetobacter colistiniresistens OX=280145 GN=tgt PE =3 SV=1
MKFEKLGQSGRARRGRLTLEHGVVETPVFMPVGTYGTVKGMLPRDIEEIQAQIILGNTFHLYLRPGLEVIKEHGGLHEFIQWDKPILTDSGGFQVFSLGAMRKIKEEGVTFRSPIDGSKVFLSPEISMEIQHVLNSDIVMIFDECTPYPATHEEAQKSLQLSLRWAKRCKTHHHDALKNKNALFGIIQGGMYEDLRDESLKGLLEVGFDGYAIGGLSVGEPKEEMIKVLDYLPNKMPQEKPRYLMGVGKPEDIVEAVRRGVDMFDCVMPTRNARNGHYFVTDGLVRIRNSKYRHDKGPLDPHCDCYTCKNFTRAYLYHLEKCGEMLASMLGTIHNLRYYQRLTQGMRDALDNGTFDEYVQDFYARRGLEVPACPED

SEQ ID NO: 51119 - protein, 376 aa, Acinetobacter cumulans
  misc_feature (1)..(376): tr|A0A4P8DQ51|A0A4P8DQ51_9GAMM Queuine tRNA-ribosyltran sferase OS=Acinetobacter cumulans OX=2136182 GN=tgt PE= 3 SV=1
MKFEKLAQSGRARRGRLTLEHGVVETPMFMPVGTYGTVKGVLPRDIKEIKSQVILGNTFHLYLRPGLEVIKQHGGLHQFMKWDKPILTDSGGFQVFSLGAMRKIKEDGVTFRSPIDGSKVFLSPEISMDIQHTLNSDIVMIFDECTPYPATHEEAQKSLQLSLRWAKRCKTQHHEVLKNRNALFGIIQGGMYEDLRDESLKGLLDIDFDGYAIGGLSVGEPKEEMIKVLDYLPEKMPADKPRYLMGVGKPEDIVEAVRRGVDMFDCVMPTRNARNGHYFVTDGLVRIRNSQYRHDQGPLDPYCDCYTCTNFTRSYLFHLEKCGEMLGSMLGTIHNLRYYLRLTEMMRDALDNGTFDEFVQDFYARRGLEVPPCPED

SEQ ID NO: 51120 - protein, 376 aa, Acinetobacter cumulans
  misc_feature (1)..(376): tr|A0A3A8G1N5|A0A3A8G1N5_9GAMM Queuine tRNA-ribosyltran sferase OS=Acinetobacter cumulans OX=2136182 GN=tgt PE= 3 SV=1
MKFEKLAQSGRARRGRLTLEHGVVETPMFMPVGTYGTVKGVLPRDIKEIKSQVILGNTFHLYLRPGLEVIKQHGGLHQFMKWDKPILTDSGGFQVFSLGAMRKIKEDGVTFRSPIDGSKVFLSPEISMDIQHTLNSDIVMIFDECTPYPATHEEAQKSLQLSLRWAKRCKTQHHEVLKNRNALFGIIQGGMYEDLRDESLKGLLDIDFDGYAIGGLSVGEPKEEMIKVLDYLPEKMPADKPRYLMGVGKPEDIVEAVRRGVDMFDCVMPTRNARNGHYFVTDGLVRIRNSQYRHDQGPLDPHCDCYTCTNFTRSYLFHLEKCGEMLGSMLGTIHNLRYYLRLTEMMRDALDNGTFDEFVQDFYARRGLEVPPCPED

SEQ ID NO: 51121 - protein, 376 aa, Acinetobacter defluvii
  misc_feature (1)..(376): tr|A0A2S2FAU8|A0A2S2FAU8_9GAMM Queuine tRNA-ribosyltran sferase OS=Acinetobacter defluvii OX=1871111 GN=tgt PE= 3 SV=1
MKFEKLGQSGRARRGRLTLAHGVVETPVFMPVGTYGTVKGMLPRDIEEIQAQIILGNTFHLYLRPGLEVIQEHGGLHEFIKWDKPILTDSGGFQVFSLGAMRKIKEEGVTFRSPIDGSKVFLSPEISMEIQKTLNSDIVMIFDECTPYPATHQEAQKSLQLSLRWAKRCKTHHHDVLKNKNALFGIIQGGMYEDLRDESLNGLKEIDFDGFAIGGLSVGEPKEEMIKVLDYLPAKMPEDKPRYLMGVGKPEDIVEAIRRGVDMFDCVMPTRNARNGHYFVTDGLVRIRNAKYRHDQSPLDPHCDCYTCKNFTRAYLFHLEKCGEMLGSMLGTIHNLRYYQRFTQDIRDALDNGTFDDFVADFYQRRGLDVPHCPVD

SEQ ID NO: 51122 - protein, 375 aa, Acinetobacter equi
  misc_feature (1)..(375): tr|A0A0N9W0V4|A0A0N9W0V4_9GAMM Queuine tRNA-ribosyltran sferase OS=Acinetobacter equi OX=1324350 GN=tgt PE=3 SV =1
MKFEKLGQSGRARRGRLTLAHGVVETPVFMPVGTYGTVKGMLPRDIEEIKAQIILGNTFHLYLRPGLEVIKEHGGLHEFMKWNKPILTDSGGFQVFSLGAMRKIKEEGVTFRSPIDGSKVFLSPEISMDIQHTLNSDIVMIFDECTPYPATHEEAQKSLQLSLRWAKRCKTQHHDELKNTNALFGIIQGGMYEDLRDESLNGLLEIGFDGYAIGGLSVGEPKEEMIKVLDYLPAKMPEDKPRYLMGVGKPEDIVEGIRRGVDMFDCVMPSRNARNGHYFVTDGLVRIRNAKYRHDQSPLDPHCDCYTCQNFTRAYLFHLEKCGEMLGSMLGTIHNLRYYQRFTEDIRNALDNGTFDAFVEDFYKRRGLEVPPCPQ

SEQ ID NO: 51123 - protein, 376 aa, Acinetobacter gandensis
  misc_feature (1)..(376): tr|A0A1A7R695|A0A1A7R695_9GAMM Queuine tRNA-ribosyltran sferase OS=Acinetobacter gandensis OX=1443941 GN=tgt PE =3 SV=1
MKFEKLAQSGRARRGRLTLEHGVVETPMFMPVGTYGTVKGMLPRDIKEIKSQVILGNTFHLYLRPGLDVIREHGGLHQFMKWNNPILTDSGGFQVFSLGAMRKIKEDGVTFRSPIDGSKVFLSPEISMDIQHTLNSDIVMIFDECTPYPATHEEAQKSLQLSLRWAKRCKTQHHDVLKNRNALFGIIQGGMYEDLRDESLNGLKEIDFDGYAIGGLSVGEPKEEMIKVLDYLPAKMPEDKPRYLMGVGKPEDIVEAVRRGVDMFDCVMPTRNARNGHYFVTDGLVRIRNAKYRHDQSPLDPHCDCYTCTNFTKSYLFHLEKCGEMLGSMLGTIHNLRYYLRLTEAMRDALDNGTFDDFVEDFYHRRGMKVPPCPQD

SEQ ID NO: 51124 - protein, 377 aa, Acinetobacter genomosp.
  misc_feature (1)..(377): tr|A0A1V2UNS7|A0A1V2UNS7_9GAMM Queuine tRNA-ribosyltran sferase OS=Acinetobacter genomosp. 33YU OX=1675530 GN=t gt PE=3 SV=1
MKFEKLGQSGRARRGRLTLEHGVVETPVFMPVGTYGTVKGMLPRDIEDIQAQIILGNTFHLYLRPGLEVIKQHGGLHDFIKWNKPILTDSGGFQVFSLGAMRKIKEEGVTFRSPIDGSKVFLSPEISMEIQHVLNSDIVMIFDECTPYPATHEEAQKSLQLSLRWAKRCKTHHHDELKNKNALFGIIQGGMYEDLRDESLNGLLEVGFDGYAIGGLSVGEPKEEMIKVLDYLPNKMPADKPRYLMGVGKPEDIVEAVRRGVDMFDCVMPTRNARNGHYFVTDGLVRIRNSKYRHDQGPLDPHCDCYTCKNFTRAYLFHLEKCGEMLASMLGTIHNLRYYQRLTEGMRDALDNGTFDEFVQDFYARRGLEVPPCPVDE

SEQ ID NO: 51125 - protein, 376 aa, Acinetobacter gerneri
  misc_feature (1)..(376): tr|N8Y642|N8Y642_9GAMM Queuine tRNA-ribosyltransferase OS=Acinetobacter gerneri DSM 14967 = CIP 107464 OX=1120 926 GN=tgt PE=3 SV=1
MKFEKLGQSGRARRGRLTLEHGVVETPVFMPVGTYGTVKGMLPRDIEEIKAQIILGNTFHLYLRPGLEVIKEHGGLHEFIKWDKPILTDSGGFQVFSLGAMRKIKEEGVTFRSPIDGSKVFLSPEISMEIQKTLNSDIVMIFDECTPYPATHEEAEKSMQLSLRWAKRCKTAHHDTLQNKNALFGIIQGGMYEDLRDVSLKGLLDIDFDGYAIGGLSVGEPKEEMIKVLDYLPNKMPQDKPRYLMGVGKPEDIVEGIRRGVDMFDCVMPTRNARNGHYFVTDGLVRIRNSRYRHDQGPLDPHCDCYTCKNFTRAYLFHLEKCGEMLASMLGTIHNLRYYQRLTEDIRDALDNGTFDDFVADFYGRRGLEVPACPQD

SEQ ID NO: 51126 - protein, 376 aa, Acinetobacter guillouiae
  misc_feature (1)..(376): tr|A0A077KVA2|A0A077KVA2_ACIGI Queuine tRNA-ribosyltran sferase OS=Acinetobacter guillouiae OX=106649 GN=tgt PE =3 SV=1
MKFEKLGQSGRARRGRLTLEHGVIETPVFMPVGTYGTVKGMLPRDIEDIKAQIILGNTFHLYLRPGLDVIREHGGLHEFMKWGKPILTDSGGFQVFSLGAMRKIKEEGVTFRSPIDGSKVFLSPEISMDIQHTLNSDIVMIFDECTPYPATHEEAQKSLQLSLRWAKRCKTQHHDVLKNRNALFGIIQGGMYEDLREESLNGLKEIDFDGFAIGGLSVGEPKEEMIKVLDYLPVKMPEDKPRYLMGVGKPEDIVEAIRRGVDMFDCVMPTRNARNGHYFVTDGLVRIRNSQYRHDQSPLDPHCDCYTCTNFTRAYLFHLEKCGEMLGSMLGTIHNLRYYQRFTQDIRDALDQGTFDEYVTDFYQRRGLEVPPCPAD

SEQ ID NO: 51127 - protein, 376 aa, Acinetobacter guillouiae
  misc_feature (1)..(376): tr|N8YG46|N8YG46_ACIGI Queuine tRNA-ribosyltransferase OS=Acinetobacter guillouiae NIPH 991 OX=1217656 GN=tgt PE=3 SV=1
MKFEKLGQSGRARRGRLTLEHGVIETPVFMPVGTYGTVKGMLPRDIEDIKAQIILGNTFHLYLRPGLDVIREHGGLHEFMKWGKPILTDSGGFQVFSLGAMRKIKEEGVTFRSPIDGSKVFLSPEISMDIQHTLNSDIVMIFDECTPYPATHEEAQKSLQLSLRWAKRCKTQHHDVLKNRNALFGIIQGGMYEDLREESLNGLKEIDFDGFAIGGLSVGEPKEEMIKVLDYLPAKMPEDKPRYLMGVGKPEDIVEAIRRGVDMFDCVMPTRNARNGHYFVTDGLVRIRNSQYRHDQSPLDPHCDCYTCTNFTRAYLFHLEKCGEMLGSMLGTIHNLRYYQRFTQDIRDALDQGTFDEYVTDFYQRRGLEVPPCPAD

SEQ ID NO: 51128 - protein, 376 aa, Acinetobacter gyllenbergii
  misc_feature (1)..(376): tr|V2T1U0|V2T1U0_9GAMM Queuine tRNA-ribosyltransferase OS=Acinetobacter gyllenbergii NIPH 230 OX=1217658 GN=tg t PE=3 SV=1
MKFEKLGQSGRARRGRLTLEHGVVETPVFMPVGTYGTVKGMLPRDIEEIQAQIILGNTFHLYLRPGLEVIKEHGGLHEFIQWDKPILTDSGGFQVFSLGAMRKIKEEGVTFRSPIDGSKVFLSPEISMEIQHVLNSDIVMIFDECTPYPATHEEAQKSLQLSLRWAKRCKTHHHDALNNKNALFGIIQGGMYEDLRDESLKGLLEVGFDGYAIGGLSVGEPKEEMIKVLDYLPNKMPQDKPRYLMGVGKPEDIVEAVRRGVDMFDCVMPTRNARNGHYFVTDGLVRIRNSKYRHDKGPLDPHCDCYTCKNFTRAYLYHLEKCGEMLASMLGTIHNLRYYQRLTQGMRDALDNGTFDEYVQDFYARRGLEVPACPED

SEQ ID NO: 51129 - protein, 376 aa, Acinetobacter gyllenbergii
  misc_feature (1)..(376): tr|A0A1B8U9A2|A0A1B8U9A2_9GAMM Queuine tRNA-ribosyltran sferase OS=Acinetobacter gyllenbergii OX=134534 GN=tgt PE=3 SV=1
MKFEKLGQSGRARRGRLTLEHGVVETPVFMPVGTYGTVKGMLPRDIEEIQAQIILGNTFHLYLRPGLEVIKEHGGLHEFIQWDKPILTDSGGFQVFSLGAMRKIKEEGVTFRSPIDGSKVFLSPEISMEIQHVLNSDIVMIFDECTPYPATHEEAQKSLQLSLRWAKRCKTHHHDELNNKNALFGIIQGGMYEDLRDESLKGLLEVGFDGYAIGGLSVGEPKEEMIKVLDYLPNKMPQDKPRYLMGVGKPEDIVEAVRRGVDMFDCVMPTRNARNGHYFVTDGLVRIRNSKYRHDKGPLDPHCDCYTCKNFTRAYLYHLEKCGEMLASMLGTIHNLRYYQRLTQGMRDALDNGTFDEYVQDFYARRGLEVPACPED

SEQ ID NO: 51130 - protein, 379 aa, Acinetobacter haemolyticus
  misc_feature (1)..(379): tr|D4XTF7|D4XTF7_ACIHA Queuine tRNA-ribosyltransferase OS=Acinetobacter haemolyticus ATCC 19194 OX=707232 GN=t gt PE=3 SV=1
MDSVMKFEKLGQSGRARRGRLTLEHGVVETPVFMPVGTYGTVKGMLPRDIEEIQAQIILGNTFHLYLRPGLEVIKEHGGLHEFIQWDKPILTDSGGFQVFSLGAMRKIKEEGVTFRSPIDGSKVFLSPEISMEIQHVLNSDIVMIFDECTPYPATHEEAQKSLQLSLRWAKRCKTHHHDELKNKNALFGIIQGGMYEDLRDESLKGLLEVGFDGYAIGGLSVGEPKEEMIKVLDYLPNKMPEDKPRYLMGVGKPEDIVEAVRRGVDMFDCVMPTRNARNGHYFVTDGLVRIRNSKYRHDKGPLDPYCDCYTCKNFTRAYLYHLEKCGEMLASMLGTIHNLRYYQRLTQGMRDALDNGTFDAYVEDFYARRGLDVPPCPN

SEQ ID NO: 51131 - protein, 375 aa, Acinetobacter haemolyticus
  misc_feature (1)..(375): tr|N9FFL7|N9FFL7_ACIHA Queuine tRNA-ribosyltransferase OS=Acinetobacter haemolyticus NIPH 261 OX=1217986 GN=tg t PE=3 SV=1
MKFEKLGQSGRARRGRLTLEHGVVETPVFMPVGTYGTVKGMLPRDIEEIQAQIILGNTFHLYLRPGLEVIKEHGGLHEFIQWDKPILTDSGGFQVFSLGAMRKIKEEGVTFRSPIDGSKVFLSPEISMEIQHVLNSDIVMIFDECTPYPATHEEAQKSLQLSLRWAKRCKTHHHDELKNKNALFGIIQGGMYEDLRDESLKGLLEVGFDGYAIGGLSVGEPKEEMIKVLDYLPNKMPEDKPRYLMGVGKPEDIVEAVRRGVDMFDCVMPTRNARNGHYFVTDGLVRIRNSKYRHDKGPLDPHCDCYTCKNFTRAYLYHLEKCGEMLASMLGTIHNLRYYQRLTQGMRDALDNGTFDAYVEDFYARRGLDVPPCPN

SEQ ID NO: 51132 - protein, 375 aa, Acinetobacter halotolerans
  misc_feature (1)..(375): tr|A0A4Q6X7F7|A0A4Q6X7F7_9GAMM Queuine tRNA-ribosyltran sferase OS=Acinetobacter halotolerans OX=1752076 GN=tgt PE=3 SV=1
MKFEKLGQSGRARRGRLTLEHGVVETPVFMPVGTYGTVKGMLPRDLEEIQAQIILGNTFHLYLRPGLEVIKEHGGLHEFIKWDKPILTDSGGFQVFSLGAMRKIKEEGVTFRSPIDGSKVFLSPEISMEIQQVLNSDIVMIFDECTPYPATHEEAQKSLQLSLRWAKRCKTHHHDELKNKNALFGIIQGGMYEDLRDESLTGLLDIGFDGYAIGGLSVGEPKDEMIKVLDYLPNKMPEDKPRYLMGVGKPEDIVEAVRRGVDMFDCVMPTRNARNGHYFVTDGLVRIRNSRYRHDQGPLDPHCDCYTCKNFSRAYLYHLEKCGEMLASMLGTIHNLRYYQRLTQGMRDALDNDTFDAYVQDFYARRGLEVPPCPN

SEQ ID NO: 51133 - protein, 376 aa, Acinetobacter idrijaensis
  misc_feature (1)..(376): tr|A0A098YIE1|A0A098YIE1_9GAMM Queuine tRNA-ribosyltran sferase OS=Acinetobacter idrijaensis OX=1507807 GN=tgt PE=3 SV=1
MKFEKLGQSGRARRGRLTLEHGVVETPMFMPVGTYGTVKGLLPRDIKEIKSQVILGNTFHLYLRPGLDVIREHGGLHGFMKWNSPILTDSGGFQVFSLGAMRKIKEEGVTFRSPIDGSKVFLSPEISMDIQHTLNSDIVMIFDECTPYPATHEEAQKSLQLSLRWAKRCKTQHHDVLKNRNALFGIIQGGMYEDLRDESLKGLLEIDFDGYAIGGLSVGEPKEEMIKVLDYLPEKMPADKPRYLMGVGKPEDIVEAVRRGVDMFDCVMPTRNARNGHYFVTDGLVRIRNSKYRHDQSPLDPHCDCYTCQNFTRAYLFHLEKCGEMLGSMLGTIHNLRYYLRLTETMRDALDNGTFDEFVHDFYARRGLEVPPCPQD

SEQ ID NO: 51134 - protein, 376 aa, Acinetobacter indicus
  misc_feature (1)..(376): tr|V2U017|V2U017_9GAMM Queuine tRNA-ribosyltransferase OS=Acinetobacter indicus CIP 110367 OX=1341679 GN=tgt P E=3 SV=1
MKFEKLGQSGRARRGRLTLEHGVVETPVFMPVGTYGTVKGMLPRDIEDIQAQIILGNTFHLYLRPGLDVIKEHGGLHEFMKWDKPILTDSGGFQVFSLGAMRKIKEEGVTFRSPIDGSKVFLSPEISMEIQKTLNSDIVMIFDECTPYPATHEEAQKSLQLSLRWAKRCKTHHHDELQNSNALFGIIQGGMYEDLRDESLKGLLEIGFDGYAIGGLSVGEPKEEMIKVLDYLPNKMPEDKPRYLMGVGKPEDIVEGIRRGVDMFDCVMPTRNARNGHYFVTDGLVRIRNSKYRHDQSPLDPHCDCYTCKNFTRAYLFHLEKCGEMLGSMLGTIHNLRYYQRFTQDIRNALDNDTFDDFVQDFYARRGLDVPPCPQD

SEQ ID NO: 51135 - protein, 376 aa, Acinetobacter indicus
  misc_feature (1)..(376): tr|A0A437IZS7|A0A437IZS7_9GAMM Queuine tRNA-ribosyltran sferase OS=Acinetobacter indicus OX=756892 GN=tgt PE=3 SV=1
MKFEKLGQSGRARRGRLTLEHGVVETPVFMPVGTYGTVKGMLPRDIEDIQAQIILGNTFHLYLRPGLDVIKEHGGLHEFMKWDKPILTDSGGFQVFSLGAMRKIKEEGVTFRSPIDGSKVFLSPEISMEIQKVLNSDIVMIFDECTPYPATHEEAQKSLQLSLRWAKRCKEHHHNVLENKNALFGIIQGGMYEDLRDESLNGLLDVGFDGYAIGGLSVGEPKEEMIKVLDYLPNKMPEDKPRYLMGVGKPEDIVEGIRRGVDMFDCVMPTRNARNGHYFVTDGLVRIRNSKYRHDQSPLDPHCDCYTCKNFTRAYLFHLEKCGEMLGSMLGTIHNLRYYQRFTQDIRNALDNGTFDDFVQDFYARRGLDVPPCPQD

SEQ ID NO: 51136 - protein, 376 aa, Acinetobacter johnsonii
  misc_feature (1)..(376): tr|A0A0U3SZH9|A0A0U3SZH9_ACIJO Queuine tRNA-ribosyltran sferase OS=Acinetobacter johnsonii XBB1 OX=1242245 GN=t gt PE=3 SV=1
MKFEKLGQSGRARRGRLTLEHGVVETPVFMPVGTYGTVKGMLPRDIEDIKAQIILGNTFHLYLRPGLEVIKEHGGLHKFMKWDKPILTDSGGFQVFSLGAMRKIKEDGVTFRSPIDGSKVFLSPEISMDIQHTLNSDIVMIFDECTPYPATHEEAQKSLQLSLRWAKRCKTQHHDVLENKNALFGIIQGGMYEDLRDESLKGLLEVGFDGYAIGGLSVGEPKEEMIKVLDYLPEKMPADKPRYLMGVGKPEDIVEGIRRGVDMFDCVMPTRNARNGHYFVTDGLVRIRNSKYRHDQSPLDPHCDCYTCTNFTRAYLFHLEKCGEMLGSMLGTIHNLRYYQRFTQDIRDALDNDRFDAFVEDFYARRGLEVPPCPQD

SEQ ID NO: 51137 - protein, 376 aa, Acinetobacter johnsonii; identical to SEQ ID NO: 51136
  misc_feature (1)..(376): tr|A0A0W8GXY0|A0A0W8GXY0_ACIJO Queuine tRNA-ribosyltran sferase OS=Acinetobacter johnsonii OX=40214 GN=tgt PE=3 SV=1

SEQ ID NO: 51138 - protein, 376 aa, Acinetobacter junii
  misc_feature (1)..(376): tr|D0SL62|D0SL62_ACIJU Queuine tRNA-ribosyltransferase OS=Acinetobacter junii SH205 OX=575587 GN=tgt PE=3 SV=1
MQFEKLGQSGRARRGRLTLEHGVVETPVFMPVGTYGTVKGMLPRDIEEIQAQIILGNTFHLYLRPGLEVIKEHGGLHEFIQWDKPILTDSGGFQVFSLGAMRKIKEEGVTFRSPIDGSKVFLSPEISMEIQHVLNSDIVMIFDECTPYPATHEEAQKSLQLSLRWAKRCKTHHHDELKNKNALFGIIQGGMYEDLRDESLAGLLEVGFDGYAIGGLSVGEPKEEMIKVLDYLPNKMPQDKPRYLMGVGKPEDIVEAVRRGVDMFDCVMPTRNARNGHYFVTDGLVRIRNSKYRHDKGPLDPHCDCYTCKNFTRAYLYHLEKCGEMLASMLGTIHNLRYYQRLTQGMRDALDNGTFDEYVQDFYARRGLEVPPCPED

SEQ ID NO: 51139 - protein, 376 aa, Acinetobacter junii
  misc_feature (1)..(376): tr|A0A365PK91|A0A365PK91_ACIJU Queuine tRNA-ribosyltran sferase OS=Acinetobacter junii OX=40215 GN=tgt PE=3 SV= 1
MQFEKLGQSGRARRGRLTLEHGVVETPVFMPVGTYGTVKGMLPRDIEEIQAQIILGNTFHLYLRPGLEVIKEHGGLHEFIQWDKPILTDSGGFQVFSLGAMRKIKEEGVTFRSPIDGSKVFLSPEISMEIQHVLNSDIVMIFDECTPYPATHEEAQKSLQLSLRWAKRCKTHHHDELKNKNALFGIIQGGMYEDLRDESLAGLLEVGFDGYAIGGLSVGEPKEEMIKVLDYLPNKMPQDKPRYLMGVGKPEDIVEAVRRGVDMFDCVMPTRNARNGHYFVTDGLVRIRNSKYRHDKGPLDPHCDCYTCKNFTRAYLYHLEKCGEMLASMLGTIHNLRYYQRLTQGLRDALDNGTFDEYVQDFYARRGLEVPPCPED

SEQ ID NO: 51140 - protein, 376 aa, Acinetobacter kookii
  misc_feature (1)..(376): tr|A0A1G6N1F0|A0A1G6N1F0_9GAMM Queuine tRNA-ribosyltran sferase OS=Acinetobacter kookii OX=1226327 GN=tgt PE=3 SV=1
MKFEKLGQSGRARRGRLTLEHGVVETPVFMPVGTYGTVKGMLPRDVEDIKAQIILGNTFHLYLRPGLDVIREHGGLHEFMKWNKPILTDSGGFQVFSLGAMRKIKEEGVTFRSPIDGSKVFLSPEISMDIQHTLNSDIVMIFDECTPYPATREEAQKSLQLSLRWAKRCKTHHHDVLKNKNALFGIIQGGMYEDLRDESLAGLKEIDFDGFAIGGLSVGEPKEEMIKILDHLPPKMPENKPRYLMGVGKPEDIVEGIRRGVDMFDCVMPTRNARNGHYFVTDGLVRIRNAKYRHDQRPLDPDCDCYTCQNFTRAYLFHLEKCGEMLGSMLGTIHNLRYYQRFTQDIRDALDNGTFDEYVQDFYARRGLEVPPCPED

SEQ ID NO: 51141 - protein, 376 aa, Acinetobacter kyonggiensis
  misc_feature (1)..(376): tr|A0A1H3JXM0|A0A1H3JXM0_9GAMM Queuine tRNA-ribosyltran sferase OS=Acinetobacter kyonggiensis OX=595670 GN=tgt PE=3 SV=1
MKFEKLGQSGRARRGRLTLEHGVIETPVFMPVGTYGTVKGMLPRDIEDIKAQIILGNTFHLYLRPGLDVIREHGGLHEFMKWNKPILTDSGGFQVFSLGAMRKIKEDGVTFRSPIDGSKVFLSPEISMDIQHTLNSDIVMIFDECTPYPATHEEAQKSLQLSLRWAKRCKTQHHDVLKNRNALFGIIQGGMYEDLRNESLNGLKEIDFDGFAIGGLSVGEPKEEMIKVLDYLPAQMPEDKPRYLMGVGKPEDIVEAIRRGVDMFDCVMPTRNARNGHYFVTDGLVRIRNAKYRHDQSPLDSECDCYTCQNFTRAYLFHLEKCGEMLGSMLGTIHNLRYYQRFTQDIRDALDNGTFDAYVHDFYARRGLEVPPCPED

SEQ ID NO: 51142 - protein, 377 aa, Acinetobacter lactucae
  misc_feature (1)..(377): tr|A0A151YM24|A0A151YM24_9GAMM Queuine tRNA-ribosyltran sferase OS=Acinetobacter lactucae OX=1785128 GN=tgt PE= 3 SV=1
MKFEKLGQSGRARRGRLTLEHGVVETPVFMPVGTYGTVKGMLPRDIEDIQAQIILGNTFHLYLRPGLEVIKEHGGLHDFIKWNKPILTDSGGFQVFSLGAMRKIKEEGVTFRSPIDGSKVFLSPEISMEIQQVLNSDIVMIFDECTPYPATHEEAQKSLQLSLRWAKRCKTHHHDELKNHNALFGIIQGGMYEDLRDESLNGLLEIGFDGYAIGGLSVGEPKEEMIKVLDYLPNKMPHDKPRYLMGVGKPEDIVEAVRRGVDMFDCVMPTRNARNGHYFVTDGLVRIRNSKYRHDQSPLDPHCDCYTCKNFTRAYLFHLEKCGEMLASMLGTIHNLRYYQRLTEGMRDALDNGTFDEFVQDFYARRGLEVPPCPVDE

SEQ ID NO: 51143 - protein, 375 aa, Acinetobacter larvae
  misc_feature (1)..(375): tr|A0A1B2M258|A0A1B2M258_9GAMM Queuine tRNA-ribosyltran sferase OS=Acinetobacter larvae OX=1789224 GN=tgt PE=3 SV=1
MKFEKLAQSGRARRGRLTLEHGVVETPVFMPVGTYGTVKGMLPRDIEEIQAQIILGNTFHLYLRPGLDVIKAHGGLHEFIKWDKPILTDSGGFQVFSLGAMRKIKEEGVTFRSPIDGSKVFLSPEISMEIQKVLNSDIVMIFDECTPYPATHQQAQQSLQLSLRWAKRCKTAHTENNNPNALFGIIQGGMYEDLRDESLNGLLEIGFDGYAIGGLSVGEPKEEMLRVLDFLPNKMPEDKPRYLMGVGKPEDIVEGIRRGVDMFDCVMPTRNARNGHYFVSDGLVRIRNSRYRFDQGPLDPHCDCYTCKNFSRAYLFHLEKCGEMLGSMLGTIHNLRYYQRFTQDIRDALEEDRFDAFVQDFYQRRGLEVPPCPED

SEQ ID NO: 51144 - protein, 376 aa, Acinetobacter lwoffii; identical to SEQ ID NO: 51133
  misc_feature (1)..(376): tr|A0A2K8UNZ0|A0A2K8UNZ0_ACILW Queuine tRNA-ribosyltran sferase OS=Acinetobacter lwoffii OX=28090 GN=tgt PE=3 S V=1

SEQ ID NO: 51145 - protein, 376 aa, Acinetobacter lwoffii; identical to SEQ ID NO: 51133
  misc_feature (1)..(376): tr|N9HSR7|N9HSR7_ACILW Queuine tRNA-ribosyltransferase OS=Acinetobacter lwoffii ATCC 9957 = CIP 70.31 OX=13118 04 GN=tgt PE=3 SV=1

SEQ ID NO: 51146 - protein, 378 aa, Acinetobacter marinus
  misc_feature (1)..(378): tr|A0A1G6N802|A0A1G6N802_9GAMM Queuine tRNA-ribosyltran sferase OS=Acinetobacter marinus OX=281375 GN=tgt PE=3 SV=1
MKFEKLNQSGRARRARLTLNHGQVETPAFMPVGTYGTVKGMLPRDIEDIGAHIILGNTFHLYLRPGLEVIKEHGGLHEFVKWDKPILTDSGGFQVFSLGEMRKIKEEGVTFRSPIDGSKVFLSPEISMEIQQVLNSDIVMIFDECTPYPATHKQAQDSLQLSLRWAKRCKTAHTENGNPNALFGIIQGGMYEDLRDESLQGLLEIDFDGYAIGGLSVGEPKEEMIKVLDYLPAKMPEDKPRYLMGVGKPEDIVEAVRRGVDMFDCVMPTRNARNAHYFVTDGVVRIRNSQYRHDQQPLDPHCDCYTCKNFTRAYLFHLEKCGEMLGAMLGTIHNLRYYQRLMQGIRDALDAGTFDAYVQDFYQRRGLEVPECPHDQIA

SEQ ID NO: 51147 - protein, 376 aa, Acinetobacter nectaris
  misc_feature (1)..(376): tr|V2TTP6|V2TTP6_9GAMM Queuine tRNA-ribosyltransferase OS=Acinetobacter nectaris CIP 110549 OX=1392540 GN=tgt PE=3 SV=1
MKFEKLGQSGRARRGRLTLEHGVVETPVFMPVGTYGTVKGMLPRDIEDINAQIILGNTFHLYLRPGLEVIKEHGGLHEFMKWNKPILTDSGGFQVFSLGAMRKIKEEGVTFRSPIDGSKVFLSPEISMEIQQTLNSDIVMIFDECTPYPATHEQAQQSLQLSLRWAKRCKTAHTNNGNPNALFGIIQGGMYEDLRDESLKGLLDIGFDGYAIGGLSVGEPKDEMIKVLDYLPNKMPEDKPRYLMGVGKPEDIVEAVRRGVDMFDCVMPTRNARNGHFFVTDGLVRIRNSKYRHDQGPLDPHCDCYTCKNFTRAYLYHLEKCGEMLASMLGTIHNLRYYLRLTETMRHALDEGTFDAFVEDFYTRRGLEVPPCPADE

SEQ ID NO: 51148 - protein, 377 aa, Acinetobacter nosocomialis
  misc_feature (1)..(377): tr|A0A0E2GCZ8|A0A0E2GCZ8_ACINO Queuine tRNA-ribosyltran sferase OS=Acinetobacter nosocomialis NIPH 386 OX=12179 85 GN=tgt PE=3 SV=1
MKFEKLGQSGRARRGRLTLEHGVVETPVFMPVGTYGTVKGMLPRDIEDIQAQIILGNTFHLYLRPGLEVIKQHGGLHDFIKWNKPILTDSGGFQVFSLGAMRKIKEEGVTFRSPIDGSKVFLSPEISMEIQHVLNSDIVMIFDECTPYPATHEEAQKSLQLSLRWAKRCKTHHHDELKNKNALFGIIQGGMYEDLRDESLNGLLEVGFDGYAIGGLSVGEPKEEMIKVLDYLPNKMPHDKPRYLMGVGKPEDIVEAVRRGVDMFDCVMPTRNARNGHYFVTDGLVRIRNSKYRHDQGPLDPHCDCYTCKNFTRAYLFHLEKCGEMLASMLGTIHNLRYYQRLTEGMRDALDNGTFDEFVQDFYARRGLEVPPCPVDE

SEQ ID NO: 51149 - protein, 377 aa, Acinetobacter nosocomialis
  misc_feature (1)..(377): tr|A0A1Y5NM32|A0A1Y5NM32_ACINO Queuine tRNA-ribosyltran sferase OS=Acinetobacter nosocomialis P020 OX=1285584 G N=tgt PE=3 SV=1
MKFEKLGQSGRARRGRLTLEHGVVETPVFMPVGTYGTVKGMLPRDIEDIQAQIILGNTFHLYLRPGLEVIKQHGGLHDFIKWNKPILTDSGGFQVFSLGAMRKIKEEGVTFRSPIDGSKVFLSPEISMEIQHVLNSDIVMIFDECTPYPATHEEAQKSLQLSLRWAKRCKTHHHDELKNKNALFGIIQGGMYEDLRDESLNGLLEVGFDGYAIGGLSVGEPKEEMIKVLDYLPNKMPHDKPRYLMGVGKPEDIVEAVRRGVDMFDCVMPTRNARNGHYFVTDGLVRIRNSKYRHDQGPLDPHCDCYTCKNFTRAYLFHLEKCGEMLASMLGTIHNLRYYQRLTEGMRDALDNDTFDEFVQDFYARRGLEVPPCPIDE

SEQ ID NO: 51150 - protein, 377 aa, Acinetobacter oleivorans; identical to SEQ ID NO: 51113
  misc_feature (1)..(377): tr|A0A0B2UCX5|A0A0B2UCX5_9GAMM Queuine tRNA-ribosyltran sferase OS=Acinetobacter oleivorans OX=1148157 GN=tgt P E=3 SV=1

SEQ ID NO: 51151 - protein, 377 aa, Acinetobacter oleivorans; identical to SEQ ID NO: 51113
  misc_feature (1)..(377): tr|D8JNN8|D8JNN8_ACISD Queuine tRNA-ribosyltransferase OS=Acinetobacter oleivorans (strain JCM 16667 / KCTC 23 045 / DR1) OX=436717 GN=tgt PE=3 SV=1

SEQ ID NO: 51152 - protein, 376 aa, Acinetobacter parvus
  misc_feature (1)..(376): tr|N8R9X8|N8R9X8_9GAMM Queuine tRNA-ribosyltransferase OS=Acinetobacter parvus NIPH 1103 OX=1217671 GN=tgt PE= 3 SV=1
MKFEKLGQSGRARRGRLTLEHGVVETPVFMPVGTYGTVKGMLPRDIEEIQAQIILGNTFHLYLRPGLEVIKEHGGLHQFIQWDKPILTDSGGFQVFSLGAMRKIKEEGVTFRSPIDGSKVFLSPEISMEIQSVLNSDIVMIFDECTPYPATHEEAQKSLQLSLRWAKRCKTHHHDELKNKNALFGIIQGGMYEDLRDESLNGLLEVGFDGYAIGGLSVGEPKEEMIKVLDYLPNKMPQDKPRYLMGVGKPEDIVEAVRRGVDMFDCVMPTRNARNGHYFVTDGLVRIRNSKYRHDKGPLDPYCDCYTCKNFTRAYLYHLEKCGEMLASMLGTIHNLRYYQRLTQGMRDALDNGTFDDYVQDFYARRGLEVPPCPED

SEQ ID NO: 51153 - protein, 376 aa, Acinetobacter parvus
  misc_feature (1)..(376): tr|N8QA94|N8QA94_9GAMM Queuine tRNA-ribosyltransferase OS=Acinetobacter parvus DSM 16617 = CIP 108168 OX=98133 3 GN=tgt PE=3 SV=1
MKFEKLGQSGRARRGRLTLEHGVVETPVFMPVGTYGTVKGMLPRDIEEIQAQIILGNTFHLYLRPGLEVIKEHGGLHQFIQWDKPILTDSGGFQVFSLGAMRKIKEEGVTFRSPIDGSKVFLSPEISMEIQSVLNSDIVMIFDECTPYPATHEEAQKSLQLSLRWAKRCKTHHHDELNNKNALFGIIQGGMYEDLRDESLNGLLEVGFDGYAIGGLSVGEPKEEMIKVLDYLPNKMPQDKPRYLMGVGKPEDIVEAVRRGVDMFDCVMPTRNARNGHYFVTDGLVRIRNSKYRHDKGPLDPHCDCYTCKNFTRAYLYHLEKCGEMLASMLGTIHNLRYYQRLTQGMRDALDNGTFDDYVQDFYARRGLEVPPCPED

SEQ ID NO: 51154 - protein, 377 aa, Acinetobacter piscicola
  misc_feature (1)..(377): tr|A0A4Q4GWH2|A0A4Q4GWH2_9GAMM Queuine tRNA-ribosyltran sferase OS=Acinetobacter piscicola OX=2006115 GN=tgt PE =3 SV=1
MKFEKLGQSGRARRGRLTLEHGVVETPVFMPVGTYGTVKGMLPRDIEDIQAQIILGNTFHLYLRPGLDVIREHGGLHEFMKWGKPILTDSGGFQVFSLGAMRKIKEEGVTFRSPIDGSKVFLSPEISMDIQHTLNSDIVMIFDECTPYPATHEEAQKSLQLSLRWAKRCKTQHHDVLKNKNALFGIIQGGMYEDLREESLNGLKEIDFDGFAIGGLSVGEPKEEMIKVLDYLPAKMPEDKPRYLMGVGKPEDIVEAIRRGVDMFDCVMPTRNARNGHYFVTDGLVRIRNAKYRHDQSPLDPHCDCYTCTNFTRAYLFHLEKCGEMLGSMLGTIHNLRYYQRFTQDIRDALDNGTFDEFVADFYQRRGLEVPPCPVDE

SEQ ID NO: 51155 - protein, 377 aa, Acinetobacter pittii; identical to SEQ ID NO: 51142
  misc_feature (1)..(377): tr|R8YBA7|R8YBA7_ACIPI Queuine tRNA-ribosyltransferase OS=Acinetobacter pittii ANC 4050 OX=1217691 GN=tgt PE=3 SV=1

SEQ ID NO: 51156 - protein, 377 aa, Acinetobacter pittii; identical to SEQ ID NO: 51142
  misc_feature (1)..(377): tr|A0A0M3BW06|A0A0M3BW06_ACIPI Queuine tRNA-ribosyltran sferase OS=Acinetobacter pittii OX=48296 GN=tgt PE=3 SV =1

SEQ ID NO: 51157 - protein, 378 aa, Acinetobacter populi
  misc_feature (1)..(378): tr|A0A1Z9Z2V1|A0A1Z9Z2V1_9GAMM Queuine tRNA-ribosyltran sferase OS=Acinetobacter populi OX=1582270 GN=tgt PE=3 SV=1
MKFEKLNQSGRARRGRLTLNHGQVETPAFMPVGTYGTVKGMLPRDIEEIGAHIILGNTFHLYLRPGLDVIKEHGGLHQFVKWDKPILTDSGGFQVFSLGEMRQIKEEGVTFRSPIDGAKVFLSPEVSMEIQRVLNSDIVMIFDECTPYPATHEQAQKSLQLSLRWAKRCKVAHTENGNPNALFGIIQGGMYEDLRDESLNGLLEIGFDGYAIGGLSVGEPKEEMIKVLDYLPNKMPADKPRYLMGVGKPEDIVEAVRRGVDMFDCVMPTRNARNAHYFVTDGVVRIRNSQYRHDQQPLDPHCDCYTCKNFTRAYLFHLEKCGEMLGAMLGTIHNLRYYQRLMQAIRDALDAGTFEQFVQDFYQRRGLEVPVCDTESFA

SEQ ID NO: 51158 - protein, 376 aa, Acinetobacter pragensis
  misc_feature (1)..(376): tr|A0A151Y118|A0A151Y118_9GAMM Queuine tRNA-ribosyltran sferase OS=Acinetobacter pragensis OX=1806892 GN=tgt PE =3 SV=1
MKFEKLAQSGRARRGRLTLEHGVVETPMFMPVGTYGTVKGMLPRDIKEIKSQVILGNTFHLYLRPGLDVIREHGGLHQFMKWDKPILTDSGGFQVFSLGAMRKIKEDGVTFRSPIDGSKVFLSPEISMDIQHTLNSDIVMIFDECTPYPATHEEAQKSLQLSLRWAKRCKTQHHDVLKNRNALFGIIQGGMYEDLRDESLNGLKEIDFDGYAIGGLSVGEPKEEMIKVLDYLPAKMPEDKPRYLMGVGKPEDIVEAVRRGVDMFDCVMPTRNARNGHYFVTDGLVRIRNAKYRHDQSPLDADCDCYTCQNVTRSYLFHLEKCGEMLGAMLGTIHNLRYYLRLTEAMRDALDNGTFDEFVQDFYARRGLEVPPCPQD

SEQ ID NO: 51159 - protein, 376 aa, Acinetobacter proteolyticus; identical to SEQ ID NO: 51128
  misc_feature (1)..(376): tr|A0A1E7R4V0|A0A1E7R4V0_9GAMM Queuine tRNA-ribosyltran sferase OS=Acinetobacter proteolyticus OX=1776741 GN=tg t PE=3 SV=1

SEQ ID NO: 51160 - protein, 378 aa, Acinetobacter puyangensis
  misc_feature (1)..(378): tr|A0A240E3A8|A0A240E3A8_9GAMM Queuine tRNA-ribosyltran sferase OS=Acinetobacter puyangensis OX=1096779 GN=tgt PE=3 SV=1
MKFEKLNQSGRARRGRLTLNHGQVETPAFMPVGTYGTVKGMLPRDIEEIGAHIILGNTFHLYLRPGLDVIKEHGGLHQFVKWDKPILTDSGGFQVFSLGEMRQIKEEGVTFRSPIDGAKVFLSPEVSMEIQRVLNSDIVMIFDECTPYPATHEQAQKSLQLSLRWAKRCKVAHTENGNPNALFGIIQGGMYEDLRDESLKGLLDIDFDGYAIGGLSVGEPKEEMIKVLDYLPNKMPADKPRYLMGVGKPEDIVEAVRRGVDMFDCVMPTRNARNAHYFVSDGVVRIRNSQYRHDQQPLDPHCDCYTCKNFTRAYLFHLEKCGEMLGAMLGTIHNLRYYQRLMQGIRDALDAGTFDQYVQDFYQRRGLEVPVCDAESFA

SEQ ID NO: 51161 - protein, 378 aa, Acinetobacter qingfengensis
  misc_feature (1)..(378): tr|A0A1E7R372|A0A1E7R372_9GAMM Queuine tRNA-ribosyltran sferase OS=Acinetobacter qingfengensis OX=1262585 GN=tg t PE=3 SV=1
MKFEKLNQSGRARRGRLTLNHGQVETPAFMPVGTYGTVKGMLPRDIEDIGAHIILGNTFHLYLRPGLEVIKEHGGLHEFVKWDKPILTDSGGFQVFSLGEMRKITEDGVTFRSPIDGSKIFLSPEISMDIQRVLNSDIVMIFDECTPYPATHAEAEKSMQLSLRWAKRCKTQHDENGNPNALFGIIQGSMYEDLREISLNGLQEIGFDGYAIGGLSVGEPKEEMIKVLDYLPAKMPAEKPRYLMGVGKPEDIVEAVRRGVDMFDCVMPTRNARNAHYFVTDGVVRIRNSQYRHDQQALDPHCDCYTCKNFTRAYLFHLEKCGEMLGAMLGTIHNLRYYQRLMQGIRDALDAGAFEAFVQDFYQRRGQEVPACPIDDVE

SEQ ID NO: 51162 - protein, 376 aa, Acinetobacter radioresistens
  misc_feature (1)..(376): tr|A0A3F3GNY3|A0A3F3GNY3_ACIRA Queuine tRNA-ribosyltran sferase OS=Acinetobacter radioresistens NIPH 2130 OX=12 17674 GN=tgt PE=3 SV=1
MKFEKLGQSGRARRGRLTLEHGVVETPVFMPVGTYGTVKGMLPRDIEEIQAQIILGNTFHLYLRPGLDVVKEHGGLHEFIKWDKPILTDSGGFQVFSLGAMRKIKEEGVTFRSPIDGSKVFLSPEVSMEIQKVLNSDIVMIFDECTPYPATHEEAQKSLQLSLRWAKRCKTHHHEVLDNKNALFGIIQGGMYEDLRDESLEGLLEIGFDGYAIGGLSVGEPKEEMIKVLDYLPNKMPHDKPRYLMGVGKPEDIVEGIRRGVDMFDCVMPTRNARNGHYFVTDGLVRIRNSKYRHDQSPLDPHCDCYTCKNFTRAYLFHLEKCGEMLGSMLGTIHNLRYYQRFTQDIRDALDNGTFEAFVEDFYTRRGMEVPPCPED

SEQ ID NO: 51163 - protein, 376 aa, Acinetobacter radioresistens
  misc_feature (1)..(376): tr|A0A2T1J374|A0A2T1J374_ACIRA Queuine tRNA-ribosyltran sferase OS=Acinetobacter radioresistens OX=40216 GN=tgt PE=3 SV=1
MKFEKLGQSGRARRGRLTLEHGVVETPVFMPVGTYGTVKGMLPRDIEEIQAQIILGNTFHLYLRPGLDVVKEHGGLHEFIKWDKPILTDSGGFQVFSLGAMRKIKEEGVTFRSPIDGSKVFLSPEVSMEIQKVLNSDIVMIFDECTPYPATHEEAQKSLQLSLRWAKRCKTHHHEVLDNKNALFGIIQGGMYEDLRDESLEGLLEIGFDGYAIGGLSVGEPKEEMIKVLDYLPNRMPHDKPRYLMGVGKPEDIVEGIRRGVDMFDCVMPTRNARNGHYFVTDGLVRIRNSKYRHDQSSLDPHCDCYTCKNFTRAYLFHLEKCGEMLGSMLGTIHNLRYYQRFTQDIRDALDNGTFEAFVEDFYTRRGMEVPPCPED

SEQ ID NO: 51164 - protein, 376 aa, Acinetobacter rudis
  misc_feature (1)..(376): tr|S3NTY6|S3NTY6_9GAMM Queuine tRNA-ribosyltransferase OS=Acinetobacter rudis CIP 110305 OX=421052 GN=tgt PE=3 SV=1
MKFEKLAQSGRARRGRLTLEHGVVETPVFMPVGTYGTVKGMLPRDIEEIQAQIILGNTFHLYLRPGLEVIKEHGGLHEFIKWDKPILTDSGGFQVFSLGAMRKIKEEGVTFRSPIDGSKVFLSPEISMEIQRVLNSDIVMIFDECTPYPATHEEAQKSLQLSLRWAKRCKTAHEENGNPNALFGIIQGGMYEDLRDESLTGLLEVGFDGYAIGGLSVGEPKEEMLKVLDYLPAKMPADKPRYLMGVGKPEDIVEAIRRGVDMFDCVMPTRNARNGHYFVTDGLVRIRNSQYRHDQQPLDPHCDCYTCKNFTRAYLFHLEKCGEMLGSMLGTIHNLRYYQRFTQQIRDALDNGTFDDFVTDFYQRRGLEVPPCPEDD

SEQ ID NO: 51165 - protein, 376 aa, Acinetobacter schindleri
  misc_feature (1)..(376): tr|N9ANA2|N9ANA2_9GAMM Queuine tRNA-ribosyltransferase OS=Acinetobacter schindleri CIP 107287 OX=1217988 GN=tg t PE=3 SV=1
MKFEKLAQSGRARRGRLTLEHGVVETPMFMPVGTYGTVKGMLPRDIKEIKSQVILGNTFHLYLRPGLDVIREHGGLHQFMKWNNPILTDSGGFQVFSLGAMRKIKEEGVTFRSPIDGSKVFLSPEISMDIQHTLNSDIVMIFDECTPYPATHEEAQKSLQLSLRWAKRCKTQHHDVLKNRNALFGIIQGGMYEDLRDESLKGLLEIGFDGYAIGGLSVGEPKEEMIKVLDYLPEKMPEDKPRYLMGVGKPEDIVEAVRRGVDMFDCVMPTRNARNGHYFVTGGLVRIRNAKYRHDQSPLDPACDCYTCQNFSRAYLFHLEKCGEMLGSMLGTIHNLRYYLRLTEAMREALDQGTFEQFVEDFYARRGMQVPPCPED

SEQ ID NO: 51166 - protein, 376 aa, Acinetobacter schindleri; identical to SEQ ID NO: 51165
  misc_feature (1)..(376): tr|A0A1P8PMD6|A0A1P8PMD6_9GAMM Queuine tRNA-ribosyltran sferase OS=Acinetobacter schindleri OX=108981 GN=tgt PE =3 SV=1

SEQ ID NO: 51167 - protein, 377 aa, Acinetobacter seifertii
  misc_feature (1)..(377): tr|A0A5E9PDC9|A0A5E9PDC9_9GAMM Queuine tRNA-ribosyltran sferase OS=Acinetobacter seifertii OX=1530123 GN=tgt PE =3 SV=1
MKFEKLGQSGRARRGRLTLEHGVVETPVFMPVGTYGTVKGMLPRDIEDIQAQIILGNTFHLYLRPGLEVIKQHGGLHDFIKWNKPILTDSGGFQVFSLGAMRKIKEEGVTFRSPIDGSKVFLSPEISMEIQHVLNSDIVMIFDECTPYPATHEEAQKSLQLSLRWAKRCKTHHHDELKNKNALFGIIQGGMYEDLRDESLNGLLEVGFDGYAIGGLSVGEPKEEMIKVLDYLPNKMPSDKPRYLMGVGKPEDIVEAVRRGVDMFDCVMPTRNARNGHYFVTDGLVRIRNSKYRHDQGPLDPHCDCYTCKNFTRAYLFHLEKCGEMLASMLGTIHNLRYYQRLTEGMRDALDNGTFDEFVQDFYARRGLEVPPCPVDE

SEQ ID NO: 51168 - protein, 377 aa, Acinetobacter seifertii; identical to SEQ ID NO: 51124
  misc_feature (1)..(377): tr|N8SFV1|N8SFV1_9GAMM Queuine tRNA-ribosyltransferase OS=Acinetobacter seifertii OX=1530123 GN=tgt PE=3 SV=1

SEQ ID NO: 51169 - protein, 376 aa, Acinetobacter soli
  misc_feature (1)..(376): tr|A0A3R9A4W2|A0A3R9A4W2_9GAMM Queuine tRNA-ribosyltran sferase OS=Acinetobacter soli OX=487316 GN=tgt PE=3 SV= 1
MKFEKLGQSGRARRGRLTLAHGVVETPVFMPVGTYGTVKGMLPRDIEEIQAQIILGNTFHLYLRPGLEVIKEHGGLHEFIKWDKPILTDSGGFQVFSLGAMRKIKEEGVTFRSPIDGSKVFLSPEISMEIQQVLNSDIVMIFDECTPYPATHEEAQKSLQLSLRWAKRCKTHHHEQLNNTNALFGIIQGGMYEDLRDESLNGLLEIGFDGYAIGGLSVGEPKEEMIKVLDYLPAKMPEDKPRYLMGVGKPEDIVEAVRRGVDMFDCVMPTRNARNGHYFVTDGLVRIRNSKYRHDQSPLDPHCDCYTCKNFTRAYLYHLEKCGEMLASMLGTIHNLRYYQRLTQGIRDALEQGTFDEFVTDFYTRRGLDVPPAPMD

SEQ ID NO: 51170 - protein, 376 aa, Acinetobacter soli
  misc_feature (1)..(376): tr|N9AJI9|N9AJI9_9GAMM Queuine tRNA-ribosyltransferase OS=Acinetobacter soli NIPH 2899 OX=1217677 GN=tgt PE=3 SV=1
MKFEKLGQSGRARRGRLTLAHGVVETPVFMPVGTYGTVKGMLPRDIEEIQAQIILGNTFHLYLRPGLEVIKEHGGLHEFIKWDKPILTDSGGFQVFSLGAMRKIKEEGVTFRSPIDGSKVFLSPEISMEIQQVLNSDIVMIFDECTPYPATHEEAQKSLQLSLRWAKRCKTHHHEQLNNTNALFGIIQGGMYEDLRDESLNGLLEIGFDGYAIGGLSVGEPKEEMIKVLDYLPAKMPEDKPRYLMGVGKPEDIVEAVRRGVDMFDCVMPTRNARNGHYFVTDGLVRIRNSKYRHDQSPLDPHCDCYTCKNFTRAYLYHLEKCGEMLASMLGTIHNLRYYQRLTQGIRDALEQGTFDEFVTDFYTRRGLDVPPAPVD

SEQ ID NO: 51171 - protein, 377 aa, Acinetobacter sp.; identical to SEQ ID NO: 51148
  misc_feature (1)..(377): tr|A0A4V7TCU7|A0A4V7TCU7_9GAMM Queuine tRNA-ribosyltran sferase OS=Acinetobacter sp. FDAARGOS_131 OX=1876769 GN =tgt PE=3 SV=1

SEQ ID NO: 51172 - protein, 376 aa, Acinetobacter sp.; identical to SEQ ID NO: 51133
  misc_feature (1)..(376): tr|A0A1E3GM68|A0A1E3GM68_9GAMM Queuine tRNA-ribosyltran sferase OS=Acinetobacter sp. 51m OX=1856846 GN=tgt PE=3 SV=1

SEQ ID NO: 51173 - protein, 376 aa, Acinetobacter tandoii
  misc_feature (1)..(376): tr|A0A515BC58|A0A515BC58_9GAMM Queuine tRNA-ribosyltran sferase OS=Acinetobacter tandoii OX=202954 GN=tgt PE=3 SV=1
MKFEKLAQSGRARRGRLTLEHGVVETPVFMPVGTYGTVKGMLPRDVEDIQAQIILGNTFHLYLRPGLDVIKAHGGLHEFMKWDKPILTDSGGFQVFSLGAMRKIKEEGVTFRSPIDGSKVFLSPEISMEIQQTLNSDIVMIFDECTPYPATHEEAQKSLQLSLRWAKRCKTHHHDELKNNNALFGIIQGGMYEDLRDESLNGLLDIGFDGYAIGGLSVGEPKEEMIKVLDYLPVKMPADKPRYLMGVGKPEDIVEGIRRGVDMFDCVMPTRNARNGHYFVTDGLVRIRNSKYRFDQQPLDPHCDCYTCKNFTRAYLFHLEKCGEMLGSMLGTIHNLRYYQRFTQDIRDALDNGTFDAFVEDFYQRRGLEVPPCPQD

SEQ ID NO: 51174 - protein, 376 aa, Acinetobacter tandoii
  misc_feature (1)..(376): tr|R9B554|R9B554_9GAMM Queuine tRNA-ribosyltransferase OS=Acinetobacter tandoii DSM 14970 = CIP 107469 OX=1120 927 GN=tgt PE=3 SV=1
MKFEKLAQSGRARRGRLTLEHGVVETPVFMPVGTYGTVKGMLPRDVEDIQAQIILGNTFHLYLRPGLDVIEAHGGLHEFMKWDKPILTDSGGFQVFSLGAMRKIKEEGVTFRSPIDGSKVFLSPEISMEIQKTLNSDIVMIFDECTPYPATHEEAQKSLQLSLRWAKRCKTHHHDELNNKNALFGIIQGGMYEDLREESLKGLLEIGFDGYAIGGLSVGEPKEEMIKVLDYLPVKMPADKPRYLMGVGKPEDIVEGIRRGVDMFDCVMPTRNARNGHYFVTDGLVRIRNSKYRHDQQPLDPHCDCYTCTNFTRAYLFHLEKCGEMLGSMLGTIHNLRYYQRFTQDIRDALDNGTFDAFVEDFYQRRGLEVPPCPQD

SEQ ID NO: 51175 - protein, 376 aa, Acinetobacter tjernbergiae
  misc_feature (1)..(376): tr|V2V358|V2V358_9GAMM Queuine tRNA-ribosyltransferase OS=Acinetobacter tjernbergiae DSM 14971 = CIP 107465 OX =1120928 GN=tgt PE=3 SV=1
MKFEKLGQSGRARRGRLTLEHGVVETPVFMPVGTYGTVKGMLPRDIEEIQAQIILGNTFHLYLRPGLEVIKEHGGLHEFIQWDKPILTDSGGFQVFSLGAMRKIKEEGVTFRSPIDGSKVFLSPEISMEIQQVLNSDIVMIFDECTPYPATHEEAQKSLQLSLRWAKRCKTHHHDELKNKNALFGIIQGGMYEDLRDESLKGLLDVGFDGYAIGGLSVGEPKDEMIKVLDYLPNKMPQDKPRYLMGVGKPEDIVEAVRRGVDMFDCVMPTRNARNGHYFVTDGLVRIRNSKYRHDKGPLDPHCDCYTCKNFTRAYLYHLEKCGEMLASMLGTIHNLRYYQRLTQGMRDALDNGTFDEYVQDFYSRRGLDVPACPED

SEQ ID NO: 51176 - protein, 376 aa, Acinetobacter towneri
  misc_feature (1)..(376): tr|N9B6H1|N9B6H1_9GAMM Queuine tRNA-ribosyltransferase OS=Acinetobacter towneri DSM 14962 = CIP 107472 OX=1120 929 GN=tgt PE=3 SV=1
MKFEKLGQSGRARRGRLTLAHGVVETPVFMPVGTYGTVKGMLPRDIEEIQAQVILGNTFHLYLRPGLEVIQQHGGLHEFIKWDKPILTDSGGFQVFSLGAMRKIKEEGVTFRSPIDGSKVFLSPEISMEIQKTLNSDIVMIFDECTPYPATHEEAQKSLQLSLRWAKRCKTHHHDELQNSNALFGIIQGGMYEDLRVESLNGLLEIGFDGYAIGGLSVGEPKEEMIKVLDYLPAKMPEDKPRYLMGVGKPEDIVEAIRRGVDMFDCVMPTRNARNGHYFVTDGLVRIRNSKYRHDQSPLDPHCDCYTCKNFTRAYLFHLEKCGEMLGSMLGTIHNLRYYQRFTQDIRNALDNGTFDEFVQDFYARRGLEVPPCPED

SEQ ID NO: 51177 - protein, 376 aa, Acinetobacter towneri
  misc_feature (1)..(376): tr|A0A1E8E4F6|A0A1E8E4F6_9GAMM Queuine tRNA-ribosyltran sferase OS=Acinetobacter towneri OX=202956 GN=tgt PE=3 SV=1
MKFEKLGQSGRARRGRLTLAHGVVETPVFMPVGTYGTVKGMLPRDIEEIQAQIILGNTFHLYLRPGLEVIQQHGGLHEFIKWDKPILTDSGGFQVFSLGAMRKIKEEGVTFRSPIDGSKVFLSPEISMEIQKTLNSDIVMIFDECTPYPATHEEAQKSLQLSLRWAKRCKTHHHDELQNSNALFGIIQGGMYEDLRDESLNGLLEIGFDGYAIGGLSVGEPKEEMIKVLDYLPTKMPEDKPRYLMGVGKPEDIVEAIRRGVDMFDCVMPTRNARNGHYFVTDGLVRIRNSKYRHDQSPLDPHCDCYTCKNFTRAYLFHLEKCGEMLGSMLGTIHNLRYYQRFTQDIRNALDNGTFDDFVQDFYARRGLEVPPCPED

SEQ ID NO: 51178 - protein, 376 aa, Acinetobacter ursingii
  misc_feature (1)..(376): tr|N9C390|N9C390_9GAMM Queuine tRNA-ribosyltransferase OS=Acinetobacter ursingii ANC 3649 OX=1257043 GN=tgt PE =3 SV=1
MKFEKLGQSGRARRGRLTLEHGIVETPVFMPVGTYGTVKGMLPRDIEEIQAQIILGNTFHLYLRPGLEVIKEHGGLHDFIKWNKPILTDSGGFQVFSLGAMRKIKEEGVTFRSPIDGSKVFLSPEISMEIQQVLNSDIVMIFDECTPYPATHEEAQKSLQLSLRWAKRCKTHHHDELKNTNALFGIIQGGMYEDLRDESLKGLLEIGFDGYAIGGLSVGEPKDEMIKVLDYLPNKMPHDKPRYLMGVGKPEDIVEGIRRGIDMFDCVMPTRNARNGHYFVTDGLVRIRNSKYRHDQSPLDLHCDCYTCKNFTRAYLYHLEKCGEMLASMLGTIHNLRYYQRFTQDIRNALDHGTFDEFVTDFYTRRGLEVPACPVD

SEQ ID NO: 51179 - protein, 395 aa, Acinetobacter ursingii
  misc_feature (1)..(395): tr|N9QW74|N9QW74_9GAMM Queuine tRNA-ribosyltransferase OS=Acinetobacter ursingii NIPH 706 OX=1217716 GN=tgt PE =3 SV=1
MLFILAISELFFRLDLESCMKFEKLGQSGRARRGRLTLEHGIVETPVFMPVGTYGTVKGMLPRDIEEIQAQIILGNTFHLYLRPGLEVIKEHGGLHDFIKWNKPILTDSGGFQVFSLGAMRKIKEEGVTFRSPIDGSKVFLSPEISMEIQQVLNSDIVMIFDECTPYPATHEEAQKSLQLSLRWAKRCKTHHHDELKNTNALFGIIQGGMYEDLRDESLNGLLEVGFDGYAIGGLSVGEPKDEMIKVLDYLPNKMPHDKPRYLMGVGKPEDIVEGIRRGIDMFDCVMPTRNARNGHYFVTDGLVRIRNSKYRHDQSPLDPHCDCYTCKNFTRAYLYHLEKCGEMLASMLGTIHNLRYYQRFTQDIRNALDHGTFDEFVTDFYTRRGLEVPACPVD

SEQ ID NO: 51180 - protein, 376 aa, Acinetobacter variabilis
  misc_feature (1)..(376): tr|N9P7P4|N9P7P4_9GAMM Queuine tRNA-ribosyltransferase OS=Acinetobacter variabilis OX=70346 GN=tgt PE=3 SV=1
MKFEKLGQSGRARRGRLTLEHGVVETPVFMPVGTYGTVKGMLPRDVEGIKAQIILGNTFHLYLRPGLEVIKQHGGLHGFMKWDKPILTDSGGFQVFSLGAMRKIEEKGVTFRSPIDGSKVFLSPEISMEIQHTLNSDIVMIFDECTPYPATHEEAQKSLQLSLRWAERCKKHHHDELNNKNALFGIIQGGMYEDLRDESLKGLLEIDFDGYAIGGLSVGEPKEEMIKVLDYLPNKMPENKPRYLMGVGKPEDIVEGIRRGVDMFDCVMPTRNARNGHYFVTDGLVRIRNSQYRHDQSPLDPHCDCYTCQNFTRAYLFHLEKCGEMLGSMLGTIHNLRYYQRFTEDIRNALDNGTFDEFVQDFYARRGLEVPPCPQD

SEQ ID NO: 51181 - protein, 376 aa, Acinetobacter venetianus
  misc_feature (1)..(376): tr|N8ZXH6|N8ZXH6_ACIVR Queuine tRNA-ribosyltransferase OS=Acinetobacter venetianus (strain ATCC 31012 / CIP 11 0063 / RAG-1) OX=1191460 GN=tgt PE=3 SV=1
MQFEKLGQSGRARRGRLTLEHGVVETPVFMPVGTYGTVKGMLPRDIEEIQAQIILGNTFHLYLRPGLEVIKEHGGLHEFIKWDKPILTDSGGFQVFSLGAMRKIKEEGVTFRSPIDGSKVFLSPEISMEIQHVLNSDIVMIFDECTPYPATHEEAQKSLQLSLRWAKRCKTHHHDELNNKNALFGIIQGGMYEDLRDESLKGLLEVGFDGYAIGGLSVGEPKDEMIKVLDYLPNKMPHDKPRYLMGVGKPEDIVEAVRRGVDMFDCVMPTRNARNGHYFVTDGLVRIRNSKYRHDKGPLDPHCDCYTCKNFTRAYLYHLEKCGEMLASMLGTIHNLRYYQRLTQGMRDALDNGTFDEYVQDFYTRRGLEVPPCPED

SEQ ID NO: 51182 - protein, 376 aa, Acinetobacter venetianus
  misc_feature (1)..(376): tr|A0A137YAR5|A0A137YAR5_9GAMM Queuine tRNA-ribosyltran sferase OS=Acinetobacter venetianus OX=52133 GN=tgt PE= 3 SV=1
MQFEKLGQSGRARRGRLTLEHGVVETPVFMPVGTYGTVKGMLPRDIEEIQAQIILGNTFHLYLRPGLEVIKEHGGLHEFIKWDKPILTDSGGFQVFSLGAMRKIKEEGVTFRSPIDGSKVFLSPEISMEIQQVLNSDIVMIFDECTPYPATHEEAQKSLQLSLRWAKRCKTHHHDELNNKNALFGIIQGGMYEDLRDESLKGLLEVGFDGYAIGGLSVGEPKEEMIKVLDYLPNKMPHDKPRYLMGVGKPEDIVEAVRRGVDMFDCVMPTRNARNGHYFVTDGLVRIRNSKYRHDKGPLDPHCDCYTCKNFTRAYLYHLEKCGEMLASMLGTIHNLRYYQRLTQGMRDALDNGTFDEYVQDFYTRRGLEVPPCPED

SEQ ID NO: 51183 - protein, 376 aa, Acinetobacter wuhouensis
  misc_feature (1)..(376): tr|A0A3G2SZC5|A0A3G2SZC5_9GAMM Queuine tRNA-ribosyltran sferase OS=Acinetobacter wuhouensis OX=1879050 GN=tgt P E=3 SV=1
MKFEKLGQSGRARRGRLTLEHGVIETPVFMPVGTYGTVKGMLPRDIEDIKAQIILGNTFHLYLRPGLDVIREHGGLHEFMKWGKPILTDSGGFQVFSLGAMRKIKEEGVTFRSPIDGSKVFLSPEISMDIQHTLNSDIVMIFDECTPYPATHEEAQKSLQLSLRWAKRCKTQHHDVLKNRNALFGIIQGGMYEDLREESLNGLKEIDFDGFAIGGLSVGEPKEEMIKVLDYLPEKMPADKPRYLMGVGKPEDIVEAIRRGVDMFDCVMPTRNARNGHYFVTDGLVRIRNSQYRHDQSPLDPHCDCYTCTNFTRAYLFHLEKCGEMLGSMLGTIHNLRYYQRFTQDIRDALDNGTFDEYVTDFYQRRGLDVPPCPED

SEQ ID NO: 51184 - protein, 376 aa, Acinetobacter wuhouensis
  misc_feature (1)..(376): tr|A0A385C1R5|A0A385C1R5_9GAMM Queuine tRNA-ribosyltran sferase OS=Acinetobacter wuhouensis OX=1879050 GN=tgt P E=3 SV=1
MKFEKLGQSGRARRGRLTLEHGVIETPVFMPVGTYGTVKGMLPRDIEDIKAQIILGNTFHLYLRPGLDVIREHGGLHEFMKWGKPILTDSGGFQVFSLGAMRKIKEEGVTFRSPIDGSKVFLSPEISMDIQHTLNSDIVMIFDECTPYPATHEEAQKSLQLSLRWAKRCKTQHHDVLKNRNALFGIIQGGMYEDLREESLNGLKEIDFDGFAIGGLSVGEPKEEMIKVLDYLPAKMPADKPRYLMGVGKPEDIVEAIRRGVDMFDCVMPTRNARNGHYFVTDGLVRIRNSQYRHDQSPLDPHCDCYTCTNFTRAYLFHLEKCGEMLGSMLGTIHNLRYYQRFTQDIRDALDNGTFDEYVADFYQRRGLDVPPCPED

SEQ ID NO: 51185 - protein, 374 aa, Actibacterium atlanticum
  misc_feature (1)..(374): tr|A0A058ZPW5|A0A058ZPW5_9RHOB Queuine tRNA-ribosyltran sferase OS=Actibacterium atlanticum OX=1461693 GN=tgt P E=3 SV=1
MEISFDLKATDGRARTGVIRTPRGDIRTPAFMPVGTAATVKAMMPESVRETGADILLGNTYHLMLRPTAERIDRLGGLHKFMNWDRPILTDSGGFQVMSLAGLRKLTEEGVKFTSHVDGSKHMLSPERSMEIQKLLGSDIVMCFDECPALPADRDTIARSMELSMRWAKRSKEAFGERPGHALFGIMQGGLERDLREVSAQKLREIGFHGYAIGGLAVGEGQQAMFACLDYAPGFLPEDKPRYLMGVGKPDDIVGAVKRGVDMMDCVLPSRSGRTGQAFTRRGVVNIKNARHIDDPRPLDEDCTCPTCRNYSRAYLSHVYRSNEMISAMLLTWHNLHYFQEIMQGMRAAIAGGTFDAWEADFHAGRADGDIAPL

SEQ ID NO: 51186 - protein, 375 aa, Actibacterium mucosum
  misc_feature (1)..(375): tr|A0A037ZIW5|A0A037ZIW5_9RHOB Queuine tRNA-ribosyltran sferase OS=Actibacterium mucosum KCTC 23349 OX=1454373 GN=tgt PE=3 SV=1
MTKFSFSLHNTDGAARTGVIDTPRGQIRTPAFMPVGTAATVKAMMPESVAATGADILLGNTYHLMLRPTAERIDRLGGLHRFMNWSKPILTDSGGFQVMSLADLRKLTEHGVTFKSHIDGSKHEITPERSMEIQRLLGSDIVMCFDECPALPASDAAVAESMRLSMRWAQRSRDAFGDRPGHALFGIMQGGVTPELREESAEALTRIGFDGYAIGGLAVGEGQAAMFGVLDYAPGFLPVDKPRYLMGVGKPDDIVGAVKRGVDMMDCVLPSRSGRTGQAWTRRGQINIKNARHADDPRPLDEDCTCPACRNYSRAYLHHVFRSNEMISGMLLTWHNLHYFQQIMGEMRAAIAAGTFDAWEEQFHAMRALGDIEPL

SEQ ID NO: 51187 - protein, 378 aa, Actinobacillus delphinicola
  misc_feature (1)..(378): tr|A0A448TUU0|A0A448TUU0_9PAST Queuine tRNA-ribosyltran sferase OS=Actinobacillus delphinicola OX=51161 GN=tgt PE=3 SV=1
MKFTLHKKDGNARRGTMTFDRPQGQCTVETPAFMPVGTYGTVKGMTPEEVRATGAEICLGNTFHLWLRPGQEVMRKHGDLHDFMQWHRPILTDSGGFQVFSLGKLRKITEEGVKFQNPINGERIFLSPEKSMEIQYDLGSDIVMIFDECAPYPSTFDYTKKSMEMSLRWAKRSRDRFDELENKNALFGIVQGGVFEELRQVSLDGLKEIGFDGYAVGGLAVGEPKEDMHRILEFTCPQLPEDKPRYLMGVGKPEDLVEGVRRGIDMFDCVMPTRNARNGHLFVTGGVVKIRNAKYRDDTSPLDPECDCYTCKNYTRAYLYHLDKCNEILGARLNTIHNLRYYQRLMAKIRQRIEEGTFDEFVKEFYAARGREVPPLQK

SEQ ID NO: 51188 - protein, 129 aa, Actinobacillus equuli
  misc_feature (1)..(129): tr|A0A448QQK4|A0A448QQK4_ACTEU Queuine tRNA-ribosyltran sferase OS=Actinobacillus equuli OX=718 GN=tgt_1 PE=4 S V=1
MTFSRPKGEYVVETPAFMPVGTYGTVKGMTPEEVAATGAQILLGNTFHLWLRPGQEVMKSHGDLHDFMQWHGPILTDSGGFQVFSLGKLRKIKEEGVTFQTRLAVRNFPFAGKIDGNSVRSRFGYRHDL

SEQ ID NO: 51189 - protein, 56 aa, Actinobacillus equuli
  misc_feature (1)..(56): tr|A0A448QQJ4|A0A448QQJ4_ACTEU Queuine tRNA-ribosyltran sferase OS=Actinobacillus equuli OX=718 GN=tgt_3 PE=4 S V=1
MFDCVMPTRNARNGHLFVSNGIVKIRNAKYKTDTTPLDPECDCYTCKTIRKRIYIT

SEQ ID NO: 51190 - protein, 385 aa, Actinobacillus indolicus
  misc_feature (1)..(385): tr|A0A4P7CHS8|A0A4P7CHS8_9PAST Queuine tRNA-ribosyltran sferase OS=Actinobacillus indolicus OX=51049 GN=tgt PE= 3 SV=1
MKYELKKTSGNARRGRLTFSRPKGEYHVETPAFMPVGTYGTVKGMTPEEVAQTGAQILLGNTFHLWLRPGQEIMRQHGDLHDFMQWHGPILTDSGGFQVFSLGKLRKIKEEGVYFQNPISGEKVFLSPEKSMEIQYDLGSDIVMIFDECTPYPATFDYAKQSMEMSLRWAKRSRDRFDELQNPNALFGIIQGGVYEELRKVSVEKLVEIGFDGYAVGGLAVGEPKEDMHRILEYVCPQIPADKPRYLMGVGKPEDLVEGVRRGIDMFDCVMPTRNARNGHLFVTNGIVKIRNAKYRNDISPLDPECDCYTCKNYTKAYLYHLDKCGEILGARLNTIHNLRYYQRLMAEIRQAIDEDRFDDFVVEFYQRIGKEVPPLQLAKEGENA

SEQ ID NO: 51191 - protein, 385 aa, Actinobacillus indolicus
  misc_feature (1)..(385): tr|A0A4V0IIU2|A0A4V0IIU2_9PAST Queuine tRNA-ribosyltran sferase OS=Actinobacillus indolicus OX=51049 GN=tgt PE= 3 SV=1
MKYELKKTNGNARRGRLTFSRPKGEYHVETPAFMPVGTYGTVKGMTPEEVAQTGAQILLGNTFHLWLRPGQEIMRQHGDLHDFMQWHGPILTDSGGFQVFSLGKLRKIKEEGVYFQNPISGEKVFLSPEKSMEIQYDLGSDIVMIFDECTPYPATFDYAKQSMEMSLRWAKRSRDRFDELQNPNALFGIIQGGVYEELRKVSVEKLVEIGFDGYAVGGLAVGEPKEDMHRILEYVCPQIPADKPRYLMGVGKPEDLVEGVRRGIDMFDCVMPTRNARNGHLFVTNGIVKIRNAKYRNDISPLDPECDCYTCKNYTKAYLYHLDKCGEILGARLNTIHNLRYYQRLMAEIRQAIDEDRFDDFVVEFYQRIGKEIPPLQLAKEGENA

SEQ ID NO: 51192 - protein, 382 aa, Actinobacillus lignieresii
  misc_feature (1)..(382): tr|A0A380TUN3|A0A380TUN3_ACTLI Queuine tRNA-ribosyltran sferase OS=Actinobacillus lignieresii OX=720 GN=tgt PE= 3 SV=1
MKYELKTTSGNARRGRLTFSRPKGEYVVETPAFMPVGTYGTVKGMTPEEVAATGAQILLGNTFHLWLRPGQEVMKSHGDLHDFMQWHGPILTDSGGFQVFSLGKLRKIKEEGVTFQNPISGEKIFLSPEKSMEIQYDLGSDIVMIFDECTPYPATFDYAKSSMEMSLRWAKRSRDRFDELQNPRALFGIVQGGTYEELRKISVEGLVNIGFDGYAVGGLAVGEPKEEMHRILEFTTPLLPRDKPRYLMGVGKPEDLVEGVRRGIDMFDCVMPTRNARNGHLFVSNGIVKIRNAKYKTDTTPLDPECDCYTCKNYTKAYLYHLDKCGEILGARLNTIHNLRYYQRLMAQIRQAIEEDRFDDFVVEFYAKIGKEVPPLQSEVNK

SEQ ID NO: 51193 - protein, 380 aa, Actinobacillus minor
  misc_feature (1)..(380): tr|C5S3A3|C5S3A3_9PAST Queuine tRNA-ribosyltransferase OS=Actinobacillus minor NM305 OX=637911 GN=tgt PE=3 SV= 1
MKYELKCTSGNARRGRLTFNRPKGEFHVETPAFMPVGTYGTVKGMTPEEVAATGAQILLGNTFHLWLRPGQEVMKMHGDLHDFMQWHGPILTDSGGFQVFSLGKLRKIKEEGVTFQNPISGEKIFLSPEKSMEIQYDLGSDIVMIFDECTPYPATFDYAKNSMEMSLRWAKRSRDRFDELENPRALFGIVQGGTYEELRKISVEGLVNIGFDGYAVGGLAVGEPKEEMHRILEFTTPLLPADKPRYLMGVGKPEDLVEGVRRGIDMFDCVMPTRNARNGHLFVSDGVVKIRNAKYKSDTSPLDPECDCYTCKNYTKAYLYHLDKCGEILGARLNTIHNLRYYQRLMAQIRQAIEEDRFDDFVVEFYAKIGKEVPPLQKGE

SEQ ID NO: 51194 - protein, 382 aa, Actinobacillus pleuropneumoniae
  misc_feature (1)..(382): sp|A3N087|TGT_ACTP2 Queuine tRNA-ribosyltransferase OS= Actinobacillus pleuropneumoniae serotype 5b (strain L20 ) OX=416269 GN=tgt PE=3 SV=1
MKYELKTTSGNARRGRLTFSRPKGEYVVETPAFMPVGTYGTVKGMTPEEVAATGAQILLGNTFHLWLRPGQEVMKSHGDLHGFMQWHGPILTDSGGFQVFSLGKLRKIKEEGVTFQNPISGEKIFLSPEKSMEIQYDLGSDIVMIFDECTPYPATFDYAKNSMEMSLRWAKRSRDRFDELQNPRALFGIVQGGTYEELRKISVEGLVNIGFDGYAVGGLAVGEPKEEMHRILEFTTPLLPQDKPRYLMGVGKPEDLVEGVRRGIDMFDCVMPTRNARNGHLFVSNGIVKIRNAKYKTDTTPLDPECDCYTCKNYTKAYLYHLDKCGEILGARLNTIHNLRYYQRLMAQIRQAIEEDRFDDFVVEFYAKIGKEVPPLQSEVNK

SEQ ID NO: 51195 - protein, 382 aa, Actinobacillus pleuropneumoniae; identical to SEQ ID NO: 51194
  misc_feature (1)..(382): sp|B3GXF8|TGT_ACTP7 Queuine tRNA-ribosyltransferase OS= Actinobacillus pleuropneumoniae serotype 7 (strain AP76 ) OX=537457 GN=tgt PE=3 SV=1

SEQ ID NO: 51196 - protein, 386 aa, Actinobacillus porcinus
  misc_feature (1)..(386): tr|A0A4V0IEZ1|A0A4V0IEZ1_9PAST Queuine tRNA-ribosyltran sferase OS=Actinobacillus porcinus OX=51048 GN=tgt PE=3 SV=1
MKFNLKTTSGTARRGEMVFQRPNKEGEITEFKVQTPAFMPVGTYGTVKGMTPEEVRATGAEILLGNTFHLWLRPGQEVMKMHGDLHDFMQWHRPILTDSGGFQVFSLGKLRKIKEEGVTFQNPINGEKIFLSPEKSMEIQYDLGSDIVMIFDECTPYPATFDYAKKSMEMSLRWAKRSRDRFDELENPRALFGIVQGGTYEELRKISAEGLVNIGFDGYAVGGLAVGEPKEEMHRILEFTTPLLPTDKPRYLMGVGKPEDLVEGVRRGIDMFDCVMPTRNARNGHLFVSDGVVKIRNAKYRSDTTALDPECDCYTCKNYTKAYLYHLDKCGEILGARLNTIHNLRYYQRLMEQIRTAIEEDRFDDFVVEFYAKIGKEVPPLQKAVK

SEQ ID NO: 51197 - protein, 380 aa, Actinobacillus porcitonsillarum; identical to SEQ ID NO: 51193
  misc_feature (1)..(380): tr|A0A2U8FML8|A0A2U8FML8_9PAST Queuine tRNA-ribosyltran sferase OS=Actinobacillus porcitonsillarum OX=189834 GN =tgt PE=3 SV=1

SEQ ID NO: 51198 - protein, 376 aa, [Actinobacillus] rossii
  misc_feature (1)..(376): tr|A0A380U242|A0A380U242_9PAST Queuine tRNA-ribosyltran sferase OS=[Actinobacillus] rossii OX=123820 GN=tgt PE= 3 SV=1
MKFNLKTTSGNARRGEMVFQRPQGEFKVQTPAFMPVGTYGTVKGMTPEEVRATGAEILLGNTFHLWLRPGQEVMKMHGDLHDFMQWHRPILTDSGGFQVFSLGQLRKIKEEGVTFQNPINGEKIFLSPEKSMEIQYDLGSDIVMIFDECTPYPATFDYAKKSMEMSLRWAKRSRDRFNELENPRALFGIVQGGTYEELRKISAEGLVNIGFDGYAVGGLAVGEPKAEMHRILEFTTPLLPADKPRYLMGVGKPEDLVEGVRRGIDMFDCVMPTRNARNGHLFVSDGVVKIRNAKYRSDTTALDPECDCYTCKNYTKAYLYHLDKCGEILGARLNTIHNLRYYQRLMEQIRTAIEEDRFDDFVVEFYTKIGKEVPPL

SEQ ID NO: 51199 - protein, 387 aa, Actinobacillus seminis
  misc_feature (1)..(387): tr|A0A263HGI6|A0A263HGI6_9PAST Queuine tRNA-ribosyltran sferase OS=Actinobacillus seminis OX=722 GN=tgt PE=3 SV =1
MKFKLHKTNGAARRGTMTFSRPQGEFTVETPAFMPVGTYGTVKGMTPEEVRATGAEILLGNTFHLWLRPGQEVMRKHGDLHDFMQWHRPILTDSGGFQVFSLGKLRKITEEGVKFQNPINGERIFLSPEKSMEIQYDLGSDIVMIFDECAPYPSTFDYTRKSMEMSLRWAQRSRQRFDELGNKNALFGIVQGGVFEELRQVSLEGLVKIGFDGYAVGGLAVGEPKEDMHRILEYVCPQLPTDKPRYLMGVGKPEDLVEGVRRGIDMFDCVMPTRNARNGHLFVSDGIVKIRNAKYRDDTSPLDPECDCYTCKHYTKSYLYHLDKCGEILGARLNTIHNLRYYQRLMAQIRQAIEEDRFEQFVMDFYAKIGKPVPPLQSETTETEPQE

SEQ ID NO: 51200 - protein, 379 aa, Actinobacillus succinogenes
  misc_feature (1)..(379): sp|A6VN75|TGT_ACTSZ Queuine tRNA-ribosyltransferase OS= Actinobacillus succinogenes (strain ATCC 55618 / DSM 22 257 / 130Z) OX=339671 GN=tgt PE=3 SV=1
MKFKLKTTSGTARRGEMTFSRPQGEFTVQTPAFMPVGTYGTVKGMTPEEVRATGAEILLGNTFHLWLRPGQEVMRKHGDLHDFMQWHRPILTDSGGFQVFSLGKLRKITEEGVKFQNPINGERIFLSPEKSMEIQYDLGSDIVMIFDECTPYPATFDYAKKSMEMSLRWAQRSRDRFDELGNKNALFGIVQGGTFEELRKVSAEGLVDIGFDGYAVGGLAVGEPKEEMHRILEFTTPLLPADKPRYLMGVGKPEDLVEGVRRGIDMFDCVMPTRNARNGHLFVTDGIVKIRNAKYRDDTSALDPHCDCYTCRHYTKSYLYHLDKCGEILGARLNTIHNLRYYQRLMEEIRQAIEEDRFDDFVVEFYTRMGKEVPPLQKP

SEQ ID NO: 51201 - protein, 382 aa, Actinobacillus suis
  misc_feature (1)..(382): tr|K0G3V1|K0G3V1_ACTSU Queuine tRNA-ribosyltransferase OS=Actinobacillus suis H91-0380 OX=696748 GN=tgt PE=3 S V=1
MKYELKNTSGNARRGRLTFSRPKGEYVVETPAFMPVGTYGTVKGMTPEEVAATGAQILLGNTFHLWLRPGQEVMKSHGDLHDFMQWHGPILTDSGGFQVFSLGKLRKIKEEGVTFQNPISGEKIFLSPEKSMEIQYDLGSDIVMIFDECTPYPATFDYAKNSMEMSLRWAKRSRDRFDELQNPRALFGIVQGGTYEELRKISVEGLVNIGFDGYAVGGLAVGEPKEEMHRILEFTTPLLPQDKPRYLMGVGKPEDLVEGVRRGIDMFDCVMPTRNARNGHLFVSNGIVKIRNAKYKTDTTPLDPGCDCYTCKNYTKAYLYHLDKCGEILGARLNTIHNLRYYQRLMAQIRQAIEEDRFDDFVVEFYAKIGKEVPPLQSEVNK

SEQ ID NO: 51202 - protein, 382 aa, Actinobacillus ureae
  misc_feature (1)..(382): tr|E8KHG3|E8KHG3_9PAST Queuine tRNA-ribosyltransferase OS=Actinobacillus ureae ATCC 25976 OX=887324 GN=tgt PE= 3 SV=1
MKYELKTTSGNARRGRLTFSRPKGEYVVETPAFMPVGTYGTVKGMTPEEVAATGAQILLGNTFHLWLRPGQEVMKSHGDLHDFMQWHGPILTDSGGFQVFSLGKLRKIKEEGVTFQNPISGEKIFLSPEKSMEIQYDLGPDIVMIFDECTPYPATFDYAKNSMEMSLRWAKRSRDRFDELQNPRALFGIVQGGTYEELRKISVEGLVNIGFDGYAVGGLAVGEPKEEMHRILEFTTPLLPQDKPRYLMGVGKPEDLVEGVRRGIDMFDCVMPTRNARNGHLFVSNGIVKIRNAKYKTDTTALDPECDCYTCKNYTKAYLYHLDKCGEILGARLNTIHNLRYYQRLMAQIRQAIEEDRFDDFVVEFYAKIGKEVPPLQSDVNK

SEQ ID NO: 51203 - protein, 408 aa, Actinobacteria bacterium
  misc_feature (1)..(408): tr|A0A0R2NX75|A0A0R2NX75_9ACTN Queuine tRNA-ribosyltran sferase OS=Actinobacteria bacterium BACL2 MAG-120802-bi n41 OX=1655568 GN=tgt PE=3 SV=1
MSFSFEVIKEIPEELGRAGVISTPHGQIATPAFIPVGTKASVKSLTPESLDDLGAQAVLANAYHLYLQPGSETLDQAGGLGKFMNWDKPSFTDSGGFQVMSLGAGFKKVIDMSLGSLDSDEAMAESKERLAHVDDEGVTFKSHLDGSMHRFTPEISMQVQHQIGADIIFAFDELTTLHNTRKYQEQSLERTRLWAIRCLDEHKRLTDQRSDKPYQALFGVLQGAQYEDLRRKAAKDLSEMKSSGLSFDGFGIGGALDKASLGQIVSWMSSELPRDKPRHLLGIGEPADLFAGVENGADTFDCVAPSREARTSAVYSENGRFNVTSATYKRDFSPIDKDCNCYTCSNFTRAYLNHLFRAKEMLASTLATIHNLAFTVRLVDRMRQAILDGNFREFKTDFLGRYQAKALD

SEQ ID NO: 51204 - protein, 374 aa, Actinobacteria bacterium
  misc_feature (1)..(374): tr|A0A1F2X5U6|A0A1F2X5U6_9ACTN Queuine tRNA-ribosyltran sferase OS=Actinobacteria bacterium RBG_16_67_15 OX=179 7202 GN=tgt PE=3 SV=1
MSALRFAITASAGAARAGTLTTTHGEVPTPAFMPVGTRATVRAIGVDDLAAVGADMVLVNTYHLMLRPGSETIAALGGVQQFMGWPGPVLTDSGGFQVFSLQPRVDEDGVTFRSTYDGSMVRMTPESAVAAQEVIGSDIAMVLDHLVGLPAPVERVADAMERTLRWAERGRAAHRRADQALFGIVQGGVDPELRASSARRTAELGFPGFGIGGLSVGESAADRAVALDAVAAVLPAESPRYVMGLGDTAGVLDAVGRGFDLFDCVWPTRLARHGKAITAYGDFSIRRAEFAADSRPLDPDCGCFTCRHHSRAYLRHLRVTDELLGHRLMSIHNLAYTLGILKQAREAIASGRFEPFRQGVMNRRRQDAGGEGLR

SEQ ID NO: 51205 - protein, 365 aa, Unknown
  misc_feature (1)..(365): tr|A0A094PS51|A0A094PS51_9ACTN Queuine tRNA-ribosyltran sferase OS=actinobacterium acAcidi OX=1504320 GN=tgt PE =3 SV=1
MFPVQLDIDARDGAARSATATTHRGTYETPCFMPVGTRGAVKYLSARDYADIGARIVLGNTYHLMLRPGADVVEKFGGLGSFSGWDGLTLTDSGGFQVFSLDPKVDDDGVTFKSTYDGSYHRFTPEIAVQTQEKIGADIQMVLDVCTSLPAEPDVVRLALERTHAWALRAKAAHSRPDQSLFGIVQGGTNSAMRAESARRTVDVGFDGFGIGGLSVGESRAEMVESIAACIDELPEDRPRYLMGVGDPASLVEAVGLGVDQFDCVLQTRLGRHGTALTSQGRVNIKNAQFLDSDEPLDPLCSCWVCASHSRGYLRHLAQTGEPTGSRLVSVHNLAWTISLMKDMRHAIQQGTFSDLKRGILDVWA

SEQ ID NO: 51206 - protein, 365 aa, Unknown
  misc_feature (1)..(365): tr|A0A094Q934|A0A094Q934_9ACTN Queuine tRNA-ribosyltran sferase OS=actinobacterium acAcidi OX=1504320 GN=tgt PE =3 SV=1
MFPVRFTTEASDGSARAGTAVTYRGPYTTPTFMPVGTRGAIKYLSATDYEDLGAQIVLGNTYHLMLRPGAETISTLGGLGKFAGWGGLTLTDSGGFQVFSLNPSVDDDGVTFRSTYDGSSHRYTPEGAVATQQLLGADIQMVLDVCPPLPSEPSVVRLALERTSAWAKRAHVAHVRDDQSLFGIVQGGIDVNMREESAKRTAELNFDGYGIGGLSVGETREQMIPALAAALAHLPTDRPRYLMGVGDPASLVEAVNLGVDQFDCVLQTRLGRHGTALTSSGRVNLKRSEFTLSEDPIDATCRCMVCSRHTRGYIRHLFQVGEPTASRLVSVHNIAWTINFMNLMREAILEARFAQFRQSTLAIWG

SEQ ID NO: 51207 - protein, 389 aa, Unknown
  misc_feature (1)..(389): tr|A0A094PJH2|A0A094PJH2_9ACTN Queuine tRNA-ribosyltran sferase OS=actinobacterium acAMD-5 OX=1504319 GN=tgt PE =3 SV=1
MDGHLGRVGTITTPHGVIQTPAFIPVGTKATVKAVLPESLIQIGAQAVLANAYHLYLQPGPKTLDQAGGVGKFMNWHGPTFTDSGGFQVLSLGVGFKKVLAMDADTVQADDVIADNKDRLALVDDDGVTFKSHLDGSMHRFTPEVSMQVQHQIGADIIFAFDECTTLLNTREYQEKSLDRTFAWAKRCIAEHQKLTLERVGKPYQMLFGVIQGAQYEDLRRKAARDLAQLEFDGFGLGGALDKNNLGTIVSWMNEELPTDKPRHLLGIGEPDDLFVGVQNGVDTFDCVAASRTARTGAIYTKDGRVNVTLASYKNDFSPLEIDCPCYTCTHYTKAYVSHLFRAKEMLGSTLATIHNEHFIVNLVDQMRKSIIDGTFFELKEEFMTRYYK

SEQ ID NO: 51208 - protein, 407 aa, Unknown
  misc_feature (1)..(407): tr|J9DWH1|J9DWH1_9ACTN Queuine tRNA-ribosyltransferase OS=actinobacterium SCGC AAA027-L06 OX=913338 GN=tgt PE= 3 SV=1
MINGFEFRVRQGLKSKLGRTGQIFTPHGVINTPAFIPVGTKATLKSVLPESLKDLGAQAVLANAYHLYLQPGPEIVDQAGGLAKFMNWPGPTFTDSGGFQVLSLGVGFKKVIAMDENTFQADDVIADDKERLAHVDDDGVTFKSHLDGSFHRFTPEVSMQVQHQIGADIIFAFDECTTLHNTRSYQEKALERTRLWAQRCLVEHDRLTKLRKDKPYQALFGVLQGAQYEELRRKAAKDLAAMSMDGISFDGFGIGGALDKQTLGDILRWVNEELPEDKPRHFLGIGEPDDLFVGVENGADTFDCVAPSRQARTSSVFTKDGRVNISNAPHKNEFFPIEKDCTCYTCQNYTRAYLCHLFRAKEMVAATLATIHNQHFIVGLVEQMRQSIEDGTFFEFKASFMKRYYGK

SEQ ID NO: 51209 - protein, 431 aa, Actinobaculum massiliense
  misc_feature (1)..(431): tr|K9EFC4|K9EFC4_9ACTO Queuine tRNA-ribosyltransferase OS=Actinobaculum massiliense ACS-171-V-Col2 OX=883066 G N=tgt PE=3 SV=1
MKDRGFEPKTELAVRRGERNGKPLGRTGVIHTPHGDIATPAFIPVGTRATVKTLTPEQVKGVGAQAVLANAYHLYLQPGPEIVDRAGGLAQFMNWGGPTYTDSGGFQVLSLGSGYKKVLSAEYAGANAGRADAQIAPDKERLAAVDDDGVWFRSHLDGSKHRFTPEVSMGIQHHLGADIMFAFDELTTLLNSRNYQEESLERTRLWAERCLAEHKKLTEERADKPYQQLFGVIQGAQYEDLRRKACADLGSMEVDGQRFDGFGIGGALEKENLGNIVSWCTDELPADRARHLLGISEPDDFFAAIEAGADTFDCVNPSRVARNGAIYSRDGRFNVTRAQFKDDFSALTPECDCYTCTNYSRAYLHHLFKAKEQLASTLATIHNERYTVRLVDEIRESIDGGYYEDYKAQTVARFYAGNWGRVDVQRRRPRG

SEQ ID NO: 51210 - protein, 419 aa, Actinobaculum sp.
  misc_feature (1)..(419): tr|U1Q491|U1Q491_9ACTO Queuine tRNA-ribosyltransferase OS=Actinobaculum sp. oral taxon 183 str. F0552 OX=12272 61 GN=tgt PE=3 SV=1
MTFTLGVRLEEPVGAGGVGGRTGRPLGRAGTIHTPHGDIATPAFVPVATKATVKAVAPEAVAELGAQAVLANAYHLYLQPGSDVVDEAGGLAAFMNWRGPTYTDSGGFQILSLGSGFKKVLSAEFSGSGRAGSASKERLVDVDDDGVWFRSHLDGARHRFTPEISMGIQHELGADVIFAFDELTTLLDSRAYQEQALERTRRWAARCLAEHGRLTEARPDRPYQQLFGVVQGAQYEDLRRKAARDLGAMEAGGRRFDGFGIGGALEKENLGRIVGWVSEELPEDRARHLLGISEPDDVFAAVEAGADTFDCVNPSRVARNAAIYSPDGRFNVTRSQFRRDFSPLVPGCACYTCSNYTRAYLHHLFKAREMLSSTLATIHNEHYTVQLVEGIRRSILSGEYAAYKGETLGRFYAGDWGRA

SEQ ID NO: 51211 - protein, 421 aa, Actinobaculum sp.
  misc_feature (1)..(421): tr|A0A430JT10|A0A430JT10_9ACTO Queuine tRNA-ribosyltran sferase OS=Actinobaculum sp. 352 OX=2490946 GN=tgt PE=3 SV=1
MHDTGVRSTGMQTAALRSGRGGRPLGRTGVIHTPHGDIRTPAFIPVGTKATVKAVLPESVAALGAQAVLANAYHLYLQPGSDIVDEAGGLARFMNWSGPTYTDSGGFQVLSLGSGFKKVLSEEFSGSSRADSDVAPTKERLADVDDDGVWFRSHLDGSRHRFTPEVSMRIQHELGADVIFAFDELTTLMNSRGYQEEALERTRRWAQRCLAAHRELTEARTGKPYQQLFGVIQGAQYEDLRRKAARDLGAMEIDGQRFDGFGVGGALEKENLGTIVGWVCEELPEDRARHLLGISEPDDFFAAVEAGADTFDCVNPSRVARNAAIYSPDGRFNVVRAQFRRDFEPLVPGCECYTCTHYSRAYLHHAFKAKEMISSTLATIHNEYFTVKLVEGIRDSIEGGYYAEFKEETLGRFYAGQWGRK

SEQ ID NO: 51212 - protein, 442 aa, Actinobaculum suis
  misc_feature (1)..(442): tr|A0A0K9EQW1|A0A0K9EQW1_9ACTO Queuine tRNA-ribosyltran sferase OS=Actinobaculum suis OX=1657 GN=tgt PE=3 SV=1
MQDRGFTVQTRLEVKRGARNGRPLGRTGVIHTPHGDIKTPAFIPVGTKATVKTLTPEQVESTGAQAVLANAYHLYLQPGPEIVDAAGGLAAFMNWRGPTYTDSGGFQVLSLGSGYKKILSAEYAGANAGMADSGVAPKTGRNKDKERLANVDEEGVWFRSHLDGSKHRFTPEVSMGIQHQLGADIMFAFDELTTLLNSRAYQEESLERTRRWAERCLREHRRLTEARAGKPYQQLFGVIQGAQYEDLRRKASRDLAAMRVDGQEFDGFGIGGALEKENLGEIVAWCCDELPEDRARHLLGISEPDDFFAAIESGADTFDCVNPSRVARNGAIYSEDGRFNITRAQFRADFSALTPECDCYTCTNYSRAYIHHLFKAKEQLANTLATIHNEQYTVRLVARIREAMENGTYEEFKKETLARFYAGGWGRKVAPQTRRRGSRKGA

SEQ ID NO: 51213 - protein, 442 aa, Actinobaculum suis
  misc_feature (1)..(442): tr|A0A1B9BDS7|A0A1B9BDS7_9ACTO Queuine tRNA-ribosyltran sferase OS=Actinobaculum suis OX=1657 GN=tgt PE=3 SV=1
MQDRGFTVQSRLEVKRGARNGRPLGRTGVIHTPHGDIKTPAFIPVGTKATVKTLTPEQVEATGAQAVLANAYHLYLQPGPEIVDAAGGLAAFMNWHGPTYTDSGGFQVLSLGSGYKKILSAEYAGANAGMADSGVAPKTGRNKDKERLANVDEEGVWFRSHLDGSKHRFTPEVSMGIQHQLGADIMFAFDELTTLLNSRAYQEESLERTRRWAERCLREHRRLTEARAGKPYQQLFGVIQGAQYEDLRRKASRDLAAMRIDGQEFDGFGIGGALEKENLGEIVAWCCDELPEDRARHLLGISEPDDFFAAIESGADTFDCVNPSRVARNGAIYSEDGRFNITRAQFRADFSALTPECDCYTCTNYSRAYIHHLFKAKEQLANTLATIHNEQYTVRLVARIREAMENGTYEEFKKETLARFYAGGWGRKVAPQTRRRGSRKGA

SEQ ID NO: 51214 - protein, 433 aa, Actinomyces coleocanis
  misc_feature (1)..(433): tr|C0VZ99|C0VZ99_9ACTO Queuine tRNA-ribosyltransferase OS=Actinomyces coleocanis DSM 15436 OX=525245 GN=tgt PE =3 SV=1
MGVTDNLDFERIDAQRGFEITARVDEVPIETPYGDKPLGRTGILTTAHGQIETPAFIPVGTLANVKGVLPEMMEDLGAQALLANAYHLYLTPGADIVDEAGGLGKFMNWEKPTYTDSGGFQVLSLGSGYKKVLSQEFSGQKPTAEQEAKEAVKRSRKSVDEDGVVFRSHHDGTKHRFNPEISLKIQHQLGADIMFAFDELTSLLHPYDYQVESLARTHRWAQRSLDAHWKLTAEQPERPYQQLFGVLQGAQFENLRRETARTLREMEFEGQGFDGYGLGGALEKENLGTIVSWLTSELPEEKPRHLLGISEPDDFFRAIEVGADTFDCVNPSRVARNAAIYTPDGRVNITNARFKRKFEPMVAGCGCYTCTHYTTAYVHHLFKTKEILASTLATIHNEWFTVHLVDTIREAIKNREYLACKEEVLGRFYSKKG

SEQ ID NO: 51215 - protein, 442 aa, Actinomyces europaeus
  misc_feature (1)..(442): tr|S2VVZ2|S2VVZ2_9ACTO Queuine tRNA-ribosyltransferase OS=Actinomyces europaeus ACS-120-V-Col10b OX=883069 GN= tgt PE=3 SV=1
MSNAPITQAHRERIEASRGFKVAAWLDEVQVETDDGPRPLGRVGTLQTAHGSIETPAFIPVGTLANVKGVLPEMMKELGAQALLANAYHLYLQPGADIVEAGGGLGEFMNWPGPTFTDSGGFQVLSLGSNYKKVLSQEFAGKKVTAEDEAAEAVRRNRAAVDDDGVVFRSHIDGAKHRFNPEISLSIQHQLGADIMFAFDELTSLLHPYDYQVESLARTHRWAQRSLDQHWRLTAENPDKPYQQLYGVLQGAQHKDLRNEAARTLTEMRTSVDLEQLGIDGEGFDGFGLGGALEKEKLGLIVSWLTSALPDNKPRHLLGISEPDDFFAAIEAGADTFDCVNPSRVARNAAIYTPYGRVNITNARFKRDFGPLANGCGCYTCQNYSTAYVHHLFKAHEILAATLATIHNEWFTVHLVDNIRESIRNGDYTEYKQETLAQFYGN

SEQ ID NO: 51216 - protein, 442 aa, Actinomyces europaeus
  misc_feature (1)..(442): tr|A0A2N6US70|A0A2N6US70_9ACTO Queuine tRNA-ribosyltran sferase OS=Actinomyces europaeus OX=66228 GN=tgt PE=3 S V=1
MSNAPITQAHRERIEASRGFKVAAWLDEVEVETDDGPRPLGRVGTLQTAHGTIETPAFIPVGTLANVKGMLPEMMKELGAQALLANAYHLYLQPGADIVEAGGGLGKFMNWAGPTFTDSGGFQVLSLGSNYKKVLSQEFAGKKVTAEDEAAEAVRRNRAAVDEDGVVFRSHIDGTKHRFNPEISLSIQHQLGADIMFAFDELTSLLHPYDYQVESLARTHRWAQRSLDQHWRLTAENPDKPYQQLYGVLQGAQYKDLRNEAARTLTQMRTSPNLEQLGIDGEGFDGFGLGGALEKENLGLIVSWLTSALPDNKPRHLLGISEPDDFFAAIEAGADTFDCVNPSRVARNAAIYTPDGRVNITNARFKRDFGPLADGCGCYTCQNYTTAYVHHLFKAHEILASTLATIHNEWFTVHLVDSIRESIRNGEYTEYKQETLARFYGN

SEQ ID NO: 51217 - protein, 432 aa, Actinomyces hominis
  misc_feature (1)..(432): tr|A0A2N6UNV5|A0A2N6UNV5_9ACTO Queuine tRNA-ribosyltran sferase OS=Actinomyces hominis OX=595468 GN=tgt PE=3 SV =1
MDRISRSQIDSQRGFVVQQRLEARSNTAVNAAGRPLGRAGVLTTAHGVIRTPAFIPVGTLATVKGVLPEQMAQLGAQALLANAYHLYLQPGDELVAQAGGVGAFMNWPGPTFTDSGGFQVLSLGSGYKKVLSDEFSGREPTSEEAAFEAVRRNRAVVDEDGVVFRSHRDGSKHRFNPEVSLSIQHNLGADIMFAFDELTSLRHPRSYQEESLERTHRWAQRSLDQHWRLTQEQPEKPYQQLFGVLQGAQYEDLRRHAARTLAAMTSHGEGFDGFGLGGALEKENLGRIVGWMTSELPEDKPRHLLGISEPDDFFRAIEAGADTFDCVNPSRVARNAAIYTRDGRFNVTNASCRTDFSPLDSTCGCYTCAHYTRAYVRHLFKAHEMLGPILATIHNEYFTVNLVKRIRQSILDGTYAEFKEDTLGRFYGARTQ

SEQ ID NO: 51218 - protein, 443 aa, Actinomyces hongkongensis
  misc_feature (1)..(443): tr|A0A1D8B028|A0A1D8B028_9ACTO Queuine tRNA-ribosyltran sferase OS=Actinomyces hongkongensis OX=178339 GN=tgt P E=3 SV=1
MSADWLAAPPVPFSLPAAPPSGWRDRGFQVGARLASGSGLGRTGTIHTAHGIIRTPAFIPVGTKANVKALTPEMVEALGAQAVLANAYHLYLRPGSDVVDEAGGFARFMNWRGPTYTDSGGFQVLSLGAGFKKVLSQEFSGAADSDDPRLSAQAVRASNAVVDDDGVVFSSHIDGTKHRFTPEASMRIQHQLGADIMFAFDELTSLLHPRSYQVESLERTHAWARRCLVEHARLTEERRAMPYQQLWGVVQGAQWEDLRRRAARTMADMEADGQRFDGFGVGGALEKERLGTIVSWVCEELGEDRPRHLLGISEPEDLFAGVEAGADTFDCVNPSRVARNAAVYTPTGRYNITNARFKRDFSPLAPGCGCYTCTNHTRAYVHHLFKAKEILSSTLATIHNEWFTLRLVDAMRDSIERGCFEDFRDDMLGRYRSGGGREGRSAQ

SEQ ID NO: 51219 - protein, 429 aa, Actinomyces liubingyangii
  misc_feature (1)..(429): tr|A0A1Q5PLU0|A0A1Q5PLU0_9ACTO Queuine tRNA-ribosyltran sferase OS=Actinomyces liubingyangii OX=1921764 GN=tgt PE=3 SV=1
MTPPPQPLPQSDPDPLPQQGDFSFEVTSQLPNGLGRTGVIHTPHGDIQTPAFIVVGTKATVKAVLPDSIRDLGAQATLANAFHLYLQPGPEILDEAGGLGQFMNWQGPTFTDSGGFQVMSLGSGFKKVLAMDTTGMQSDDVIAEGKTRRAHVDDDGVWFTSPLDGSKHRFTPEVSLQIQHQLGADIMFAFDELTTLAHTRSYQESSLERTRLWAQRCLREHRRLSIEREHRPYQALFGVIQGAQYEDLRRKACQDLSEMSIDGQQFDGFGLGGAIEKQRLGEIVGWCAQELPQNKPRHLLGISEPDDLFAACEMGADTFDCVNPSRVARNAAIYTNRGRYNVNRAVHKRDFRPLEEGCECYTCQNYTRAYLHHLFKAKEMLASTLATIHNEYWTVNLVEQIRLSMIEGRFEAFRDEFLGRYYENGGRLK

SEQ ID NO: 51220 - protein, 429 aa, Actinomyces marimammalium
  misc_feature (1)..(429): tr|A0A1Q5PSJ9|A0A1Q5PSJ9_9ACTO Queuine tRNA-ribosyltran sferase OS=Actinomyces marimammalium OX=156892 GN=tgt P E=3 SV=1
MTDDSLTLTPAQTGNAQEETCFTVGTRLESGYGLGRTGTIHTPHGEIQTPAFIPVGTKATVKTVLPETVAELGAQAVLANAYHLYLQPGSDIVDEAGGLGKFMNWPGPTYTDSGGFQVLSLGSGFKKVLSQQFAGTANADTDVAEDKIRRAQVDDDGVWFKSHLDGSMHRFTSEISMRIQHELGADIIFAFDELTTLLNSYEYQVESLERTRLWAERCLRAHGQLTAQRAGKPRQLLFGVVQGAQYEDLRRKAARDLAAMEVDGWRFDGFGLGGALEKENLGKICAWVCEELPEDRPRHLLGISEPDDFFRAIEAGADTFDCVSPSRVARTSAVYLPTGRKNLTRAEFKRDFRPLDETCGCYTCQHYSRAYLHHLFKAKEMLGKTLATIHNEYFTVHLVDRIRQSIEDGTYEELKAEVLGNYYGSSSAS

SEQ ID NO: 51221 - protein, 408 aa, Actinomyces nasicola
  misc_feature (1)..(408): tr|A0A1Q5Q4Z1|A0A1Q5Q4Z1_9ACTO Queuine tRNA-ribosyltran sferase OS=Actinomyces nasicola OX=208480 GN=tgt PE=3 S V=1
MSEVFTVGERLATGGRTGTIHTPHGDIQTPAFIPVATQATIKAVLPETIASLGAQAVLANAYHLYLQPGHEVVEAAGGLGRFMNWPGPTYTDSGGFQVLSLGSGFKKVLSDQFAGKANADTDVAEDKSRRAQVDDDGVWFTSHRDGTKHRFTPEVSMQVQHAIGADIIFAFDELTTLLNSYDYQVESLERTRLWAIRSLREHTRLMAAHPDRPRQLLFGVIQGAQYEDLRRKAARDLGAMEVDGAHFPGFGIGGALEKENLATIVRWVTEELPEDRPRHLLGISEPDDLFNAIAVGADTFDCVSPSRVARTSAVYTRTGRTNLLRSENRTAFVPIDETCTCYTCENYTRAYLHHLFKAKEMVGSTLATIHNEHFTLTLVDRIRKSITTGDFERLRADVLGDYYGQRCE

SEQ ID NO: 51222 - protein, 407 aa, Actinomyces nasicola
  misc_feature (1)..(407): tr|A0A1H3WF35|A0A1H3WF35_9ACTO Queuine tRNA-ribosyltran sferase OS=Actinomyces nasicola OX=208480 GN=tgt PE=3 S V=1
MSEVFTLGTQLETGGRTGIIHTPHGDIHTPAFIPVATQATIKAVLPETIASLGAQAVLANAYHLYLQPGPEIVEEAGGLGRFMNWLGPTYTDSGGFQVLSLGSGFKKVLSDQFAGKANADTDIAEDKIRRAQVDDDGVWFTSHRDGTKHRFTPEVSMQVQHALGADIIFAFDELTTLLNSYDYQVESLERTRRWAERSLREITRLMDSHPERPRQLLFGVIQGAQYEDLRRKSARDLGAMEVDGHQFPGFGIGGALEKENLATIVRWVTEELPEDRPRHLLGISEPDDLFNAIAVGADTFDCVSPSRVARTSAVYTRTGRTNLLRSENRTRFEPIDDSCPCYTCTHYTRAYLHHLFKAKEMVASTLATIHNEFFTITLVDRIRTAISEGNFVELRSEVLGDYYGQKV

SEQ ID NO: 51223 - protein, 405 aa, Actinomyces neuii
  misc_feature (1)..(405): tr|A0A2I1IKU3|A0A2I1IKU3_9ACTO Queuine tRNA-ribosyltran sferase OS=Actinomyces neuii OX=33007 GN=tgt PE=3 SV=1
MKGFEIGVRLEGHLGRTGTIHTPHGDIATPAFIPVGTKATVKAVLPESMADLGAQALLANAYHLYLQPGPQIVDEAGGLAAFMNWPGPTYTDSGGFQVLSLGAGYKKVLSEEFSGKTTAPISKPQLKNRATVDEDGVVFRSHLDGSKHRFTPEISMQIQHHLGADIMFAFDELTSLVHPYDYQVTSLERTRRWAERCLSAHKQLTAERANKPYQQLFGVLQGAQYEDLRRKAARDLGTMEIDGISFDGFGIGGALEKENLGKIVGWVCEELPESKARHLLGISEPDDFFSAIENGADTFDCVNPSRVARNAAIYLPGGRVNITRAEFKRDFRPLDEKCECYTCTHYTRAYLHHLFKAKEMLASTLATIHNEHFTVTLVAGIRRAIEEGYYHEFKTQTLGRFYGKK

SEQ ID NO: 51224 - protein, 404 aa, Actinomyces neuii
  misc_feature (1)..(404): tr|K0ZIR1|K0ZIR1_9ACTO Queuine tRNA-ribosyltransferase OS=Actinomyces neuii BVS029A5 OX=888439 GN=tgt PE=3 SV= 1
MTSFDIGARLDGKLGRTGIIHTPHGDIPTPAFIPVGTKATVKAVLPESMRSLGANALLANAYHLYLQPGPEIVDEAGGLSKFMNWDGPTYTDSGGFQVLSLGAGYKKVLSQEFSGKTTAPVSQPQLKNRAKVDEDGVVFRSHLDGSKHRFNPEVSMRIQHQLGADIMFAFDELTSLVHPYDYQVTSLERTRRWAERCLSAHAKLTEERADKPHQQLFGVLQGAQYEDLRRKAARDLGSMEIDGTTFDGFGIGGALEKENLGTIVGWVCEELPEDKARHLLGISEPDDFFTAIENGADTFDCVNPSRVARNAAIYMPTGRVNITRAEFKRDFRPLDDNCTCYTCTHYSRAYLHHLFKAKEMLSATLATIHNEHFTVQLVANIRKSIEEGYYEDFKTETLGRFYGN

SEQ ID NO: 51225 - protein, 441 aa, Actinomyces sp.
  misc_feature (1)..(441): tr|J3J7W7|J3J7W7_9ACTO Queuine tRNA-ribosyltransferase OS=Actinomyces sp. ICM58 OX=1105030 GN=tgt PE=3 SV=1
MNAHWLGAPSPEQVAPFSAPASSGAHRPDRGFEVGARLEAERGLGRTGVIHTAHGTIATPAFIPVGTKANVKALTPEMVRSLGAQAVLANAYHLYLQPGSDIVDEAGGFASFMNWAGPTYTDSGGFQVLSLGAGFKKVLSQEFSGQADPSDPAVQMQAIKASNAVVDDDGVVFSSHIDGTKHRFNPEVSMGIQHQLGADIMFAFDELTSLLHPRDYQVESLERTHAWARRCLVEHGRLTRERAGKPYQQLWGVIQGAQWEDLRRRAARTMADMEADGQRFDGFGVGGALEKENLGTIVSWVCEELGEDRPRHLLGISEPEDLFAGVAAGADTFDCVNPSRVARNAAIYTPDGRFNITNARFKRDFTPLVEGCECYTCTHYTRAYVHHLFKAKEILSSTLATIHNEWFTLRLVDAIRASIKDGCFEEFRSDMLGRYQAGRRP

SEQ ID NO: 51226 - protein, 415 aa, Actinomyces sp.
  misc_feature (1)..(415): tr|D0WLD0|D0WLD0_9ACTO Queuine tRNA-ribosyltransferase OS=Actinomyces sp. oral taxon 848 str. F0332 OX=649743 GN=tgt PE=3 SV=1
MTFEIRARLDAHPLARTGVLATPHGDIATPAFVPVGTKATVKAVAPEAIADVGAQAVLANAYHLYLQPGSDIVDEAGGLGKFMNWPGPTFTDSGGFQVLSLGSGFKKVLSEEFSGSPHADGTVAPWKERLADVDDDGVWFRSHLDGSRHRFTPEVSMRIQYELGADVIFAFDELTTLLNSRAYQEEALERTRRWALRCLAAHRALTAEREGKPYQQLFGVVQGAQYEDLRRKAARDLGAMEADGQRFDGFGIGGALEKENLGTIVGWVSQELPEDRARHLLGISEPDDFFAAVEAGADTFDCVNPSRVARNAAIYSPDGRFNLTRAQFRRDFNPLVPGCGCYTCTHYSRAYLHHLYKAKEMLFSTLATIHNEHFTVQLVDGIRAAIETGDYADFKEETLGRFYAGKWGRSAGEKQ

SEQ ID NO: 51227 - protein, 415 aa, Actinomyces tangfeifanii
  misc_feature (1)..(415): tr|A0A1D9MMM1|A0A1D9MMM1_9ACTO Queuine tRNA-ribosyltran sferase OS=Actinomyces tangfeifanii OX=1912795 GN=tgt P E=3 SV=1
MPAQETFSFEVTSTLPNGKGRTGIIHTPHGDIHTPAFIVVGTKATVKAVLPDNIKDLGAQATLANAFHLYLQPGPQILDQAGGLGQFMNWSGPTFTDSGGFQVMSLGSGFKKVLAMDMAGKQTDDVLAEGTTRRAHVDDDGVWFTSHLDGSKHRFTPEISLQIQHQLGADIMFAFDELTTLAHTRAYQESSLERTRLWAQRCLREHRRLSIEREHRPYQALFGVIQGAQYEDLRRKACQDLSAMCIDGQEFDGFGLGGAIEKENLGTIVGWCAEELPANKPRHLLGISEPDDLFAACEMGADTFDCVNPSRVARNAAIYTADGRYNVSRAACKDDFGPLEEGCECYTCQHYSRAYLHHLFKAKEMLFSTLATIHNEYWTVQLVENIRKAMLAGEFETYRDEFLGRYYANGGRVKF

SEQ ID NO: 51228 - protein, 415 aa, Actinomycetaceae bacterium
  misc_feature (1)..(415): tr|A0A179B365|A0A179B365_9ACTO Queuine tRNA-ribosyltran sferase OS=Actinomycetaceae bacterium BA112 OX=1823756 GN=tgt PE=3 SV=1
MTFEIRARLDAHPLARTGVLATPHGEIATPAFVPVGTKATVKAVAPEAIADVGAQAVLANAYHLYLQPGSDIVDEAGGLGKFMNWPGPTFTDSGGFQVLSLGSGFKKVLSEEFSGSPHADGTVAPWKERLADVDDDGVWFRSHLDGSRHRFTPEVSMRIQHELGADVIFAFDELTTLLNSRAYQEEALERTRRWALRCLAAHRALTAEREGKPYQQLFGVVQGAQYEDLRRKAARDLGAMEADGQRFDGFGIGGALEKENLGTIVGWASQELPEDRARHLLGISEPDDFFAAVEAGADTFDCVNPSRVARNAAIYSPDGRFNLTRAQFRRDFNPLVPGCDCYTCTHYSRAYLHHLYKAKEMLFSTLATIHNEHFTVRLVDGIRAAIETGDYADFKEETLGRFYAGKWGRSAGEKQ

SEQ ID NO: 51229 - protein, 394 aa, Actinomycetales bacterium
  misc_feature (1)..(394): tr|A0A524B3X8|A0A524B3X8_9ACTO Queuine tRNA-ribosyltran sferase OS=Actinomycetales bacterium mxb001 OX=1962179 GN=tgt PE=3 SV=1
MPDSPGRTGIITTPHGQIRTPAFIPVGTKATVKALLPESVRDLGAQAVLANAYHLYLQPGADIVAEAGGLGAYMNWSGPTFTDSGGFQVLSLGAGFKKVLAMDAGQRDDDVIAPGKERLAVVDDDGVTFRSHLDGSEHRFTPEVSMRVQADIGADIAFAFDELTTLNNTRDYQDLSLERTRLWAERCLVEHARLREVHPHRPYQALFGVIQGAQYEDLRRKAARDLGAMDFDGFGIGGAIEKVSLPEIVGWVTSELPDDRPRHLLGIGEPGDLFAGVAAGADTFDCVSPSREARNSAVYTPDGRFNLLTSASRRAFVPIDEECDCYTCANYTRAYLHHAFKAKEMIGATLATIHNIRFTVRLVDRMREAMESGDFAAYRDEFLGRYYAGRDASA

SEQ ID NO: 51230 - protein, 406 aa, Actinomycetales bacterium
  misc_feature (1)..(406): tr|A0A1Z9D781|A0A1Z9D781_9ACTO Queuine tRNA-ribosyltran sferase OS=Actinomycetales bacterium TMED115 OX=1986615 GN=tgt PE=3 SV=1
MGEDRSLPGSQLGRSGVITTPHGQIRTPAFIPVGTKATVKTVLPESMRDLGAQAVLANAYHLYLQPGADIVEAAGGLGAFMNWPGPTFTDSGGFQVLSLGVGFKKVLAMDVSDRTVDDVVAPGKDRLAHVDDDGVTFTSHLDGSRHRFTAEVSMQVQHALGADIIFAFDECTTLMNSRDYQQVAMRRTLEWAKRCIAEHRRITADRPERAYQALFGVIQGAQYEDLRRQAASDIAALPFDGFGIGGAIEKERMADIVRWVCEELPEDKPRHLLGIGEPQDFFTAIASGADTFDCVSPARVARNSALYTSRGRFNVTASINRRTFAPIEEGCTCYTCKNYTRAYLHHAFKAKESIAATLATIHNQHFIVNLVDNIRVAIEAGDFHAYREAFVGGYANNGQAGSQAGG

SEQ ID NO: 51231 - protein, 565 aa, Actinoplanes sp.
  misc_feature (1)..(565): tr|G8S1R3|G8S1R3_ACTS5 Drug resistance transporter, Emr B/QacA subfamily OS=Actinoplanes sp. (strain ATCC 31044 / CBS 674.73 / SE50/110) OX=134676 GN=ACPL_1277 PE=3 S V=1
MSHPTPTAARPAAEFTHRQILTILAGLMMGMFLAALDQTIMATATRTIADDLNGFDLQAWATTAFLITSTISTPLYGKLSDIYGRRPFFLFAIGIFIVGSMLCGLSQNMYELAAFRAIQGIGAGGLMSLALAIIGDIVPPRERAKYQGFFLAVFGTASVLGPILGGFFAGADQLLWVDGWRWVFYLNVPIGIAAMAVVAKVLHLPHTRVNHRIDWPGAVALIVGLVPLLTVAEQGRTWGWDSGRSILCYVIGVVGLISFVIAERAYKDEALLPLRLFGNRTIAVGTGASTILGIAMFGGLMTVPLYLQIVKGSSATMAGLQMIPFVFGIMSGSIIAGQLIARTGRYRIFPILGSTFMVIALFLFSLVGADTPLWRTMLIMVLMGLGLGGNMQPMITAVQNAVSPREIGVATGAVTFFRSMGGTMGTAVFLSVLFNVLPGNIRDAYADAAKNPEFLKAAADPTQQQLLKQAQGGGGLSDTSFINKLTDVVAHPFKVGFSDSVHVVYLLAFAIMLVGLVIVFFLPEIPLAMRSAQQQRADDAAAQGDASGADQGTAGVKAGTEGFAH

SEQ ID NO: 51232 - protein, 824 aa, Actinoplanes sp.
  misc_feature (1)..(824): tr|G8SL54|G8SL54_ACTS5 Drug resistance transporter, Emr B/QacA subfamily OS=Actinoplanes sp. (strain ATCC 31044 / CBS 674.73 / SE50/110) OX=134676 GN=ACPL_7379 PE=3 S V=1
MSATGGAPPLSHRQILQVLSGLMLGMFLAALDQTIVASAIRTIGDDLHGLSLQAWVTTAYLITATISTPLYGKLSDIYGRKRFFVTAITIFVVGSAACSFATSMYQLAVFRAVQGLGAGGLFSLALAIIGDLVPPRERARYQGYFLAVFGASSVLGPVIGGFFAGADEILGLSGWRWVFLVNVPIGAVALVVVAKVLHLRHTRRDHRIDWWGAVALCVCLVPLLTAAEQGRTWGWTGSRTVLCYAVGAAGLVAFLVAEARMGAEALIPLRFFRNRTFALTSFAGFVTGMGMFGGLALLPLYLQIVHGASPTRSGLQLLPLTAGIMAGSLISGRAISATGRYRVWPMLGAPLMIGGMGLMHSLAVDTPYWRTGVFMGLFGLGLGFVLQPVTLAVQNAMPPQDMGVATASATFFRQMGATAGTAVFLSLLFSRVGDRIRDALRVAGADPAFQKLMADPANRRVLGGSLDDTSFLRHVDPVLARPFESGFAATIADICLVAGGVLTVALILFAFLPQVPLRGSAPAGPAELSPSSGSATDLSPSPGSATASPASSRSPHSPSPPARSVDALSLSGVVTGLDQRPLTGARLTLADLAGGQAARAVTGPDGRYLLTPEVAGAYLLICAADRHQPAAIRLTVTGADARDVRLAAGGRIEGDVVDQHDRPVAAATVTLTDAAGAVVASAITGPDGGYVLAGLYPAEYTLTGIAPGARPAARTVVLDTGGVSRADLLLAGNGTLTGQVRAAASGHPVPEASVMAVDEAGAVVATTWTDADGRYAFADLVPGAYTVTASGYPPVADRVELIGELTAHDIMLGGPREGSRLISP

SEQ ID NO: 51233 - protein, 421 aa, Actinotignum sanguinis
  misc_feature (1)..(421): tr|A0A430JMX9|A0A430JMX9_9ACTO Queuine tRNA-ribosyltran sferase OS=Actinotignum sanguinis OX=1445614 GN=tgt PE= 3 SV=1
MTTGFTIGTRLDARVGDRTGQPLGRTGVIHTPHGDIATPAFIPVGTKATVKTLTPEQVRGIGAQAVLANAYHLYLQPGPEILDAAGGLAAFMNWNGPTYTDSGGFQVLSLGSGFKKVLTNEYAGKNAGRADTELARDKERLANVDDDGVWFRSHLNGSRHRFTPEVSMGIQHQLGADIMFAFDELTTLLNSRAYQEKSLERTRRWAQRCLAEHRRLTIERVGKPYQQLFGVIQGAQYEDLRRKAARDLGSMCVDGQEFDGFGIGGALEKEKLGTICAWVSEELPETKARHLLGISEPDDFFAAIEAGADTFDCVNPSRVARNAAIYSPDGRFNVTRAQFRTDFGPLVPECECYTCQNYSRAYLNHLFKAKEALAATLATIHNEYFTVHLVDTIRAAIESGDYAACKEETLGRFYRGQWGRA

SEQ ID NO: 51234 - protein, 421 aa, Actinotignum schaalii
  misc_feature (1)..(421): tr|S2VP63|S2VP63_9ACTO Queuine tRNA-ribosyltransferase OS=Actinotignum schaalii FB123-CNA-2 OX=883067 GN=tgt P E=3 SV=1
MTTGFTIGTRLDARVGDLTGRPLGRTGVIHTPHGDIATPAFIPVGTKATVKTLTPEQVRGIGAQAVLANAYHLYLQPGPEILDAAGGLSAFMNWNGPTYTDSGGFQVLSLGSGFKKVLTNEYAGKNAGRADTELARDKERLANVDDDGVWFRSHLNGSRHRFTPEVSMGIQHQLGADIMFAFDELTTLLNSRAYQEKSLERTRRWAERCLAEHRRLTIERAGKPYQQLFGVIQGAQYEDLRRKAARDLGSMCVDGQEFDGFGIGGALEKEKLGTICAWVSEELPETKARHLLGISEPDDFFAAIEAGADTFDCVNPSRVARNAAIYSPDGRFNVTRAQFRTDFGPLVPECECYTCQNYSRAYLNHLFKAKEALAATLATIHNEYFTVHLVDTIRAAIESGDYAACKEETLGRFYRGQWGRA

SEQ ID NO: 51235 - protein, 421 aa, Actinotignum schaalii
  misc_feature (1)..(421): tr|A0A068NN04|A0A068NN04_9ACTO Queuine tRNA-ribosyltran sferase OS=Actinotignum schaalii OX=59505 GN=tgt PE=3 S V=1
MTTGFTIGTRLDARVGDLTGRPLGRTGVIHTPHGDIATPAFIPVGTKATVKTLTPEQVRGIGAQAVLANAYHLYLQPGPEILDAAGGLSAFMNWNGPTYTDSGGFQVLSLGSGFKKVLSNEYAGKNAGRADTELARDKERLANVDDDGVWFRSHLNGSRHRFTPEVSMGIQHQLGADIMFAFDELTTLLNSRAYQEKSLERTRRWAERCLAEHRRLTIERAGKPYQQLFGVIQGAQYEDLRRKAARDLGAMCVDGQEFDGFGIGGALEKEKLGTICAWVSEELPETKARHLLGISEPDDFFAAIEAGADTFDCVNPSRVARNAAIYSPDGRFNVTRAQFRTDFGPLVPDCECYTCQNYSRAYLNHLFKAKEALAATLATIHNEYFTVHLVDTIRAAIESGDYAACKEETLGRFYRGQWGRA

SEQ ID NO: 51236 - protein, 421 aa, Actinotignum timonense
  misc_feature (1)..(421): tr|A0A2I2J307|A0A2I2J307_9ACTO Queuine tRNA-ribosyltran sferase OS=Actinotignum timonense OX=1870995 GN=tgt PE= 3 SV=1
MTTGFTIGTRLDARVGDLTGRPLGRTGVIHTPHGDIATPAFIPVGTKATVKTLTPEQVRGIGAQAVLANAYHLYLQPGPEILDAAGGLSAFMNWNGPTYTDSGGFQVLSLGSGFKKVLSNEYAGKNAGRADTELARDKERLANVDDDGVWFRSHLNGSRHRFTPEVSMGIQHQLGADIMFAFDELTTLLNSRAYQEKSLERTRRWAERCLAEHRRLTIERAGKPYQQLFGVIQGAQYEDLRRKAARDLGSMCVDGQEFDGFGIGGALEKEKLGTICAWVSEELPETKARHLLGISEPDDFFAAIEAGADTFDCVNPSRVARNAAIYSPDGRFNVTRAQFRTDFGPLVPGCECYTCQNYSRAYLNHLFKAKEALAATLATIHNEYFTVHLVDTIRAAIESGDYAACKEETLGRFYRGQWGRA

SEQ ID NO: 51237 - protein, 438 aa, Actinotignum urinale
  misc_feature (1)..(438): tr|A0A2N6V0G6|A0A2N6V0G6_9ACTO Queuine tRNA-ribosyltran sferase OS=Actinotignum urinale OX=190146 GN=tgt PE=3 S V=1
MDKVGFTVETRLDVRCGSETGKPLGRTGVIHTPHGNIATPAFIPVGTKATVKTLNPEQVKGVGAQAVLSNAYHLYLQPGSDVVDEAGGLGAFMNWDGPTYTDSGGFQVLSLGSGFKKVLSNEYASKADGRADMETATDRERLANVDDDGVWFRSHLDGSKHRFTPEVSMGIQHELGADIMFAFDELTTLLNSRGYQETSLERTRLWAQRCLIEHQRLTQERVGKPYQQLFGVVQGAQYEDLRRKAARDLGAMNMNGQMFDGFGIGGALEKENLGTIVGWVSEELPENKARHLLGISEPDDFFAAIEAGADTFDCVNPSRVARNGAIYSPDGRFNVTRYQFRRDFRQLVEGCECYTCSNYTRAYLNHLFKAKEMLGYALATIHNEHYTVKLVDDIRASIENGNYTDFKEETLGRFYAGNWGRIDAKPKSALKKRGEKAR

SEQ ID NO: 51238 - protein, 376 aa, Acutalibacter muris
  misc_feature (1)..(376): tr|A0A1Z2XQH5|A0A1Z2XQH5_9FIRM Queuine tRNA-ribosyltran sferase OS=Acutalibacter muris OX=1796620 GN=tgt PE=3 S V=1
MYRLIKTEGTARRGELATVHGMVQTPGFMNVATAGAIKGAVSAYDLMELGCQVQLCNTYHLHLRPGDETVKRLGGIRKFTGWQGPVLTDSGGFQVFSLAKLRDIREEGVTFSSHIDGRKIFMGPEESMRIQSNLGSTIAMAFDECVENPAEYEYAKMSCARTARWLERCKAEMARLNREEGTLNPNQMLFGINQGCTYHDLRIEHMKRIAEMGLDGYGIGGLAVGETAGEMYSVIEAIEPHMPKDKIRYLMGVGTPANLLEAVRRGVDLFDCVMPTRNARHGHAFTMEGCRNMLNAKYVLDEAPLDETCDCPVCRRFTRAYIHHLFKAGEMLAMRLTVMHNLYFYNHLLAKIRDALDEGRFEAFYKENIETVGRRI

SEQ ID NO: 51239 - protein, 376 aa, Acutalibacter sp.
  misc_feature (1)..(376): tr|A0A3A9EKI1|A0A3A9EKI1_9FIRM Queuine tRNA-ribosyltran sferase OS=Acutalibacter sp. 1XD8-33 OX=2320081 GN=tgt PE=3 SV=1
MYQLLKTEGMARRGRFVTVHGTVQTPGFMNVATAGAIKGAVSAYDLKELGCQVQLCNTYHLHLRPGDETVKALGGIRKFTGWEGPVLTDSGGFQVFSLAKLRNIREEGVTFASHIDGRRIFMGPEESMRIQSNLGSTIAMAFDECVENPAPYDYAKSSCARTARWLRRCKEEMARLNARQDTLNPSQLLFGINQGCTYQDLRVEHMKEIAALDLDGYGIGGLAVGETAEEMYAVIEAIEPHMPKDKIRYLMGVGTPANILEAVRRGVDLFDCVMPTRNARHGHAFTAEGCRNLMNAKYRLDQAPLDESCGCPVCRSFTRAYVHHLLKAGEMLGMRLAVMHNLYFYNHLLERIRAALDEGRFEAFYRENIEVISRRI

SEQ ID NO: 51240 - protein, 376 aa, Adhaeribacter aerolatus
  misc_feature (1)..(376): tr|A0A512B4D7|A0A512B4D7_9BACT Queuine tRNA-ribosyltran sferase OS=Adhaeribacter aerolatus OX=670289 GN=tgt PE= 3 SV=1
MTFELTAKDIHSKARAGEITTAHGTIQTPIFMPVGTAGTVKAVHQRELTNDIQAQIILGNTYHLYLRPGLEVLEQAGGLHKFNGWDQPILTDSGGYQVYSLSGTRKIVEEGVKFKSHIDGSTHFFSPEGVMDIQRTIGADIMMAFDECTPYPCEYNYAKKSLDMTHRWLQRCCDRFDSTEGKYGYDQTLFPIVQGSTYKDLRIQSAETIASFNREGNAIGGLSVGEPAEMMYEFTELVCDILPADKPRYLMGVGTPANILENIALGVDMFDCVLPTRNARNGMLFTSQGIINIRNERWKNDFSPIDETVGGYASTFYSKAYLRHLVHSGEMLGSQISSVHNLTFYLWLVKQAREHIIAGDYLAWKDKMVKQVMQRL

SEQ ID NO: 51241 - protein, 376 aa, Adhaeribacter sp.
  misc_feature (1)..(376): tr|A0A2T2YMP1|A0A2T2YMP1_9BACT Queuine tRNA-ribosyltran sferase OS=Adhaeribacter sp. HMF7605 OX=2072846 GN=tgt PE=3 SV=1
MTFTLTAHDKESKARAGTLTTAHGIIQTPIFMPVGTAGTVKAVHQREIKEDIQAQIILGNTYHLYLRPGLNTLEQAGGLHKFNGWDQPILTDSGGYQVYSLSGTRKIVEEGVKFKSHIDGSTHFFSPENVMDIQRTIGADIIMAFDECTPYPCEYNYARKSMDMTHRWLQRCCERFDNMESKYGYEQNLFPIVQGSTFKDLRQKSAETIASFNRAGNAIGGLSVGEPADMMYEMTELVCDILPADKPRYLMGVGTPANILENIALGIDMFDCVLPTRNARNGMLFTTQGIINIRNEKWKNDFSPIDETLGGYASTFYTKAYLRHLVHSGEMLGAQISSVHNLTFYLWLVKQAREQILAGTFRAWKDKMVKDLMVRL

SEQ ID NO: 51242 - protein, 376 aa, Adhaeribacter sp.
  misc_feature (1)..(376): tr|A0A369QAQ2|A0A369QAQ2_9BACT Queuine tRNA-ribosyltran sferase OS=Adhaeribacter sp. HMF7616 OX=2072847 GN=tgt PE=3 SV=1
MLFTLTAHDKETKARAGTLTTDHGLIQTPIFMPVGTAGTVKAVHQREIRDDIQAQIILGNTYHLYLRPGLQTLEQAGGLHRFNGWDKPILTDSGGYQVYSLSGTRKIVEEGVKFKSHIDGSTHFFSPENVMDIQRTIGADIIMAFDECTPYPCEYNYARKSMDMTHRWLQRCCDRFDATESKYGYEQNLFPIVQGSTYKDLRVKSAETIASFNRAGNAIGGLSVGEPAEMMYEMTELVCDILPADKPRYLMGVGTPANILENIALGVDMFDCVLPTRNARNGMLFTTQGIINIRNEKWKNDFSPIDETLGGYASTFYSKAYLRHLVHSGEMLGAQISSVHNLTFYLWLVKQARKQILAGTFRTWKDKMVKDLMVRL

SEQ ID NO: 51243 - protein, 381 aa, Adlercreutzia equolifaciens
  misc_feature (1)..(381): tr|A0A3E2ER20|A0A3E2ER20_9ACTN Queuine tRNA-ribosyltran sferase OS=Adlercreutzia equolifaciens OX=446660 GN=tgt PE=3 SV=1
MALFDCTCDATSGHARALTYTTAHGDFHTPMFMPVGTSATVKGITTSQLRELGSQVVLANTYHLAMRPGADLVAEAGGIHRFMNYDGPMLTDSGGFQVFSLADTVKLSDDGVTFQSIYDGSKIHWTPEENMRIQELIGADIAMQLDQCAPYPATREFVARAVDYSSAWARRCLAAHKRPDQTLFGIVQGGMHLDLRLESVRRLREIEEESLTAGGRRFGGYGIGGYSVGEDHEVMFETLGEVARACPDDRPRYLMGVGNPTTLVRAVREGVDMFDCVLPTRTARMGTAFSSAGRMNMRNAKYARDFTPLDPTCDCPTCKNHTRAYIRHLVKQNEMLGAILLSVHNLHFLLDLMRRAREAVLADAYEEFFEQWMESDAAADY

SEQ ID NO: 51244 - protein, 379 aa, Advenella incenata
  misc_feature (1)..(379): tr|A0A4Q7VSW1|A0A4Q7VSW1_9BURK Queuine tRNA-ribosyltran sferase OS=Advenella incenata OX=267800 GN=tgt PE=3 SV= 1
MPGLSFSLIKTEGKARRASITLNHGTVQTPMFMPVGTYGSVKAMLPHELEEIGAQVVLGNTFHLWLRPGTEVIEKHDGLHGFMQWKKPILTDSGGFQVFSLSDLRSKITEEGVKFSSPIDGSRLFLTPEESMRIQRALNSDIVMVFDECTPYTIDGRPATHDEAARSMRMSLRWAQRSRDAFDTLQNPNALFGIVQGGMFEDLRDESLAGLQRIGFDGYAIGGLSVGEPKPDMRRILAHIAHQLPDNAPRYLMGVGTPEDLVEGVSQGVDMFDCVMPSRNARNGWLFTRFGDIKIRNARYRDDTRPLDPTCACHTCRHFSRAYLHHMQKANEITGARLNTLHNLHFYLRIMEEMREALEQNRFAQWQEQFFTDRSKGID

SEQ ID NO: 51245 - protein, 379 aa, Advenella kashmirensis
  misc_feature (1)..(379): tr|A0A356LEH1|A0A356LEH1_9BURK Queuine tRNA-ribosyltran sferase OS=Advenella kashmirensis OX=310575 GN=tgt PE=3 SV=1
MPGLSFSLIKTEGKARRASITLNHGTVQTPMFMPVGTYGSVKAMLPHELEEIGAQVVLGNTFHLWLRPGTEVIEKHDGLHGFMQWKKPLLTDSGGFQVFSLSDLRSKITEEGVKFSSPIDGSRLFLTPEESMRIQRALNSDIAMVFDECTPYTIDGRPATHDEAARSMRMSLRWAQRSRDAFDTLQNPNALFGIVQGGMFEDLRDESLAGLQRIGFDGYAIGGLSVGEPKPDMRRILAHIAHQLPDNAPRYLMGVGTPEDLVEGVSQGVDMFDCVMPSRNARNGWLFTRFGDIKIRNARYRDDTRPLDPTCACHTCRHFSRAYLHHMQKANEITGARLNTLHNLHFYLNIMEQMRQALEQGRFAHWQEQFFIDRSKGID

SEQ ID NO: 51246 - protein, 379 aa, Advenella kashmirensis
  misc_feature (1)..(379): tr|I3UA17|I3UA17_ADVKW Queuine tRNA-ribosyltransferase OS=Advenella kashmirensis (strain DSM 17095 / LMG 22695 / WT001) OX=1036672 GN=tgt PE=3 SV=1
MPGLSFSLIKTEGKARRASITLNHGTVQTPMFMPVGTYGSVKAMLPHELEEIGSQVVLGNTFHLWLRPGTEVIEKHDGLHGFMQWKKPILTDSGGFQVFSLSDLRSKITEEGVKFSSPIDGSRLFLTPEESMRIQRALNSDIVMVFDECTPYTIDGRPATHDEAARSMRMSLRWAQRSRDAFDTLQNPNALFGIVQGGMFEDLRDESLAGLQRIGFDGYAIGGLSVGEPKPDMRRILAHIAHQLPDNAPRYLMGVGTPEDLVEGVSQGVDMFDCVMPSRNARNGWLFTRFGDIKIRNARYRDDTRPLDPTCACHTCRHFSRAYLHHMQKANEITGARLNTLHNLHFYLRIMEEMREALEQGRFAQWQEQFFIDRSKGID

SEQ ID NO: 51247 - protein, 379 aa, Advenella mimigardefordensis
  misc_feature (1)..(379): tr|W0PIR0|W0PIR0_9BURK Queuine tRNA-ribosyltransferase OS=Advenella mimigardefordensis DPN7 OX=1247726 GN=tgt PE=3 SV=1
MPGLSFSLIKTEGKARRASITLNHGTVQTPMFMPVGTYGSVKAMLPHELDDIGAQVVLGNTFHLWLRPGTDVIEKHDGLHGFMQWKKPILTDSGGFQVFSLSDLRSKITEEGVKFSSPIDGSRLFLTPEESMRIQRSLNSDIVMVFDECTPYTIDGRPATHDEAARSMRMSLRWAQRSRDAFNALQNPNALFGIVQGGMFEDLRDESLAGLQRIGFDGYAIGGLSVGEPKEDMRRILAHIAHQLPDNAPRYLMGVGTPEDLVEGVSQGVDMFDCVMPSRNARNGWLFTRFGDIKIRNARYRDDTRPLDPTCACHTCQHFSRAYLHHMQKANEITGARLNTLHNLHFYLNLMEQMREALEQGRFAQWQEQFFTDRSKGID

SEQ ID NO: 51248 - protein, 379 aa, Advenella sp.
  misc_feature (1)..(379): tr|A0A2M9TZY5|A0A2M9TZY5_9BURK Queuine tRNA-ribosyltran sferase OS=Advenella sp. S44 OX=1982755 GN=tgt PE=3 SV= 1
MSGLSFSLLKTEGKARRASITLNHGTVQTPMFMPVGTYGSVKAMLPHELEEIGAQVVLGNTFHLWLRPGTDVIEKHGGLHGFMQWEKPILTDSGGFQVFSLSDLRSKITEEGVKFSSPIDGSRLFLTPEESMRIQRKLNSDIVMVFDECTPYSIDGRPASHDEAASSMRMSLRWAQRSRDAFDSLQNPNALFGIVQGGMFEDLRDESLAGLQGIGFDGYAIGGLSVGEPKADMRRILAHIAHQLPENAPRYLMGVGTPEDLVEGVSQGVDMFDCVMPSRNARNGWLFTRFGDIKIRNARYRDDTRPLDPSCACHTCRHFSRAYLHHMQKANEITGARLNTLHNLYFYLQIMKEMREALEQGRFGQWQEQFFTDRSKGID

SEQ ID NO: 51249 - protein, 376 aa, Aequorivita antarctica
  misc_feature (1)..(376): tr|A0A5C6YXN2|A0A5C6YXN2_9FLAO Queuine tRNA-ribosyltran sferase OS=Aequorivita antarctica OX=153266 GN=tgt PE=3 SV=1
MHFKLEATDLQSSARAGTITTDHGVIETPIFMPVGTVGTVKGVHQRELKEDINPDVILGNTYHLYLRPQMPVLEKAGGLHKFMNWDRNILTDSGGYQVYSLSANRKIKEEGVKFKSHIDGSYHFFTPENVMEIQRTIGADIIMAFDECAPYPCDYNYAKRSMHMTHRWLDRCIKHLEKTPLKYDYGQTFFPIVQGSTYKDLRKQSAEYIASVGAEGNAIGGLSVGEPAEEMYEMTAIVTEILPKEKPRYLMGVGTPINILENIALGIDMFDCVMPTRNGRNGMLFTSEGIINIKNKKWEADLSVIDPMGITWVDTEYNKAYLRHLFTVNEMLGRQIATIHNLGFYLWLVREARKHILAGDFAQWKNSMVKKLDQRL

SEQ ID NO: 51250 - protein, 376 aa, Aequorivita lipolytica
  misc_feature (1)..(376): tr|A0A5C6YM17|A0A5C6YM17_9FLAO Queuine tRNA-ribosyltran sferase OS=Aequorivita lipolytica OX=153267 GN=tgt PE=3 SV=1
MHFKLEATDLQSSARAATITTDHGVIETPIFMPVGTLGTVKGVHQRELKEDINPDVILSNTYHLYLRPQTPVLEKAGGIHKFINWDRNILTDSGGYQVYSLSANRKIKEEGVKFKSHIDGSYHVFTPENVMEIQRTIGADIIMAFDECTPYPCEYNYAKRSMHMTHRWLDRCIKHLEKTPLKYDYGQTFFPIVQGSTYKDLRKQSAEYIASVGAEGNAIGGLSVGEPADEMYEMTAVVTEILPKEKPRYLMGVGTPANILENIALGVDMFDCVMPTRNGRNGMIFTSEGTINIKNKKWEADLSAIDPMGITWVDTEYSKAYLRHLFTVNEMLGRQIATIHNLGFYLWLVREARKHILAGDFAAWKNGMVKKLDQRL

SEQ ID NO: 51251 - protein, 376 aa, Aequorivita soesokkakensis
  misc_feature (1)..(376): tr|A0A1A9LDW5|A0A1A9LDW5_9FLAO Queuine tRNA-ribosyltran sferase OS=Aequorivita soesokkakensis OX=1385699 GN=tgt PE=3 SV=1
MHFKLEATDLQSSARAATITTDHGVIETPIFMPVGTVGTVKGVHQRELKQDINPDIILGNTYHLYLRPQTPVLEKAGGLHKFMNWDRNILTDSGGYQVYSLSANRKIKEEGVKFKSHIDGSYHVFTPENVMEIQRTIGADIIMAFDECTPYPCEYNYAKRSMHMTHRWLDRCIKHLEKTPLKYDYGQTFFPIVQGSTYKDLRRQSAEYIASVGAEGNAIGGLSVGEPADEMYEMTAVVTEILPKEKPRYLMGVGTPVNLLENIALGIDMFDCVMPTRNGRNGMLFTSEGIINIKNKKWEADLSVIDPMGITWVDTDYSKAYLRHLFTVNEMLGRQIATIHNLGFYLWLVREARKHILAGDFAEWKNGMVKKLDQRL

SEQ ID NO: 51252 - protein, 376 aa, Aequorivita sp.
  misc_feature (1)..(376): tr|A0A330MPU6|A0A330MPU6_9FLAO Queuine tRNA-ribosyltran sferase OS=Aequorivita sp. CIP111184 OX=2211356 GN=tgt PE=3 SV=1
MHFKLEATDLQSSARAATITTDHGVIETPIFMPVGTVGTVKGVHQRELKEDINPDIILGNTYHLYLRPQTPILEKAGGLHKFMNWDRNILTDSGGYQVYSLSANRKIKEEGVKFKSHIDGSYHVFTPENVMEIQRSIGADIIMAFDECTPYPCEYNYAKRSMHMTHRWLDRCIKHLEKTPLKYDYGQTFFPIIQGSTYKDLRKQSAEYIASVGAEGNAIGGLSVGEPADEMYEMTAVVTEILPKDKPRYLMGVGTPVNLLENIALGIDMFDCVMPTRNGRNGMLFTSEGTINIKNKKWEMDLSAIDPMGITWVDTDYSKAYLRHLFTVNEMLGRQIATIHNLGFYLWLVREARKHILAGTFTDWKNVMVKKMDQRL

SEQ ID NO: 51253 - protein, 376 aa, Aequorivita sp.
  misc_feature (1)..(376): tr|A0A2E4RVM1|A0A2E4RVM1_9FLAO Queuine tRNA-ribosyltran sferase OS=Aequorivita sp. OX=1872390 GN=tgt PE=3 SV=1
MHFKLEATDLQSSARAATITTDHGVIETPIFMPVGTVGTVKGVHQRELKQDINPDIILGNTYHLYLRPQTPVLEKAGGLHKFMNWDRNILTDSGGYQVYSLSANRKIKEEGVKFKSHIDGSYHVFTPENVMEIQRTIGADIIMAFDECTSYPCEYNYAKRSMHMTHRWLDRCIKHLEKTPLKYDYGQTFFPIVQGSTYKDLRRQSAEYIASVGAEGNAIGGLSVGEPADEMYEMTAVVTEILPKEKPRYLMGVGTPVNLLENIALGIDMFDCVMPTRNGRNGMLFTSEGIINIKNKKWEADLSVIDPMGITWVDTDYSKAYLRHLFTVNEMLGRQIATIHNLGFYLWLVREARKHILAGDFAEWKGGMVKKLDQRL

SEQ ID NO: 51254 - protein, 376 aa, Aequorivita sublithincola
  misc_feature (1)..(376): tr|I3YS33|I3YS33_AEQSU Queuine tRNA-ribosyltransferase OS=Aequorivita sublithincola (strain DSM 14238 / LMG 21 431 / ACAM 643 / 9-3) OX=746697 GN=tgt PE=3 SV=1
MQFKLEATDLQSNARAGTITTDHGVIETPIFMPVGTVGTVKGVHQRELKEDINPDVILGNTYHLYLRPQMAVLEKAGGLHKFMNWDRNILTDSGGYQVYSLSANRKIKEEGVKFKSHIDGSYHFFTPENVMEIQRTIGADIIMAFDECAPYPCEYNYAKRSMHMTHRWLDRCIKHLEKTPLKYGYDQTFFPIVQGSTYKDLRKQSAEYIASVGAEGNAIGGLSVGEPAEEMYEMTEIVTAILPKEKPRYLMGVGTPINILENIALGIDMFDCVMPTRNGRNGMLFTSEGIINIKNKKWEADLSAIDPMGITWVDTDYNKAYLRHLFTVNEMLGRQIATIHNLGFYLWLVREARKHILTGDFAQWKNGMVKKLDQRL

SEQ ID NO: 51255 - protein, 376 aa, Aequorivita viscosa
  misc_feature (1)..(376): tr|A0A1M6F0T8|A0A1M6F0T8_9FLAO Queuine tRNA-ribosyltran sferase OS=Aequorivita viscosa OX=797419 GN=tgt PE=3 SV =1
MQFKLEATDINSDARAATITTDHGVIETPIFMPVGTVGSVKGVHQRELREDINPDIILGNTYHLYLRPQMPILEKAGGLHKFMNWDRNILTDSGGYQVYSLSANRKIKEEGVKFKSHIDGSYHLFTPENVMEIQRTIGADIIMAFDECAPYPCNYNYAKRSMHMTHRWLDRCINHLGKSPVKYGFDQSFFPIVQGSTYKDLRKQSAEYIASVGAEGNAIGGLSVGEPAEEMYEMTAVVTEILPKDKPRYLMGVGTPVNILENIALGIDMFDCVMPTRNGRNGMLFTSEGIINIKNKKWEDDFSPIDPMGITWVDTEYSKAYLRHLFTVNEMLGRQIGSIHNLGFYLWLVREARKHILAGDFASWKESMVKKLDQRL

SEQ ID NO: 51256 - protein, 381 aa, Aeribacillus composti
  misc_feature (1)..(381): tr|A0A559U9R4|A0A559U9R4_9BACI Queuine tRNA-ribosyltran sferase OS=Aeribacillus composti OX=1868734 GN=tgt PE=3 SV=1
MNKPPIRYELIKTCKQTGARLGIVHTPHGSFETPVFMPVGTLATVKTMSPEELKEIGAKIILSNTYHLWLRPGEDIVKEAGGLHSFMNWDGAILTDSGGFQVFSLSEFRRIEEEGVYFRNHLNGDKLFLSPEKATEIQNALGSDIIMAFDECPPYPASFDYMKQSVERTSRWAERCLAAHKRENEQGMFGIVQGGEYENLRKQSARDLVSLDFSGYAVGGLSVGEPKEVMNRVLEFTVPLLPSDKPRYLMGVGSPDSLIDGAIRGIDMFDCVLPTRIARNGTLMTSTGRLVVKNAKYARDFGPLDESCDCYVCRNYSRAYIRHLIKSNETFGIRLTSYHNLYFLIKLMEQIRESIREDRLGDFREEFFERYGFNKPNAKNF

SEQ ID NO: 51257 - protein, 381 aa, Aeribacillus pallidus; identical to SEQ ID NO: 51256
  misc_feature (1)..(381): tr|A0A165XN31|A0A165XN31_9BACI Queuine tRNA-ribosyltran sferase OS=Aeribacillus pallidus OX=33936 GN=tgt PE=3 S V=1

SEQ ID NO: 51258 - protein, 536 aa, Aeriscardovia aeriphila
  misc_feature (1)..(536): tr|A0A261F830|A0A261F830_9BIFI Queuine tRNA-ribosyltran sferase OS=Aeriscardovia aeriphila OX=218139 GN=tgt PE= 3 SV=1
MSEHDEIFTADASASDPAAASAAASDQATSAPAATYPAASTSNPADPAFQPHYGKRKKEIQHVDPDDEGAWVTPPALAEKISESDARSAALAHSGWHAIRTREEQAESLAHAIAQGRDAFGFELKTELPNGMDNNGKQGLGQGGRRHGRTGVIHTPHGDIHTPAFVPVATQATMKGVLPEQIRGLGAQCMLSNAFHLNERPGPELIDKAGGLAAFENWDGPTFTDSGGFQVLSLGAGFKKTLAMDVTGLKNDDVIAEGKTRHAFVDEDGVTFHSPLSGKKERFSAEISMQIQHQLGADIMFAFDELTTLMNTRRYQEASVERTFRWAKRCVAEHHKLTQERSDKPYQALFGVVQGANYEDLRRRAASQIASLDFDGFGLGGAFEKRIMGEICAWICDELPENKPRHVLGIAAVDDIFAAVENGGDTFDCVAPARVGRNGAIYTHDGRYNVLRARFTDDFRPLEVGCDCYTCQHYSRAYVHHVLKCKEMTGSTLATIHNERFFVRLLDEIRDSIDGGWFYELRDETLARFYRNGSKG

SEQ ID NO: 51259 - protein, 382 aa, Aerococcaceae bacterium
  misc_feature (1)..(382): tr|A0A347WLE7|A0A347WLE7_9LACT Queuine tRNA-ribosyltran sferase OS=Aerococcaceae bacterium ZY16052 OX=2036206 G N=tgt PE=3 SV=1
MTETAPIRYELIKEEKHTGARLGILHTPHGSFETPMYMPVGTLATVKGLSPEELKAMGAGVILSNTYHLWLRPGEDIVEEAGGLHQFMNWDQGVLTDSGGFQVFSLSDTRKITEEGVKFKSHIDGSDLFLTPEKSIQIQNALGADIIMSFDECPDFNHTYDYVKQSIHRTTRWAERGLKAHQKANQQALFGIVQGAGYKDLRLQHARDMVSLDFPGYSIGGLSVGESKEEMNDVMDYLLPELPANKPRYLMGVGSPDSLIDGAIRGVDMFDCVLATRIARNGTCMTSSGRLVVKNATYARDFRPIDEHCQCYTCQNYTRAYVRHLFKADEIFGLRLASIHNVYFLLELMRQVRQAIREDNLLEFREAFFEAYGYNKPNARAF

SEQ ID NO: 51260 - protein, 381 aa, Aerococcaceae bacterium
  misc_feature (1)..(381): tr|A0A3D0CGN6|A0A3D0CGN6_9LACT Queuine tRNA-ribosyltran sferase OS=Aerococcaceae bacterium OX=2053495 GN=tgt PE =3 SV=1
MTEPAIRYELIKEEKNTGARLGILHTPHGSFETPIYMPVGTLATVKGLSPEELKDMGAEIVLSNTYHLWLRPGEDIVEEAGGLHKFMNWDRGILTDSGGFQVFSLSDMRKIEEVGVHFRNHISGEKLFLTPEKAIQIENALGADIIMSFDECPDFHHSYDYVKNSIYRTTRWAERGLKAHQRPEDQALFGIVQGAGYKDLRIQHARDLVSLDFPGYSIGGLSVGETKEEMNSVLDYLTPELPKDKPRYLMGVGSPDALIDGVIRGVDMFDCVLATRIARNGTCMTSNGRLVVKNAQYARDFRPIDENCDCYTCRNYTRAYVRHLIKTDELFGMRLASIHNVYFLLELMRNVRKAIMDDQLLEFREDFFEKYGYNKPNAKNF

SEQ ID NO: 51261 - protein, 379 aa, Aerococcus christensenii
  misc_feature (1)..(379): tr|A0A133XT84|A0A133XT84_9LACT Queuine tRNA-ribosyltran sferase OS=Aerococcus christensenii OX=87541 GN=tgt PE= 3 SV=1
MPALRYELIKKEKHTGARLGRVITPHGVIETPIFMPVGTLASVKSVSPEELKEMKAQIILSNTYHLWLRPGDDLIERAGGLHTFMNWDRPILTDSGGFQVFSLTDIRRLEEEGVHFRSHLDGSKLFLSPEKAIQIQNHLGSDIMMSLDECPPFDASYDYMKHSIERTTRWAERGLKAHQRPNDQALFGILQGGGYKDLRLQHAKEMIGLDFPGYSIGGLSVGESKEEMYKVLDYLTPIMPENKPRYLMGVGSPDALIEGSIRGVDMFDCVLATRIARNGTCMTSKGRLVVKNAAYKEDFRPIDEACQCYTCRNFTRAYVRHLLHCGETFGLRLTSIHNLHFLLQLMEQVRQAIREDCLLDFKEDFFERYGLNVDKPKNF

SEQ ID NO: 51262 - protein, 379 aa, Aerococcus christensenii
  misc_feature (1)..(379): tr|A0A2I1K861|A0A2I1K861_9LACT Queuine tRNA-ribosyltran sferase OS=Aerococcus christensenii OX=87541 GN=tgt PE= 3 SV=1
MPALRYELIKKEKHTGARLGRVITPHGVIETPIFMPVGTLASVKSVSPEELKEMKAQIILSNTYHLWLRPGDDLIERAGGLHTFMNWDRPILTDSGGFQVFSLTDIRRLEEEGVRFRSHLDGSKLFLSPEKAIQIQNHLGSDIMMSLDECPPFDASYDYMKHSIERTTRWAERGLKAHQRPNDQALFGILQGGGYKDLRLQHAKEMIGLDFPGYSIGGLSVGESKEEMYKVLDYLTPIMPENKPRYLMGVGSPDALIEGSIRGVDMFDCVLATRIARNGTCMTSKGRLVVKNAAYKEDFRPIDEACQCYTCRNFTRAYVRHLLHCGETFGLRLTSIHNLHFLLQLMEQVRQAIREDCLLDFKEDFFERYGLNVDKPKNF

SEQ ID NO: 51263 - protein, 379 aa, Aerococcus sanguinicola
  misc_feature (1)..(379): tr|A0A109RDS6|A0A109RDS6_9LACT Queuine tRNA-ribosyltran sferase OS=Aerococcus sanguinicola OX=119206 GN=tgt PE= 3 SV=1
MPALEYRLIKKEKHTGARLGEIKTPHGVIETPIFMPVGTLATVKSLSPEELKAMNAQIILSNTYHLWLRPGDDIVKEAGGLHQFMNWDRPILTDSGGFQVFSLSDSRKLTEEGAHFKSHLDGRKLFLSPEKAIEIENNLGADIIMSLDECPDFNHDYDYVKHSIDRTTRWAERGLKAHQRPDDQALFGILQGAGYKDLRLQHAKDMISLDFPGYSIGGLSVGESKDEMYQVLDYLTPVMPEHKPRYLMGVGSPDALIEGVIRGVDMFDCVLATRIARNGTCMTSQGRLVVKNAPYQRDFNPIDPNCSCYTCQNFSRAYVRHLFKADETFGLRLTSIHNLHFLLDLMAQVRQAIRDDNLLDFKEEFFEAYGLNTKNPKNF

SEQ ID NO: 51264 - protein, 379 aa, Aerococcus sp.
  misc_feature (1)..(379): tr|A0A1F1DP40|A0A1F1DP40_9LACT Queuine tRNA-ribosyltran sferase OS=Aerococcus sp. HMSC061A03 OX=1739396 GN=tgt PE=3 SV=1
MPALEYRLIKKEKHTGARLGEIKTPHGIIETPIFMPVGTLATVKSLSPEELKAMNAQIILSNTYHLWLRPGDDIVKEAGGLHQFMNWDRPILTDSGGFQVFSLSDSRKLTEEGVHFKSHLDGRKLFLSPEKAIEIENNLGADIIMSLDECPDFNHDYDYVKHSIERTTRWAERGLKAHQRPDDQALFGILQGAGYKDLRLQHAKDMISLDFPGYSIGGLSVGESKEDMYQVLDYLTPVMPEGKPRYLMGVGSPDALIEGVIRGVDMFDCVLATRIARNGTCMTSQGRLVVKNAPYQRDFNPIDPNCSCYTCQNFSRAYVRHLFKADETFGLRLTSIHNLHFLLDLMAQVRQAIREDRLLDFKEEFFEAYGLNVKNPKNF

SEQ ID NO: 51265 - protein, 380 aa, Aerococcus sp.
  misc_feature (1)..(380): tr|A0A3N4GR23|A0A3N4GR23_9LACT Queuine tRNA-ribosyltran sferase OS=Aerococcus sp. SJQ22 OX=2487350 GN=tgt PE=3 SV=1
MTSSALNFTLHKKEKHTGARLGTVETPHGSIETPVFMPVGTLATVKSVSPEELTDMNAQIILSNTYHLWLRPGDDLVKEAGGLHKFMNWDKPILTDSGGFQVFSLADTRKIEEEGVTFKSHLDGKKLFLSPEKAIQIENNLGADIIMSFDECPDFNHDYDYVKNSINRTTHWAERGLKAHERSNDQALFGILQGAGYKDLRLQHAKDMISLDFPGYSIGGLSVGESKEDMYEVLDYLTPVMPENKPRYLMGVGSPDALIEGVIRGVDMFDCVLPTRIARNGTTMTSQGRVVIKNAQYARDFTPLDPECDCYTCRNYSRAYIRHLIKTNETFGIRLTSIHNLHFLINLMEQIKEAIREDRLLDFRDEFFLRYYGEVKKSNF

SEQ ID NO: 51266 - protein, 381 aa, Aerococcus suis
  misc_feature (1)..(381): tr|A0A1W1Y2C2|A0A1W1Y2C2_9LACT Queuine tRNA-ribosyltran sferase OS=Aerococcus suis OX=371602 GN=tgt PE=3 SV=1
MSKALKYTLHKKEKHTGARLGEIETPHGKIQTPVFMPVGTQATVKAVSPEELKAMSAEIILSNTYHLWLRPGDDLVKEAGGLHQFMNWDRPILTDSGGFQVFSLAKLRQIKEEGVHFRSHLDGRKLFLGPEEAIGIENNLGADIIMSFDECPDYNHDYDYVKKSIARTTRWAERGLKAHKRPDEQALFGILQGAGYKDLRLQHAKDMISLDFPGYSIGGLSVGESKEEMYGVMDYLLPVMPENKPRYLMGVGSPDALIEGVIRGVDMFDCVLPTRIARNGTTMTSNGRLVVKNAKYARDFRPIDEHCDCYTCRNYTRAYVRHLLKTDETFGLRLTSIHNLHFLTHLMADIREAIRQDQLMEFRDDFFMRYYGTKGLPTKNF

SEQ ID NO: 51267 - protein, 339 aa, Aerococcus urinae
  misc_feature (1)..(339): tr|A0A329NU46|A0A329NU46_9LACT Queuine tRNA-ribosyltran sferase (Fragment) OS=Aerococcus urinae OX=1376 GN=DBT5 4_10215 PE=3 SV=1
VKALYMDQVRGAGADIILGNTYHLMLRPGAEEVAALGGLHKFANWPHPILTDSGGFQVMSLATLRKMTEEGVTFASHIDGSRHLLTPERSIEIQCLLGSDIQMQLDECTPFPATEEEARVSMELSLRWGKRSKAAFETQPHRLEGQALFGIVQGSVYPDLRARSVDGLMATGFDGYAIGGLAVGEGQSEMLRMLDVTAPLLPADRPRYLMGVGTPDDLVESVRRGVDMFDCVMPTRNGRHGLAFTRMGRVNLKNARHAKDPRPLDAESSCPAARDYSRAYLHHLIKSGEMLGSMLVSWINIAYYQELMAGLRAAIAAGRLDAFAAEFKRDQAAGDIEAL

SEQ ID NO: 51268 - protein, 379 aa, Aerococcus urinae
  misc_feature (1)..(379): tr|A0A178HFJ9|A0A178HFJ9_9LACT Queuine tRNA-ribosyltran sferase OS=Aerococcus urinae OX=1376 GN=tgt PE=3 SV=1
MPALTYELIKTEKHTGARLGRVTTPHGSFETPIFMPVGTLATVKGLSPEELKDLGAEIILSNTYHLWLRPGDDIVKEAGGLHQFMNWNRPILTDSGGFQVFSLTKIRRLEEEGVYFRSHLNGHRLFLSPEKAISIENNLGADIIMSLDECPPFDASYDYMKNSINRTTRWAERGLAAHQRPEDQALFGIIQGGGYKDLRLQHAQDLINLDFPGYSIGGLSVGESKEEMYEVLDYLTPVMPSHKPRYLMGVGSPDALIEGAIRGIDMFDCVLATRIARNGTCMTSRGRLVVKNATFKRDFRPLDEACSCYTCQNYSRAYIRHLIHTNEILGARLTSIHNLHFLTDLMANVRQAIRDDNLLDFKADFFERYGLNKKNPKNF

SEQ ID NO: 51269 - protein, 380 aa, Aerococcus urinaeequi
  misc_feature (1)..(380): tr|A0A3D4XLA0|A0A3D4XLA0_9LACT Queuine tRNA-ribosyltran sferase OS=Aerococcus urinaeequi OX=51665 GN=tgt PE=3 S V=1
MTSSALKYTLHKKEKHTGARLGQVETPHGMIETPVFMPVGTQASVKAVSPEELTDMNAQIILSNTYHLWLRPGDDLVKEAGGLHQFMNWDKPILTDSGGFQVFSLADSRKIEEEGVTFKSHLDGKKLFLSPEKAIHIENNLGADIIMSFDECPDFNHDHNYVEKSIHRTTRWAERGLNAHQRPNDQALFGILQGAGYKDLRLQHAKDMIGLDFPGYSIGGLSVGESKEDMYKVLDYITPVMPEDKPRYLMGVGSPDALIEGVIRGIDMFDCVLPTRIARNGTTMTSQGRVVIKNAQYARDFTPLDPNCDCYTCRNYTRAYIRHLLKANETFALRLTSIHNLHFLINLMEQIKDAIREDRLLDFRDEFFLQYYGKVQKTAF

SEQ ID NO: 51270 - protein, 380 aa, Aerococcus urinaeequi
  misc_feature (1)..(380): tr|A0A0U4VWH4|A0A0U4VWH4_9LACT Queuine tRNA-ribosyltran sferase OS=Aerococcus urinaeequi OX=51665 GN=tgt PE=3 S V=1
MTSSALKYTLHKKEKHTGARLGQVETPHGTIETPVFMPVGTQASVKAVSPEELTDMNAQIILSNTYHLWLRPGDDLVKEAGGLHQFMNWDKPILTDSGGFQVFSLADSRKIEEEGVTFKSHLDGKKLFLSPEKAIHIENNLGADIIMSFDECPDFNHDHNYVEKSIHRTTRWAERGLNAHQRPNDQALFGILQGAGYKDLRLQHAKDMIGLDFPGYSIGGLSVGESKEDMYKVLDYLTPVMPEDKPRYLMGVGSPDALIEGVIRGIDMFDCVLPTRIARNGTTMTSQGRVVIKNAQYARDFTPLDPNCDCYTCRNYTRAYIRHLLKANETFALRLTSIHNLHFLINLMEQIKDAIREDRLLDFRDEFFLQYYGKVQKTAF

SEQ ID NO: 51271 - protein, 381 aa, Aerococcus urinaehominis
  misc_feature (1)..(381): tr|A0A120IAR9|A0A120IAR9_9LACT Queuine tRNA-ribosyltran sferase OS=Aerococcus urinaehominis OX=128944 GN=tgt PE =3 SV=1
MSSPALKYTLIHQDKYTGARLGEIETPHGKIETPIFMPVGTLATVKSVSPEELTAMEAQIILSNTYHLWLRPGDDLVKEAGGLHQFMNWHKPILTDSGGFQVFSLSDSRTIKEEGVYFKSHLDGSKLFLGPEEAIQIENNLGADIIMSFDECPDFNHSYDYVKDSINRTTRWAERGLKAHQRPDDQALFGIIQGAGYKDLRLQHAHDLISLDFPGYSIGGLSVGESKQEMYEVLDYLTPVMPSDKPRYLMGVGSPDALIEGAIRGVDMFDCVLPTRIARNGTCMTSRGRLVVKNAKFARDFGPIDDQCDCYTCRNFSRAYVRHLFKADETFGLRLTSIHNLHFLINLMKQVREAIRNDQLLEFKEDFFEAYGLNQANPKNF

SEQ ID NO: 51272 - protein, 389 aa, Aerococcus viridans
  misc_feature (1)..(389): tr|D4YF55|D4YF55_9LACT Queuine tRNA-ribosyltransferase OS=Aerococcus viridans ATCC 11563 = CCUG 4311 OX=655812 GN=tgt PE=3 SV=1
MCGRKKGILMTSSALKYTLHKKEKHTGARLGQVETPHGTIETPVFMPVGTQASVKAVSPEELTDMNAQIILSNTYHLWLRPGDDLVKEAGGLHQFMNWDKPILTDSGGFQVFSLADSRKIEEEGVTFKSHLDGKKLFLSPEKAIHIENNLGADIIMSFDECPDFNHDHNYVEKSIHRTTRWAERGLNAHQRPDDQALFGILQGAGYKDLRLQHAKDMIGLDFPGYSIGGLSVGESKEDMYKVLDYLTPVMPEDKPRYLMGVGSPDALIEGVIRGVDMFDCVLPTRIARNGTTMTSQGRVVIKNAQYARDFTPLDPNCDCYTCRNYTRAYIRHLLKANETFALRLTSIHNLHFLINLMEQIKDAIREDRLLDFRDEFFLQYYGKVQKTAF

SEQ ID NO: 51273 - protein, 380 aa, Aerococcus viridans
  misc_feature (1)..(380): tr|A0A2N6UCL6|A0A2N6UCL6_9LACT Queuine tRNA-ribosyltran sferase OS=Aerococcus viridans OX=1377 GN=tgt PE=3 SV=1
MTSSALKYTLHKKEKHTGARLGQVETPHGTIETPVFMPVGTQASVKAVSPEELNDMNAQIILSNTYHLWLRPGDDLVKEAGGLHQFMNWDKPILTDSGGFQVFSLADFRKIEEEGVTFKSHLDGKTLFLSPEKAIHIENNLGADIIMSFDECPDFNHDHAYVEKSIHRTTRWAERGLNAHQRPNDQALFGILQGAGYKDLRLQHAKDMIGLDFPGYSIGGLSVGESKEDMYQVLDYLTPVMPENKPRYLMGVGSPDALIEGVIRGVDMFDCVLPTRIARNGTTMTSQGRVVIKNAQYARDFSPLDPNCDCYTCRNYTRAYIRHLLKANETFGLRLTSIHNLHFLINFMAQIKDAIREDRLLDFRDEFFLQYYGKVQKTAF

SEQ ID NO: 51274 - protein, 407 aa, Aeromicrobium camelliae
  misc_feature (1)..(407): tr|A0A3N6WMI4|A0A3N6WMI4_9ACTN Queuine tRNA-ribosyltran sferase OS=Aeromicrobium camelliae OX=1538144 GN=tgt PE =3 SV=1
MAWRDGTLDGVFTIGSRLDDAPGRSGVITTPHGQIRTPAFIPVGTRATVKAVLPEHMAELGAQALLANAYHLYLQPGSDIVDEAGGLGRFMNWPGPTFTDSGGFQVMSLGVGFKKTLSMDSSRATADDVIASGKERLAHVDDDGVTFKSHLDGSTHRFTPEISMRIQHELGADIIFAFDELTTLMNTRGYQEEALARTQAWAQRCVVEHERLTRERSDKPYQALFGVVQGAQYEDLRRKAARDLASLPFDGFGIGGAIEKENLGTICRWVVEELPEDKPRHLLGIGEPDDFFAGVENGCDTFDCVGPSRVARSSRVYTRTGRYNLNVAASRRDFGPIDDECDCYTCAHYTKAYLHHLFKTNEMLSATLCTIHNERFTVRLVDDIRASIEDGTYWEFKAETLGRFYGA

SEQ ID NO: 51275 - protein, 401 aa, Aeromicrobium choanae
  misc_feature (1)..(401): tr|A0A1T4Z7A9|A0A1T4Z7A9_9ACTN Queuine tRNA-ribosyltran sferase OS=Aeromicrobium choanae OX=1736691 GN=tgt PE=3 SV=1
MFTVGSTLPDAPGRSGTIETPHGSIRTPAFIPVGTKATVKAVLPESISDLGGQAVLANAYHLYLQPGADIVEAAGGLGAFMNWHGPTFTDSGGFQVLSLGAGFKKTLAMDAVGAEADDVIAPGKDRLAHVDEDGVTFKSHLDGSKHRFTPEVSMGIQHQLGADIIFAFDELTTLMNSREYQEDSLRRTQAWAQRCLAEIERLRAAHPERPRQALFGVVQGAQHEDLRRQAARGLADLAFDGYGVGGAIEKENLGAIVRWVTDELPDDRPRHLLGIGEPEDLFAGVEAGCDTFDCVTPTRVARSSRVYSATGRYNLMVAASRRDFGPIEEGCDCYTCAHYTKAYLHHLFKANEYNAATLCSIHNERFFVRLVDSMRTAIEAGDFAALRTEWLGRYLAGQAAR

SEQ ID NO: 51276 - protein, 435 aa, Aeromicrobium erythreum
  misc_feature (1)..(435): tr|A0A0U4AXG9|A0A0U4AXG9_9ACTN Queuine tRNA-ribosyltran sferase OS=Aeromicrobium erythreum OX=2041 GN=tgt PE=3 SV=1
MTDSPTTTPPLFEVGARLGDRAGRTGTLTTAHGTIRTPAFVPVGTKATVEAVLPEAMAELGAQALLANAYHLYLQPGDDVVEEAGGLGRFMGWSGPTFTDSGGFQVMSLGAGFRKTLSMDSTSEAADVIATDKDRLAHVDDDGVTFRSHLDGSTHRFTPEVSMGIQHRLGADVIFAFDELTTLLDSRAYQEESLARTEAWAARCLAEHRRLSSLRRPQPGTLAGTPTGPARRPQPGTPAGPAGPALFGVVQGAQHEDLRRRAARHLAELEVDGTRFDGFGIGGAIEKENLATIVGWVTDELPDDKPRHLLGIGEPDDLFAAVEAGADTFDCVGPSRVARSSRVYTADGRENLLVARSRRRFEPIEDDCDCYTCAHYTRAYLHHLFKAKEYLAATLTTIHNERYVVRLVDRMRAALEDGTFDELRAETMGRIRSSR

SEQ ID NO: 51277 - protein, 397 aa, Aeromicrobium flavum
  misc_feature (1)..(397): tr|A0A512HQY8|A0A512HQY8_9ACTN Queuine tRNA-ribosyltran sferase OS=Aeromicrobium flavum OX=416568 GN=tgt PE=3 S V=1
MFTVGSTLPDAPGRSGTIETPHGAIRTPAFIPVGTKATVKAVLPESIVQLGGQAVLSNAYHLYLQPGADIVEEAGGLGAFMNWRGPTFTDSGGFQVLSLGAGFKKTLAMDAVGTEADDVIAPGKDRLAHVDDDGVTFKSHLDGSKHRFTPEVSMRIQHQLGADIIFAFDELTTLMNSREYQEDSLRRTQAWAERCLAEHQRLSAERADKPRQALYGVVQGAQHEDLRRQAARGLAGMDFDGYGVGGAIEKESLGTIVRWVTDELPDDRPRHLLGIGEPEDLFAGVEAGCDTFDCVTPTRVARSSRIYTADGRSNLMVAASRRDFGPIEEGCDCYTCAHYTKAYLHHLFKANEYNAATLCSIHNERFFIRLVDRMRDAIEAGDFAALRDEWLGRYLSK

SEQ ID NO: 51278 - protein, 400 aa, Aeromicrobium marinum
  misc_feature (1)..(400): tr|E2SAF5|E2SAF5_9ACTN Queuine tRNA-ribosyltransferase OS=Aeromicrobium marinum DSM 15272 OX=585531 GN=tgt PE= 3 SV=1
MFTVHHTANDSRARTGTLTTPHGEVRTPAFVPVGTRATVKAVLPEQMRELGAQALLANAYHLYLQPGSDVVDEAGGLGRFMNWPGPTFTDSGGFQVMSLGAGFKKTLAMDATGVTSDEVIAPGKERLAHVDDDGVTFKSHLDGSRHRFTPEISMRIQHELGADVIFAFDELTTLMNTRGYQEEALARTQAWAVRCVEEHRRLTEERVGKPYQALFGVVQGAQYEDLRRQAARDLVPLGFDGFGIGGAMEKENLGTIIGWVTEELPDDRPRHLLGIGEPDDLFTAVEAGCDTFDCVGPSRVARSSRMYGSDGQFNLKVAANKRNFDPIDAECDCYTCAHYSRAYLHHLFKTDEFIGNTLGTIHNERFIVRLVDRIREAVADGTYADLKAETLARYYPRRGQ

SEQ ID NO: 51279 - protein, 410 aa, Aeromicrobium sp.
  misc_feature (1)..(410): tr|A0A0Q7QFF2|A0A0Q7QFF2_9ACTN Queuine tRNA-ribosyltran sferase OS=Aeromicrobium sp. Root495 OX=1736550 GN=tgt PE=3 SV=1
MFTVGAELPDAAGRTGVLSTPHGDVQTPAFIPVGTRATVKAVLPESVRELGAQAVLANAYHLYLQPGADIVEEGGGLARFMGWGGPTFTDSGGFQVMSLGAGFKKTLSMDSTSATSDTVIAPGKERLAHVDDDGVTFKSHLDGSKHRFTPEISMGIQHRLGADVIFAFDELTTLMNTRGYQEQSVERTHAWAERCLAEHDRLTVERSEHPYQALFGVVQGAQYEDLRRRAASGLAALEVEGRSFDGFGIGGAIEKEQLSEIVGWVVDELPRDKPRHLLGIGEPDDLFAGVEAGCDTFDCVGPSRTARSSRVYTADGHRNLLVAASRRDFGPIEDDCDCYTCTHYTTAYLHHLFKTKEFLSATLTTIHNERFIVRLVDSMRTAIASGDFAALKEESLGRFYARRSAGSSAQ

SEQ ID NO: 51280 - protein, 397 aa, Aeromicrobium sp.
  misc_feature (1)..(397): tr|A0A200HBV3|A0A200HBV3_9ACTN Queuine tRNA-ribosyltran sferase OS=Aeromicrobium sp. PE09-221 OX=1898043 GN=tgt PE=3 SV=1
MFSIDHRIEDAPGRSGVITTPHGQIRTPAFIPVGTRATVKSVLPESMAELGAQALLANAYHLYLQPGADIVDEAGGLGRFMNWPGPTFTDSGGFQVMSLGVGFKKTLSMDSTRVARDDVIAKGKERLAHVDDDGVTFKSHLDGSRHRFTPEVSMRIQHQLGADIIFAFDELTTLMNTRGYQEESLARTQAWAERCIAEHEKLTRERADKPYQALFGVVQGAQYEDLRRKAARDLAGLPFDGFGIGGAIEKENLGTICRWVVDELPEDKPRHLLGIGEPDDFFEGIENGADTFDCVTPSRVARSSRVYTRRGRYNLDVAASRRDFSPIDDACDCYTCAHYTKAYLHHLFKTNEMLSATLCTIHNERFMVKLVDDIRASIDDGTYHAFKADTLGRFYGP

SEQ ID NO: 51281 - protein, 378 aa, Aeromonas allosaccharophila
  misc_feature (1)..(378): tr|A0A0T6U0G9|A0A0T6U0G9_9GAMM Queuine tRNA-ribosyltran sferase OS=Aeromonas allosaccharophila OX=656 GN=tgt PE =3 SV=1
MKFELKTTDGRARRGQLVFERGVVQTPAFMPVGTYGTVKGMTPEEVRESGAQILLGNTFHLWLRPGQEVMRAHGDLHDFMNWQGPILTDSGGFQVFSLGDIRKITEAGVHFRHPINGEKIFLDPEKSMEIQYDLGSDIVMIFDECTPYPATYEEARKSMEMSLRWGKRSRDKFDALGNKNALFGIIQGSVYEDLRDVSLNGLLEIGFDGYAVGGLAVGEPKEDMHRILEHVCPKIPADKPRYLMGVGKPEDLVEGVRRGIDMFDCVMPTRNARNGHLFTTDGVVKIRNAKYRNDTSTLDADCDCYTCKNYTRSYLYHLDKCNEILGARLNTIHNLRYYQRVMQGLRDAIEQGKLDDFVTEFYRRQGKPVPPLAEKDVK

SEQ ID NO: 51282 - protein, 378 aa, Aeromonas cavernicola
  misc_feature (1)..(378): tr|A0A2H9U5Z2|A0A2H9U5Z2_9GAMM Queuine tRNA-ribosyltran sferase OS=Aeromonas cavernicola OX=1006623 GN=tgt PE=3 SV=1
MKFELKTTDGRARRGQLVFDRGVVQTPAFMPVGTYGTVKGMTPEEVRESGAQILLGNTFHLWLRPGQEVMRAHGDLHDFMNWQGPILTDSGGFQVFSLGDIRKITEEGVHFRHPINGEKIFLDPEKSMEIQYDLGSDIVMIFDECTPYPATYEEARKSMEMSLRWAKRSRDKFDALGNKNALFGIIQGSVYEPLRDVSLNGLLEIGFDGYAVGGLAVGEPKEDMHRILEHVCPQIPADKPRYLMGVGKPEDLVEGVRRGIDMFDCVMPTRNARNGHLFTTDGVVKIRNAKYRSDTSPLDADCDCYTCQHYSRSYLHHLDKCNEILGARLNTIHNLRYYQRVMQGLRDAIEQGKLNDFVTEFYRRQGKPVPPLAENDVK

SEQ ID NO: 51283 - protein, 378 aa, Aeromonas caviae
  misc_feature (1)..(378): tr|A0A2X4NF47|A0A2X4NF47_AERCA Queuine tRNA-ribosyltran sferase OS=Aeromonas caviae OX=648 GN=tgt PE=3 SV=1
MKFELKTTDGRARRGQLVFERGVVQTPAFMPVGTYGTVKGMTPEEVRETGAQILLGNTFHLWLRPGQEVMRAHGDLHDFMNWQGPILTDSGGFQVFSLGHIRKITEEGVHFRHPINGEKIFLDPEKSMEIQYDLGSDIVMIFDECTPYPATYEEARKSMEMSLRWAKRSRDKFDALGNKNALFGIIQGSVYEPLRDVSLDGLLEIGFDGYAVGGLAVGEPKEDMHRILDHVCPKIPADKPRYLMGVGKPEDLVEGVRRGIDMFDCVMPTRNARNGHLFTTDGVVKIRNAKYREDTSTLDADCDCYTCKNYTRSYLYHLDKCNEILGARLNTIHNLRYYQRVMQGLRDAIEQGKLDDFVTEFYRRQGKPVPPLAENDVK

SEQ ID NO: 51284 - protein, 378 aa, Aeromonas caviae
  misc_feature (1)..(378): tr|A0A443VYU5|A0A443VYU5_AERCA Queuine tRNA-ribosyltran sferase OS=Aeromonas caviae OX=648 GN=tgt PE=3 SV=1
MKFELKTTDGRARRGQLVFERGVVQTPAFMPVGTYGTVKGMTPEEVRETGAQILLGNTFHLWLRPGQEVMRAHGDLHDFMNWQGPILTDSGGFQVFSLGHIRKITEEGVHFRHPINGEKIFLDPEKSMEIQYDLGSDIVMIFDECTPYPATYEEARKSMEMSLRWAKRSRDKFDALGNKNALFGIIQGSVYEPLRDVSLDGLLEIGFDGYAVGGLAVGEPKEDMHRILDHVCPKIPADKPRYLMGVGKPEDLVEGVRRGIDMFDCVMPTRNARNGHLFTTDGVVKIRNAKYREDTSTLDADCDCYTCKNYTRSYLYHLDKCNEILGARLNTIHNLRYYQRVMQGLRDAIEQGKLDDFVTEFYRRQGKPVPPLAENGVK

SEQ ID NO: 51285 - protein, 378 aa, Aeromonas dhakensis
  misc_feature (1)..(378): tr|K1JHF4|K1JHF4_9GAMM Queuine tRNA-ribosyltransferase OS=Aeromonas dhakensis OX=196024 GN=tgt PE=3 SV=1
MKFELKTTDGRARRGQLVFERGTVQTPAFMPVGTYGTVKGMTPEEVRETGAQILLGNTFHLWLRPGQEVMRAHGDLHDFMNWQGPILTDSGGFQVFSLGHIRKITEAGVHFRHPINGEKIFLDPEKSMEIQYDLGSDIVMIFDECTPYPATYEEARKSMEMSLRWGKRSRDKFDALGNKNALFGIIQGSVYEDLRDVSLAGLLEIGFDGYAVGGLAVGEPKEDMHRILEHVCPKIPADKPRYLMGVGKPEDLVEGVRRGIDMFDCVMPTRNARNGHLFTTDGVVKIRNAKYREDTSTLDADCDCYTCKNYTRSYLYHLDKCNEILGARLNTIHNLRYYQRVMQGLRDAIEQGKLDDFVTEFYRRQGKPVPPLAENDVK

SEQ ID NO: 51286 - protein, 378 aa, Aeromonas diversa
  misc_feature (1)..(378): tr|N9VJC1|N9VJC1_9GAMM Queuine tRNA-ribosyltransferase OS=Aeromonas diversa CDC 2478-85 OX=1268237 GN=tgt PE=3 SV=1
MKFELKTTDGRARRGQLVFERGTVQTPAFMPVGTYGTVKGMTPEEVRQSGAEILLGNTFHLWLRPGQEVMRLHGDLHDFMNWHGPILTDSGGFQVFSLGDIRKITEEGVTFRHPINGDKIFLSPEKSMEIQYDLGSDIVMIFDECTPYPATYEEARKSMEMSLRWAKRSRQRFNELGNKNALFGIIQGSVYEPLRDVSLDGLLEIGFDGYAVGGLAVGEPKEDMHRILEHVCPKIPADKPRYLMGVGKPEDLVEGVRRGIDMFDCVMPTRNARNGHLFTTDGVVKIRNAKHKDDTSPLDAECDCYTCQNYSRSYLHHLDKCNEILGARLNTIHNLRYYQRVMQGLRDAIEQGKLDDFVTEFYRRQGKPVPPLAEAATE

SEQ ID NO: 51287 - protein, 378 aa, Aeromonas encheleia
  misc_feature (1)..(378): tr|A0A3S4SSB3|A0A3S4SSB3_9GAMM Queuine tRNA-ribosyltran sferase OS=Aeromonas encheleia OX=73010 GN=tgt PE=3 SV= 1
MKFELKTTDGRARRGQLVFERGVVQTPAFMPVGTYGTVKGMTPEEVRETGAQILLGNTFHLWLRPGQAVMRAHGDLHDFMNWQGPILTDSGGFQVFSLGHIRKITEAGVHFRHPINGEKIFLDPEKSMEIQYDLGSDIVMIFDECTPYPATYEEARKSMEMSLRWGKRSRDKFDALGNKNALFGIIQGSVYEELRDVSLNGLLEIGFDGYAVGGLAVGEPKEDMHRILEHVCPKIPADKPRYLMGVGKPEDLVEGVRRGVDMFDCVMPTRNARNGHLFTTNGVVKIRNAKYREDTSTLDADCDCYTCKNYTRSYLYHLDKCNEILGARLNTIHNLRYYQRVMQGLRDAIEQGKLDDFVTEFYRRQGKPVPPIAENDVK

SEQ ID NO: 51288 - protein, 378 aa, Aeromonas enteropelogenes
  misc_feature (1)..(378): tr|A0A175VKN0|A0A175VKN0_AEREN Queuine tRNA-ribosyltran sferase OS=Aeromonas enteropelogenes OX=29489 GN=tgt PE =3 SV=1
MKFELKTTDGRARRGQLVFERGTVQTPAFMPVGTYGTVKGMTPEEVAETGAQILLGNTFHLWLRPGQEVMRAHGDLHDFMNWQGPILTDSGGFQVFSLGDIRKITEAGVHFRHPINGEKIFLDPEKSMEIQYDLGSDIVMIFDECTPYPATYEEARKSMEMSLRWAKRSRDKFDALGNKNALFGIIQGSVYEPLRDVSLDGLLEIGFDGYAVGGLAVGEPKEDMHRILEHVCPKIPADKPRYLMGVGKPEDLVEGVRRGIDMFDCVMPTRNARNGHLFTTDGVVKIRNAKHRDDTSTLDADCDCYTCKNYSRSYLHHLDKCNEILGARLNTIHNLRYYQRVMQGLRDAIEQGKLDDFVTEFYRRQGKPVPPLAENDVK

SEQ ID NO: 51289 - protein, 378 aa, Aeromonas hydrophila
  misc_feature (1)..(378): sp|A0KJ20|TGT_AERHH Queuine tRNA-ribosyltransferase OS= Aeromonas hydrophila subsp. hydrophila (strain ATCC 796 6 / DSM 30187 / JCM 1027 / KCTC 2358 / NCIMB 9240) OX=3 80703 GN=tgt PE=3 SV=1
MKFELKTTDGRARRGQLVFERGTVQTPAFMPVGTYGTVKGMTPEEVRETGAQILLGNTFHLWLRPGQEVMRAHGDLHDFMNWQGPILTDSGGFQVFSLGHIRKITEAGVHFRHPINGEKIFLDPEKSMEIQYDLGSDIVMIFDECTPYPATYEEARKSMEMSLRWGKRSRDKFDALGNKNALFGIIQGSVYEDLRDVSLDGLLEIGFDGYAVGGLAVGEPKEDMHRILEHVCPKIPADKPRYLMGVGKPEDLVEGVRRGIDMFDCVMPTRNARNGHLFTTDGVVKIRNAKYREDTSTLDADCDCYTCKNYTRSYLYHLDKCNEILGARLNTIHNLRYYQRVMQGLRDAIEQGKLDDFVTEFYRRQGKPVPPLAENDVK

SEQ ID NO: 51290 - protein, 378 aa, Aeromonas hydrophila; identical to SEQ ID NO: 51289
  misc_feature (1)..(378): tr|A0A347A7A7|A0A347A7A7_AERHY Queuine tRNA-ribosyltran sferase OS=Aeromonas hydrophila OX=644 GN=tgt PE=3 SV=1

SEQ ID NO: 51291 - protein, 378 aa, Aeromonas jandaei
  misc_feature (1)..(378): tr|A0A2S5FFW2|A0A2S5FFW2_AERJA Queuine tRNA-ribosyltran sferase OS=Aeromonas jandaei OX=650 GN=tgt PE=3 SV=1
MKFELKTTDGRARRGQLVFERGTVQTPAFMPVGTYGTVKGMTPEEVRETGAQILLGNTFHLWLRPGQEVMRAHGDLHDFMNWQGPILTDSGGFQVFSLGDIRKITEAGVHFRHPINGEKIFLDPEKSMEIQYDLGSDIVMIFDECTPYPATYEEARKSMEMSLRWAKRSRDKFDALGNKNALFGIIQGSVYEPLRDVSLEGLLEIGFDGYAVGGLAVGEPKEDMHRILEHVCPKIPADKPRYLMGVGKPEDLVEGVRRGIDMFDCVMPTRNARNGHLFTTDGVVKIRNAKYRNDTSTLDADCDCYTCKNYTRSYLHHLDKCNEILGARLNTIHNLRYYQRVMQGLRDAIEQGKLDDFVTEFYRRQGKPVPPLAVNDVK

SEQ ID NO: 51292 - protein, 378 aa, Aeromonas lusitana
  misc_feature (1)..(378): tr|A0A2M8HC69|A0A2M8HC69_9GAMM Queuine tRNA-ribosyltran sferase OS=Aeromonas lusitana OX=931529 GN=tgt PE=3 SV= 1
MKFELKTTDGRARRGQLVFERGVVQTPAFMPVGTYGTVKGMTPEEVRETGAQILLGNTFHLWLRPGQAVMRAHGDLHDFMNWQGPILTDSGGFQVFSLGHIRKITEAGVHFRHPINGEKIFLDPEKSMEIQYDLGSDIVMIFDECTPYPATYEEARKSMEMSLRWGKRSREKFDALGNKNALFGIIQGSVYEELRDVSLDGLLEIGFDGYAVGGLAVGEPKEDMHRILEHVCPKIPADKPRYLMGVGKPEDLVEGVRRGVDMFDCVMPTRNARNGHLFTTDGVVKIRNAKYREDTSTLDADCDCYTCKNYTRSYLYHLDKCNEILGARLNTIHNLRYYQRVMQGLRDAIEQGKLDDFVTEFYRRQGKPVPPLAENDVK

SEQ ID NO: 51293 - protein, 378 aa, Aeromonas media
  misc_feature (1)..(378): tr|A0A023RKV5|A0A023RKV5_AERME Queuine tRNA-ribosyltran sferase OS=Aeromonas media WS OX=1208104 GN=tgt PE=3 SV =1
MKFELKTTDGRARRGQLVFERGVVQTPAFMPVGTYGTVKGMTPEEVRETGAQILLGNTFHLWLRPGQAVMRAHGDLHDFMNWQGPILTDSGGFQVFSLGHIRKITEAGVHFRHPINGEKIFLDPEKSMEIQYDLGSDIVMIFDECTPYPATYEEARKSMEMSLRWAKRSREKFDALGNKNALFGIIQGSVYEPLRDVSLDGLLEIGFDGYAVGGLAVGEPKEDMHRILDHVCPKIPADKPRYLMGVGKPEDLVEGVRRGIDMFDCVMPTRNARNGHLFTTDGVVKIRNAKYREDTSTLDADCDCYTCKNYTRSYLYHLDKCNEILGARLNTIHNLRYYQRVMQGLRDAIEQGKLDDFVTEFYRRQGKPVPPLTENDVK

SEQ ID NO: 51294 - protein, 378 aa, Aeromonas molluscorum
  misc_feature (1)..(378): tr|R1GUE5|R1GUE5_9GAMM Queuine tRNA-ribosyltransferase OS=Aeromonas molluscorum 848 OX=1268236 GN=tgt PE=3 SV= 1
MKFELKTTDGRARRGQLVFERGVVQTPAFMPVGTYGTVKGMTPEEVRETGAEILLGNTFHLWLRPGQAVMRAHGDLHDFMNWQGPILTDSGGFQVFSLGHIRKITEAGVHFRHPINGEKIFLDPEKSMEIQYDLGSDIVMIFDECTPYPATYEEARKSMEMSLRWGKRSRDKFDALGNKNALFGIIQGSVYEELRDVSLNGLLEIGFDGYAVGGLAVGEPKEDMHRILEHVCPKIPADKPRYLMGVGKPEDLVEGVRRGVDMFDCVMPTRNARNGHLFTTDGVVKIRNAKYREDTSTLDADCDCYTCKNYTRSYLYHLDKCNEILGARLNTIHNLRYYQRVMQGLRDAIEQGKLDDFVTEFYRRQGKAVPPLAEENVQ

SEQ ID NO: 51295 - protein, 378 aa, Aeromonas rivipollensis
  misc_feature (1)..(378): tr|A0A2P1PGH5|A0A2P1PGH5_9GAMM Queuine tRNA-ribosyltran sferase OS=Aeromonas rivipollensis OX=948519 GN=tgt PE= 3 SV=1
MKFELKTTDGRARRGQLVFERGVVQTPAFMPVGTYGTVKGMTPEEVRETGAQILLGNTFHLWLRPGQAVMRAHGDLHDFMNWQGPILTDSGGFQVFSLGHIRKITEAGVHFRHPINGEKIFLDPEKSMEIQYDLGSDIVMIFDECTPYPATYEEARKSMEMSLRWAKRSRDKFDALGNKNALFGIIQGSVYEPLRDVSLDGLLEIGFDGYAVGGLAVGEPKEDMHRILDHVCPKIPADKPRYLMGVGKPEDLVEGVRRGIDMFDCVMPTRNARNGHLFTTDGVVKIRNAKYREDTSTLDADCDCYTCKNYTRSYLYHLDKCNEILGARLNTIHNLRYYQRVMQGLRDAIEQGKLDDFVTEFYRRQGKPVPPLTENDVK

SEQ ID NO: 51296 - protein, 378 aa, Aeromonas salmonicida
  misc_feature (1)..(378): sp|A4SP26|TGT_AERS4 Queuine tRNA-ribosyltransferase OS= Aeromonas salmonicida (strain A449) OX=382245 GN=tgt PE =3 SV=1
MKFELKTTDGRARRGQLVFERGTVQTPAFMPVGTYGTVKGMTPEEVRETGAEILLGNTFHLWLRPGQEVMRAHGDLHDFMNWQGPILTDSGGFQVFSLGHIRKITEAGVHFRHPINGEKIFLDPEKSMEIQYDLGSDIVMIFDECTPYPATYEEARKSMEMSLRWGKRSRDKFDALGNKNALFGIIQGSVYEELRDVSLNGLLEIGFDGYAVGGLAVGEPKEDMHRILEHVCPKIPADKPRYLMGVGKPEDLVEGVRRGVDMFDCVMPTRNARNGHLFTTDGVVKIRNAKYRSDTSTLDADCDCYTCKNYTRSYLYHLDKCNEILGARLNTIHNLRYYQRVMQGLRDAIEQGKLDDFVTEFYRRQGKPVPPLAENDVK

SEQ ID NO: 51297 - protein, 378 aa, Aeromonas salmonicida
  misc_feature (1)..(378): tr|T0QY19|T0QY19_AERSA Queuine tRNA-ribosyltransferase OS=Aeromonas salmonicida subsp. pectinolytica 34mel OX= 1324960 GN=tgt PE=3 SV=1
MKFELKTTDGRARRGQLVFERGVVQTPAFMPVGTYGTVKGMTPEEVRETGAEILLGNTFHLWLRPGQEVMRAHGDLHDFMNWQGPILTDSGGFQVFSLGHIRKITEAGVHFRHPINGEKIFLDPEKSMEIQYDLGSDIVMIFDECTPYPATYEEARKSMEMSLRWGKRSRDKFDALGNKNALFGIIQGSVYEELRDVSLNGLLEIGFDGYAVGGLAVGEPKEDMHRILEHVCPKIPADKPRYLMGVGKPEDLVEGVRRGVDMFDCVMPTRNARNGHLFTTDGVVKIRNAKYRSDTSTLDADCDCYTCKNYTRSYLYHLDKCNEILGARLNTIHNLRYYQRVMQGLRDAIEQGKLDDFVTEFYRRQGKPVPPLAENDVK

SEQ ID NO: 51298 - protein, 378 aa, Aeromonas schubertii
  misc_feature (1)..(378): tr|A0A0W7U2B5|A0A0W7U2B5_9GAMM Queuine tRNA-ribosyltran sferase OS=Aeromonas schubertii OX=652 GN=tgt PE=3 SV=1
MKFELKTTDGRARRGQLVFERGTVQTPAFMPVGTYGTVKGMTPEEVRQSGAEILLGNTFHLWLRPGQEVMRLHGDLHDFMNWHGPILTDSGGFQVFSLGDIRKITEEGVTFRHPINGDKIFLSPEKSMEIQYDLGSDIVMIFDECTPYPATYEEARKSMEMSLRWAKRSRQRFDELGNKNALFGIIQGSVYEPLRDVSLDGLLEIGFDGYAVGGLAVGEPKEDMHRILEHVCPKIPADKPRYLMGVGKPEDLVEGVRRGIDMFDCVMPTRNARNGHLFTTDGVVKIRNAKHKDDTSPLDAECDCYTCQNYSRSYLHHLDKCNEILGARLNTIHNLRYYQRVMQGLRDAIEQGKLDDFVTEFYRRQGKPVPPLAEAATE

SEQ ID NO: 51299 - protein, 378 aa, Aeromonas schubertii
  misc_feature (1)..(378): tr|A0A0S2SDT4|A0A0S2SDT4_9GAMM Queuine tRNA-ribosyltran sferase OS=Aeromonas schubertii OX=652 GN=tgt PE=3 SV=1
MKFELKTTDGRARRGQLVFERGTVQTPAFMPVGTYGTVKGMTPEEVRQSGAEILLGNTFHLWLRPGQEVMRLHGDLHDFMNWHGPILTDSGGFQVFSLGDIRKITEEGVTFRHPINGDKIFLSPEKSMEIQFDLGSDIVMIFDECTPYPATYEEARKSMEMSLRWAKRSRQRFDELGNKNALFGIIQGSAYEPLRDVSLDGLLEIGFDGYAVGGLAVGEPKEDMHRILEHVCPKIPADKPRYLMGVGKPEDLVEGVRRGIDMFDCVMPTRNARNGHLFTTDGVVKIRNAKHKDDTSPLDAECDCYTCQNYSRSYLHHLDKCNEILGARLNTIHNLRYYQRVMQGLRDAIEQGKLDDFVTEFYRRQGKPVPPLAEAATE

SEQ ID NO: 51300 - protein, 378 aa, Aeromonas simiae
  misc_feature (1)..(378): tr|A0A5J6WYU8|A0A5J6WYU8_9GAMM tRNA guanosine(34) trans glycosylase Tgt OS=Aeromonas simiae OX=218936 GN=tgt PE =4 SV=1
MKFELKTTDGRARRGQLVFERGTVQTPAFMPVGTYGTVKGMTPEEVAETGAQILLGNTFHLWLRPGQDVMRKHGDLHDFMNWHGPILTDSGGFQVFSLGDIRKITEEGVTFRHPINGDKIFLSPEKSMEIQYDLGSDIVMIFDECTPYPATYEEARKSMEMSLRWAKRSRERFNELGNKNALFGIIQGSVYEPLRDVSLDGLLEIGFDGYAVGGLAVGEPKEDMHRILEHVCPKIPADKPRYLMGVGKPEDLVEGVRRGIDMFDCVMPTRNARNGHLFTTDGVVKIRNAKHREDTSPLDAECDCYTCQNYSRSYLHHLDKCNEILGARLNTIHNLRYYQRVMQGLRDAIEQGKLDDFVTEFYRRQGKPVPPLAEAASE

SEQ ID NO: 51301 - protein, 378 aa, Aeromonas sobria
  misc_feature (1)..(378): tr|A0A2N3J3D2|A0A2N3J3D2_AERSO Queuine tRNA-ribosyltran sferase OS=Aeromonas sobria OX=646 GN=tgt PE=3 SV=1
MKFELKTTDGRARRGQLVFERGTVQTPAFMPVGTYGTVKGMTPEEVRETGAQILLGNTFHLWLRPGQEVMRAHGDLHDFMNWQGPILTDSGGFQVFSLGHIRKITEAGVHFRHPINGEKIFLDPEKSMEIQYDLGSDIVMIFDECTPYPATYEEARKSMEMSLRWGKRSRDKFDALGNKNALFGIIQGSVYEELRDVSLNGLLEIGFDGYAVGGLAVGEPKEDMHRILEHVCPKIPADKPRYLMGVGKPEDLVEGVRRGVDMFDCVMPTRNARNGHLFTTDGVVKIRNAKYRTDTSTLDADCDCYTCKNYTRSYLYHLDKCNEILGARLNTIHNLRYYQRVMQGLRDAIEQGKLDDFVTEFYRRQGKPVPPLAENDVK

SEQ ID NO: 51302 - protein, 378 aa, Aeromonas sobria
  misc_feature (1)..(378): tr|A0A2N3IW81|A0A2N3IW81_AERSO Queuine tRNA-ribosyltran sferase OS=Aeromonas sobria OX=646 GN=tgt PE=3 SV=1
MKFELKTTDGRARRGQLVFERGTVQTPAFMPVGTYGTVKGMTPEEVRETGAQILLGNTFHLWLRPGQEVMRAHGDLHDFMNWQGPILTDSGGFQVFSLGHIRKITEAGVHFRHPINGEKIFLDPEKSMEIQYDLGSDIVMIFDECTPYPATYEEARKSMEMSLRWGKRSRDKFDALGNKNALFGIIQGSVYEELRDVSLNGLLEIGFDGYAVGGLAVGEPKEDMHRILEHVCPKIPADKPRYLMGVGKPEDLVEGVRRGVDMFDCVMPTRNARNGHLFTTDGVVKIRNAKYRTDTSTLDADCDCYTCKNYTRSYLYHLDKCNEILGARLNTIHNLRYYQRVMQGLRDAIEQGKLDDFVTEFYRRQGKPVPPLVENDVK

SEQ ID NO: 51303 - protein, 378 aa, Aeromonas sp.
  misc_feature (1)..(378): tr|A0A291TIH7|A0A291TIH7_9GAMM Queuine tRNA-ribosyltran sferase OS=Aeromonas sp. CU5 OX=2033033 GN=tgt PE=3 SV= 1
MKFELKTTDGRARRGQLVFERGTVQTPAFMPVGTYGTVKGMTPEEVRETGAEILLGNTFHLWLRPGQEVMRAHGDLHDFMNWQGPILTDSGGFQVFSLGDIRKITEAGVHFRHPINGEKIFLDPEKSMEIQYDLGSDIVMIFDECTPYPVSYEDARKSMEMSLRWGKRSRDKFDALGNKNALFGIIQGSVYEELRDVSLNGLLEIGFDGYAVGGLAVGEPKEDMHRILEHVCPKIPADKPRYLMGVGKPEDLVEGVRRGVDMFDCVMPTRNARNGHLFTTDGVVKIRNAKYRTDTSTLDADCDCYTCKNYTRSYLYHLDKCNEILGARLNTIHNLRYYQRVMQGLRDAIEQGKLDDFVTEFYRRQGKPVPPLAENDVK

SEQ ID NO: 51304 - protein, 378 aa, Aeromonas sp.; identical to SEQ ID NO: 51284
  misc_feature (1)..(378): tr|A0A369SV59|A0A369SV59_9GAMM Queuine tRNA-ribosyltran sferase OS=Aeromonas sp. ARM81 OX=1747384 GN=tgt PE=3 S V=1

SEQ ID NO: 51305 - protein, 378 aa, Aeromonas taiwanensis
  misc_feature (1)..(378): tr|A0A5F0KDG4|A0A5F0KDG4_9GAMM Queuine tRNA-ribosyltran sferase OS=Aeromonas taiwanensis OX=633417 GN=tgt PE=3 SV=1
MKFELKTTDGRARRGQLVFERGTVQTPAFMPVGTYGTVKGMTPEEVRDTGAQILLGNTFHLWLRPGQEVMRAHGDLHDFMNWQGPILTDSGGFQVFSLGHIRKITEEGVHFRHPINGEKIFLDPEKSMEIQYDLGSDIVMIFDECTPYPATYEEARKSMEMSLRWAKRSRDKFDALGNKNALFGIIQGSVYEPLRDVSLDGLLEIGFDGYAVGGLAVGEPKEDMHRILEHVCPRIPADKPRYLMGVGKPEDLVEGVRRGIDMFDCVMPTRNARNGHLFTTDGVVKIRNAKYREDTSTLDADCDCYTCKNYTRSYLYHLDKCNEILGARLNTIHNLRYYQRVMQGLRDAIEQGKLDDFVTEFYRRQGKPVPPLAENDVK

SEQ ID NO: 51306 - protein, 378 aa, Aeromonas veronii
  misc_feature (1)..(378): tr|A0A0E2LJY8|A0A0E2LJY8_9GAMM Queuine tRNA-ribosyltran sferase OS=Aeromonas veronii Hm21 OX=1347420 GN=tgt PE= 3 SV=1
MKFELKTTDGRARRGQLVFERGVVQTPAFMPVGTYGTVKGMTPEEVRETGAQILLGNTFHLWLRPGQEVMRAHGDLHDFMNWQGPILTDSGGFQVFSLGHIRKITEAGVHFRHPINGEKIFLDPEKSMEIQYDLGSDIVMIFDECTPYPATYEEARKSMEMSLRWGKRSRDKFDALGNKNALFGIIQGSVYEDLRDVSLKGLLEIGFDGYAVGGLAVGEPKEDMHRILEHVCPKIPADKPRYLMGVGKPEDLVEGVRRGIDMFDCVMPTRNARNGHLFTTDGVVKIRNAQHRNDTSTLDAECDCYTCKNYSRSYLHHLDKCNEILGARLNTIHNLRYYQRVMQGLRDAIEQGKLDDFVTEFYRRQGKPVPPLAENDVK

SEQ ID NO: 51307 - protein, 378 aa, Aeromonas veronii; identical to SEQ ID NO: 51283
  misc_feature (1)..(378): tr|A0A494TUN7|A0A494TUN7_9GAMM Queuine tRNA-ribosyltran sferase OS=Aeromonas veronii OX=654 GN=tgt PE=3 SV=1

SEQ ID NO: 51308 - protein, 343 aa, Aestuariibacter sp.
  misc_feature (1)..(343): tr|A0A2D6XW84|A0A2D6XW84_9ALTE Queuine tRNA-ribosyltran sferase (Fragment) OS=Aestuariibacter sp. OX=1872400 GN =CL531_02925 PE=3 SV=1
  misc_feature (79)..(79): Xaa can be any naturally occurring amino acid
MQFELLHTDGKARRGRLVFERGVVETPAFMPVGTYGTVKGMTPEELEDSGAHICLGNTFHLMLRPGTGIIKQHGDLHDXMHWDKPILTDSGGFQVFSLGDLRKITEEGVTFRSPINGEKILLTPEKSMEVQRDLGSDIVMIFDECTPYPATEQEARISMELSLRWAKRSKDAHGDNPSALFGIIQGGMYEDLRDVSLAGLEDIGFDGYAIGGLSVGEPKDDMIRIINHTAPKIPENKPRYLMGVGKPEDIVEAVRRGIDMFDCVMPTRNARNGHLFVTEGVIKIRNAKHKHDTGPLDENCDCYTCKNYSRSYLHHLDKCNEILGARLNTIHNLRYYQRVMQGL

SEQ ID NO: 51309 - protein, 370 aa, Aestuariibacter sp.
  misc_feature (1)..(370): tr|A0A506RT91|A0A506RT91_9ALTE Queuine tRNA-ribosyltran sferase OS=Aestuariibacter sp. GS-14 OX=2590670 GN=tgt PE=3 SV=1
MQFELLHTDGKARRGRLVFERGVVETPAFMPVGTYGTVKGMTPEELEDSGAHICLGNTFHLMLRPGTGIIKQHGDLHDFMHWEKPILTDSGGFQVFSLGDLRKITEEGVTFRSPINGEKILLTPEKSMEVQRDLGSDIVMIFDECTPYPATEQEARISMELSLRWAKRSKEAHGDNPSALFGIIQGGMFEDLRDVSLAGLEDIGFDGYAIGGLSVGEPKEDMIRIINHTAPKIPENKPRYLMGVGKPEDIVEAVRRGIDMFDCVMPTRNARNGHLFVTEGVIKIRNAKHKNDTGPLDEKCDCYTCKNYSRSYLHHLDKCNEILGARLNTIHNLRYYQRVMQGLRDAIASDSLDAFVEEFYAQKNMPVPAL

SEQ ID NO: 51310 - protein, 375 aa, Aestuariispira insulae
  misc_feature (1)..(375): tr|A0A3D9HXU9|A0A3D9HXU9_9PROT Queuine tRNA-ribosyltran sferase OS=Aestuariispira insulae OX=1461337 GN=tgt PE= 3 SV=1
MPDFGFDLLGTDGQARRGRVTTAHGTIETPAFMPVGTAATVKAMFPEDVAKTGAEIVLGNTYHLMLRPTAERIAELGGLHKFMNWSKPILTDSGGYQVMSLTELRKLTEEGVRFRSHIDGSYHMLTPERSTEIQHLLGSTITMAFDECTPYPCTKEEAEKSMELSMRWAVRSRDAFVKREGYGQFGIVQGSVHEDLRLRSIEALNGIDFEGYAVGGLAVGEGQELMFSTLDFTTPAMKTDKPRYLMGVGKPTDLVGAVARGIDMFDCVLPTRSGRNAQAFTRRGPVNMKNARHATDHRPLDEECPCPACTQYSRAYLHHLIKAGEILGMMLLSWHNIQYYQQLMQGMRDAIEAGSFEDFQAAFLEEYNGGDIAPL

SEQ ID NO: 51311 - protein, 380 aa, Aestuariivirga litoralis
  misc_feature (1)..(380): tr|A0A2W2ATL5|A0A2W2ATL5_9RHIZ Queuine tRNA-ribosyltran sferase OS=Aestuariivirga litoralis OX=2650924 GN=tgt P E=3 SV=1
MTLQEKTPEFGFTLHGTDGTARLGTVHTLHGDIRTPAFMPVGTVGTVKGLYLDQVEGTGADIILGNTYHLMLRPGAEEVAKLGGLHHFIGWKRPILTDSGGFQIMSLSKIRKITEQSAMFQSHIDGRKYELSPERAMEIQRLLGSDIQMQLDQCIQYPHTEKEAEKAMQLSLRWAERSRKAFGRQPGRGNFGIVQGGINPKLRKESAEGLKSIGFEGYAIGGLAVGEGHELMLQAIEHTIPHLPEDRPRYLMGVGTPEDILESVARGIDMFDCVLPTRSGRHGQAFTRFGKINLRNAKHADDLRPLDPEHPCPALSRYSRAYLHHLIRSGELLGMMLLSWANIAYYQSLMQGIRAAISEGRFEDFRVATKEQWKRGDIPA

SEQ ID NO: 51312 - protein, 376 aa, Aestuariivita sp.
  misc_feature (1)..(376): tr|A0A2E0YJ37|A0A2E0YJ37_9RHOB Queuine tRNA-ribosyltran sferase OS=Aestuariivita sp. OX=1872407 GN=tgt PE=3 SV= 1
MKDKVSFVLKSQSGKARCGVIRTPRGEIRTPAFMPVGTGATVKAMMTDSVRATGADILLGNTYHLMLRPGAQRIANLGGLHQFMNWSRPILTDSGGFQVMSLAGLRKMSEHGVTFKSHIDGSCHELSPERSIEIQKLLGSDIAMVFDECTPFPATQEEARKSMKLSMRWAERSKDAFGDRLGHALFGIQQGSVYPDQRAESAVALTDIGFDGYAIGGLAVGEGQEAMFDVLEYAPDMLPFDKPRYLMGVGKPDDIVGAVKRGIDMMDCVLPSRSGRTGQVFTRRGVVNIKNARHQDDPRPLDEDCTCPACRNYSRAYLHHVFKSQEMISGMLLTWHNLHYFQELMSNMRSAIAEDKFDIFEKFFHNSRVNGDIEQL

SEQ ID NO: 51313 - protein, 372 aa, Afifella marina
  misc_feature (1)..(372): tr|A0A1G5NI93|A0A1G5NI93_AFIMA Queuine tRNA-ribosyltran sferase OS=Afifella marina DSM 2698 OX=1120955 GN=tgt P E=3 SV=1
MTEFSFTLQARDGNARRGTISMPRGLIRTPAFMPVGTQATVKAMYPEQVRELGADIVLGNTYHLMLRPGAERVARLGGLHSFMRWPHPILTDSGGFQVMSLAQLTKLDEDGVTFKSHVDGSTHRLTPERSVEIQGLLGADITMQLDECLKLPADYSEVERAMELSLRWGERSKAAFGGEPGRALFGIVQGGDQPDLRLRSAEGLRRIGFHGYAVGGLAVGEPQAIMLEILQETVPALPDEAPRYLMGVGTPEDILLSIARGIDMFDCVMPTRAGRHGQAFTRYGRLNMRNAKHTEDLRPLDPSSDCPAARDYSRAYLHHLFRTQETLGAMLLTWSNLAYYQTLMKEARQAISEGRYTDYVAEVRENWERGEP

SEQ ID NO: 51314 - protein, 377 aa, Afipia broomeae
  misc_feature (1)..(377): tr|K8P658|K8P658_9BRAD Queuine tRNA-ribosyltransferase OS=Afipia broomeae ATCC 49717 OX=883078 GN=tgt PE=3 SV= 1
MSVPNYFKLLGRDGEARTGELTTPHGVVRTPAFMPVGTAGAMKGIHWRDIRETGADIVLGNTYHLMLRPGAERIAALGGLQAFTTWNGPMLTDSGGFQVMSLAKIRKVTEHAVTFSSHIDGTKVELSPERAIEVQRLLGSDIAMQLDECVRLPAERTEIERAMQLSIRWAERSKRAFETAPPGYMLFGIAQGGDVPELRRESTLSLIDIGFHGYAVGGLAVGEPQEVMLAMIEEVAPLLPQERPRYLMGVGTPDDMLEAVARGIDMFDCVMPTRNGRHGHVFTRHGVINLRNARHADDPRPLDEESGWRSTSGYSRAYLHHLVKSEEALGAMLLSEINVAYYQSLMSGARAAIAAGTFDDYRASVRAGWARGDIAPR

SEQ ID NO: 51315 - protein, 377 aa, Afipia broomeae
  misc_feature (1)..(377): tr|A0A2M8ZI00|A0A2M8ZI00_9BRAD Queuine tRNA-ribosyltran sferase OS=Afipia broomeae OX=56946 GN=tgt PE=3 SV=1
MSLPNHFDLVATDGAARTGRLTTPHGVVRTPAFMPVGTAGAMKGVHWREVRDAGADIVLGNTYHLMLRPGAERIAALGGLQVFTGWQGPMLTDSGGFQVMSLSELRKVSEAAVTFRSHIDGTKIELSPERSIEVQRLLGSDIAMQMDECVRLPAERDDIERAMQLSLRWAERSKRAFETAPPGYMLFGIAQGGDIPELRQASARGLVDIGFHGYAIGGLAVGEPQSVMLAMIEEVAPILPPDRPRYLMGVGTPDDLLEAVARGIDMFDCVMPTRNGRHGVAFTRFGQVNLRNARHADDPRPIDEESSWPSARNCSRAYLHHLVKSGETLGAMLLSEINIAYYQQLMHDIRNAVSEGRFADLREHIRAGWAKGDITAR

SEQ ID NO: 51316 - protein, 377 aa, Afipia clevelandensis
  misc_feature (1)..(377): tr|K8PLL7|K8PLL7_9BRAD Queuine tRNA-ribosyltransferase OS=Afipia clevelandensis ATCC 49720 OX=883079 GN=tgt PE =3 SV=1
MAVPNHFKLLGHDGEARTGVLTTPHGVVRTPAFMPVGTAGAMKSIHWRDIRETGADIVLGNTYHLMLRPGAERIASLGGLQTFTTWNGPMLTDSGGFQVMSLAKLRKVTEHAVTFSSHIDGSKVELSPERAIEVQRLLGSDIAMQLDECVRLPAERADIERAMLLSIRWAERSKRAFESAPEGYMLFGIVQGGDIPELRRDSAHRLIDIGFHGYAVGGLAVGEPQAVMLAMIEEVAPLLPQERPRYLMGVGTPDDMLEAIARGIDMFDCVMPTRNGRHGHVFTRHGIINLRNARHADDPRPLDEESHWRGARDYSRAYLHHLVKSEEALGAMLLSEINVAYYQTLMSGARAAIAAGTFDSYRASVRDGWARGDIAPR

SEQ ID NO: 51317 - protein, 458 aa, Afipia felis
  misc_feature (1)..(458): tr|A0A090MKN6|A0A090MKN6_AFIFE Queuine tRNA-ribosyltran sferase OS=Afipia felis OX=1035 GN=tgt PE=3 SV=1
MSVANHFRLLGSDGEARTGVLTTPHGAVRTPAFMPVGTAGAMKGIHWREIRETGADIVLGNTYHLMLRPTAERIAALGGLQKFTGWNGPMLTDSGGFQVMSLSKLRKVTEQGVRFKSHIDGAVLDLTPERAIEVQRLFGSDIAMQLDECVRLPATRAEVERAMQLSLRWAERSKRAFEGAPSGRMLFGIVQGGDIAELRRQSAVALGQIDFHGFAVGGLAVGEPQEVMLAMIEETAPLLPQDRPRYLMGVGTPDDMIEAVARGIDMFDCVLPTRNGRHGHAFTRRGVINLRNARHADDPRPLDEESPWPPARSYSRAYLHHLVKAGEALGAMLLSEINIAYFQTLMSGIREAICGGHVSRIFALQRKRAGRQATCRRGRHRFRSRLAVGRPDNPSAYAWSRNRGRRYRRSTDSSRCCRKRLRLQPPPWCRSRLRKSCARLRAERTARASGGFQRLPSS

SEQ ID NO: 51318 - protein, 377 aa, Afipia felis
  misc_feature (1)..(377): tr|A0A380W7T2|A0A380W7T2_AFIFE Queuine tRNA-ribosyltran sferase OS=Afipia felis OX=1035 GN=tgt PE=3 SV=1
MSVANHFKLLGRDGEARTGVLTTPHGEVRTPAFMPVGTAGAMKGIHWRDIRETGADIVLGNTYHLMLRPTAERIAALGGLQTFTGWKGPMLTDSGGFQVMSLSKLRKVTEQGVRFKSHIDGAVLDLTPERAIEVQRLFGSDIAMQLDECVRLPAPRGEVERAMQLSLRWAERCKRAFETAPPGHMLFGIVQGGDVAELRRRSAAALGEIGFHGYAVGGLAVGEPQEVMLAMIEEAAPLLPQDRPRYLMGVGTPDDMIEAVARGIDMFDCVLPTRNGRHGHAFTRRGVINLRNARHADDPRPLDEESPWLPARSYSRAYLHHLVKAGEALGAMLLSEINIAYFQTLMSDIRDAIAAGTFADFRAVTKAGWAAGDLPPR

SEQ ID NO: 51319 - protein, 377 aa, Afipia massiliensis
  misc_feature (1)..(377): tr|A0A4U6BUG1|A0A4U6BUG1_9BRAD Queuine tRNA-ribosyltran sferase OS=Afipia massiliensis OX=211460 GN=tgt PE=3 SV =1
MTVPNHFKLLGRDGEARTGELTTPHGVVRTPAFMPVGTAGAMKSIHWRDIRDTGADIVLGNTYHLMLRPGAERIAALGGLQKFTTWNGPMLTDSGGFQVMSLAKLRKVTEHAVTFSSHIDGTKVELSPERAIEVQRLLGSDIAMQLDECVRLPAERADIERAMQLSIRWAGRSKRAFETAPAGYMLFGIVQGGDIPELRRESTRALIDIGFHGYAVGGLAVGEPQAVMLAMIEEVAPILPQERPRYLMGVGTPDDMLEAVARGIDMFDCVMPTRNGRHGHVFTRHGVINLRNARHADDPRPLDEESAWRSANGYSRAYLHHLVKSEEALGAMLLSEVNVAYYQSLMTGARAAIAAGTYGDYRASVREGWARGDIAPR

SEQ ID NO: 51320 - protein, 377 aa, Afipia sp.
  misc_feature (1)..(377): tr|A0A1G9WY45|A0A1G9WY45_9BRAD Queuine tRNA-ribosyltran sferase OS=Afipia sp. GAS231 OX=1882747 GN=tgt PE=3 SV= 1
MTVPNHFELLATNGAARTGRLTTPHGVIRTPAFMPVGTAGAMKGLHWREVRDAGADIVLGNTYHLMLRPGAERIAALGGLQKFTGWNGPMLTDSGGFQVMSLSELRKVTEQAVTFRSHIDGAKVELSPERSIEVQRLLGSDIAMQMDECVRLPAERADIERAMQLSLRWAVRSKRAFESAPEGYMLFGIVQGGDIPQLRHASARGLVEIGFHGYAIGGLAVGEPQAVMLDMIEETAPELPADRPRYLMGVGTPEDLLEAVARGIDMFDCVMPTRNGRHGMAFTRFGQINLRNARHADDPRPLDEESAWPSARDYSRAYLHHLVRSGETLGAMLLSDINVAYYQHLMQGMRDAIAAGGFEDFKKQTRAGWARGDIAAR

SEQ ID NO: 51321 - protein, 377 aa, Afipia sp.
  misc_feature (1)..(377): tr|A0A2D6Z3M8|A0A2D6Z3M8_9BRAD Queuine tRNA-ribosyltran sferase OS=Afipia sp. OX=1871052 GN=tgt PE=3 SV=1
MSVPNHFKLLGRDGEARTGELTTPHGVVRTPAFMPVGTAGAMKGIHWRDIRETGADIVLGNTYHLMLRPGAERIAALGGLQAFTTWNGPMLTDSGGFQVMSLAKIRKVTEHAVTFSSHIDGTKVELSPERAIEVQRLLGSDIAMQLDECVRLPAERTEIERAMQLSIRWAERSKRAFETAPPGYMLFGIAQGGDVPELRRESTLALIDIGFHGYAVGGLAVGEPQEVMLAMIEEVAPLLPQERPRYLMGVGTPDDMLEAVARGIDMFDCVMPTRNGRHGHVFTRHGVINLRNARHADDPRPLDEESGWRSTSGYSRAYLHHLVKSEEALGAMLLSEINVAYYQSLMNGARAAIAAGTFDDYRASVRAGWARGDIAPR

SEQ ID NO: 51322 - protein, 374 aa, Agarivorans albus
  misc_feature (1)..(374): tr|R9PJB8|R9PJB8_AGAAL Queuine tRNA-ribosyltransferase OS=Agarivorans albus MKT 106 OX=1331007 GN=tgt PE=3 SV= 1
MKYELLAQDGKARRGRLVFERGSVETPAFMPVGTYGTVKGMTPEEVSATGAEILLGNTFHLWLRPGQEVMKAHGDLHDFMNWQGPILTDSGGFQVFSLGDIRNITEEGVHFRNPVNGDKIFLTPEKSMEIQNDLGSDVVMIFDECTPYPATEEEADKSMQMSLRWAARSRQRHDELENKNALFGIIQGGVYEHLRDVSLEGLTNIGFDGYAIGGLAVGEPKEDMHRILDYVAHKVPEDKPRYLMGVGKPEDLVEGVRRGVDMFDCVMPTRNARNGHLFTSEGVIKIRNARHREDTNTLDKECDCYTCQNYSRSYLHHLDKCNEILGARLNTIHNLRHYQRLMEGLRGAIAAGKLDDFVAEFYAKLGREVPPLAE

SEQ ID NO: 51323 - protein, 374 aa, Agarivorans sp.
  misc_feature (1)..(374): tr|A0A4D4IN06|A0A4D4IN06_9ALTE Queuine tRNA-ribosyltran sferase OS=Agarivorans sp. Toyoura001 OX=2283141 GN=tgt PE=3 SV=1
MKYQLLAQDGKARRGRLEFERGSVETPAFMPVGTYGTVKGMTPEEVSETGAEILLGNTFHLWLRPGQEVMKAHGDLHDFMNWQGPILTDSGGFQVFSLGDIRNITEEGVHFRNPVNGDKIFLTPEKSMEIQNDLGSDIVMIFDECTPYPATEAEADKSMQMSLRWAARSRQRHDELNNKNALFGIIQGGVYEHLRDVSLEGLTNIGFDGYAIGGLAVGEPKEDMHRILDYVAHKVPADKPRYLMGVGKPEDLVEGVRRGVDMFDCVMPTRNARNGHLFTGEGVVKIRNARHREDTNPLDKECDCYTCQNYSRSYLHHLDKCNEILGARLNTIHNLRYYQRVMEGIREAVAAGKFDDFVADFYAKLGREVPPLAE

SEQ ID NO: 51324 - protein, 380 aa, Agathobacter rectalis
  misc_feature (1)..(380): tr|C4ZAW9|C4ZAW9_AGARV Queuine tRNA-ribosyltransferase OS=Agathobacter rectalis (strain ATCC 33656 / DSM 3377 / JCM 17463 / KCTC 5835 / VPI 0990) OX=515619 GN=tgt PE =3 SV=1
MAKYELLKQEGRAKRGTFHTVHGDIQTPVFMNVGTVGAIKGAVSTDDLKEIKCQVELSNTYHLHVRTGDKIIKELGGLHKFMVWDRPILTDSGGFQVFSLAGLRKIKEEGVYFNSHIDGAKIFMGPEESMQIQSNLGSTIAMAFDECPSSVADRQYVTNSVNRTARWLERCKKEMARLNSLPDTINKEQLLFGINQGAIYDDIRIDHAKRISELELDGYAVGGLAVGESHEEMYHILDETVPHLPVNKPTYLMGVGTPANILEGVERGIDFFDCVYPSRNGRHGHVYTNHGKLNLFNQKYQKDMRPIEEGCNCPACRTYSRAYIRHLLKAKEMLGMRLCVLHNLYFYNNMMEEIRDSLDAGRFASYKAEKLYGMTQGEQS

SEQ ID NO: 51325 - protein, 379 aa, Agathobacter ruminis
  misc_feature (1)..(379): tr|A0A2G3E688|A0A2G3E688_9FIRM Queuine tRNA-ribosyltran sferase OS=Agathobacter ruminis OX=1712665 GN=tgt PE=3 SV=1
MAKYDLLKTEGRAKRGVFHTVHGDIQTPVFMNVGTVGAIKGAVSTEDLKQIKCQVELSNTYHLHVRTGDKTIKELGGLHKFMVWDRPILTDSGGFQVFSLSSLRKIKEEGVHFRSHIDGAKIFMGPEESMQIQSNLGSTIAMAFDECPPALAERKYVEDSVARTTRWLKRCKTEMARLNALEDTVNPNQLLFGINQGAVYDDIRIDHAKEIAELDLDGYAVGGLAVGESHEQMYHVLEETVPYLPQNKPTYLMGVGTPANILEGVERGIDFFDCVYPSRNGRHGHAYTRFGKLNLNNKKFEKDMRPIEEGCQCPACRNYSRAYIRHLLKAGEMLGLRLMVLHNLYFYNNMMEEIRNALDEGRFAQYKASMLDSMEHGQD

SEQ ID NO: 51326 - protein, 380 aa, Agathobaculum butyriciproducens
  misc_feature (1)..(380): tr|A0A2U1BBT3|A0A2U1BBT3_9FIRM Queuine tRNA-ribosyltran sferase OS=Agathobaculum butyriciproducens OX=1628085 G N=tgt PE=3 SV=1
MEIGKFNLIKTEGRARRGEFCTAHGVVQTPVFQNVGTAGAIKGAVDAFDLKELGCQIELSNTYHLHVRPGDQIVKQMGGLHKFMRWDGPMLTDSGGFQVFSLATLRKIKEEGVTFHSHVDGRKIFMGPEESMRIQSNLGSDIAMAFDECIENPAPREYVKNSIDRTTRWLKRCKTELDRLNTLPDTVNPHQLLFGINQGGTYDDLRIEHMQAIAELDLPGYAIGGLAVGESTEVMYHILDVVLPHAPEHKPRYLMGVGTPSNIIEGVARGIDFFDCVMPTRNARHGHLFTHNGILNIMNAKYQTDDRPIEEGCQCPTCQRFSRAYLRHLLKSGEMLSQRLLVMHNLWFYNHLMQEIRDALDNGTFEAYRAEYSEKMSKRI

SEQ ID NO: 51327 - protein, 381 aa, Aggregatibacter actinomycetemcomitans
  misc_feature (1)..(381): tr|H0KHB8|H0KHB8_AGGAC Queuine tRNA-ribosyltransferase OS=Aggregatibacter actinomycetemcomitans RhAA1 OX=10894 47 GN=tgt PE=3 SV=1
MKYELDKTSGNARRGRLVFERPQGTFTVETPAFMPVGTYGTVKGMTPEEVRATGAEILLGNTFHLWLRPGQEVMRKHGDLHDFMQWHRPILTDSGGFQVFSLGKLRKITEEGVRFQNPINGERIFLSPEKSMEIQYDLGSDIVMIFDECTPYPATFDYAKQSMEMSLRWAQRSRARFDELGNKNALFGIIQGGTFEELRKVSLEGLVNIGFDGYAVGGLAVGEPKEDMHRILEYICPQIPVDKPRYLMGVGKPEDLVEGVRRGIDMFDCVMPTRNARNGHLFVTDGIVKIRNAKYKDDTSPLDLHCDCYTCKHYTKAYLYHLDKCGEILGARLNTIHNLRYYQRLMAEIRQAIEADHFDDFVVEFYARIGKPVPPLQLTDQ

SEQ ID NO: 51328 - protein, 383 aa, Aggregatibacter actinomycetemcomitans
  misc_feature (1)..(383): tr|A0A5D0EPG3|A0A5D0EPG3_AGGAC tRNA guanosine(34) trans glycosylase Tgt OS=Aggregatibacter actinomycetemcomitan s OX=714 GN=tgt PE=4 SV=1
MKYELDKTSGNARRGRLVFERPRGTFTVETPAFMPVGTYGTVKGMTPEEVRTTGAEILLGNTFHLWLRPGQEVMRKHGDLHDFMQWHCPILTDSGGFQVFSLGKLRKITEEGVKFQNPINGERIFLSPEKSMEIQYDLGSDIVMIFDECTPYPATFNYAKQSMEMSLRWAQRSRARFDELGNKNALFGIIQGGTFEELRKVSLEGLINIGFDGYAVGGLAVGEPKEDMHRILEYICPQIPADKPRYLMGVGKPEDLVEGVRRGIDMFDCVMPTRNARNGHLFVTDGIVKIRNAKYKDDTSPPDPHCDCYTCKHYTKAYLYHLDKCGEILGARLNTIHNLRYYQRLMAEIRQAIEADRFDNFVVEFYARIGKPVPPLQLAEADQ

SEQ ID NO: 51329 - protein, 383 aa, Aggregatibacter aphrophilus
  misc_feature (1)..(383): tr|A0A448FBU9|A0A448FBU9_AGGAP Queuine tRNA-ribosyltran sferase OS=Aggregatibacter aphrophilus ATCC 33389 OX=98 5008 GN=tgt PE=3 SV=1
MKYELDKTSGNARRGRLVFERPQGTFTVETPAFMPVGTYGTVKGMTPEEVRATGAEILLGNTFHLWLRPGQEVMRKHGDLHDFMQWHRPILTDSGGFQVFSLGKLRKITEEGVKFQNPINGERIFLSPEKSMEIQYDLGSDIVMIFDECTPYPATFDYAKKSMEMSLRWAQRSRNRFDELGNKNALFGIIQGGTFEELRKVSLEGLVNIGFDGYAVGGLAVGEPKEDMHRILEYICPQIPADKPRYLMGVGKPEDLVEGVRRGIDMFDCVMPTRNARNGHLFVTDGIVKIRNAKYKDDTSPLDPHCDCYTCKHYTKAYLYHLDKCGEILGARLNTIHNLRYYQRLMAEIRQAIEEDRFDDFVVEFYARIGKPIPPLQLAETEK

SEQ ID NO: 51330 - protein, 221 aa, Aggregatibacter aphrophilus
  misc_feature (1)..(221): tr|A0A336N282|A0A336N282_AGGAP Queuine tRNA-ribosyltran sferase OS=Aggregatibacter aphrophilus OX=732 GN=tgt_2 PE=3 SV=1
MEMSLRWAQRSRNRFDELGNKNALFGIIQGGTFEELRKVSLEGLVNIGFDGYAVGGLAVGEPKEDMHRILEYICPQIPADKPRYLMGVGKPEDLVEGVRRGIDMFDCVMPTRNARNGHLFVTDGIVKIRNAKYKDDTSPLDPHCDCYTCKHYTKAYLYHLDKCGEILGARLNTIHNLRYYQRLMAEIRQAIEEDRFDDFVVEFYARIGKPIPPLQLAETEK

SEQ ID NO: 51331 - protein, 383 aa, Aggregatibacter segnis
  misc_feature (1)..(383): tr|E6KYW2|E6KYW2_9PAST Queuine tRNA-ribosyltransferase OS=Aggregatibacter segnis ATCC 33393 OX=888057 GN=tgt P E=3 SV=1
MKYELDKTSGNARRGRLVFERPQGTFTVETPAFMPVGTYGTVKGMTPEEVRATGAEILLGNTFHLWLRPGQEIMRKHGDLHDFMQWHRPILTDSGGFQVFSLGKLRKITEEGVKFQNPINGERIFLSPEKSMEIQYDLGSDIVMIFDECTPYPATFDYAKKSMEMSLRWAQRSRNRFDELGNKNALFGIIQGGTFEELRKVSLEGLVNIGFDGYAVGGLAVGEPKEDMHRILEYICPQIPADKPRYLMGVGKPEDLVEGVRRGIDMFDCVMPTRNARNGHLFVTDGIVKIRNAKYKDDTSPLDPHCDCYTCKHYTKAYLYHLDKCGEILGARLNTIHNLRYYQRLMAEIRQAIEEDRFDDFVVDFYARIGKPVPPLQLAETEK

SEQ ID NO: 51332 - protein, 383 aa, Aggregatibacter segnis
  misc_feature (1)..(383): tr|A0A369YC23|A0A369YC23_9PAST Queuine tRNA-ribosyltran sferase OS=Aggregatibacter segnis OX=739 GN=tgt PE=3 SV =1
MKYELDKTSGNARRGRLVFERPQGTFTVETPAFMPVGTYGTVKGMTPEEVRATGAEILLGNTFHLWLRPGQEVMRKHGDLHDFMQWHRPILTDSGGFQVFSLGKLRKITEEGVKFQNPINGERIFLSPEKSMEIQYDLGSDIVMIFDECTPYPATFDYAKKSMEMSLRWAQRSRNRFDELGNKNALFGIIQGGTFEELRKVSLEGLVNIGFDGYAVGGLAVGEPKEDMHRILEYICPQIPADKPRYLMGVGKPEDLVEGVRRGIDMFDCVMPTRNARNGHLFVTDGIVKIRNAKYKDDTSPLDPHCDCYTCKHYTKAYLYHLDKCGEILGARLNTIHNLRYYQRLMAEIRQAIEDDRFDDFVVEFYARIGKPVPPLQLAETEK

SEQ ID NO: 51333 - protein, 383 aa, Aggregatibacter sp.
  misc_feature (1)..(383): tr|U1S7Y4|U1S7Y4_9PAST Queuine tRNA-ribosyltransferase OS=Aggregatibacter sp. oral taxon 458 str. W10330 OX=13 21772 GN=tgt PE=3 SV=1
MKYELDKTSGNARRGRLVFERPQGTFTVETPAFMPVGTYGTVKGMTPEEVRATGAEILLGNTFHLWLRPGQEVMRKHGDLHDFMQWHRPILTDSGGFQVFSLGKLRKITEEGVKFQNPINGERIFLSPEKSMEIQYDLGSDIVMIFDECTPYPATFDYAKKSMEMSLRWAQRSRNRFDELGNKNALFGIIQGSTFEELRKVSLEGLVNIGFDGYAVGGLAVGEPKEDMHRILEYICPQIPADKPRYLMGVGKPEDLVEGVRRGIDMFDCVMPTRNARNGHLFVTDGIVKIRNAKYKDDTSPLDPHCDCYTCKHYTKAYLYHLDKCGEILGARLNTIHNLSYYQRLMAEIRQAIEDDRFDDFVVEFYARIGKPVPPLQLAETEK

SEQ ID NO: 51334 - protein, 370 aa, Agitococcus lubricus
  misc_feature (1)..(370): tr|A0A2T5J1A1|A0A2T5J1A1_9LACT Queuine tRNA-ribosyltran sferase OS=Agitococcus lubricus OX=1077255 GN=tgt PE=3 SV=1
MQFKLLATDGIARRGELTLQHGKVQTPAFMPVGTYGTVKGMFPSDIENIGADIILGNTFHLWLRPTTEVVKQFGGLHKFINWDKPILTDSGGFQVFSLGALRKISEEGVKFQSPIDGAKVFLTPEVSMQIQRELNSDIVMIFDECTPYPATEKEARDSMELSLRWAARCKTAHEGNPNALFGIVQGGMYEHLRDVSLAGLLDIGFDGYAIGGLSVGEPKDDMLKILNHVPTKLPDDKPRYLMGVGKPEDIVEAVRRGVDMFDCVMPTRNARNGHYFVTDGVVRIRNSQYKTDQSPIDEHCDCYACKNFSRAYLHHLDKCGEMLGAMLGTLHNLRYYQRLMAGLRTAIENGTLSAFVADFYARRGLPVPVL

SEQ ID NO: 51335 - protein, 376 aa, Agrobacterium albertimagni
  misc_feature (1)..(376): tr|K2QA89|K2QA89_9RHIZ Queuine tRNA-ribosyltransferase OS=Agrobacterium albertimagni AOL15 OX=1156935 GN=tgt P E=3 SV=1
MSENFTFNLKATSGKARLGEITMPRGTIRTPAFMPVGTVGTVKAMYLDQVKEGGADIILGNTYHLMLRPGPERVARLGGLHELIRWPGPILTDSGGFQVMSLSGLRKLDEQGVTFKSHVDGSLHHMSPERSIEIQGLLDSDIQMQLDECVALPNEPREIERAMELSLRWAERCRVAFGNQPGKAMFGIVQGGDQPALRIRSAEGLKQLDLKGYSIGGLAVGEPQAVMLDMLRITLPVLPTEKPRYLMGVGTPDDMLKSVAEGIDMFDCVMPTRSGRHGLAFTRRGKVNIRNARHAEDMRPLDEQSSCPATRDYSRAYLHHLVRSNEALGGMLLSWNNLSYYQELMQGIRQAIAEDRFEDFKAETIEMWARGDIDPV

SEQ ID NO: 51336 - protein, 376 aa, Agrobacterium arsenijevicii
  misc_feature (1)..(376): tr|A0A0D8KKI4|A0A0D8KKI4_9RHIZ Queuine tRNA-ribosyltran sferase OS=Agrobacterium arsenijevicii OX=1585697 GN=tg t PE=3 SV=1
MHDKFTFTLKATSGGARLGEVAMPRGVIRTPAFMPVGTVGTVKAMYLDQVRELGADIILGNTYHLMLRPGPERVARLGGLHELIRWPHPILTDSGGFQVMSLSGLRKLDEKGVTFKSHVDGSLHHMSPERSIEIQGMLDSDIQMQLDECIALPAERKEIERAMEMSLRWAERCRVAFGEQPGKAMFGIVQGGDQPDLRIRSAEGLKQLDLKGYAVGGLAVGEPQDVMLGMLDITLPVLPTEKPRYLMGVGTPDDILKSVARGIDMFDCVMPTRSGRHGLAFTRRGRVNIRNARHAEDMRPLDEQSNCPASRDYSRAYLHHLTRSNEALGGMLLSWHNLAYYQELMQGIRKSIEEGRFADFYAETIEMWARGDIDPV

SEQ ID NO: 51337 - protein, 376 aa, Agrobacterium bohemicum
  misc_feature (1)..(376): tr|A0A135P5I4|A0A135P5I4_9RHIZ Queuine tRNA-ribosyltran sferase OS=Agrobacterium bohemicum OX=2052828 GN=tgt PE =3 SV=1
MQENFTFTLKTTSGGARLGEVAMPRGVIRTPAFMPVGTVGTVKAMYLDQVRELGADVILGNTYHLMLRPGPERVQRLGGLHELIRWPHPILTDSGGFQVMSLSGLRKLDEKGVTFKSHIDGSLHYMSPERSIEIQGMLDSDIQMQLDECIALPAERKEIERAMEMSLRWAERCRVAFGEQTGKAMFGIVQGGDQPDLRIRSAEGLKQLDLKGYAVGGLAVGEPQDVMLGMLDITLPVLPTEKPRYLMGVGTPDDILKSVARGIDMFDCVMPTRSGRHGLAFTRRGRVNLRNARHAEDMRPLDEQSNCPASRDYSRAYLHHLARSNEALGGMLLSWHNLAYYQELMQGIRKSIEEDRFADFYAETIEMWAKGDIDRI

SEQ ID NO: 51338 - protein, 376 aa, Agrobacterium deltaense
  misc_feature (1)..(376): tr|A0A1S7NWN8|A0A1S7NWN8_9RHIZ Queuine tRNA-ribosyltran sferase OS=Agrobacterium deltaense RV3 OX=1183426 GN=tg t PE=3 SV=1
MHDKFTFTLKATSGGARLGEVAMPRGVIRTPAFMPVGTVGTVKAMYLDQVRELGADIILGNTYHLMLRPGPERVARLGGLHELIRWPHPILTDSGGFQVMSLSGLRKLDEKGVTFKSHVDGSLHHMSPERSIEIQGMLDSDIQMQLDECIALPAERKEIERAMEMSLRWAERCRVAFGEQPGKAMFGIVQGGDQPDLRIRSAEGLKQLDLKGYAVGGLAVGEPQDVMLGMLDITLPVLPTEKPRYLMGVGTPDDILKSVARGIDMFDCVMPTRSGRHGLAFTRRGKVNIRNARHAEDMRPLDEQSNCPASRDYSRAYLHHLTRANEALGGMLLSWHNLAYYQELMQGIRKSIEEGRFADFYAETIEMWARGDIDPI

SEQ ID NO: 51339 - protein, 376 aa, Agrobacterium deltaense
  misc_feature (1)..(376): tr|A0A1S7TKE0|A0A1S7TKE0_9RHIZ Queuine tRNA-ribosyltran sferase OS=Agrobacterium deltaense NCPPB 1641 OX=118342 5 GN=tgt PE=3 SV=1
MHDKFTFTLKATSGGARLGEVAMPRGVIRTPAFMPVGTVGTVKAMYLDQVRELGADIILGNTYHLMLRPGPERVARLGGLHELIRWPHPILTDSGGFQVMSLSGLRKLDEQGVTFKSHVDGSLHHMSPERSIEIQGMLDSDIQMQLDECIALPAERKEIERAMEMSLRWAERCRVAFGDQPGKAMFGIVQGGDQPDLRVRSAEGLKQLDLKGYAVGGLAVGEPQDVMLGMLDITLPVLPTEKPRYLMGVGTPDDILKSVARGIDMFDCVMPTRSGRHGLAFTRRGKVNIRNARHAEDMRPLDEQSNCPASRDYSRAYLHHLTRANEALGGMLLSWHNLAYYQELMQGIRKSIEEGRFADFYAETIEMWARGDIDPI

SEQ ID NO: 51340 - protein, 376 aa, Agrobacterium fabrum
  misc_feature (1)..(376): tr|A0A2W5F0W8|A0A2W5F0W8_9RHIZ Queuine tRNA-ribosyltran sferase OS=Agrobacterium fabrum OX=1176649 GN=tgt PE=3 SV=1
MHDKFTFTLKATSGGARLGEVAMPRGVIRTPAFMPVGTVGTVKAMYLDQVRELGADIILGNTYHLMLRPGPERVARLGGLHELIRWPHPILTDSGGFQVMSLSGLRKLDEKGVTFKSHVDGSLHHMSPERSIEIQGMLDSDIQMQLDECIALPAERKEIERAMEMSLRWAERCRVAFGEQPGKAMFGIVQGGDQPDLRIRSAEGLKQLDLKGYAVGGLAVGEPQDVMLGMLDITLPVLPTEKPRYLMGVGTPDDILKSVARGIDMFDCVMPTRSGRHGLAFTRRGKVNIRNARHAEDMRPLDEQSNCPASRDYSRAYLHHLTRANEALGGMLLSWHNLAYYQELMQGIRKSIEEGRFADFYAETIEMWARGDIDPV

SEQ ID NO: 51341 - protein, 376 aa, Agrobacterium fabrum
  misc_feature (1)..(376): sp|Q8UES8|TGT_AGRFC Queuine tRNA-ribosyltransferase OS= Agrobacterium fabrum (strain C58 / ATCC 33970) OX=17629 9 GN=tgt PE=3 SV=1
MHEKFTFTLKSTSGGARLGEVAMPRGVIRTPAFMPVGTVGTVKAMYLDQVRELGADIILGNTYHLMLRPGPERVARLGGLHELIRWPHPILTDSGGFQVMSLSGLRKLDEKGVTFKSHVDGSLHHMSPERSIEIQGMLDSDIQMQLDECIALPAERKEIERAMEMSLRWAERCRVAFGEQPGKAMFGIVQGGDQPDLRIRSAEGLKELDLKGYAVGGLAVGEPQDVMLGMLDITLPVLPTEKPRYLMGVGTPDDILKSVARGIDMFDCVMPTRSGRHGLAFTRRGRVNIRNARHAEDMRPLDEQSNCPASRDYSRAYLHHLTRSNEALGGMLLSWHNLAYYQELMQGIRTSIEEGRFADFYAETIEMWARGDIDPV

SEQ ID NO: 51342 - protein, 376 aa, Agrobacterium genomosp.
  misc_feature (1)..(376): tr|A0A1S7P9S3|A0A1S7P9S3_9RHIZ Queuine tRNA-ribosyltran sferase OS=Agrobacterium genomosp. 3 str. CFBP 6623 OX= 1183432 GN=tgt PE=3 SV=1
MHDKFTFTLKATSGGARLGEVAMPRGIIRTPAFMPVGTVGTVKAMYLDQVRELGADIILGNTYHLMLRPGPERVARLGGLHELIRWPHPILTDSGGFQVMSLSGLRKLDEKGVTFKSHVDGSLHHMSPERSIEIQGMLDSDIQMQLDECIALPAERKEIERAMEMSLRWAERCRVAFGEQPGKAMFGIVQGGDQPDLRIRSAEGLKQLDLKGYAVGGLAVGEPQDVMLGMLDITLPVLPTEKPRYLMGVGTPDDILKSVARGIDMFDCVMPTRSGRHGLAFTRRGRVNIRNARHAEDMRPLDEQSNCPASRDYSRAYLHHLTRSNEALGGMLLSWHNLAYYQELMQGIRKSIEEGRFADFYAETIEMWARGDIDPI

SEQ ID NO: 51343 - protein, 376 aa, Agrobacterium genomosp.
  misc_feature (1)..(376): tr|A0A1S7MAI3|A0A1S7MAI3_9RHIZ Queuine tRNA-ribosyltran sferase OS=Agrobacterium genomosp. 2 str. CFBP 5494 OX= 1183436 GN=tgt PE=3 SV=1
MHDKFTFTLKATSGGARLGEVAMPRGVIRTPAFMPVGTVGTVKAMYLDQVRELGADIILGNTYHLMLRPGPERVARLGGLHELIRWPHPILTDSGGFQVMSLSGLRKLDEKGVTFKSHVDGSLHHMSPERSIEIQGLLDSDIQMQLDECIALPAERKEIERAMEMSLRWAERCRVAFGDQPGKAMFGIVQGGDQPDLRIRSAEGLKQLDLKGYAVGGLAVGEPQDVMLGMLDITLPVLPTEKPRYLMGVGTPDDILKSVARGIDMFDCVMPTRSGRHGLAFTRRGKVNIRNARHAEDMRPLDEQSNCPASRDYSRAYLHHLVRANEALGGMLLSWHNLAYYQELMQGIRKSIEEGRFADFYMETIEMWARGDIDAV

SEQ ID NO: 51344 - protein, 376 aa, Agrobacterium larrymoorei
  misc_feature (1)..(376): tr|A0A4D7DTV2|A0A4D7DTV2_9RHIZ Queuine tRNA-ribosyltran sferase OS=Agrobacterium larrymoorei OX=160699 GN=tgt P E=3 SV=1
MQENFTFTLKATSGGARLGEVAMPRGVIRTPAFMPVGTVGTVKAMYLDQVRELGADVILGNTYHLMLRPGPERVARLGGLHELIRWPHPILTDSGGFQVMSLSGLRKLDEKGVTFKSHVDGSLHHMSPERSIEIQGMLDSDIQMQLDECVALPAERKEIERAMEMSLRWAERCRVAFGEQPGKAMFGIVQGGDQPDLRIRSAEGLKQLDLKGYAVGGLAVGEPQDVMLSMLDTTLPVLPTEKPRYLMGVGTPDDILKSVARGIDMFDCVMPTRSGRHGLAFTRRGRVNIRNARHAEDMRPLDEQSNCPASRDYSRAYLHHLARSNEALGGMLLSWHNLAYYQELMQGIRKSIEEGRFPDFYAETIEMWAKGDIDPV

SEQ ID NO: 51345 - protein, 376 aa, Agrobacterium larrymoorei
  misc_feature (1)..(376): tr|A0A4Z1PXG1|A0A4Z1PXG1_9RHIZ Queuine tRNA-ribosyltran sferase OS=Agrobacterium larrymoorei OX=160699 GN=tgt P E=3 SV=1
MQENFTFTLKATSGGARLGEVAMPRGVIRTPAFMPVGTVGTVKAMYLDQVRELGADVILGNTYHLMLRPGPERVARLGGLHELIRWPHPILTDSGGFQVMSLSGLRKLDEKGVTFKSHVDGSLHHMSPERSIEIQGMLDSDIQMQLDECVALPAERKEIERAMEMSLRWAERCRVAFGEQPGKAMFGIVQGGDQPDLRIRSAEGLKQLDLKGYAVGGLAVGEPQAVMLSMLDTTLPVLPTEKPRYLMGVGTPDDILKSVARGIDMFDCVMPTRSGRHGLAFTRRGRVNIRNARHAEDMRPLDEQSNCPASRDYSRAYLHHLARSNEALGGMLLSWHNLAYYQELMQGIRKSIEEGRFPDFYAETIEMWAKGDIDPV

SEQ ID NO: 51346 - protein, 376 aa, Agrobacterium radiobacter
  misc_feature (1)..(376): tr|B9JFA9|B9JFA9_AGRRK Queuine tRNA-ribosyltransferase OS=Agrobacterium radiobacter (strain K84 / ATCC BAA-868 ) OX=311403 GN=tgt PE=3 SV=1
MSESFQFQLKKTDGGARLGEVSMPRGTIRTPAFMPVGTVGTVKAMYLDQVRESGADIILGNTYHLMLRPTAERVARLGGLHELIRWPHPILTDSGGFQVMSLSGLRKLDEKGVTFKSHVDGSLHHMSPERSIEIQGLLGSDIQMQLDECVALPSTPKEIERAMEMSLRWAERCKVAFGDQPGKAMFGIVQGGDVPDLRVRSAQALSQMDLKGYAVGGLAVGEPQDVMLRMLETTLPELPTEKPRYLMGVGTPDDILKSVARGIDMFDCVMPTRSGRHGLAFTRRGKVNIRNARHAEDMRPLDDQSNCPASRDYSRAYLHHLVRANEALGGMLLSWNNLAYYQELMQGIRQAIAEGRFADFMAETQENWARGDLEPV

SEQ ID NO: 51347 - protein, 376 aa, Agrobacterium rhizogenes
  misc_feature (1)..(376): tr|A0A2T7VGL7|A0A2T7VGL7_AGRRH Queuine tRNA-ribosyltran sferase OS=Agrobacterium rhizogenes OX=359 GN=tgt PE=3 SV=1
MHENFTFTLKATSGGARLGEVAMPRGVIRTPAFMPVGTVGTVKAMYLDQVREAGADIILGNTYHLMLRPGPERVARLGGLHELIRWPHPILTDSGGFQVMSLSGLRKLDEKGVTFKSHVDGSLHHMSPERSIEIQGLLDSDIQMQLDECVALPAERKEIERAMEMSLRWAERCRVAFGEQPGKAMFGIVQGGDQPDLRIRSAEGLKELDLKGYAVGGLAVGEPQDVMLAMLDTTLPVLPTEKPRYLMGVGTPDDILKSVARGIDMFDCVMPTRSGRHGLAFTRRGRVNIRNARHAEDMRPLDEQSNCPASRDYSRAYLHHLVRSNEALGGMLLSWHNLAYYQELMQGIRKSIEEGRFPDFHAETIEMWAKGDIDPV

SEQ ID NO: 51348 - protein, 376 aa, Agrobacterium rhizogenes
  misc_feature (1)..(376): tr|A0A546XJR7|A0A546XJR7_AGRRH Queuine tRNA-ribosyltran sferase OS=Agrobacterium rhizogenes OX=359 GN=tgt PE=3 SV=1
MHDKFTFTLKATSGGARLGEVAMPRGVIRTPAFMPVGTVGTVKAMYLDQVRELGADIILGNTYHLMLRPGPERVARLGGLHELIRWPHPILTDSGGFQVMSLSGLRKLDEKGVTFKSHVDGSLHHMSPERSIEIQGMLDSDIQMQLDECIALPAERKEIERAMEMSLRWAERCRVAFGEQPGKAMFGIVQGGDQPDLRIRSAEGLKQLDLKGYAVGGLAVGEPQDVMLGMLDITLPVLPTEKPRYLMGVGTPDDILKSVARGIDMFDCVMPTRSGRHGLAFTRRGRVNIRNARHAEDMRPLDEQSNCPASRDYSRAYLHHLTRSNEALGGMLLSWHNLAYYQELMQGIRKSIEEGRFADFYAETIEMWARGDIDPI

SEQ ID NO: 51349 - protein, 376 aa, Agrobacterium rosae
  misc_feature (1)..(376): tr|A0A2S4EF94|A0A2S4EF94_9RHIZ Queuine tRNA-ribosyltran sferase OS=Agrobacterium rosae OX=1972867 GN=tgt PE=3 S V=1
MQENFTFTLKATSGGARLGEVAMPRGTIRTPAFMPVGTVGTVKAMYLEQVRELGADVILGNTYHLMLRPGPERVQRLGGLHELIRWPHPILTDSGGFQVMSLSGLRKLDEKGVTFKSHLDGSLHHMSPERSIEIQGMLDSDIQMQLDECIALPAERKEIERAMEMSLRWAERCRVQFGEQPGKAMFGIVQGGDQPDLRIRSAEGLKQLDLKGYAVGGLAVGEPQEVMLGMLDITLPVLPTEKPRYLMGVGTPDDILKSVARGIDMFDCVMPTRSGRHGLAFTRRGRVNIRNARHAEDMRPLDEQSNCPASRDYSRAYLHHLARSNEALGGMLLSWHNLAYYQELMQGIRKSIEEGRFADFYAETIEMWAKGDIDPI

SEQ ID NO: 51350 - protein, 376 aa, Agrobacterium rubi
  misc_feature (1)..(376): tr|A0A081CWF4|A0A081CWF4_9RHIZ Queuine tRNA-ribosyltran sferase OS=Agrobacterium rubi TR3 = NBRC 13261 OX=13684 15 GN=tgt PE=3 SV=1
MQENFTFTLKATSGGARLGEVAMPRGTIRTPAFMPVGTVGTVKAMYLDQVRDLGADVILGNTYHLMLRPGPERVQRLGGLHELIRWPHPILTDSGGFQVMSLSGLRKLDEKGVTFKSHVDGSLHHMSPERSIEIQGMLDSDIQMQLDECIALPAERKEIERAMEMSLRWAERCRVAFGEQPGKAMFGIVQGGDQPDLRIRSAEGLKQLDLKGYAVGGLAVGEPQEVMLSMLDITLPALPTEKPRYLMGVGTPDDILKSVARGIDMFDCVMPTRSGRHGLAFTRRGRVNIRNARHAEDMRPLDEQSNCPASRDYSRAYLHHLARSNEALGGMLLSWHNLAYYQELMQGIRKSIEEGRFADFYAETIEMWAKGDIDPI

SEQ ID NO: 51351 - protein, 376 aa, Agrobacterium rubi
  misc_feature (1)..(376): tr|A0A1B9T803|A0A1B9T803_9RHIZ Queuine tRNA-ribosyltran sferase OS=Agrobacterium rubi OX=28099 GN=tgt PE=3 SV=1
MQENFTFTLKATSGGARLGEVAMPRGTIRTPAFMPVGTVGTVKAMYLDQVRDLGADVILGNTYHLMLRPGPERVQRLGGLHELIRWPHPILTDSGGFQVMSLSGLRKLDEKGVTFKSHVDGSLHHMSPERSIEIQGMLDSDIQMQLDECIALPAERKEIERAMEMSLRWAERCRVAFGEQPGKAMFGIVQGGDQPDLRIRSAEGLKQLDLKGYAVGGLAVGEPQEVMLSMLDITLPALPTEKPRYLMGVGTPDDILKSVARGIDMFDCVMPTRSGRHGLAFTRRGRVNIRNARHAEDMRPLDEQSNCPASRDYSRAYLHHLARSNEALGGMLLSWHNLAYYQELMQGIRKSIEEGRFADFYAETIEMWAKGDIDRI

SEQ ID NO: 51352 - protein, 376 aa, Agrobacterium salinitolerans
  misc_feature (1)..(376): tr|A0A4Z1QWV0|A0A4Z1QWV0_9RHIZ Queuine tRNA-ribosyltran sferase OS=Agrobacterium salinitolerans OX=1183413 GN=t gt PE=3 SV=1
MHDKFTFTLKATSGGARLGEVAMPRGVIRTPAFMPVGTVGTVKAMYLDQVRELGADIILGNTYHLMLRPGPERVARLGGLHELIRWPHPILTDSGGFQVMSLSGLRKLDEQGVTFKSHVDGSLHHMSPERSIEIQGMLDSDIQMQLDECIALPAERKEIERAMEMSLRWAERCRVAFGEQPGKAMFGIVQGGDQPDLRIRSAEGLKQLDLKGYAVGGLAVGEPQDVMLGMLDITLPVLPTEKPRYLMGVGTPDDILKSVARGIDMFDCVMPTRSGRHGLAFTRRGKVNIRNARHAEDMRPLDEQSNCPASRDYSRAYLHHLTRSNEALGGMLLSWHNLAYYQELMQGIRKSIEEGRFADFYAETIEMWARGDIDPV

SEQ ID NO: 51353 - protein, 376 aa, Agrobacterium salinitolerans
  misc_feature (1)..(376): tr|A0A1S7U5Y6|A0A1S7U5Y6_9RHIZ Queuine tRNA-ribosyltran sferase OS=Agrobacterium salinitolerans str. Hayward 03 63 OX=1183434 GN=tgt PE=3 SV=1
MHDKFTFTLKATSGGARLGEVAMPRGVIRTPAFMPVGTVGTVKAMYLDQVRELGADIILGNTYHLMLRPGPERVARLGGLHELIRWPHPILTDSGGFQVMSLSGLRKLDEQGVTFKSHVDGSLHHMSPERSIEIQGMLDSDIQMQLDECIALPAERKEIERAMEMSLRWAERCRVAFGEQPGKAMFGIVQGGDQPDLRIRSAEGLKQLDLKGYAVGGLAVGEPQDVMLGMLDITLPVLPTEKPRYLMGVGTPDDILKSVARGIDMFDCVMPTRSGRHGLAFTRRGKVNIRNARHAEDMRPLDEQSNCPASRDYSRAYLHHLTRANEALGGMLLSWHNLAYYQELMQGIRKSIEEGRFADFYAETIEMWARGDIDPI

SEQ ID NO: 51354 - protein, 376 aa, Agrobacterium sp.; identical to SEQ ID NO: 51342
  misc_feature (1)..(376): tr|A0A4U6AQ09|A0A4U6AQ09_9RHIZ Queuine tRNA-ribosyltran sferase OS=Agrobacterium sp. LC34 OX=1643810 GN=tgt PE= 3 SV=1

SEQ ID NO: 51355 - protein, 376 aa, Agrobacterium sp.; identical to SEQ ID NO: 51353
  misc_feature (1)..(376): tr|A0A3S2UND0|A0A3S2UND0_9RHIZ Queuine tRNA-ribosyltran sferase OS=Agrobacterium sp. CNPSo 2736 OX=2499627 GN=t gt PE=3 SV=1

SEQ ID NO: 51356 - protein, 376 aa, Agrobacterium tumefaciens
  misc_feature (1)..(376): tr|A0A1S7QSI6|A0A1S7QSI6_RHIRD Queuine tRNA-ribosyltran sferase OS=Agrobacterium tumefaciens str. Kerr 14 OX=11 83424 GN=tgt PE=3 SV=1
MHEKFTFTLKATSGGARLGEVAMPRGVIRTPAFMPVGTVGTVKAMYLDQVRELGADIILGNTYHLMLRPGPERVARLGGLHELIRWPHPILTDSGGFQVMSLSGLRKLDEKGVTFKSHVDGSLHHMSPERSIEIQGMLDSDIQMQLDECIALPAERKEIERAMEMSLRWAERCRVAFGEQPGKAMFGIVQGGDQPDLRIRSAEGLKELDLKGYAVGGLAVGEPQDVMLGMLDITLPVLPTEKPRYLMGVGTPDDILKSVARGIDMFDCVMPTRSGRHGLAFTRRGRVNIRNARHAEDMRPLDEQSNCPASRDYSRAYLHHLTRSNEALGGMLLSWHNLAYYQELMQGIRKSIEEGRFADFYAETIEMWARGDIDPV

SEQ ID NO: 51357 - protein, 376 aa, Agrobacterium tumefaciens; identical to SEQ ID NO: 51348
  misc_feature (1)..(376): tr|H0HAU7|H0HAU7_RHIRD Queuine tRNA-ribosyltransferase OS=Agrobacterium tumefaciens 5A OX=1107544 GN=tgt PE=3 SV=1

SEQ ID NO: 51358 - protein, 376 aa, Agrobacterium vitis
  misc_feature (1)..(376): tr|A0A560ZU53|A0A560ZU53_AGRVI Queuine tRNA-ribosyltran sferase OS=Agrobacterium vitis OX=373 GN=tgt PE=3 SV=1
MSEKFTFTLKATSGKARLGEISMPRGTIRTPAFMPVGTVGTVKAMYLDQVREGGADIILGNTYHLMLRPGPERVARLGGLHELIRWPQPILTDSGGFQVMSLSGLRKLDEQGVTFKSHIDGSYHHMSPERSIEIQGLLDSDIQMQLDECVALPAEPREIERAMEMSLRWAERCRVAFGEQPGKAMFGIVQGGDQPALRIRSAEGLKQLDLKGYAVGGLAVGEPQDVMLSMLDITLPALPSEKPRYLMGVGTPDDMLKSVALGVDMFDCVMPTRSGRHGLAFTRRGKVNIRNARHAEDMRPLDEQSSCPAARDYSRAYLHHLVRSNEALGGMLLSWNNLSYYQELMQGIRKSIAEGRFEDFKAETMEMWARGDIDPR

SEQ ID NO: 51359 - protein, 376 aa, Agrobacterium vitis
  misc_feature (1)..(376): tr|A0A368NXX1|A0A368NXX1_AGRVI Queuine tRNA-ribosyltran sferase OS=Agrobacterium vitis OX=373 GN=tgt PE=3 SV=1
MSEQFTFTLKATSGKARLGEITMPRGTIRTPAFMPVGTVGTVKAMYLDQVREGGADIILGNTYHLMLRPGAERVARLGGLHELIRWPQPILTDSGGFQVMSLSGLRKLDEQGVTFKSHIDGSLHHMSPERSIEIQGLLDSDIQMQLDECVALPAEPREIERAMEMSLRWAERCRVAFGEQPGKAMFGIVQGGDQPGLRIRSAQGLKQLDLKGYAVGGLAVGEPQEVMLSMLDITLPVLPTEKPRYLMGVGTPDDMLKSVARGIDMFDCVMPTRSGRHGLAFTRRGKVNIRNARHAEDKRPLDEQSSCPAARDYSRAYLHHLVRSNEALGGMLLSWNNLSYYQELMQGIRQSIAEGRFEDFMAETMECWARGDIDAV

SEQ ID NO: 51360 - protein, 375 aa, Agromyces sp.
  misc_feature (1)..(375): tr|A0A542JQ76|A0A542JQ76_9PSED Queuine tRNA-ribosyltran sferase OS=Agromyces sp. SLBN-50 OX=744977 GN=tgt PE=3 SV=1
MSHMSFELLATDGRARRGRLTFPRGVVETPAFMPVGTYGTVKGMLPRDIEGIGAQIILGNTFHLWLRPGTEVIKRHGDLHDFMQWQGPILTDSGGFQVFSLGAMRKIKEEGVYFSSPVDGAKVFMGPEESMQVQRDLGSDIVMIFDECTPYPADFDTAKRSMELSLRWAKRSKNAHEGNPSALFGIVQGGMHEELRLRSLEGLMEIGFDGLAIGGLSVGEPKEEMIRVLDFLPPHLPTDKPRYLMGVGKPEDLVEGVRRGVDMFDCVMPTRNARNGHLFVDTGVIKIRNAVHKHDDAPLDPACDCYTCQHFSRAYLHHLDKCGEMLGSMLNTIHNLRHYQRLMAGLREAIQQGTLAAFVDAFYARRGLPTPPLEP

SEQ ID NO: 51361 - protein, 366 aa, Ahniella affigens
  misc_feature (1)..(366): tr|A0A2P1PZA4|A0A2P1PZA4_9GAMM Queuine tRNA-ribosyltran sferase OS=Ahniella affigens OX=2021234 GN=tgt PE=3 SV= 1
MQFEILGREGVSRRGRLTFARGTVETPAFMPVGTYGSVKAVTPHQVEAVGAEIILGNTFHLWLRPGTEVIEAHGGLHEFIGWSKPILTDSGGFQVWSLAERRKITPEGVHFASPVDGRKVFLSPEESMRIQRALNSDIVMIFDECTPYPATEPEARKSMELSLAWAERSKRAFEGNPNALFGIVQGGMHSALRARSAKVLTDIGFHGYAIGGLSVGEPAAEREHILDETVPHLVDDAPRYLMGVGRPEDIVEAVRRGVDMFDCVMPTRNARNGHLFTRFGQVRIRNAKYEKDLAPIDKDCTCYTCQHYSRAYLKHLDRCKEMLYSTLATIHNLHYYQELMAGIRLALEQGRFADFVAEFYAARAEP

SEQ ID NO: 51362 - protein, 376 aa, Ahrensia marina
  misc_feature (1)..(376): tr|A0A0N0E7K9|A0A0N0E7K9_9RHOB Queuine tRNA-ribosyltran sferase OS=Ahrensia marina OX=1514904 GN=tgt PE=3 SV=1
MTQDFGFTLHNSDGMARRGTVHTGRGDIQTPAFMPVGTVGTVKGLYLDQVKDAGADIILGNTYHLMLRPGAERMDRLGGLHKFIGWDGPILTDSGGFQVMSLSALRKISEEGVTFKSHVDGKLFEMSPERSIEIQGLLGSDIQMQLDECVALPADHDTMKSAMELSLRWAERCKTAFGNQPGKAMFGIVQGGDNVGLREQSAQALVDMDLKGYSIGGLAVGEPQEVMLAMLDVVCPILPTTKPRYLMGVGTPQDLLRSVAHGVDMFDCVMPTRSGRHGLAFTTRGRVNLKNARHAEDTRPLDEGVNCTASNSYSRAYLHHLIRSNEMLGMMLLSWHNIAYYQHLMAGIRDAISNNNFAQFAEETEARWAAGDIDAL

SEQ ID NO: 51363 - protein, 376 aa, Ahrensia sp.
  misc_feature (1)..(376): tr|A0A2E2RJY0|A0A2E2RJY0_9RHOB Queuine tRNA-ribosyltran sferase OS=Ahrensia sp. OX=1872419 GN=tgt PE=3 SV=1
MTTPFSFELLATDGAARRGVVHTARGDIRTPAFMPVGTAGTVKAMYLDQVRDCGADIILGNTYHLMLRPGAERVARLGGLHKMIGWKHPILTDSGGFQVMSLAALRKMTEDGVTFQSHIDGKRYEMSPERSIEIQGLLGSDIQMQLDECTKLPAEPDAIRKAMELSLRWAERCKTAFGDQPERAMFGIVQGGDNEIMRAESAKALAEMDLKGYAVGGLAVGEPQDVMLAMLDVTCPLLPADRPRYLMGVGTPQDILRSVGHGVDMFDCVMPTRAGRHGLAFTRHGKVNLKNARHADDHRPLDEESTCPAARGYSRAYLHHLIRSGEMLGAMLLTWNNIHYYQQLMQGIRDAVEAKRYADFSAETEAAWERGDIPAL

SEQ ID NO: 51364 - protein, 385 aa, Ahrensia sp.
  misc_feature (1)..(385): tr|E0MKN6|E0MKN6_9RHOB Queuine tRNA-ribosyltransferase OS=Ahrensia sp. R2A130 OX=744979 GN=tgt PE=3 SV=1
MSERDETSATFQFAVHNTDGEARRGTLSMPRGSIRTPAYMPVGTAGTVKAMYMDQVRDLGADVILGNTYHLMLRPGAERVAKLGGLHEFARWPHPILTDSGGFQVMSLANLRKMSEQGVTFKSHIDGAKYELTPERSIEIQALLDSDIQMQLDECIALPASRDEIERAMQLSLRWAERSHTAFKTQSDHSARAMFGIVQGGDDEALRVESARALRAMDMKGYSIGGLAVGEPQETMLRMLETVCPELPSEKPRYLMGVGTPDDLLKSIARGVDMFDCVMPTRAGRHATAYTRFGKLNLRNARHAEDHRPLDEQSDCPAARDYSRAYIHHLMRANEALGGMLLTWSNLAYYQQLMAGARDAIEQGRYADYMAETQDGWAKGDIAAL

SEQ ID NO: 51365 - protein, 379 aa, Aidingimonas halophila
  misc_feature (1)..(379): tr|A0A1H2ZP64|A0A1H2ZP64_9GAMM Queuine tRNA-ribosyltran sferase OS=Aidingimonas halophila OX=574349 GN=tgt PE=3 SV=1
MRNDCFMTFDHLASDGRARRGRLTFPRGTVETPAFMPVGTYGTVKGMTPADVEAIGADIILGNTFHLWLRPGVEVVEAHGDLHDFAQWQRPILTDSGGFQVFSLGEMRKITEQGVHFRSPVDGAKIFMGPEESMAVQRSLGSDIVMIFDECTPYPATEAEAEASMELSLRWAKRSREAHDDSPSALFGIIQGGMYPHLRERSLAGLSEIGFDGLAIGGLSVGEPKSDMLAVLDYLPTWMPEDKPRYLMGVGKPEDLVEGVRRGIDMFDCVMPTRNARNGHLFTDEGTVKIRNARHRHDINPLEAGCDCYTCQHFSRSYLHHLDRCGEMLGSMLNTIHNLRHYQRLMAGLRGAIEAGTLANFVNAFYEHRGLPVPTAPAA

SEQ ID NO: 51366 - protein, 376 aa, Akkermansia glycaniphila
  misc_feature (1)..(376): tr|A0A1C7PEJ7|A0A1C7PEJ7_9BACT Queuine tRNA-ribosyltran sferase OS=Akkermansia glycaniphila OX=1679444 GN=tgt P E=3 SV=1
MSFTLHSVDPSGARLGTLHLPHGDVQTPIFMPVGTQGTVKTLHPDDLHALGAQIILGNTYHLSLRPGAETVRDLGGLHTLSGWDKPILTDSGGFQVWSLAKLRKITEEGVRFQNHIDGATMMLTPERSMEIQAQLGSDIAMLFDECPPYPCDRRYAEKSLGYTLRWARRCKQWVDENNPASGSGRQSHFGIVQGSVYADLRRQCAEELAAMDFDGYAIGGVSVGEPEEEMLKAIEHSAPYLPADKPRYAMGLGTPVQLLEMIERGVDMFDCVMPTRLARHGIAMTPDGPIHIKNKKWEKDMRPLDVEGHPHVNRFSRAAIRHFFRSGEILALRLLSFQNLSFYLRLMAQARSAIAAGQFGSFKRAFISRYQANDIS

SEQ ID NO: 51367 - protein, 377 aa, Akkermansia muciniphila
  misc_feature (1)..(377): tr|A0A2N8I7P7|A0A2N8I7P7_9BACT Queuine tRNA-ribosyltran sferase OS=Akkermansia muciniphila OX=239935 GN=tgt PE= 3 SV=1
MPFILHQKDSTTAARLGSLELPHGRVPTPIFMPVGTQGSVKTMHPQDLEMLGAEIILGNTYHLSLRPGSALIRQMGGLHKFSSWNRPILTDSGGFQVWSLAKLRKITEEGVRFQNHLDGAYMMLSPERSMEIQADLGSDIAMLFDECPPYPCDRKYAEASLGYTLRWARRCKAWVQEHRPRSGEGRQHHFGIVQGSVYADLRKKCAEELAAMDFDGYAIGGVSVGEPEDEMLRAIDHSAPWLPEEKPRYAMGLGTPPQLLEMIARGVDMFDCVMPTRLARHGVALTPDGPMHIKNQRWATDSRPIDPEGHPHVTQFSRAYVRHLFKAGEILALRLLSFQNLEFYLRLMAQAREAIAAGTFGSFKDSFIARYKANDIL

SEQ ID NO: 51368 - protein, 377 aa, Akkermansia muciniphila
  misc_feature (1)..(377): tr|A0A2N8HL56|A0A2N8HL56_9BACT Queuine tRNA-ribosyltran sferase OS=Akkermansia muciniphila OX=239935 GN=tgt PE= 3 SV=1
MPFTLHQKDSSTAARLGTLDLPHGRVPTPIFMPVGTQGSVKTMHPQDLETLGARIILGNTYHLSLRPGSALIREMGGLHRFSSWNRPILTDSGGFQVWSLAKLRKITEEGVRFQNHLDGAYMMLSPERSMEIQADLGSDIAMLFDECPPYPCDRKYAEASLGYTLRWARRCKDWVQEHRPRSGEGRQHHFGIVQGSVYADLRKRCAEELAAMEFDGYAIGGVSVGEPEEEMLRAIDHSAPWLPEDKPRYAMGLGTPPQLLEMIARGVDMFDCVMPTRLARHGVALTPDGPMHIKNQRWAADSRPIDPEGHPHVTQFSRAYVRHLFKAGEILALRLLSFQNLEFYLRLMAQAREAIAAGTFGSFKDSFIARYKANDIL

SEQ ID NO: 51369 - protein, 377 aa, Akkermansia sp.; identical to SEQ ID NO: 51368
  misc_feature (1)..(377): tr|R7DWW0|R7DWW0_9BACT Queuine tRNA-ribosyltransferase OS=Akkermansia sp. CAG:344 OX=1262691 GN=tgt PE=3 SV=1

SEQ ID NO: 51370 - protein, 377 aa, Akkermansia sp.
  misc_feature (1)..(377): tr|A0A5B6H741|A0A5B6H741_9BACT Queuine tRNA-ribosyltran sferase OS=Akkermansia sp. BIOML-A8 OX=2584564 GN=tgt P E=3 SV=1
MPFTLHQKDSSTNARLGTLELPHGRVQTPIFMPVGTQGSVKTLHSQDLESLGAQIILGNTYHLSLRPGSGLIREMGGLHRFSSWNRPILTDSGGFQVWSLAKLRKITEEGVRFQNHLDGAYMMLSPERSMEIQADLGSDIAMLFDECPPYPCDRKYAENSLGYTLRWARRCKAWVQEHQPCSGEGRQHHFGIVQGSVYADLRKRCAEELAAMDFDGYAIGGVSVGEPEDEMLRAIDHSAPWLPEDKPRYAMGLGTPPQLLEMIARGVDMFDCVMPTRLARHGVALTPDGPMHIKNQRWAADIRPIDSEGHPHVTQFSRAYVRHLFKAGEILALRLLSFQNLEFYLRLMAQAREAIAAGTFGSFKDSFIARYQANDIL

SEQ ID NO: 51371 - protein, 398 aa, Albidiferax sp.
  misc_feature (1)..(398): tr|A0A1H0UMR8|A0A1H0UMR8_9BURK Queuine tRNA-ribosyltran sferase OS=Albidiferax sp. OV413 OX=1855285 GN=tgt PE=3 SV=1
MLKFDLLATDAPSADGSYAGSHARRGTLTLNHGVVQTPIFMPVGTYGTVKGVMPRSLEEMGAQIILGNTFHLWMRPGLDVMAQFGGLHQFEKWNKPILTDSGGFQVWSLGEMRKISEEGVKFSSPVNGDKLFLTPEISMQIQTTLNSDIVMQFDECTPYDTKGHITTEREARNSMELSLRWAKRCQAEFAKLQNPNALFGIVQGGMFENLRQESLDQLVEMDFPGYAVGGVSVGEPKDEMLRIMAHTPHKLPAHKPRYLMGVGTPEDLVQGVAEGVDMFDCVMPTRNARNGTLFTRYGDLKIRNARHKTDEQPLDVTCTCHACAGTSGVSYANGGRDGFSRAYLHHLDRCAEMLGPMLASIHNLHYFLNLMSEMRAALDTGTFGAFRAQFKADRARGV

SEQ ID NO: 51372 - protein, 376 aa, Albidovulum inexpectatum
  misc_feature (1)..(376): tr|A0A2S5JJY2|A0A2S5JJY2_9RHOB Queuine tRNA-ribosyltran sferase OS=Albidovulum inexpectatum OX=196587 GN=tgt PE =3 SV=1
MTSAFTFELRATDGKARTGVITTPRGKIRTPAFMPVGTAATVKAMLPESVAATGADIILGNTYHLMLRPTAERIARLGGLHKFMNWHGPILTDSGGFQVMSLAALRKLTEEGVTFSSHIDGSKHVLTPERSMEIQRLLGSDIVMCFDECPALPAPDEEVARAMRLSMRWAERSKAAFGDRPGHALFGIQQGGVNRELREESAEALKVIGFDGYAIGGLAVGEGQEAMFGVLDYAPQMLPADKPRYLMGVGKPDDIVGAVQRGVDMMDCVLPTRSGRTGQAWTRRGQVNIKNARHADDPRPLDEDCTCPACRNYSRAYLHHVFRAGEMISGMLLTWHNLHYYQELMQGLRDAIAEGRLDAFVSEFHRLRAEGDIEPI

SEQ ID NO: 51373 - protein, 375 aa, Albidovulum xiamenense
  misc_feature (1)..(375): tr|A0A1G9FED4|A0A1G9FED4_9RHOB Queuine tRNA-ribosyltran sferase OS=Albidovulum xiamenense OX=990712 GN=tgt PE=3 SV=1
MSGFRFTIHATDGKARTGLIETPRGEIRTPAFMPVGTAGTVKAMLPENVRATGADIILGNTYHLMLRPGAERIARLGGLHRFMNWPRPILTDSGGFQVMSLAELRRIDERGVTFQSHIDGARHELTPERSMEIQRLLGSDIVMAFDECPALPADRARIEESMRLSMRWAARSREAFGERPGHALFGIQQGGLERDLRAESAEALKAIGFDGYAIGGLAVGEGQAAMFEVLDYAPDMLPADRPRYLMGVGKPDDIVGAVVRGVDMMDCVLPTRSGRTGQAFTRRGVVNIRNARHRDDPRPLDEACACPACRSYSRAYLHHVVRAGEIIGAMLMTWHNLQYYQDLMAGLREAIAGGRLDAFVAEFEALRAEGDIEPL

SEQ ID NO: 51374 - protein, 376 aa, Albimonas donghaensis
  misc_feature (1)..(376): tr|A0A1H3A8I8|A0A1H3A8I8_9RHOB Queuine tRNA-ribosyltran sferase OS=Albimonas donghaensis OX=356660 GN=tgt PE=3 SV=1
MAQGIDFQISARDGKARRCALSTPRGEIRTPAFMPVGTAATVKAMLPGSVRETGADILLGNTYHLMLRPGAQRVHDLGGLHRFMNWDRPILTDSGGFQVMSLADLRRLSEDGVKFRSHIDGSEHMLSPETSMEIQKLLGSDIVMCFDECPALPADRERIAESMRLSMRWAQRSRDAFGDRPGHALFGIQQGGLEEDLRGESAEALAAIGFDGYAIGGLAVGEGQEAMFGCLDFAPGQLPDDKPRYLMGVGKPDDIVGAVRRGVDMFDCVLPSRSGRTGQGLTRRGPVNLRNARHKDDPRPLDPECACPCCSGYSRAYLHHVVRSGEIIASMLLTWHNLHYYQELMQGLRDAIEAGRLDAFAADFDAQRAQGDLPPV

SEQ ID NO: 51375 - protein, 375 aa, Albimonas pacifica
  misc_feature (1)..(375): tr|A0A1I3PMH4|A0A1I3PMH4_9RHOB Queuine tRNA-ribosyltran sferase OS=Albimonas pacifica OX=1114924 GN=tgt PE=3 SV =1
MTRFSYSILARDGLARRGVISTPRGEIRTPAFMPVGTAATVKAMLPGSVRETGADILLGNTYHLMLRPGAERIARLGGLHRFMDWDRPILTDSGGFQVMSLSELRKLTEEGVRFRSHVDGSEHMLTPERSMEIQRLLGSDIVMCFDECPALPADRERIVESMRLSMRWARRSRDAFGDRPGHALFGIQQGGLEEDMRGESAEALASIGFDGYAIGGLAVGEGQEAMFACLDYAPGQLPDDKPRYLMGVGKPDDIVGAVQRGVDMFDCVLPSRSGRTGQALTRFGAVNLKNARHRDDPRPLDPECTCPCCTRYSRAYLHHVMRSGEIISSMLLTWHNLHYYQELMQGLRDAIEAGTLDAFAEGFHARRAEGDMAPV

SEQ ID NO: 51376 - protein, 377 aa, Alcaligenaceae bacterium
  misc_feature (1)..(377): tr|A0A516W831|A0A516W831_9BURK Queuine tRNA-ribosyltran sferase OS=Alcaligenaceae bacterium SJ-26 OX=2593958 GN =tgt PE=3 SV=1
MTGLNFTLEATDGKARRGRMTLNHGVVETPIFMPVGTYGSVKAMLPHELHEIGAQIVLGNTFHLWLRPGTEVMDKHGGLHGFMQWNKPLLTDSGGFQVFSLQGMRKITEEGVRFASPIDGARLFLTPEESMRIQRSLNSDIAMVFDECTPYKIKDRPATLDEAAQSMRMSLRWARRSRDEFDRLENPNALFGIVQGGMYETLRDESLAGLTDIGFHGYAIGGLSVGEPKEDMLRILAHTTPRLPADRPRYLMGVGTPEDLVDGVASGVDMFDCVMPSRNARNGWLFTRFGDVKIRNARYRDDTQPLDESCSCHTCSHFSRAYLHHLQRANEITGARLNTLHNLHFYLTIMREMREAISAGTFEAWCKQFAADRARGV

SEQ ID NO: 51377 - protein, 378 aa, Alcaligenaceae bacterium
  misc_feature (1)..(378): tr|A0A4S1EKL6|A0A4S1EKL6_9BURK Queuine tRNA-ribosyltran sferase OS=Alcaligenaceae bacterium 429 OX=2562948 GN=t gt PE=3 SV=1
MSGLDFKLLKRDGKARRGQVTLNHGVVQTPIFMPVGTYGSVKGMLPHELTEIKSQIILGNTFHLWLRPGTEVIKQHGGLHGFMQWNGPILTDSGGFQVFSLKGMRKITEEGVKFASPINGDQMFLTPEESMRIQHALNSDIVMVFDECTPYLIDERPATHEEAAKSMRMSLRWAKRSRDEFNALENPNALFGIVQGGMYEDLREESLAGLTDIGFEGYAIGGLSVGEPKEDMFRILQHTTPRLPEHAPRYLMGVGTPEDLVEGVSQGVDMFDCVMPTRNARNGWLFTRFGDVKIRNARYRDDTRPLDPSCHCHTCQNFSRAYLHHLQRSNEIAGARLNTYHNLHFYLQIMQEMRDAIEAERFEEWKAAFARDRSRGIE

SEQ ID NO: 51378 - protein, 378 aa, Alcaligenes aquatilis
  misc_feature (1)..(378): tr|A0A3G2HS30|A0A3G2HS30_9BURK Queuine tRNA-ribosyltran sferase OS=Alcaligenes aquatilis OX=323284 GN=tgt PE=3 SV=1
MSGLKFDLLSTDGAARRGQITLNHGVVQTPIFMPVGTYGSVKAMMPHELNEIGSQIILGNTFHLWLRPGTEVMDKYQGLHNFMQWDKPILTDSGGFQVFSLKGMRKITEEGVKFASPITGERLFLTPEVSMQIQYSLNSDISMVFDECTPYLIDDRPATHDEAAKSMRMSLRWARRSREEFKRLTNPNALFGIVQGGMYEDLRDESLSGLTDIGFEGYAIGGLSVGEPKEDMMRILAHTTPKLPTNAPRYLMGVGTPEDLVEGVSQGVDMFDCVMPTRNARNGWLFTRYGDIKIRNARYRDDTRPLDPNCTCHTCQHFSRGYLHHLQRSNEITGSRLNTLHNLHFYLQIMQEMRDAIEQKRFAAWREQFHQDRARGIE

SEQ ID NO: 51379 - protein, 378 aa, Alcaligenes aquatilis
  misc_feature (1)..(378): tr|A0A3R9GN52|A0A3R9GN52_9BURK Queuine tRNA-ribosyltran sferase OS=Alcaligenes aquatilis OX=323284 GN=tgt PE=3 SV=1
MSGLKFDLLSTDGGARRGQITLNHGVVQTPIFMPVGTYGSVKAMMPHELNEIGSQIILGNTFHLWLRPGTEVMDKYQGLHNFMQWDKPILTDSGGFQVFSLKGMRKITEEGVKFASPITGERLFLTPEVSMQIQYSLNSDISMVFDECTPYLIDDRPATHDEAAKSMRMSLRWARRSREEFKRLTNPNALFGIVQGGMYEDLRDESLAGLTDIGFEGYAIGGLSVGEPKEDMMRILAHTTPKLPTNAPRYLMGVGTPEDLVEGVSQGVDMFDCVMPTRNARNGWLFTRYGDIKIRNARYRDDTRPLDPSCTCHTCQHFSRGYLHHLQRSNEITGSRLNTLHNLHFYLQIMQEMRDAIEQKRFAAWREQFHQDRARGIE

SEQ ID NO: 51380 - protein, 378 aa, Alcaligenes faecalis
  misc_feature (1)..(378): tr|A0A2U2BKZ7|A0A2U2BKZ7_ALCFA Queuine tRNA-ribosyltran sferase OS=Alcaligenes faecalis OX=511 GN=tgt PE=3 SV=1
MSGLKFDLLSTDGAARRGQITLNHGVVQTPIFMPVGTYGSVKAMMPHELNEIGSQIILGNTFHLWLRPGTEVMDKYKGLHSFMQWDKPILTDSGGFQVFSLKGMRKITEEGVRFASPITGERLFLTPEVSMQIQYSLNSDISMVFDECTPYLIDDRPATHDEAARSMRMSLRWARRSREEFKKLANPNALFGIVQGGMYEDLRDESLAGLTEIGFEGYAIGGLSVGEPKEDMMRILAHTTPKLPTHAPRYLMGVGTPEDLVEGVSQGVDMFDCVMPTRNARNGWLFTRYGDIKIRNARYRDDTRPLDPGCTCHTCQHFSRGYLHHLQRSNEITGSRLNTLHNLHFYLQIMQEMRDAIEQKRFAAWREQFHQDRARGIE

SEQ ID NO: 51381 - protein, 378 aa, Alcaligenes faecalis
  misc_feature (1)..(378): tr|A0A3D0KZK8|A0A3D0KZK8_ALCFA Queuine tRNA-ribosyltran sferase OS=Alcaligenes faecalis OX=511 GN=tgt PE=3 SV=1
MSGLKFDLLSTDGAARRGQITLNHGVVQTPIFMPVGTYGSVKAMMPHELKDIGSQIILGNTFHLWLRPGTEVMDKYKGLHNFMQWDKPILTDSGGFQVFSLKGMRKITEEGVKFASPITGERLFLTPEVSMQIQYSLNSDISMVFDECTPYLIDDRPATHIEAAKSMRMSLRWARRSRDEFKKLANPNALFGIVQGGMYEDLRDESLAGLTEIGFEGYAIGGLSVGEPKEDMMRILAHTTPKLPTNAPRYLMGVGTPEDLVEGVSQGVDMFDCVMPTRNARNGWLFTRFGDIKIRNARYRDDTRPLDTGCQCHTCQHFSRGYLHHLQRSNEITGSRLNTLHNLHFYLQIMQEMRDAIEQKRFSAWREQFHQDRARGIE

SEQ ID NO: 51382 - protein, 378 aa, Alcaligenes sp.
  misc_feature (1)..(378): tr|U7U7H2|U7U7H2_9BURK Queuine tRNA-ribosyltransferase OS=Alcaligenes sp. EGD-AK7 OX=1386079 GN=tgt PE=3 SV=1
MSGLKFDLLSTDGAARRGQITLNHGVVQTPIFMPVGTYGSVKAMMPHELNEIGSQIILGNTFHLWLRPGTEVMDKYQGLHNFMQWDKPILTDSGGFQVFSLKGMRKITEEGVKFASPITGERLFLTPEVSMQIQYSLNSDISMVFDECTPYLIDDRPATHIEAAKSMRMSLRWARRSREEFKRLNNPNALFGIVQGGMYEDLRDESLAGLTEIGFEGYAIGGLSVGEPKEDMMRILAHTTPKLPTHAPRYLMGVGTPEDLVEGVSQGVDMFDCVMPTRNARNGWLFTRYGDIKIRNARYRDDTRPLDPSCTCHTCKHFSRGYLHHLQRSNEITGSRLNTLHNLHFYLQIMQEMRDAIEQKRFAAWREQFHQDRARGIE

SEQ ID NO: 51383 - protein, 378 aa, Alcaligenes xylosoxydans
  misc_feature (1)..(378): tr|A0A0D6IHR2|A0A0D6IHR2_ALCXX Queuine tRNA-ribosyltran sferase OS=Alcaligenes xylosoxydans xylosoxydans OX=856 98 GN=tgt PE=3 SV=1
MTGLNFELLATDGGARRGRITLNHGVVETPIFMPVGTYGSVKAMMPHELKDIGAQIVLGNTFHLWLRPGTDIMEKHGGLHGFMQWDKPILTDSGGFQVFSLQGMRKITEEGVKFASPIDGARLFLTPEESMRIQRSLNSDIVMVFDECTPYEIDGRPATIEEAARSMRMSLRWARRSREEFDRLQNPNALFGIVQGGMYESLRDESLAGLQDIGFHGYAIGGLSVGEPKEDMMRILAHVTPKLPAQAPRYLMGVGTPEDLVEGVSRGVDMFDCVMPTRNARNGWLFTRFGDVKIRNAKYRDDTRPLDPSCACHTCANFSRAYLHHLQRANEITGARLNTLHNLHFYLTIMKEMREAIAEGRFDAWRAQFAADRARGVE

SEQ ID NO: 51384 - protein, 378 aa, Alcaligenes xylosoxydans
  misc_feature (1)..(378): tr|A0A5C2NGL8|A0A5C2NGL8_ALCXX Queuine tRNA-ribosyltran sferase OS=Alcaligenes xylosoxydans xylosoxydans OX=856 98 GN=tgt PE=3 SV=1
MTGLNFELLATDGGARRGRITLNHGVVETPIFMPVGTYGSVKAMMPHELKDIGSQIVLGNTFHLWLRPGTDIMEKHGGLHGFMQWDKPILTDSGGFQVFSLQGMRKITEEGVKFASPIDGARLFLTPEESMRIQRSLNSDIVMVFDECTPYEIDGRPATIEEAARSMRMSLRWARRSREEFDRLQNPNALFGIVQGGMYESLRDESLAGLQDIGFHGYAIGGLSVGEPKEDMMRILAHVTPKLPAQAPRYLMGVGTPEDLVEGVSRGVDMFDCVMPTRNARNGWLFTRFGDVKIRNAKYRDDTRPLDPSCACHTCANFSRAYLHHLQRANEITGARLNTLHNLHFYLTIMKEMREAIAEGRFDAWRAQFAADRARGVE

SEQ ID NO: 51385 - protein, 370 aa, Alcanivoracaceae bacterium
  misc_feature (1)..(370): tr|A0A2E2DDU4|A0A2E2DDU4_9GAMM Queuine tRNA-ribosyltran sferase OS=Alcanivoracaceae bacterium OX=2024895 GN=tgt PE=3 SV=1
  misc_feature (17)..(17): Xaa can be any naturally occurring amino acid
  misc_feature (86)..(86): Xaa can be any naturally occurring amino acid
  misc_feature (106)..(106): Xaa can be any naturally occurring amino acid
  misc_feature (122)..(122): Xaa can be any naturally occurring amino acid
  misc_feature (296)..(296): Xaa can be any naturally occurring amino acid
MQFSLKTTDGDARRGEXTFPRGTIQTPAFMPVGTYGTVKGMLPKDLADTGAEICLGNTFHLMLRPGTEVIEAHGSLHGFMQWDKPXLTDSGGFQVFSLGEMRKISXHGVVFKNPINGDKVEXTPERAMQVQRSLGSDICMIFDECTPFPATEQQARDSMELSLRWAQRSKDAHQGNDAACFGIVQGGMYDNLRRESLAGLVDIGFDGYAVGGLSVGEPQEEMLRTLGNLTPHMPAERPRYLMGVGKPEDIVEAVRRGVDMFDCVMPTRNARNGHLFTSQGVIKIRNAKHRHDLAPXEAECDCYTCQHFSRSYLHHLDRCNEMLGSQLNTIHNLRYYQRLMAGLRGAIEGGTLSAFVDDFYAARGEQTPAL

SEQ ID NO: 51386 - protein, 373 aa, Alcanivoracaceae bacterium
  misc_feature (1)..(373): tr|A0A3L8AVV9|A0A3L8AVV9_9GAMM Queuine tRNA-ribosyltran sferase OS=Alcanivoracaceae bacterium GenoA1_TS13_700 O X=2072747 GN=tgt PE=3 SV=1
MKFELAGTDAGARRGRLVFDRGVVETPAFMPVGTYGSVKAMLPRDIGDIGAHIILGNTFHLMLRPGTDIIRLHGDLHDFMHWQGPILTDSGGFQVFSLGKMRKISEEGVKFQSPVDGSPVFLTPEISMQVQKDLGSDIVMIFDECTPYPATEQQARDSMALSLRWARRSKDAHQGNPSALFGIVQGGMYENLRLESLAGLTDIGFDGYAIGGLSVGEPKEEMLNVLNYLQPHMPKDRPRYLMGVGKPEDIVEAVRRGVDMFDCVMPTRNARNGHLFTADGVVKIRNAAHKTDTGPLEPGCDCYTCQNFSRAYLHHLDRCKEILGCQLNTIHNLRYYQRLMHGLRTAIETGTFERFVTEFYQRRGEPVPPLASN

SEQ ID NO: 51387 - protein, 373 aa, Alcanivorax borkumensis
  misc_feature (1)..(373): tr|Q0VS99|Q0VS99_ALCBS Queuine tRNA-ribosyltransferase OS=Alcanivorax borkumensis (strain ATCC 700651 / DSM 11 573 / NCIMB 13689 / SK2) OX=393595 GN=tgt PE=3 SV=1
MSRMTFKLSTTDGAARRGEITFPRGTIQTPAFMPVGTYGTVKSMLPRDLADTGAEICLGNTFHLMLRPGTEVIEAHGSLHGFMQWDKPILTDSGGFQVFSLGEMRKISEQGVVFRNPINGDKVELSPEKAMQVQRSLGSDICMIFDECTPFPATEKQARDSMELSLRWAKRSKDAHEGNDAACFGIVQGGMYDDLRRESLAGLVDIGFDGYAVGGLSVGEPQNEMLRTLGNLTPHMPEDHPRYLMGVGKPDDIVEAVRRGVDMFDCVMPTRNARNGHLFIAEGVVKIRNARHRHDLAPLEAECDCYTCQNFSRSYLHHLDRCNEMLGSQLNTIHNLRYYQRLMAGLRGAIEGGTLSAFVDDFYAARGQQTPAL

SEQ ID NO: 51388 - protein, 376 aa, Alcanivorax dieselolei
  misc_feature (1)..(376): tr|K0CK51|K0CK51_ALCDB Queuine tRNA-ribosyltransferase OS=Alcanivorax dieselolei (strain DSM 16502 / CGMCC 1.3 690 / B-5) OX=930169 GN=tgt PE=3 SV=1
MSRMSFDLLTTDGSARRGRLTFPRGEVETPAFMPVGTYGTVKAMLPRDLADSGAQICLGNTFHLMLRPGTEIIERHGSLHGFMQWDKPILTDSGGFQVFSLGELRKISEQGVVFKNPINGDRVELTPERAMQVQRSLGSDICMIFDECTPYPATETQAAESMRLSLRWARRSKAAHVAHEGNDAACFGIVQGGMYDNLRRESLAGLTDIGFDGYAIGGLSVGEPQEEMRRTLAGITPHMPADRPRYLMGVGRPEDIVEGVRRGVDMFDCVMPTRNARNGHLFTREGVIKIRNARHRDDLSPLEEGCDCYTCRQFSRSYLHHLDRCGEMLGAQLNTIHNLRYYQRLMAGLRGAIEAGTLSAFVGDFYAAMGRDVPAL

SEQ ID NO: 51389 - protein, 370 aa, Alcanivorax hongdengensis
  misc_feature (1)..(370): tr|L0WDB8|L0WDB8_9GAMM Queuine tRNA-ribosyltransferase OS=Alcanivorax hongdengensis A-11-3 OX=1177179 GN=tgt P E=3 SV=1
MTFQLNATDGAARRGQITFPRGTVQTPAFMPVGTYGTVKAMLPRDLAGTGAEICLGNTFHLMLRPGTEVIEAHGSLHSFMQWDKPILTDSGGFQVFSLGEMRKISEQGVVFKNPINGDRVELSPEKAMQVQRSLGSDICMIFDECTPFPATERQARDSMELSLRWAQRSRAAHEGNDAACFGIVQGGMYDTLRQASLAGLTDIGFDGYAVGGLSVGEPQEEMLRTLGGITPHMPADRPRYLMGVGKPEDIVEAVRRGVDMFDCVMPTRNARNGHLFTAEGVIKIRNARHRHDLAPLEADCDCYTCQHFSRSYLHHLDRCGEMLGSQLNTIHNLRYYQRLMAGLRGAIEGGTLSAFVNDFYAARGQQAPAL

SEQ ID NO: 51390 - protein, 370 aa, Alcanivorax jadensis
  misc_feature (1)..(370): tr|A0A095S9G3|A0A095S9G3_9GAMM Queuine tRNA-ribosyltran sferase OS=Alcanivorax jadensis T9 OX=1177181 GN=tgt PE =3 SV=1
MQFSLNKTDGAARRGHLTFPRGTIQTPAFMPVGTYGTVKGMLPRDLADTGAEICLGNTFHLMLRPGTEVIEAHGSLHGFMQWDKPILTDSGGFQVFSLGDMRKISEQGVVFKNPINGDRVELTPEKAMQVQRSLGSDICMIFDECTPFPATEQQARDSMQLSLRWAQRSKEAHEGNDAACFGIVQGGMYDNLRQESLAGLVDIGFDGYAIGGLSVGEPQEEMLRTLGAIAPHMPEDRPRYLMGVGKPDDIVEAVRRGVDMFDCVMPTRNARNGHLFTAEGVVKIRNARHRHDLAPLESDCDCYTCQHFSRSYLHHLDRCNEMLGSQLNTIHNLRYYQRLMAGLRGAIEGGTLSAFVDDFYAARGQQTPAL

SEQ ID NO: 51391 - protein, 370 aa, Alcanivorax nanhaiticus
  misc_feature (1)..(370): tr|A0A095USR6|A0A095USR6_9GAMM Queuine tRNA-ribosyltran sferase OS=Alcanivorax nanhaiticus OX=1177154 GN=tgt PE =3 SV=1
MTFQLNTTDGAARRGEITFPRGTIQTPAFMPVGTYGTVKGMLPKDLADTGAEICLGNTFHLMLRPGTEVIEAHGSLHGFMQWDKPILTDSGGFQVFSLGEMRKISEQGVVFKNPINGDRVELTPERAMQVQRSLGSDICMIFDECTPFPATEQQARDSMELSLRWAQRSKDAHEGNDAACFGIVQGGMYDNLRRESLAGLVDIGFDGYAVGGLSVGEPQEEMLRTLGNLTPHMPEDRPRYLMGVGKPEDIVEAVRRGVDMFDCVMPTRNARNGHLFTSQGVIKIRNAKHRHDLAPLEEGCDCYTCQHFSRSYLHHLDRCNEMLGSQLNTIHNLRYYQRLMAGLRGAIEGGTLSAFVDDFYAARGEQTPAL

SEQ ID NO: 51392 - protein, 373 aa, Alcanivorax pacificus
  misc_feature (1)..(373): tr|A0A0B4XL82|A0A0B4XL82_9GAMM Queuine tRNA-ribosyltran sferase OS=Alcanivorax pacificus W11-5 OX=391936 GN=tgt PE=3 SV=1
MSFSLLGQDGAARRGQLAFPRGTVQTPAFMPVGTYGTVKGMLPSDLLATGAEICLGNTFHLMLRPGTDIIEQHGSLHGFMQWPKPILTDSGGFQVFSLGELRKITEEGVTFRSPINGDKVFLSPERAMQVQRSLGSDICMIFDECTPFPATEQQARQSMELSLRWAQRSKAAHEGNDAACFGIIQGGMYPALRQASLAGLADIGFDGYAIGGLSVGEPQEEMLRILGEITPHMPQDRPRYLMGVGRPEDIVEAVRRGVDMFDCVMPTRNARNGHLFTREGVIKIRNARHREDTGPLDETCDCYTCRHFSRSYLHHLDRCGEMLGAQLGTIHNLRYYQNLMAGLRGAIEAGTLSAFIDDFYRARGLPVPVLTAV

SEQ ID NO: 51393 - protein, 370 aa, Alcanivorax profundi
  misc_feature (1)..(370): tr|A0A418XVY7|A0A418XVY7_9GAMM Queuine tRNA-ribosyltran sferase OS=Alcanivorax profundi OX=2338368 GN=tgt PE=3 SV=1
MQFSLKTTDGDARRGEITFPRGTIQTPAFMPVGTYGTVKGMLPKDLADTGAEICLGNTFHLMLRPGTEVIEAHGSLHGFMQWDKPILTDSGGFQVFSLGEMRKISEHGVVFKNPINGDKVELTPERAMQVQRSLGSDICMIFDECTPFPATEQQARDSMELSLRWAQRSKDAHQGNDAACFGIVQGGMYDNLRRESLAGLVDIGFDGYAVGGLSVGEPQEEMLRTLGNLTPHMPADRPRYLMGVGKPEDIVEAVRRGVDMFDCVMPTRNARNGHLFTSQGVIKIRNAKHRHDLAPLEAECDCYTCQHFSRSYLHHLDRCNEMLGSQLNTIHNLRYYQRLMAGLRGAIEGGTLSAFVDDFYAARGEQTPAL

SEQ ID NO: 51394 - protein, 373 aa, Alcanivorax sp.
  misc_feature (1)..(373): tr|A0A220SN94|A0A220SN94_9GAMM Queuine tRNA-ribosyltran sferase OS=Alcanivorax sp. N3-2A OX=2014542 GN=tgt PE=3 SV=1
MTFQHLASDGAARRGRLTFPRGSVETPAFMPVGTYGTVKGMLPRDLDETGAEICLGNTFHLMLRPGTEVIGQHGGLHGFMQWPRPILTDSGGFQVFSLGAMRKISEQGVVFKSPINGDRIELSPERAMQVQHALGSDICMIFDECTPFPATETQAAESMRLSLRWAARSKQAHFEQAGNDAACFGIVQGGMYDALRRESLHGLVDIGFDGYAVGGLSVGEPQQEMLRTLGEIAPHMPADKPRYLMGVGKPEDIVEAVRRGVDMFDCVMPTRNARNGHLFTASGVVKIRNARHRHDLSPLEEGCDCYTCGRFSRGYLHHLDRCGEMLGAQLNTIHNLRYYQRLMAGLRGAIEAGTLSAFVGGFYAALERPVPAL

SEQ ID NO: 51395 - protein, 67 aa, Alcanivorax sp.
  misc_feature (1)..(67): tr|A0A356PMT0|A0A356PMT0_9GAMM tRNA guanosine(34) trans glycosylase Tgt (Fragment) OS=Alcanivorax sp. OX=187242 7 GN=tgt PE=4 SV=1
MTFQHLASDGAARRGRLTFPRGSVETPAFMPVGTYGTVKGMLPRDLEDIGAEICLGNTFHLMLRPGT

SEQ ID NO: 51396 - protein, 376 aa, Algibacter alginicilyticus
  misc_feature (1)..(376): tr|A0A0P0CE48|A0A0P0CE48_9FLAO Queuine tRNA-ribosyltran sferase OS=Algibacter alginicilyticus OX=1736674 GN=tgt PE=3 SV=1
MKFELKAKDLQSKARAATIKTDHGVIETPIFMPVGTVASVKGVHQRELKQDINPDIILGNTYHLYLRPQTPILEQAGGIHKFMNWDRNILTDSGGYQVYSLSSNRKIKEEGVKFKSHIDGSYHTFTPENVMEIQRSIGADIIMAFDECTPYPCEYNYAKRSMHMTHRWLDRCISHLKKTPLKYDYNQAFFPIVQGSTYKDLRKQSAEYIANTGAVGNAIGGLSVGEPAEEMYAMTEVVCEVLPEDKPRYLMGVGTPINILENIALGIDMFDCVMPTRNARNGMLFTAHGTVNIKNLKWANDFSPVDAMGITFVDTDYSKAYLRHLFSVNERLGAQIATIHNLGFYLWLVREARKHILAGDFRVWKDMMVKQMDKRL

SEQ ID NO: 51397 - protein, 376 aa, Algibacter amylolyticus
  misc_feature (1)..(376): tr|A0A556QEU4|A0A556QEU4_9FLAO Queuine tRNA-ribosyltran sferase OS=Algibacter amylolyticus OX=1608400 GN=tgt PE =3 SV=1
MKFELLAKDAQSKARAGKLTTDHGVIETPIFMPVGTVATVKGVHQRELKDDINPDIILGNTYHLYLRPQTHIIEKAGGLHKFMNWDRNILTDSGGYQVYSLSANRKIKEEGVKFKSHIDGSYHTFTPENVMEIQRSIGADIIMAFDECTPYPCDYNYAKRSMHMTHRWLDRCINHLEKTPLKYDYNQAFFPIVQGSTYTDLRKQSAEYIANSGAVGNAIGGLSVGEPAEEMYAMTDVVCSILPEEKPRYLMGVGTPINILENIALGVDMFDCVMPTRNARNGMLFTAHGSINIKNLKWADDFSPIDDMGITFVDTEYSKAYLRHLFTVNELLGKQIATIHNLGFYLWLVREARKHILAGDFRTWKDKMVKQMDNRL

SEQ ID NO: 51398 - protein, 376 aa, Algibacter aquaticus
  misc_feature (1)..(376): tr|A0A1E5SI46|A0A1E5SI46_9FLAO Queuine tRNA-ribosyltran sferase OS=Algibacter aquaticus OX=1849968 GN=tgt PE=3 SV=1
MKFELKAKDAQSKARAGKITTDHGVIETPIFMPVGTVATVKGVHQRELKDDINPDIILGNTYHLYLRPQTKIIEKAGGLHKFMNWDRNILTDSGGYQVYSLSANRKIKEEGVKFKSHIDGSYHTFTPENVMEIQRSIGADIIMAFDECTPYPCDYNYAKRSMHMTHRWLDRCINHLEKTPLKYDYNQAFFPIVQGSTYKDLRKQSAEYIANSGAVGNAIGGLSVGEPADEMYAMTDVVCSILPEDKPRYLMGVGTPINILENIALGVDMFDCVMPTRNARNGMLFTAHGTINIKNLKWAEDFSPIDEMGITFVDTEYSKAYLRHLFTVNELLGKQIATIHNLGFYLWLVREARKHILAGDFRSWKDKMVKQMDNRL

SEQ ID NO: 51399 - protein, 83 aa, Algibacter lectus
  misc_feature (1)..(83): tr|A0A090X4L0|A0A090X4L0_9FLAO tRNA-guanine transglycos ylase OS=Algibacter lectus OX=221126 GN=JCM19274_4466 P E=4 SV=1
MKFELNAKDPQSKARAGKLTTDHGVIETPIFMPVGTVGTVKGVHQRELKNDINPDIILGNTYHLYLRPPQTHVLEKQVDFINL

SEQ ID NO: 51400 - protein, 294 aa, Algibacter lectus
  misc_feature (1)..(294): tr|A0A090VDW4|A0A090VDW4_9FLAO Queuine tRNA-ribosyltran sferase OS=Algibacter lectus OX=221126 GN=JCM19274_4465 PE=3 SV=1
MNWDRNILTDSGGYQVYSLSANRKIKEEGVKFKSHIDGSYHTFTPENVMEIQRTIGADIIMAFDECTPYPCDYNYAKRSMHMTHRWLDRCINHLEKTPLKYDYNQAFFPIVQGSTYKDLRKQSAEYIANSGAVGNAIGGLSVGEPAEEMYAMTDVVCSILPEEKPRYLMGVGTPINILENIALGVDMFDCVMPTRNARNGMLFTAHGSINIKNLKWAEDFSPIDEMGITFVDTEYSKAYLRHLFTVNELLGKQIATIHNLGFYMWLVREARKHILAGDFNDWKNQMVKQMANRL

SEQ ID NO: 51401 - protein, 376 aa, Algibacter pectinivorans
  misc_feature (1)..(376): tr|A0A1I1RM96|A0A1I1RM96_9FLAO Queuine tRNA-ribosyltran sferase OS=Algibacter pectinivorans OX=870482 GN=tgt PE =3 SV=1
MKFELLAKDAQSKARAGKITTDHGVIETPIFMPVGTVATVKGVHQRELKEEINPDIILGNTYHLYLRPQTHIIEKAGGLHKFMNWDRNILTDSGGYQVYSLSANRKIKEEGVKFKSHIDGSYHTFTPENVMEIQRSIGADIIMAFDECTPYPCDYNYAKRSMHMTHRWLDRCINHLEKTPLKYDYNQAFFPIVQGSTYTDLRKQSAEYIANSGAVGNAIGGLSVGEPAEEMYAMTDVVCSILPEEKPRYLMGVGTPINILENIALGVDMFDCVMPTRNARNGMLFTAHGSINIKNLKWADDFSPIDEMGITFVDTEYSKAYLRHLFTVNELLGKQIATIHNLGFYLWLVREARKHILAGDFRAWKDKMVKQMDNRL

SEQ ID NO: 51402 - protein, 376 aa, Algibacter sp.
  misc_feature (1)..(376): tr|A0A2N0JDF0|A0A2N0JDF0_9FLAO Queuine tRNA-ribosyltran sferase OS=Algibacter sp. RHA_19 OX=1798237 GN=tgt PE=3 SV=1
MKFTLEKKDPQSKARAATMVTDHGVIETPIFMPVGTVASVKGVHQRELKEEINPDIILGNTYHLYLRPKLDILEAAGGLHKFMGWDRNILTDSGGYQVYSLSANRKIKEEGVKFKSHIDGSYHFFTPENVMEIQRTIGADIIMAFDECTPYPCDYNYAKRSMHMTHRWLDRCMNHLEKLPFKYGYEQTFFPIVQGSTYKDLRKQSAEYIANAGAEGNAIGGLSVGEPAEEMYAMTEVVCDILPEEKPRYLMGVGTPINILENIALGVDMFDCVMPTRNARNGMLFTAHGTINIKNKKWEADFSPIDEMGITFVDTEYTKAYLRHLFAANEYLGKQIATIHNLGFYLWLTREARKHIIAGDFTEWKNMMVKQMDKRL

SEQ ID NO: 51403 - protein, 376 aa, Algibacter sp.
  misc_feature (1)..(376): tr|A0A2U2X5H1|A0A2U2X5H1_9FLAO Queuine tRNA-ribosyltran sferase OS=Algibacter sp. ZY111 OX=2100723 GN=tgt PE=3 SV=1
MKFELHSKDTQSKARAGKITTDHGVIETPIFMPVGTVATVKGVHQRELKDDINPDIILGNTYHLYLRPQTHIIEKAGGLHKFMNWDRNILTDSGGYQVYSLSANRKIKEEGVKFKSHIDGSYHTFTPENVMEIQRSIGADIIMAFDECTPYPCDYNYAKRSMHMTHRWLDRCINHLEKTPLKYDYNQTFFPIVQGSTYKDLRKQSAEYIANAGAVGNAIGGLSVGEPAEEMYAMTDVVCSILPEDKPRYLMGVGTPINILENIALGVDMFDCVMPTRNARNGMLFTAHGSINIKNLKWADDFSPIDEMGITFVDTEYSKAYLRHLFTVNELLGKQIATIHNLGFYLWLVREARKHILAGDFKVWKEKMVKQMNNRL

SEQ ID NO: 51404 - protein, 376 aa, Algibacter wandonensis
  misc_feature (1)..(376): tr|A0A4R8MBS3|A0A4R8MBS3_9FLAO Queuine tRNA-ribosyltran sferase OS=Algibacter wandonensis OX=1343161 GN=tgt PE= 3 SV=1
MKFELNAKDPQSKARAGKLTTDHGVIETPIFMPVGTVGTVKGVHQRELKNDINPDIILGNTYHLYLRPQTHVLEKAGGLHKFMNWDRNILTDSGGYQVYSLSANRKIKEEGVKFKSHIDGSYHTFTPENVMEIQRTIGADIIMAFDECTPYPCDYNYAKRSMHMTHRWLDRCINHLEKTPLKYDYNQAFFPIVQGSTYKDLRKQSAEYIANSGAVGNAIGGLSVGEPAEEMYAMTDVVCSILPEEKPRYLMGVGTPINILENIALGVDMFDCVMPTRNARNGMLFTAHGSINIKNLKWAEDFSPIDEMGITFVDTEYSKAYLRHLFTVNELLGKQIATIHNLGFYMWLVREARKHILAGDFNDWKNQMVKQMANRL

SEQ ID NO: 51405 - protein, 376 aa, Algoriella xinjiangensis
  misc_feature (1)..(376): tr|A0A1I5AXQ2|A0A1I5AXQ2_9FLAO Queuine tRNA-ribosyltran sferase OS=Algoriella xinjiangensis OX=684065 GN=tgt PE =3 SV=1
MKFSIDKKDEFSKARAGVVETDHGKIQTPIFMPVGTVGTVKSVHQRELEEDIKAQIILGNTYHLYLRPGTDILHKAGGLHQFMNWQKPILTDSGGFQVYSLSTSRKKSEEGVRFKSHIDGSYHMFTPEKSMEIQRFIGGDIFMAFDELTGIPAKYHDAKRAMHVTHRWLERCRTWLDNNPEYYGHKQTLFPIVQGNDFKDLRQESAKYISDFGAEGNAIGGLSVGEPEPIMYEMTDIVTEILPQDKPRYLMGVGTPWNIIECIALGVDMFDCVMPTRNARNGMLFTWNGVMNMKNAKWKDCFEPLDESGTSYVDSFYSKSYVRHLFNANESLGKQIASIHNLAFYLDLVRVAREHILAGDFAQWKEQIVPQLKKRL

SEQ ID NO: 51406 - protein, 376 aa, Algoriphagus alkaliphilus
  misc_feature (1)..(376): tr|A0A1G5WSB9|A0A1G5WSB9_9BACT Queuine tRNA-ribosyltran sferase OS=Algoriphagus alkaliphilus OX=279824 GN=tgt P E=3 SV=1
MKFTLRKKDLQTKARTGTLFTDHGEIQTPIFMPVGTAATVKAVHQRELKEDIKAQIILGNTYHLYLRPGLDILEKAGGLHKFNGWERPILTDSGGYQVFSLSGTRKIKEEGVTFKSHIDGSKHEFTPENVMDIQRTIGADIIMAFDECTPYPCEYGYARNSMEMTHRWLTRCIDRFDSTEGKYGYRQTFFPIVQGSVYKDLRKQSAEFIAAQGREGNAIGGLSVGEPAEMMYEMTELVTDILPADKPRYLMGVGTPANILECIALGVDMFDCVMPTRNARNGMLFTSEGIINIRNEKWKDDFSPIDPAIGNYASTFYSKAYLRHLTVSKEILAAQIASIHNLAFYLWLVGQAREHIQAGDFAVWKDQMVKKVSTRL

SEQ ID NO: 51407 - protein, 376 aa, Algoriphagus antarcticus
  misc_feature (1)..(376): tr|A0A3E0DP96|A0A3E0DP96_9BACT Queuine tRNA-ribosyltran sferase OS=Algoriphagus antarcticus OX=238540 GN=tgt PE =3 SV=1
MKFTLEYSDPKSKARAGVVKTDHGDIQTPIFMPVGTAGSVKAVHQRELDQDIKAQIILGNTYHLYLRPGLDVLEKAGGLHKFNGWGKPILTDSGGYQVFSLSGTRKIKEDGVMFKSHIDGSKHHFTPENVMDIQRTIGADIIMAFDECTPYPCEYGYARNSMEMTHRWLTRCIDRFDATEGKYGYHQTLFPIVQGSVYKDLRKQSAEFIASTNQQGNAIGGLSVGEPAEMMYEMTELVTDILPHDKPRYLMGVGTPANILECIALGVDMFDCVMPTRNARNGMLFTSEGFINIRNEKWKDDFSGIDPAIGGYVSTFYSKAYLRHLTISKEILAAQIASIHNLSFYLWLVGQAREHILAGDFAVWKDQMVKKVSTRL

SEQ ID NO: 51408 - protein, 376 aa, Algoriphagus aquaeductus
  misc_feature (1)..(376): tr|A0A326RVC1|A0A326RVC1_9BACT Queuine tRNA-ribosyltran sferase OS=Algoriphagus aquaeductus OX=475299 GN=tgt PE =3 SV=1
MKFTLEKKDSQSQARAGQIQTDHGLINTPIFMPVGTAGTVKAVHQRELKEDIQAQIILGNTYHLYLRPGLDILEKAGGLHKFNGWDRPILTDSGGYQVFSLAGTRKIKEEGVTFKSHIDGSKHNFTPENVMDIQRTIGADIIMAFDECTPYPCEYGYARNSMDMTHRWLKRCIDRFDATEGKYGYHQTLFPIVQGSVYKDLRKQSAEFIAAQGREGNAIGGLSVGEPAEMMYEMTELVTEILPADKPRYLMGVGTPANILECIALGVDMFDCVMPTRNARNGMLFTSEGIINIRNEKWKDDFSPIDPLIGNYASSFYSKAYLRHLTVSKEILAAQIASIHNLSFYLWLVGQAREHILSGDFGVWKDAMVKKVSTRL

SEQ ID NO: 51409 - protein, 376 aa, Algoriphagus aquimarinus
  misc_feature (1)..(376): tr|A0A5C7B0W8|A0A5C7B0W8_9BACT Queuine tRNA-ribosyltran sferase OS=Algoriphagus aquimarinus OX=237018 GN=tgt PE =3 SV=1
MKFTLEYSDSKSKARAGVVRTDHGDIQTPIFMPVGTAGSVKAVHQRELDQDIKAQIILGNTYHLYLRPGLDVLEKAGGLHKFNGWEKPILTDSGGYQVFSLSGTRKIKEDGVMFKSHIDGSKHHFTPENVMDIQRTIGADIIMAFDECTPYPCEYGYARNSMEMTHRWLTRCIGRFDETEGKYGYNQTLFPIVQGSVYKDLRKQSAEFIASTNQQGNAIGGLSVGEPAEMMYEMTELVTDILPKDKPRYLMGVGTPANILECIALGVDMFDCVMPTRNARNGMLFTSEGFINIRNEKWKDDFTGIDPAIGGYVSTFYSKAYLRHLTISKEILAAQIASIHNLSFYLWLVGQAREHILAGDFAVWKDQMVKKVSTRL

SEQ ID NO: 51410 - protein, 376 aa, Algoriphagus aquimarinus
  misc_feature (1)..(376): tr|A0A1I1BGC0|A0A1I1BGC0_9BACT Queuine tRNA-ribosyltran sferase OS=Algoriphagus aquimarinus OX=237018 GN=tgt PE =3 SV=1
MKFTLEYSDSKSKARAGVVKTDHGDIQTPIFMPVGTAGSVKAVHQRELDQDIKAQIILGNTYHLYLRPGLDVLEKAGGLHKFNGWEKPILTDSGGYQVFSLSGTRKIKEDGVMFKSHIDGSKHHFTPENVMDIQRTIGADIIMAFDECTPYPCEYGYARNSMEMTHRWLTRCIGRFDETEGKYGYNQTLFPIVQGSVYKDLRTQSAEFIASTNQQGNAIGGLSVGEPAEMMYEMTELVTDILPKDKPRYLMGVGTPANILECIALGVDMFDCVMPTRNARNGMLFTSEGFINIRNEKWKDDFTGIDPAIGGYVSTFYTKAYLRHLTISKEILAAQIASIHNLSFYLWLVGQAREHILAGDFAVWKDQMVKKVSTRL

SEQ ID NO: 51411 - protein, 376 aa, Algoriphagus boritolerans
  misc_feature (1)..(376): tr|A0A1H5UPR7|A0A1H5UPR7_9BACT Queuine tRNA-ribosyltran sferase OS=Algoriphagus boritolerans DSM 17298 = JCM 18 970 OX=1120964 GN=tgt PE=3 SV=1
MKFTLGKKDLKTKARTGTLFTDHGEIQTPIFMPVGTAATVKAVHQRELIEDIKAQIILGNTYHLYLRPGLDILEKAGGLHKFNGWDRPILTDSGGYQVFSLAGTRKIKEAGVTFKSHIDGSKHEFTPENVMDIQRTIGADIIMAFDECTPYPCEYGYARNSMELTHRWLKRCIDRFDSTEGKYGYTQTFFPIVQGSVYKDLRKQSAEFIAAQGREGNAIGGLSVGEPVEMMYEMTELVTDILPADKPRYLMGVGTPANILECIALGVDMFDCVMPTRNARNGMLFTSAGIINIRNEKWKDDFSPIDPELGNYASTFYSKAYLRHLTISKEILAAQIASIHNLAFFLWLVGQAREHILAGDFAVWKDQMVKKVSTRL

SEQ ID NO: 51412 - protein, 394 aa, Algoriphagus boseongensis
  misc_feature (1)..(394): tr|A0A4R6T7M5|A0A4R6T7M5_9BACT Queuine tRNA-ribosyltran sferase OS=Algoriphagus boseongensis OX=1442587 GN=tgt PE=3 SV=1
MQAEPVNMQDVPLGRLKVMKFTLEKKDLQTKARVGRVETDHGTIQTPIFMPVGTAGTVKAVHQRELKEDIKAQIILGNTYHLYLRPGLDVLEKAGGLHQFNGWDRPILTDSGGYQVFSLAGTRKINEEGVTFKSHIDGSKHIFSPEGVMDIQRTIGADIIMAFDECTPYPCEYGYARKSMEMTHRWLDRCIDRFDSTEGKYGYRQTLFPIVQGSVYKDLRVQSAEFIASRNREGNAIGGLSVGEPAEMMYEMTELVTDILPTEKPRYLMGVGTPANILECIALGVDMFDCVMPTRNARNGMLFTSEGIINIRNEKWKEDFSPIDPAIGNYASSFYSKAYLRHLTISKEILAAQIASIHNLAFYLWLVGQAREHILLGDFGVWKDQMVKKVSTRL

SEQ ID NO: 51413 - protein, 376 aa, Algoriphagus chordae
  misc_feature (1)..(376): tr|A0A2W7QYG7|A0A2W7QYG7_9BACT Queuine tRNA-ribosyltran sferase OS=Algoriphagus chordae OX=237019 GN=tgt PE=3 S V=1
MKFTLSHQDPKSKARAGVVKTDHGDIQTPIFMPVGTAGSVKAVHQRELDQDIKAQIILGNTYHLYLRPGLDVLEKAGGLHKFNGWEKPILTDSGGYQVFSLSGTRKIKEDGVMFKSHIDGSKHHFTPENVMDIQRTIGADIIMAFDECTPYPCEYGYARNSMEMTHRWLTRCIDRFDATEGKYGYNQTLFPIVQGSVYKDLRKQSAEFIASTNQQGNAIGGLSVGEPAEMMYEMTELVTDILPQDKPRYLMGVGTPANILECIALGVDMFDCVMPTRNARNGMLFTSEGFINIRNEKWKDDFTSIDPAIGGYVSTFYSKAYLRHLTVSKEILAAQIASIHNLSFYLWLVGQAREHILAGDFAVWKDQMVKKVSTRL

SEQ ID NO: 51414 - protein, 376 aa, Algoriphagus faecimaris
  misc_feature (1)..(376): tr|A0A1G6QIT9|A0A1G6QIT9_9BACT Queuine tRNA-ribosyltran sferase OS=Algoriphagus faecimaris OX=686796 GN=tgt PE= 3 SV=1
MKFTLEKKDSQSQARAGEILTDHGMIQTPIFMPVGTAGTVKAVHQRELKEDIQAQIILGNTYHLYLRPGLDILEKAGGLHQFNGWDRPILTDSGGYQVFSLAGTRKIKEEGVTFKSHIDGSKHNFTPENVMDIQRTIGADIIMAFDECTPYPCEYGYARNSMEMTHRWLKRCIHRFDATEGKYGYSQTLFPIVQGSVYKDLRKQSAEFIAAQGREGNAIGGLSVGEPAEMMYEMTELVTEILPQEKPRYLMGVGTPANILECIALGVDMFDCVMPTRNARNGMLFTSEGIINIRNEKWKDDFSPIDPAIGNYASSFYSRAYLRHLTISKEILAAQIASIHNLAFYLWLVGQAREHILAGDFVTWKDQMVKKVSTRL

SEQ ID NO: 51415 - protein, 376 aa, Algoriphagus halophilus
  misc_feature (1)..(376): tr|A0A1N6FFJ8|A0A1N6FFJ8_9BACT Queuine tRNA-ribosyltran sferase OS=Algoriphagus halophilus OX=226505 GN=tgt PE= 3 SV=1
MKFTLSHQDSKSKARAGLVKTDHGEIETPIFMPVGTAGSVKAVHQRELLYDVKAEIILGNTYHLYLRPGLGILEKAGGLHKFNGWSKPILTDSGGYQVFSLSGTRKIKEDGVMFKSHIDGSKHHFTPENVMDIQRTIGADIIMAFDECTPYPCEYGYARNSMEMTHRWLKRCIERFDATEGKYGYSQTLFPIVQGSVYKDLRQKSAEFIANTHQEGNAIGGLSVGEPAEMMYEMTELVTDILPTDKPRYLMGVGTPANILECIALGVDMFDCVMPTRNARNGMLFTSEGIINIRNEKWKDDFSPIDSAIGGHVSTFYSKAYLRHLVISKEILAAQIASIHNLSFYLWLVKQAREHILAGDFAVWKDQMVKKVSTRL

SEQ ID NO: 51416 - protein, 376 aa, Algoriphagus hitonicola
  misc_feature (1)..(376): tr|A0A1I2VH47|A0A1I2VH47_9BACT Queuine tRNA-ribosyltran sferase OS=Algoriphagus hitonicola OX=435880 GN=tgt PE= 3 SV=1
MKFRLEKSDNQSKARAGKLETDHGTIQTPIFMPVGTAGTVKAVHQRELKEDIQAQIILGNTYHLYLRPGLDILEKAGGLHKFNGWDRPILTDSGGYQVFSLAGTRKIKEEGVTFKSHIDGSKHHFTAENVMDIQRTIGADIIMAFDECTPYPCEYGYARNSMEMTHRWLKRCIHRFDATEGKYGYSQTLFPIVQGSVYKDLRKQSAEFIAEQGREGNAIGGLSVGEPAEMMYEMTELVTDILPVDKPRYLMGVGTPANILECIALGVDMFDCVMPTRNARNGMLFTSEGIINIRNEKWKDDFSPIDPAIGNYASTFYSRAYLRHLTISKEILAAQIASIHNLSFYLWLVGQAREHILAGDFAVWKDQMVKKVSTRL

SEQ ID NO: 51417 - protein, 376 aa, Algoriphagus locisalis
  misc_feature (1)..(376): tr|A0A1I7D0M6|A0A1I7D0M6_9BACT Queuine tRNA-ribosyltran sferase OS=Algoriphagus locisalis OX=305507 GN=tgt PE=3 SV=1
MKFTLEYSDSKSKARAGVVKTDHGEIQTPIFMPVGTAGSVKAVHQRELDQDIKAQIILGNTYHLYLRPGLEVLEKAGGLHKFNGWGKPILTDSGGYQVFSLSGTRKIKEDGVMFKSHIDGSKHHFTPENVMDIQRTIGADIIMAFDECTPYPCEYGYARNSMEMTHRWLTRCIDRFEATEGKYGYNQTLFPIVQGSVYKDLRKQSAEFIASTNQQGNAIGGLSVGEPAEMMYEMTELVTDILPQDKPRYLMGVGTPANILECIALGVDMFDCVMPTRNARNGMLFTSEGFINIRNEKWKDDFTGIDPAIGGYVSTFYTKAYLRHLTISKEILAAQIASIHNLSFYLWLVGQAREHILAGDFAVWKDQMVKKVSTRL

SEQ ID NO: 51418 - protein, 376 aa, Algoriphagus machipongonensis
  misc_feature (1)..(376): tr|A3I2C5|A3I2C5_9BACT Queuine tRNA-ribosyltransferase OS=Algoriphagus machipongonensis OX=388413 GN=tgt PE=3 SV=1
MKFNLSHQDPKSKARAGVVKTDHGDIQTPIFMPVGTAGSVKAVHQRELMYDIKAEIILGNTYHLYLRPGLDILEKAGGLHKFNGWSKPILTDSGGYQVFSLAGTRKIKEDGVMFKSHIDGSKHHFTPENVMDIQRTIGADIIMAFDECTPYPCEYGYARNSMEMTHRWLKRCIDRFDSTEGKYGYSQTLFPIVQGSVYKDLRKQSAEFIASTNQEGNAIGGLSVGEPAEMMYEMTELVTDILPTDKPRYLMGVGTPANILECIALGVDMFDCVMPTRNARNGMLFTSEGIINIRNEKWKDDFSAIDPAIGGHVSTFYSKAYLRHLVISKEILAAQIASIHNLSFYLWLVKQAREHILSGDFAVWKDQMVKKVSTRL

SEQ ID NO: 51419 - protein, 376 aa, Algoriphagus marincola
  misc_feature (1)..(376): tr|A0A0P8CBI7|A0A0P8CBI7_9BACT Queuine tRNA-ribosyltran sferase OS=Algoriphagus marincola HL-49 OX=1305737 GN=t gt PE=3 SV=1
MKFTLAQEDPQSKARAGLVETDHGKIETPIFMPVGTAGTVKAVHQRELKEDVQAQIILGNTYHLYLRPGLDILEKAGGLHKFNGWDRPILTDSGGYQVFSLAGTRKIKEEGVTFKSHIDGSKHNFTPENVMDIQRTIGADIIMAFDECTPYPCEYGYARKSMEMTHRWLKRCAERFDSTEGKYGYNQTLFPIVQGSVYKDLRKQSAEFIAEQGREGNAIGGLSVGEPAEMMYEMTEIVTDLLPRDKPRYLMGVGTPANILECIALGVDMFDCVMPTRNARNGMLFTSEGIINIRNEKWKDDFTPIDPAIGNYASTFYSKAYLRHLTISKEILAAQIASIHNLSFYLWLVKEARNHILAGDFASWKTQMVKKVSTRL

SEQ ID NO: 51420 - protein, 398 aa, Algoriphagus ornithinivorans
  misc_feature (1)..(398): tr|A0A1I5ICP8|A0A1I5ICP8_9BACT Queuine tRNA-ribosyltran sferase OS=Algoriphagus ornithinivorans OX=226506 GN=tg t PE=3 SV=1
MDIFAGQSHHFVDEVHIIENQEMKFTLKHTDPQTKARVGTVETDHGTIQTPIFMPVGTAGSVKAVHQRELKEDIQAQIILGNTYHLYLRPGLDIIEKAGGLHRFNGWDRPILTDSGGYQVFSLSGSRKIKEDGVMFKSHIDGSKHHFTPENVMDIQRTIGADIIMAFDECTPYPCEYGYARKSMEMTHRWLDRCITQFDSTTGKYGYSQTLFPIVQGSVYKDLRKQSAEFIASREREGNAIGGLSVGEPAEMMYEMTELVTDILPQDKPRYLMGVGTPANILECIALGVDMFDCVMPTRNARNGMLFTSEGIINIRNKKWEDDFSAIDPAIGNYASTFYSKAYLRHLTISKEILAAQIASIHNLAFYLWLVGQAREHILAGDFAVWKEQMVKKVSTRL

SEQ ID NO: 51421 - protein, 376 aa, Algoriphagus ratkowskyi
  misc_feature (1)..(376): tr|A0A2W7RKU7|A0A2W7RKU7_9BACT Queuine tRNA-ribosyltran sferase OS=Algoriphagus ratkowskyi OX=57028 GN=tgt PE=3 SV=1
MKFTLEYSDSKSKARAGVVKTDHGEIQTPIFMPVGTAGSVKAVHQRELDQDIKAQIILGNTYHLYLRPGLDVLEKAGGLHKFNGWEKPILTDSGGYQVFSLSGTRKIKEDGVMFKSHIDGSKHHFTPENVMDIQRTIGADIVMAFDECTPYPCEYGYARNSMEMTHRWLTRCVGRFDETEGKYGYNQTLFPIVQGSVYKDLRKQSAEFIASTNQQGNAIGGLSVGEPAEMMYEMTELVTDILPKDKPRYLMGVGTPANILECIALGVDMFDCVMPTRNARNGMLFTSEGFINIRNEKWKDDFSGIDPAIGGYVSTFYSKAYLRHLTISKEILAAQIASIHNLSFYLWLVGQAREHILAGDFAVWKDQMVKKVSTRL

SEQ ID NO: 51422 - protein, 376 aa, Algoriphagus sp.
  misc_feature (1)..(376): tr|A0A418PTM4|A0A418PTM4_9BACT Queuine tRNA-ribosyltran sferase OS=Algoriphagus sp. N3 OX=2056311 GN=tgt PE=3 S V=1
MKFTLGKKDTQTKARTGTLITDHGDIQTPIFMPVGTAATVKAVHQRELKDDIKAQIILGNTYHLYLRPGLDILEKAGGLHKFNGWDRPILTDSGGYQVFSLAGTRKIKEEGVMFKSHIDGSKHEFTPENVMDIQRTIGADIIMAFDECTPYPCEYGYARNSMELTHRWLKRCINRFDTTEGKYGYSQTLFPIVQGSVYKDLRKQSAEFIASCDREGNAIGGLSVGEPAEMMYEMTELVTDILPSDKPRYLMGVGTPANILECIALGVDMFDCVMPTRNARNGMLFTSEGIINIRNEKWKDDFNPIDPAIGNYASTFYSKAYLRHLTISKEILAAQIASIHNLAFYLWLVGQAREHILAGDFGVWKDHMVKKVSTRL

SEQ ID NO: 51423 - protein, 376 aa, Algoriphagus sp.
  misc_feature (1)..(376): tr|A0A142ESL6|A0A142ESL6_9BACT Queuine tRNA-ribosyltran sferase OS=Algoriphagus sp. M8-2 OX=1727163 GN=tgt PE=3 SV=1
MKFTLEKTDSQSKARVGLIETDHGTIQTPIFMPVGTAATVKAVHQRELKEDIKAQIILGNTYHLYLRPGLEVLEKAGGLHRFNGWDRPILTDSGGYQVFSLAGTRKIKEEGVTFKSHIDGSKHNFTPENVMDIQRTIGADIIMAFDECTPYPCEYGYARNSMDLTHRWLKRCISRFDSTEGKYGYSQTLFPIVQGSVYKDLRKQSAEFIAEQGREGNAIGGLSVGEPAEMMYEMTELVTDILPTEKPRYLMGVGTPANILECIALGVDMFDCVMPTRNARNGMLFTSEGIINIRNEKWKDDFTSIDPAIGNYASTFYTKAYLRHLTISKEILAAQIASIHNLAFYLWLVNQAREHILAGDFAVWKDQMVKKVSTRL

SEQ ID NO: 51424 - protein, 385 aa, Algoriphagus yeomjeoni
  misc_feature (1)..(385): tr|A0A327PBB0|A0A327PBB0_9BACT Queuine tRNA-ribosyltran sferase OS=Algoriphagus yeomjeoni OX=291403 GN=tgt PE=3 SV=1
MSQQQPISDMKFTLAQQDSKSKARAGVIKTDHGDIQTPIFMPVGTAGSVKAVHQRELDQDVKAQIILGNTYHLYLRPGLDVLEKAGGLHKFNGWEKPILTDSGGYQVFSLSGTRKIKEDGVMFKSHIDGSKHHFTPENVMDIQRTIGADIIMAFDECTPYPCEYGYARNSMEMTHRWLTRCINQFDATEGKYGYNQTLFPIVQGSVYKDLRKQSAEFIASTNQQGNAIGGLSVGEPAEMMYEMTELVTDILPQDKPRYLMGVGTPANILECIALGVDMFDCVMPTRNARNGMLFTSEGFINIRNEKWKEDFSAIDPAIGGYVSTFYSKAYLRHLTVSKEILAAQIASIHNLSFYLWLVGQAREHILAGDFAVWKDQMVKKVSTRL

SEQ ID NO: 51425 - protein, 395 aa, Algoriphagus zhangzhouensis
  misc_feature (1)..(395): tr|A0A1M7ZII6|A0A1M7ZII6_9BACT Queuine tRNA-ribosyltran sferase OS=Algoriphagus zhangzhouensis OX=1073327 GN=tg t PE=3 SV=1
MQAKPIKTWIISTGQKSKKMKFTLQHADPQSKARAGQLETDHGTIQTPIFMPVGTAASVKAVHQRELKEDIKAQIILGNTYHLYLRPGLDVLEKAGGLHKFNGWDGPILTDSGGYQVFSLSGTRKIKEDGVMFKSHIDGSKHHFTPENVMDIQRTIGADIIMAFDECTPYPCEYGYARNSMEMTHRWLDRCIDRFDSTEGKYGYSQTLFPIVQGSVYKDLRQKSAEFIASRGREGNAIGGLSVGEPAEMMYEMTELVTDILPNDKPRYLMGVGTPANILECIALGVDMFDCVMPTRNARNGMLFTSEGIINIRNEKWKDDFTPIDPAIGNYASTFYSKAYLRHLTISKEILAAQIASIHNLAFYLWLVGQAREHILAGDFAVWKDHMVKKVSTRL

SEQ ID NO: 51426 - protein, 390 aa, Alicycliphilus denitrificans
  misc_feature (1)..(390): tr|A0A3R7IGY3|A0A3R7IGY3_9BURK Queuine tRNA-ribosyltran sferase OS=Alicycliphilus denitrificans OX=179636 GN=tg t PE=3 SV=1
MLQFQLLANDPSSHARRGTLTLNHGVVQTPIFMPVGTYGTVKGVMPRSLREMGAQIILGNTFHLWMRPGLDIVKDFGGLHGFEQWDRPILTDSGGFQVWSLGAMRKITEEGVHFASPVNGDKLFMSPEVSMQIQTILNSDIVMQLDECTPYETNGHKTTEAEARKSMEMSRRWAARSKAEFERLANPNALFGIVQGGMYEHLRQESLDALVEMDFPGYAIGGVSVGEPKDEMLRIMAHTPHRLPAHKPRYLMGVGTPEDLVEGVAQGVDMFDCVMPTRNARNGTIFTRYGDLKIRNARHKTDHQPLDPSCTCHACAGTEGVAWNDGGRGGFSRAYLHHLDRCGEMLGPMLTTIHNLHYYLNLMQEIRDALDAGAFAAFRARFKADRARGV

SEQ ID NO: 51427 - protein, 390 aa, Alicycliphilus denitrificans
  misc_feature (1)..(390): tr|E8TTQ6|E8TTQ6_ALIDB Queuine tRNA-ribosyltransferase OS=Alicycliphilus denitrificans (strain DSM 18852 / JCM 14587 / BC) OX=596153 GN=tgt PE=3 SV=1
MLQFQLLATDPSSHARRGTLTLNHGVVQTPIFMPVGTYGTVKGVMPRSLREMGAQIILGNTFHLWMRPGLDIVKDFGGLHGFEQWDRPILTDSGGFQVWSLGAMRKITEEGVHFASPVNGDKLFMSPEVSMQIQTILNSDIVMQLDECTPYETNGHKTTEAEARKSMEMSRRWAARSKAEFERLANPNALFGIVQGGMYEHLRQESLDALVEMDFPGYAIGGVSVGEPKDEMLRIMAHTPHRLPAHKPRYLMGVGTPEDLVEGVAQGVDMFDCVMPTRNARNGTLFTRYGDLKIRNARHKADHQPLDPSCTCHACAGTEGVAWNDGGRGGFSRAYLHHLDRCGEMLGPMLTTIHNLHYYLRLMQEIRDALDAGAFAAFRARFKADRARRV

SEQ ID NO: 51428 - protein, 459 aa, Alicycliphilus sp.
  misc_feature (1)..(459): tr|A0A0E9LJA1|A0A0E9LJA1_9BURK Queuine tRNA-ribosyltran sferase OS=Alicycliphilus sp. B1 OX=1603291 GN=tgt PE=3 SV=1
MLQFQLLATDPSSHARRGTLTLNHGVVQTPIFMPVGTYGTVKGVMPRSLREMGAQIILGNTFHLWMRPGLDIVKDFGGLHGFEQWDRPILTDSGGFQVWSLGAMRKITEEGVHFASPVNGDKLFMSPEVSMQIQTILNSDIVMQLDECTPYETNGHKTTEAEARKSMEMSRRWAARSKAEFERLANPNALFGIVQGGMYEHLRQESLDALVEMDFPGYAIGGVSVGEPKDEMLRIMAHTPHRLPAHKPRYLMGVGTPEDLVEGVAQGVDMFDCVMPTRNARNGTLFTRYGDLKIRNARHKADHQPLDPSCTCHACAGTEGVAWNDGGRGGFSRAYLHHLDRCGEMLGPMLTTIHNLHYYLRLMQEIRDALDAGAFAAFRARFKADRARRRLMDQPCAAAAAPQAWQNRANALLRVLQCPQRSNSPMPQCGQKSIFSFFKSTARSQPGHTPLAWRARATS

SEQ ID NO: 51429 - protein, 379 aa, Alicyclobacillus acidocaldarius
  misc_feature (1)..(379): tr|B7DNX2|B7DNX2_9BACL Queuine tRNA-ribosyltransferase OS=Alicyclobacillus acidocaldarius LAA1 OX=543302 GN=tg t PE=3 SV=1
MQAPVRYELLKRCSRTEARRGRLFTPHGVIDTPVFMPVGTQATVKTMAPWELEELGAGIILANTYHLHLRPGEDIVQRAGGLHAFMQWKGAILTDSGGFQVFSLASLRKITDEGVQFRSHIDGSPRFFSPETVMAIENALGADIIMQLDECPPYGASRSYLETSLRRTLAWAKRCKDAHARPEDQALFGIVQGGEHLDLRRRAVEELVELDLPGYAIGGLSVGEPKPLMYEILSHVAPLLPQGKPRYLMGVGSPDDLFEGVERGVDMFDCVLPTRIARNGTVFTSTGKMVMKHAQYRDDFRPIDPSCSCRVCRTFSRAYVRHLLKAEEILGVRLTTYHNVHFLLNLMKEIRKSIEEDRFLAFKREFYDRYGYTSEREDV

SEQ ID NO: 51430 - protein, 375 aa, Alicyclobacillus acidocaldarius
  misc_feature (1)..(375): tr|F8IFP9|F8IFP9_ALIAT Queuine tRNA-ribosyltransferase OS=Alicyclobacillus acidocaldarius (strain Tc-4-1) OX=1 048834 GN=tgt PE=3 SV=1
MRYELLKRCSRTEARRGRLYTPHGVIDTPVFMPVGTQATVKTMAPWELEELGAGIILANTYHLHLRPGEDIVQRAGGLHGFMQWKGAILTDSGGFQVFSLASLRKITDEGVQFRSHIDGSPRFFSPETVMAIENALGADIIMQLDECPPYGATRSYLETSLRRTLAWAKRCKESHARPEEQALFGIVQGGEHLDLRRQAVEALVELDLPGYAIGGLSVGEPKSLMYEILSHVAPLLPEEKPRYLMGVGSPDDLFEGVERGVDMFDCVLPTRIARNGTVFTSTGKMVMKHAQYRDDLLPIDPSCSCRVCRTFSRAYIRHLLKAEEILGVRLTTYHNVHFLLNLMREIRKSIEEDRFLAFKREFYSRYGYTSEREDV

SEQ ID NO: 51431 - protein, 380 aa, Alicyclobacillus acidoterrestris
  misc_feature (1)..(380): tr|A0A512CSC3|A0A512CSC3_9BACL Queuine tRNA-ribosyltran sferase OS=Alicyclobacillus acidoterrestris OX=1450 GN= tgt PE=3 SV=1
MTVPVRYELIQRCKDTSARRGRVYTPHGVIETPVFMPVGTQATVKTMAPWELEELGAKIILSNTYHLHLRPGEELVKQGGGLHGFMNWSGAVLTDSGGFQVFSLSELRKITDEGVAFRSHIDGSPRFFSPESVMGIENALGADIIMQLDECPPYPASREYLRTSLDRTLAWAKRCVAAHARPDEQALFGIVQGGEHLDLRREAAEALVELDLPGYAIGGLSVGEPKSLMYEILAYTTPFLPVDKPRYLMGVGSPDDLFEGVERGVDMFDCVLPTRIARNGTIFTSKGKLVLKNARFKDDFSPIDEDCDCRVCKTFTRAYIRHLLKAEEVLGIRLTTYHNVHFLLDLMEKMRKSIEENRFLAFKREFYDSYGYTEHREDVF

SEQ ID NO: 51432 - protein, 380 aa, Alicyclobacillus acidoterrestris
  misc_feature (1)..(380): tr|T0DN36|T0DN36_ALIAG Queuine tRNA-ribosyltransferase OS=Alicyclobacillus acidoterrestris (strain ATCC 49025 / DSM 3922 / CIP 106132 / NCIMB 13137 / GD3B) OX=135685 4 GN=tgt PE=3 SV=1
MTVPVRYELIQRCKDTSARRGRVYTPHGVIETPVFMPVGTQATVKTMAPWELEELGAKIILSNTYHLHLRPGEELVKQGGGLHGFMNWSGAVLTDSGGFQVFSLSELRKITDEGVAFRSHIDGSPRFFSPESVMGIENALGADIIMQLDECPPYPASREYLRTSLDRTLAWAKRCVAAHARPDEQALFGIVQGGEHLDLRREAAEALVDLDLPGYAIGGLSVGEPKPLMYEILAYTTPFLPADKPRYLMGVGSPDDLFEGVERGIDMFDCVLPTRIARNGTIFTSKGKLVLKNARFKDDFSPIDEDCNCRVCKTFTRAYIRHLLKAEEVLGIRLTTYHNVHFLLDLMEKMRKSIEENRFLAFKREFYDSYGYTEHREDVF

SEQ ID NO: 51433 - protein, 381 aa, Alicyclobacillus ferrooxydans
  misc_feature (1)..(381): tr|A0A0P9CRV2|A0A0P9CRV2_9BACL Queuine tRNA-ribosyltran sferase OS=Alicyclobacillus ferrooxydans OX=471514 GN=t gt PE=3 SV=1
MTQPIRYELLRRDEHSLARRGRLTTPHGVIETPVFMPVGTQATVKTMAPWELAEVGAGIILSNTYHLHLRPGEELVRKAGGLHGFMHWDGAVLTDSGGFQVFSLADLRKITDDGVTFRSHLDGSLHSFTPESVMEIENALGADIIMAFDECPPYPATREYVETSLRRTLDWAARCKAAHRRPDEQGLFGIVQGGEHIDLRKESAQRLVELDFPGYAIGGLSVGEPKPLMYEILSATTPWLPADKPRYLMGVGSPDDLFEGVERGVDMFDCVLPTRIARNGTVLTSEGKRVMKNARYGDDFLPLDPNCQCKVCQTFSRAYIRHLLKADEVLGIRLTTYHNVYFMLDLMKQIRQSLDEGRFLLYKQEFYARYGYNETNAGEEV

SEQ ID NO: 51434 - protein, 381 aa, Alicyclobacillus hesperidum
  misc_feature (1)..(381): tr|A0A1H2Q2S1|A0A1H2Q2S1_9BACL Queuine tRNA-ribosyltran sferase OS=Alicyclobacillus hesperidum OX=89784 GN=tgt PE=3 SV=1
MKQPVTYERIARCSHTLARRGRVHTPHGEIETPVFMPVGTQATVKTMAPWELTELGAQIILSNTYHLHLRPGEDIVRQAGGLHGFMQWPGAVLTDSGGFQVFSLASLRKITDEGVAFRSHIDGSPRFFSPESVMGIENALGADIIMQLDECPPYPASRGYLRTSLDRTLAWAKRCKEAHRRPEEQALFGIVQGGEHLDLRREAAERLVELDLPGYAVGGLSVGEPKPLMYEILAYTTPLLPADKPRYLMGVGSPDDLFEGVERGIDMFDCVLPTRIARNGTVFTATGKRVLKHARYRDDFRPLDEACSCRVCKTFSRAYIRHLLKADEILGLRLTSYHNVHFLLDMMAKIRKSIEEDRFLQLKREFYETYGYTGQREDVLD

SEQ ID NO: 51435 - protein, 381 aa, Alicyclobacillus hesperidum
  misc_feature (1)..(381): tr|J9HF84|J9HF84_9BACL Queuine tRNA-ribosyltransferase OS=Alicyclobacillus hesperidum URH17-3-68 OX=1200346 GN =tgt PE=3 SV=1
MKQPVTYERIARCSHTLARRGRVHTPHGEIETPVFMPVGTQATVKTMAPWELTELGAQIILSNTYHLHLRPGEDIVRQAGGLHGFMQWPGAVLTDSGGFQVFSLASLRKITDEGVAFRSHIDGSPRFFSPESVMGIENALGADIIMQLDECPPYPASREYLRTSLDRTLAWAKRCKEAHRRPEEQALFGIVQGGEHLDLRREAAERLVELDLPGYAVGGLSVGEPKPLMYEILAYTTPLLPADKPRYLMGVGSPDDLFEGVERGIDMFDCVLPTRIARNGTVFTATGKRVLKHARYRDDFRPLDEACSCRVCKTFSRAYIRHLLKADEILGLRLTSYHNVHFLLDMMAKIRKSIEEDRFLQLKREFYETYGYTGQREDVLD

SEQ ID NO: 51436 - protein, 383 aa, Alicyclobacillus macrosporangiidus
  misc_feature (1)..(383): tr|A0A1I7J0C6|A0A1I7J0C6_9BACL Queuine tRNA-ribosyltran sferase OS=Alicyclobacillus macrosporangiidus OX=392015 GN=tgt PE=3 SV=1
MEPVRFELIRRCPRTLARRGRLHTPHGTVETPVFMPVGTQATVKTMAPWELAEMGAGIILSNTYHLHLRPGEDMVREMGGLHAFMQWPGAILTDSGGFQVFSLADLRKITDEGVQFRSHLDGSLRFFSPERVMEIENALGADIIMAFDECPPYPASREYLETSLRRTLDWARRCQRAHARPEEQALFGIVQGGEHLDLRRQAVEALVELDLPGYAVGGLSVGEPKPVMHEVLAYTTPLLPADKPRYLMGVGTPEDLFEGVERGIDMFDCVLPTRIARNGTVLTSRGKLVIRNARYARDPRPLDEACDCRVCRTFSRAYIRHLIKAGEVLGIRLTTYHNVYFLLRLMEGIRRAIEAGRFPEYKREFYDTYGYNESGNIGEEGLD

SEQ ID NO: 51437 - protein, 378 aa, Alicyclobacillus montanus
  misc_feature (1)..(378): tr|A0A1M6KAJ1|A0A1M6KAJ1_9BACL Queuine tRNA-ribosyltran sferase OS=Alicyclobacillus montanus OX=1830138 GN=tgt PE=3 SV=1
MTSSIQFKILSTSSNTNARRGRLITPHGTIDTPVFMPVGTQATVKTLSPFELREMGAGIILSNTYHLHLRPGEDLVDEAGGLHQFMRWPGAVLTDSGGFQVFSLAKLRKITDEGVTFRSHIDGSPRFFSPETVMEIENKLGADIIMAFDECPPYPATREYIETSLKRTLAWAKRCKASHQRSDQQALFGIVQGGMYADLRREAALSLVDLDFPGYAIGGLSVGEPKPMMNEVLADVVCHLPVDKPRYLMGVGSPDDLFEGVERGVDMFDCVLPTRIARNGTVMTSRGKVVLKNAQYSRDFGPLDENCDCQVCKVYTRAYLRHLLKAGEVLGIRLTSYHNVYFLLDMMKKIRKSIEEDRFLAFKREFYESYGFASNDSE

SEQ ID NO: 51438 - protein, 381 aa, Alicyclobacillus sacchari
  misc_feature (1)..(381): tr|A0A4R8LU61|A0A4R8LU61_9BACL Queuine tRNA-ribosyltran sferase OS=Alicyclobacillus sacchari OX=392010 GN=tgt P E=3 SV=1
MKQPVTYELIGRCSHTLARRGRVHTPHGAIETPVFMPVGTQATVKTMAPWELTELGAQIILSNTYHLHLRPGEDIVRQAGGLHGFMQWPGAVLTDSGGFQVFSLASLRKITDEGVAFRSHIDGSPRFFSPESVMGIENALGADIIMQLDECPPYPASREYLRTSLERTLAWAKRCKEAHRRPDEQALFGIVQGGEHLDLRREAAERLVELDLPGYAVGGLSVGEPKPLMYDILGYTTPFLPADKPRYLMGVGSPDDLFEGVERGIDMFDCVLPTRIARNGTVFTATGKRVLKHARYRDDFRPLDEACSCRVCQTFSRAYIRHLLKADEILGLRLTSYHNVHFLLDMMARIRKSIEEDRFLQLKREFYETYGYTGQREDVLD

SEQ ID NO: 51439 - protein, 381 aa, Alicyclobacillus tengchongensis
  misc_feature (1)..(381): tr|A0A0V0PS25|A0A0V0PS25_9BACL Queuine tRNA-ribosyltran sferase OS=Alicyclobacillus tengchongensis OX=368812 GN =tgt PE=3 SV=1
MKQPVTYELIGRCSHTLARRGRVHTPHGAIETPVFMPVGTQATVKTMAPWELTELGAQIILSNTYHLHLRPGEDIVRQAGGLHGFMQWPGAVLTDSGGFQVFSLASLRKITDEGVAFRSHIDGSPRFFSPESVMGIENALGADIIMQLDECPPYPASREYLRTSLDRTLAWAKRCKEAHRRPEEQALFGIVQGGEHLDLRREAAERLVELDLPGYAVGGLSVGEPKPLMYEILAYTTPLLPADKPRYLMGVGSPDDLFEGVERGIDMFDCVLPTRIARNGTVFTATGKRVLKHARYRDDFSPLDEACSCRVCKTFSRAYIRHLLKADEILGLRLTSYHNVHFLLDMMAKIRKSIEEDRFLQLKREFYETYGYTGQREDVLD

SEQ ID NO: 51440 - protein, 380 aa, Alicyclobacillus vulcanalis
  misc_feature (1)..(380): tr|A0A1N7P9G2|A0A1N7P9G2_9BACL Queuine tRNA-ribosyltran sferase OS=Alicyclobacillus vulcanalis OX=252246 GN=tgt PE=3 SV=1
MLQAPVRFELIKRCSQTEARRGRLFTPHGVIETPVFMPVGTQATVKTMAPWELEELGAGIILSNTYHLHLRPGEDVVARAGGLHGFMQWKGAVLTDSGGFQVFSLASLRKITDEGVRFRSHIDGSPRFFSPETVMAIENALGADIIMQLDECPPYGATRSYLETSLQRTLAWAKRCKAAHARPEDQALFGIVQGGEHLDLRRRAVEELAELDLPGYAIGGLSVGEPKPLMYEILGHVAPLMPRDKPRYLMGVGSPDDLLEGVERGVDMFDCVLPTRIARNGTVFTSAGKVVMKHAKYREDFGPIDPACSCRVCRTFSRAYIRHLLKADEILGVRLTTYHNVHFLLNLMREIRKSIEEDRFLAFKREFYDRYGYTSEREDV

SEQ ID NO: 51441 - protein, 371 aa, Aliidiomarina haloalkalitolerans
  misc_feature (1)..(371): tr|A0A432VTJ4|A0A432VTJ4_9GAMM Queuine tRNA-ribosyltran sferase OS=Aliidiomarina haloalkalitolerans OX=859059 G N=tgt PE=3 SV=1
MKFELLKKTGKARRGQLKFARGTVDTPAFMPVGTLGTVKGMSPEELADTGAQICLGNTFHLMLRPGTSIIRQHGDLHDFMNWDKPILTDSGGFQVFSLGDLRKISEEGVTFRSPINGEKILLTPEKSMEVQRELGSDIVMIFDECTPYPATEKQAEDSMQLSLRWAERSKTAHGDNEAALFGIIQGGMYEHLRDVSLNGLTAIGFDGYAIGGLSVGEPKEDMMRILEHTAPQMPEDKPRYLMGVGKPEDLVEAVRRGIDMFDCVMPTRNARNGHLFTSEGVIKIRNARHRTDTAPLDPECDCYTCQNYSRAYLHHLDRCNEILGARLNTIHNLHFYQSLMKGMRDAIENDQFDQFVETFYAKRGETVPELD

SEQ ID NO: 51442 - protein, 371 aa, Aliidiomarina iranensis
  misc_feature (1)..(371): tr|A0A432VV57|A0A432VV57_9GAMM Queuine tRNA-ribosyltran sferase OS=Aliidiomarina iranensis OX=1434071 GN=tgt PE =3 SV=1
MKFELLKSTGKVRRGRMTFERGTVETPAFMPVGTLGTVKGMSPEELKATGAEICLGNTFHLMLRPGTQIIQQHGDLHDFMNWDKPILTDSGGFQVFSLGDLRKISEEGVVFRSPINGEKILLTPEKSMEVQRELGSDIVMIFDECTPHPATVKQAEDSMQLSLRWAQRSKEAHGDSKAALFGIIQGGMYEDLRDVSLTGLTNIGFDGYAIGGLSVGEPKEDMMRILDHVAPKMPEDKPRYLMGVGKPEDLVEAVRRGVDMFDCVMPTRNARNGHLFTSEGVIKIRNARHRTDTSPLDSRCDCYTCKHYSRAYLHHLDRCNEILGARLNTIHNLHYYQALMQGMRDAIENDQFDQFVNEFYAQRGENVPESA

SEQ ID NO: 51443 - protein, 425 aa, Aliidiomarina maris
  misc_feature (1)..(425): tr|A0A327WS59|A0A327WS59_9GAMM Queuine tRNA-ribosyltran sferase OS=Aliidiomarina maris OX=531312 GN=tgt PE=3 SV =1
MQRIKLAVHCDGNLKSIAQADKSARGCPFTERFVYNRASLCNINVVTMKFELDTTSGRARRGRMVFARGTVETPAFMPVGTLGTVKGMTPEEVKETGAQICLGNTFHLMLRPGTQIIQQHGDLHDFMHWDGPILTDSGGFQVFSLGELRKISEEGATFRSPINGEKILLTPEKSMQVQRELGSDIVMIFDECTPYPATYEQAQVSMELSLRWAQRSKDAHEGNPAALFGIIQGGMYEDLRDVSLHGLTDIGFDGYAIGGLSVGEPKEDMMRVLDHTAPQMPVDKPRYLMGVGKPEDLVEAVRRGVDMFDCVMPTRNARNGHLFVSDGVLKIRNAKHRTDPSPLDANCDCYTCKNYSRAYLHHLDRCNEILGARLNTIHNLRFYQIVMQGMRDALDNGTFDDFVSEFYAQRGLPVPPLGDAPAASA

SEQ ID NO: 51444 - protein, 375 aa, Aliidiomarina minuta
  misc_feature (1)..(375): tr|A0A432W4A9|A0A432W4A9_9GAMM Queuine tRNA-ribosyltran sferase OS=Aliidiomarina minuta OX=880057 GN=tgt PE=3 S V=1
MKFELDKTIGRARRGRMIFERGTVETPAFMPVGTLGTVKGMTPEELKETGAQICLGNTFHLMLRPGTQIIQQHGDLHDFMHWDGPILTDSGGFQVFSLGELRKITEEGATFRSPINGEKILLTPEKSMQVQRELGADIVMIFDECTPHPATTEEAETSMQLSLRWAQRSKEAHEGNSAALFGIIQGGMYEELRDVSLNGLTDIGFDGYAIGGLSVGEPKEDMMRILDHTAPQMPEDKPRYLMGVGKPEDLVEAVRRGIDMFDCVMPTRNARNGHLFVSEGVLKIRNARHRTDTSPLDASCDCYTCKNYSRAYLHHLDRCNEILGARLNTIHNLRFYQNVMQGLRDAIATDTLDQFVAEFYASRDLPVPVLPWEEA

SEQ ID NO: 51445 - protein, 371 aa, Aliidiomarina sanyensis
  misc_feature (1)..(371): tr|A0A432WCS1|A0A432WCS1_9GAMM Queuine tRNA-ribosyltran sferase OS=Aliidiomarina sanyensis OX=1249555 GN=tgt PE =3 SV=1
MKFELKKTIGKARRGQLQFDRGVVDTPAFMPVGTLGTVKGMTPEELKDTGAQICLGNTFHLMLRPGTSIVQQHGDLHDFMHWDKPILTDSGGFQVFSLGDLRKISEEGVTFRSPINGEKILLTPEKSMEVQRELGSDIVMIFDECTPYPATEKQAEDSMQLSLRWAERSKTAHGDSSAALFGIIQGGMYEHLRDVSLAGLTEIGFDGYAIGGLSVGEPKEDMMRILDHTAPKMPADKPRYLMGVGKPEDLVEAVRRGIDMFDCVMPTRNARNGHLFTSEGVIKIRNARHRTDTAPLDPECDCYTCKNYSRAYLHHLDRCNEILGARLNTIHNLHFYQTLMKGMRDAIENDQFDQFVADFYAKRGESVPPLD

SEQ ID NO: 51446 - protein, 371 aa, Aliidiomarina shirensis
  misc_feature (1)..(371): tr|A0A432WQX3|A0A432WQX3_9GAMM Queuine tRNA-ribosyltran sferase OS=Aliidiomarina shirensis OX=1048642 GN=tgt PE =3 SV=1
MKFELIKSIGKVRRGRMTFDRGTVETPAFMPVGTLGTVKGMSPEELKATGAEICLGNTFHLMLRPGTQIIQQHGDLHDFMNWDKPILTDSGGFQVFSLGDLRKISEEGVVFRSPINGEKILLTPEKSMEVQRELGSDVVMIFDECTPHPATVKQAEDSMQLSLRWAQRSKEAHGDSKAALFGIIQGGMYEDLRDVSLTGLTNIGFDGYAIGGLSVGEPKEDMMRILDHVAPKMPEDKPRYLMGVGKPEDLVEAVRRGVDMFDCVMPTRNARNGHLFTSEGVVKIRNARHRTDTAPLDTSCDCYTCKHYSRAYLHHLDRCNEILGARLNTIHNLHYYQALMQGMRDAIENDQFDQFVSDFYAKRGENVPESA

SEQ ID NO: 51447 - protein, 372 aa, Aliidiomarina soli
  misc_feature (1)..(372): tr|A0A432WDV2|A0A432WDV2_9GAMM Queuine tRNA-ribosyltran sferase OS=Aliidiomarina soli OX=1928574 GN=tgt PE=3 SV =1
MKFELDTTSGQARRGRMIFQRGTVETPAFMPVGTLGTVKGMTPEEVRETGAQICLGNTFHLMLRPGTQIIQQHGDLHDFMHWDGPILTDSGGFQVFSLGELRKISEEGATFRSPINGEKILLTPEKSIQVQRELGSDIVMIFDECTPHPATEEQAKSSMELSLRWAQRSKDAHEGNPAALFGIIQGGMYEELRDVSLNGLTDIGFDGYAIGGLSVGEPKEDMMRILSHTAPQMPADKPRYLMGVGKPEDLVEAVRRGVDMFDCVMPTRNARNGHLFVSDGVLKIRNARHRTDPGPLDETCDCYTCKNYSRAYLHHLDRCNEILGARLNTIHNLRFYQVVMQGMRDALDNGTFDDFVENFYAKRSLPVPALND

SEQ ID NO: 51448 - protein, 371 aa, Aliidiomarina sp.
  misc_feature (1)..(371): tr|A0A552X0M9|A0A552X0M9_9GAMM Queuine tRNA-ribosyltran sferase OS=Aliidiomarina sp. IM1326 OX=2593535 GN=tgt P E=3 SV=1
MKFELMKTAGRARRGQLQFERGVVDTPAFMPVGTLGTVKGMSPEELKDTGAQICLGNTFHLMLRPGTSIIRQHGDLHDFMNWDRPILTDSGGFQVFSLGELRKISEEGVTFRSPINGEKILLTPEKSMEVQRELGADVVMIFDECTPYPATEKQAEDSMQLSLRWAERSKEAHSDNPAALFGIIQGGMYEELRDVSLEGLTNIGFDGYAIGGLSVGEPKDDMMRILDHTAPKMPEDKPRYLMGVGKPEDLVEAVRRGVDMFDCVMPTRNARNGHLFTSEGVIKIRNARHRTDTAPLDADCDCYTCQNYSRAYLHHLDRCNEILGARLNTIHNLHYYQTLMQGMRDAIENDQFDQFVAAFYAKRGENVPPLD

SEQ ID NO: 51449 - protein, 372 aa, Aliidiomarina taiwanensis
  misc_feature (1)..(372): tr|A0A432X1J7|A0A432X1J7_9GAMM Queuine tRNA-ribosyltran sferase OS=Aliidiomarina taiwanensis OX=946228 GN=tgt P E=3 SV=1
MSFELISTTGKARRGRLTFPRGEVDTPAFMPVGTLGTVKGMTPEEVAATGAQICLGNTFHLMLRPGTDIIEQHGDLHDFMNWEKPILTDSGGFQVFSLGKLRKISEEGVDFRSPINGEKIMLTPEISIDVQRKLGSDIVMIFDECTPYPATHEEARVSMELSLRWAERSKRAHEGNDAALFGIVQGGMYEELRTISLEGLESIGFDGYAIGGLSVGEPKEDMMRILDHITPEMPEHKPRYLMGVGKPEDLVEAVRRGVDMFDCVMPTRNARNGHLFVREGVIKIRNARHKTDTGPLDPECSCYTCQNYSRAYLHHLHRSNEILGARLNTIHNLQYYQDVMQGMRHALDNNTFEDFVTEFYERKGLDVPDLLK

SEQ ID NO: 51450 - protein, 375 aa, Aliifodinibius roseus
  misc_feature (1)..(375): tr|A0A1M4XXR3|A0A1M4XXR3_9BACT Queuine tRNA-ribosyltran sferase OS=Aliifodinibius roseus OX=1194090 GN=tgt PE=3 SV=1
MFDLHKTALSTKARMGTLSTDHGTISTPIFMPVGTLGTVKAVKQDELIDKVKAQIILGNTYHLYLRPGCDIIENAGGLHSFINWDHPILTDSGGYQIFSLSDNRELKEEGAHFKSHLDGSKHLFTPENVVDIQRTLGSDIIMVLDECPPYPSSRDYAKESMELTHRWEKRGRQAFLNTSSKYEHGQFQFGIVQGGTYPDLRKESSKYVTDLDFEGIAIGGLSVGEPTELMYEMTDLNTDYLPENKPRYLMGVGKPANLLHCIARGIDMFDCVLPTRNARNGQIFTRNGYINIRNAKWKNHNRPLDPDFPTDLCSQYKMSYIHHLFRNSELLGLELASLHNLTFYLWLMEKVKERIANDSFHNWYQEKAKVLDTKI

SEQ ID NO: 51451 - protein, 375 aa, Aliifodinibius sediminis
  misc_feature (1)..(375): tr|A0A521F449|A0A521F449_9BACT Queuine tRNA-ribosyltran sferase OS=Aliifodinibius sediminis OX=1214077 GN=tgt P E=3 SV=1
MFELHKTATTTKARLGTLTTDHGTIETPIFMPVGTLGTVKAVKQDELIRKVKAQIILGNTYHLYLRPGCEIIENAGGLHSFISWDHPILTDSGGYQIFSLSDNRELKEEGAHFKSHLDGSKHLFTPENVVEIQRILGSDIMMILDECPPYPSSHDYAKESMELTHRWEKRGRDAFLNSIPHYNHQQFQFGIVQGGTYPDLRKESAKYITDLDFEGIAIGGLSVGEPIELMYEMTDLNTDYLPKEKPRYLMGVGKPANLLHCIARGIDMFDCVLPTRNARNGQIFTPDGYVNIRNAKWKNHNRPLDPDFPTDLCSRYKMSYIHHLFRNNELLGLALASLHNLTFYLWLMEEARNRIADDTFHSWYKQKAELLDTKI

SEQ ID NO: 51452 - protein, 375 aa, Aliifodinibius sp.
  misc_feature (1)..(375): tr|A0A2A2G746|A0A2A2G746_9BACT Queuine tRNA-ribosyltran sferase OS=Aliifodinibius sp. WN023 OX=2032627 GN=tgt P E=3 SV=1
MFKLKKTASSTKARLGTLSTDHGKIDTPIFMPVGTLGTVKAVKQDELIDKVKAQIILGNTYHLYLRPGCDIIENAGGLHSFINWDRPILTDSGGYQIFSLSDNRELTEEGAKFKSHLDGSKHMFTPENIVDIQRTLGSDIMMVLDECPPYPSSYEYAKESMELTHRWEKRGREAFLNTKPKYSHKQAQFGIVQGGTYEDLRIESSKYVTDLDFEGIAIGGLSVGEPTELMYEMTDLNTDYLPEDKPRYLMGVGKPENLLHAIARGIDMFDCVLPTRNARNGQIFTRNGYINIRNAKWKNHQKPLDPDFPTDLCQKYKMSYIHHLFRNNELLGLELASLHNLTFYLWLMDKVKERITNDTFHTWYKEKAEVLGTKI

SEQ ID NO: 51453 - protein, 370 aa, Aliiglaciecola lipolytica
  misc_feature (1)..(370): tr|K6YH36|K6YH36_9ALTE Queuine tRNA-ribosyltransferase OS=Aliiglaciecola lipolytica E3 OX=1127673 GN=tgt PE=3 SV=1
MKFELDTTDGKARRGRLVFDRGVVETPAFMPVGTYGTVKGMTPEELDETGAHICLGNTFHLMLRPGTEIMKQHGDLHDFMHWDKPILTDSGGFQVFSLGDLRKITEEGVTFRSPINGEKILLTPEKSMEVQRDLGSDIVMIFDECTPYPATEPDARRSMELSLRWAKRSKQAHEGNPSALFGIIQGGMYEGLRDQSLKGLEDIGFDGYAIGGLSVGEPKEDMIRILDHTADKIPAEKPRYLMGVGRPEDIVEAVRRGIDMFDCVMPTRNARNGHLFVTEGVIKIRNAKHKTDIGPLDEKCDCYTCKNYSRSYLHHLDKCNEILGARLNTIHNLRYYQRVMQGLRDAIAEQKLDQFVEQFYAQKDMPVPAL

SEQ ID NO: 51454 - protein, 374 aa, Aliiglaciecola sp.
  misc_feature (1)..(374): tr|A0A553KXU1|A0A553KXU1_9ALTE Queuine tRNA-ribosyltran sferase OS=Aliiglaciecola sp. M165 OX=2593649 GN=tgt PE =3 SV=1
MKFELETTDGNARRGRLVFERGVVETPAFMPVGTYGTVKGMTPEELKDTGAHICLGNTFHLMLRPGTEIMKQHGDLHDFMHWDKPILTDSGGFQVFSLGDLRKITEEGVTFRSPINGEKILLTPEKSMEVQKDLGSDIVMIFDECTPYPATEAEARRSMELSLRWAKRSKDSHQGNPSALFGIIQGGMYEGLRDLSLKGLEDIGFDGYAIGGLSVGEPKEDMIRVLDHTAHKIPQDKPRYLMGVGRPEDIVEAVRRGIDMFDCVMPTRNARNGHLFVTDGVIKIRNAKHKTDTGPLDEKCDCYTCKNYSRSYLHHLDKCNEILGARLNTIHNLRYYQRVMQGLRDAIAEHKLDDFVAQFYADKNMPVPALEQQK

SEQ ID NO: 51455 - protein, 373 aa, Aliikangiella marina
  misc_feature (1)..(373): tr|A0A545TI04|A0A545TI04_9GAMM Queuine tRNA-ribosyltran sferase OS=Aliikangiella marina OX=1712262 GN=tgt PE=3 SV=1
MKFKLLTTDGAARRAQLEFERGTVNTPAFMPVGTYGSVKGMSPERVEHTGAEIILGNTFHLMLRPGTEIIQMHGDLHDFTHWQGPILTDSGGFQVFSLGDLRKITEEGVTFRSPVNGEKVFLGPEESMQVQRELGSDIVMIFDECTPYPATEEEAKVSMELSLRWAKRSKEAHGDNPAALFGIVQGGMYPELREVSRIGLEAIGFDGYAIGGLSVGESKEEMKMVLDNLMPNMPDNKPRYLMGVGKPEDIVEAVRRGVDMFDCVIPTRNARNGHLFTSTGVVRIRNSPNKKDTGPIDPNCDCYTCQNYSRAYIHHMDKCGEMFGAELATIHNLHYYQHLMKGLREAIETGTLTDFVEKFYADRGLEVPPMASL

SEQ ID NO: 51456 - protein, 372 aa, Aliikangiella sp.
  misc_feature (1)..(372): tr|A0A545UA94|A0A545UA94_9GAMM Queuine tRNA-ribosyltran sferase OS=Aliikangiella sp. M105 OX=2592383 GN=tgt PE= 3 SV=1
MKFTLQATDGQARRGQLSFERGTINTPAFMPVGTYGSVKGMSPERVVETGAEIILGNTFHLMLRPGTEIIQMHGDLHDFMNWQGPILTDSGGFQVFSLGELRKISEKGVTFRSPVNGDKVFLGPEESMQVQKALGSDIVMIFDECTPYPATEKQAKESMELSLRWAERSKIAHGDNKSALFGIVQGGMYPELREVSLQGLTKIGFDGYAIGGLSVGESKEEMRLVLNNLTPKMPTDKPRYLMGVGKPEDIVEAVRRGVDMFDCVMPTRNARNGHLFTSTGVVRLRNSPNKRDTGPIDDNCSCYTCANYSRAYLHHLDKCGEMFGAELATIHNLHYYQHLMKGLREAIETGTLCDFVENFYAARGLPVPPLEN

SEQ ID NO: 51457 - protein, 379 aa, Aliiroseovarius crassostreae
  misc_feature (1)..(379): tr|A0A0P7IGT2|A0A0P7IGT2_9RHOB Queuine tRNA-ribosyltran sferase OS=Aliiroseovarius crassostreae OX=154981 GN=tg t PE=3 SV=1
MTQDTTTFSYTLKATDGRARTGVISTPRGEIRTPAFMPVGTAATVKAMMPESVAATGADILLGNTYHLMLRPTAERIHALGGLHKFMNWSKPILTDSGGFQVMSLSSLRKLTEKGVTFRSHIDGSKHELTPERSMEIQRLLGSDIVMCFDECPALPADRKRIAESMRLSMRWAERSREAFGDRPGHALFGIMQGGLEKDFREESAKALIEIGFDGYAIGGLAVGEGQEAMFDCLEFAPGFLPEDKPRYLMGVGKPDDIVGAVKRGVDMMDCVLPSRSGRTGQVWTRHGVLNIKNARHADDPRPVDENCTCPACRNYSRAYLHHVFRSNEMISGMLLTWHNLHYFQEIMQGMRDAIFEGRFDAWEAEFHAQRAQGDIAPL

SEQ ID NO: 51458 - protein, 380 aa, Aliiroseovarius halocynthiae
  misc_feature (1)..(380): tr|A0A545SS94|A0A545SS94_9RHOB Queuine tRNA-ribosyltran sferase OS=Aliiroseovarius halocynthiae OX=985055 GN=tg t PE=3 SV=1
MTDQSTTKFSYTLKATDGRARTGVIHTPRGDIRTPAFMPVGTAATVKAMMPESVAATGADILLGNTYHLMLRPTAERIDRLGGLHKFMNWDKPILTDSGGFQVMSLAGLRKLTEKGVTFKSHIDGSKHELTPERSMEIQKLLGSDIVMCFDECPALPADRKRIAESMRLSMRWAQRSRDAFGDRPGHALFGIMQGGLEADLREESAKALREIEFDGYAIGGLAVGEGQEAMFDCLDYAPGYLPEDKPRYLMGVGKPDDIVGAVKRGVDMMDCVLPSRSGRTGQVWTRHGVLNIKNARHQDDPRPIDENCTCPACQNYSRAYLHHVFRSNEMISGMLLTWHNLHYFQEIMQGMRDAISEGRFDAWEADFHANRAQGDIDPL

SEQ ID NO: 51459 - protein, 380 aa, Aliiroseovarius pelagivivens
  misc_feature (1)..(380): tr|A0A2R8AL92|A0A2R8AL92_9RHOB Queuine tRNA-ribosyltran sferase OS=Aliiroseovarius pelagivivens OX=1639690 GN=t gt PE=3 SV=1
MTDQSTKKFSYTLKATDGRARTGVIHTPRGDIRTPAFMPVGTAATVKAMMPESVAATGADILLGNTYHLMLRPTAERIDRLGGLHKFMNWDKPILTDSGGFQVMSLASLRKLTEKGVTFKSHIDGSKHELTPERSMEIQKLLGSDIVMCFDECPALPADRKRIAESMRLSMRWAQRSRDAFGDRPGYALFGIMQGGLERDFREESAEALKEIGFEGYAIGGLAVGEGQEAMFDCLDYAPGFLPEDKPRYLMGVGKPDDIVGAVKRGVDMMDCVLPSRSGRTGQVWTRMGVLNIKNARHQDDPRPIDENCTCPACTNYSRAYLHHVFRSNEMISGMLLTWHNLHYFQEIMQGMRDAISEGRFDAWEADFHANRAQGDIDPL

SEQ ID NO: 51460 - protein, 383 aa, Aliiroseovarius sediminilitoris
  misc_feature (1)..(383): tr|A0A1I0Q477|A0A1I0Q477_9RHOB Queuine tRNA-ribosyltran sferase OS=Aliiroseovarius sediminilitoris OX=1173584 G N=tgt PE=3 SV=1
MSRMQDQSQNRITFSLNATDGKARTGVISTPRGDIRTPAFMPVGTAATVKAMMPESVAATGADILLGNTYHLMLRPTAERIDRLGGLHKFMNWDKPILTDSGGFQVMSLAGLRKLTEKGVTFKSHIDGSKHELTPERSMDIQRLLGSDIVMCFDECPALPADRGRIAESMRLSMRWAARSKEAFGDRPGHALFGIMQGGLERDFREESAEALKKIGFDGYAVGGLAVGEGQASMFDCLDFAPGFLPDDKPRYLMGVGKPDDIVGAVKRGIDMMDCVLPSRSGRTGQVFTRHGVLNIKNARHQDDPRPLDESCGCPACRNYSRAYLHHVFRAQEMISGMLLTWHNLHYFQDIMQGMRDAIAKQAFAEWETAFHAGRAQGDIDPL

SEQ ID NO: 51461 - protein, 375 aa, Aliishimia ponticola
  misc_feature (1)..(375): tr|A0A4S4NRG5|A0A4S4NRG5_9RHOB Queuine tRNA-ribosyltran sferase OS=Aliishimia ponticola OX=2499833 GN=tgt PE=3 SV=1
MTSFSFDLQATDGRARTGVISTPRGDIRTPAFMPVGTAATVKAMMPESVRATGADILLGNTYHLMLRPTAERIDRLGGLHKFMNWDRPILTDSGGFQVMSLAGLRKLTEEGVTFKSHVDGSKHMLSPERSMEIQRLLGSDIVMCFDECPALPADRDRIAASMELSMRWAARSREAFGDRPGHALFGIQQGGLEEDLRAQSAEALREIGFEGYAVGGLAVGEGQEAMFGCLDYAPEQLPQDKPRYLMGVGKPDDIVGAVARGIDMMDCVLPSRSGRTGQVFTRLGVLNIKNARHQDDPRPLDEECTCPACRNYSRAYLHHVFRTQEIISSMLLTWHNLHYYQQIMDQMRHAIAEGRFEAWQTEFTQTRAQGDIDPL

SEQ ID NO: 51462 - protein, 375 aa, Aliivibrio finisterrensis
  misc_feature (1)..(375): tr|A0A4Q5KP91|A0A4Q5KP91_9GAMM Queuine tRNA-ribosyltran sferase OS=Aliivibrio finisterrensis OX=511998 GN=tgt P E=3 SV=1
MKYELLKKQGRARRGQLQFDRGTVETPAFMPVGTYGTVKGMTPEEVKGTGAEILLGNTFHLWLRPGQEIMKLHGDLHDFMNWKGPILTDSGGFQVFSLGKTRKITEEGVHFRSPVNGDKVFMDAEKSMQIQYDLGSDVVMIFDECTPYPATHDEARISMERSIRWADRSRNEFDRQENPNALFGIVQGGVYEDLRDVSVEALTKIGFDGYAVGGLAVGEPKEDMHRILEHTCPQLPEDKPRYLMGVGKPEDLVEGVRRGIDMFDCVMPTRNARNGHLFVTGGVIKIRNAKHKTDTTPLDPECDCYTCQNYSKSYLHHLDRCNEILGARLNTIHNLRYYQRIMASIRKALEEERFEQFVEEFYARRDREVPPLKDL

SEQ ID NO: 51463 - protein, 375 aa, Aliivibrio fischeri
  misc_feature (1)..(375): sp|Q5E3D2|TGT_ALIF1 Queuine tRNA-ribosyltransferase OS= Aliivibrio fischeri (strain ATCC 700601 / ES114) OX=312 309 GN=tgt PE=3 SV=1
MKYELIKKQGRARRGQLQFDRGTVETPAFMPVGTYGTVKGMTPEEVKGTGAEILLGNTFHLWLRPGQEIMKLHGDLHDFMNWKGPILTDSGGFQVFSLGKTRKITEEGVHFRSPVNGDKIFMDAEKSMQIQYDLGSDVVMIFDECTPYPATHDEARISMERSIRWAERSRNEFDRQENPNALFGIVQGGVYEDLRDVSVEALTKIGFDGYAVGGLAVGEPKEDMHRILEHTCPQLPEDKPRYLMGVGKPEDLVEGVRRGIDMFDCVMPTRNARNGHLFVTGGVIKIRNAKHKTDTTPLDPECDCYTCQNYSKSYLHHLDRCNEILGARLNTIHNLRYYQRIMASIRKALEEDRFEQFVEEFYARRDREVPPLKDL

SEQ ID NO: 51464 - protein, 375 aa, Aliivibrio fischeri; identical to SEQ ID NO: 51463
  misc_feature (1)..(375): sp|B5F9Y3|TGT_ALIFM Queuine tRNA-ribosyltransferase OS= Aliivibrio fischeri (strain MJ11) OX=388396 GN=tgt PE=3 SV=1

SEQ ID NO: 51465 - protein, 375 aa, Aliivibrio logei
  misc_feature (1)..(375): tr|A0A1B9NXY3|A0A1B9NXY3_ALILO Queuine tRNA-ribosyltran sferase OS=Aliivibrio logei OX=688 GN=tgt PE=3 SV=1
MKYELIKKQGRARRGQLQFDRGTVETPAFMPVGTYGTVKGMTPEEVKDTGAEILLGNTFHLWLRPGQEIMKLHGDLHDFMNWKGPILTDSGGFQVFSLGKTRKITEEGVHFRSPVNGDKIFMDAEKSMQIQYDLGSDVVMIFDECTPYPATHDEARISMERSIRWADRSRNEFDRQENPNALFGIVQGGVYEDLRDVSVEALTKIGFDGYAVGGLAVGEPKEDMHRILEHTCPQLPEDKPRYLMGVGKPEDLVEGVRRGIDMFDCVMPTRNARNGHLFVTGGIVKIRNAKHKVDTTPLDPECDCYTCQNYSKSYLHHLDRCNEILGARLNTIHNLRYYQRIMASIRKALEEDRFEQFVEEFYARRDREVPPLKDL

SEQ ID NO: 51466 - protein, 375 aa, Aliivibrio salmonicida
  misc_feature (1)..(375): sp|B6EK65|TGT_ALISL Queuine tRNA-ribosyltransferase OS= Aliivibrio salmonicida (strain LFI1238) OX=316275 GN=tg t PE=3 SV=1
MKYELIKKQGRARRGQLQFDRGTVETPAFMPVGTYGTVKGMTPEEVKDTGAEILLGNTFHLWLRPGQEIMKLHGDLHDFMNWKGPILTDSGGFQVFSLGKTRKITEEGVHFRSPVNGDKIFMDAEKSMQIQYDLGSDVVMIFDECTPYPATHDEARISMERSIRWADRSRNEFDRQENPNALFGIVQGGVYEDLRDVSVEALTKIGFDGYAVGGLAVGEPKEDMHRILEHTCPLLPEDKPRYLMGVGKPEDLVEGVRRGIDMFDCVMPTRNARNGHLFVTGGIVKIRNAKHKVDTTPLDPECDCYTCQNYSKSYLHHLDRCNEILGARLNTIHNLRYYQRIMASIRKALEEDRFEQFVEEFYARRDREVPPLKDL

SEQ ID NO: 51467 - protein, 375 aa, Aliivibrio sifiae
  misc_feature (1)..(375): tr|A0A2S7XES8|A0A2S7XES8_9GAMM Queuine tRNA-ribosyltran sferase OS=Aliivibrio sifiae OX=566293 GN=tgt PE=3 SV=1
MKYELLKKQGRARRGQLQFDRGTVETPAFMPVGTYGTVKGMTPEEVKDTGAEILLGNTFHLWLRPGQEIMKLHGDLHDFMNWKGPILTDSGGFQVFSLGKTRKITEEGVHFRSPVNGDKVFMDAEKSMQIQYDLGSDVVMIFDECTPYPATHDEARISMERSIRWADRSRNEFDRQENPNALFGIVQGGVYEDLRDVSVEALTKIGFDGYAVGGLAVGEPKEDMHRILEHTCPQLPEDKPRYLMGVGKPEDLVEGVRRGIDMFDCVMPTRNARNGHLFVTGGVIKIRNAKHKTDTTPLDPECDCYTCQNYSKSYLHHLDRCNEILGARLNTIHNLRYYQRIMASIRKALEEERFEQFVEEFYARRDREVPPLKDL

SEQ ID NO: 51468 - protein, 375 aa, Aliivibrio sifiae
  misc_feature (1)..(375): tr|A0A2S7XG97|A0A2S7XG97_9GAMM Queuine tRNA-ribosyltran sferase OS=Aliivibrio sifiae OX=566293 GN=tgt PE=3 SV=1
MKYELLKKQGRARRGQLQFDRGTVETPAFMPVGTYGTVKGMTPEEVKDTGAEILLGNTFHLWLRPGQEIMKLHGDLHDFMNWKGPILTDSGGFQVFSLGKTRKITEEGVHFRSPVNGDKIFMDAEKSMQIQYDLGSDVVMIFDECTPYPATHDEARISMERSIRWADRSRNEFDRQENPNALFGIVQGGVYEDLRDVSVEALTKIGFDGYAVGGLAVGEPKEDMHRILEHTCPQLPEDKPRYLMGVGKPEDLVEGVRRGIDMFDCVMPTRNARNGHLFVTGGVIKIRNAKHKTDTTPLDPECDCYTCQNYSKSYLHHLDRCNEILGARLNTIHNLRYYQRIMASIRKALEEERFEQFVEEFYARRDREVPPLKDL

SEQ ID NO: 51469 - protein, 375 aa, Aliivibrio sp.
  misc_feature (1)..(375): tr|A0A1B9P8P7|A0A1B9P8P7_9GAMM Queuine tRNA-ribosyltran sferase OS=Aliivibrio sp. 1S175 OX=1840087 GN=tgt PE=3 SV=1
MKYELLKKQGRARRGQLQFDRGTVETPAFMPVGTYGTVKGMTPEEVKDTGAEILLGNTFHLWLRPGQEIMKLHGDLHDFMNWKGPILTDSGGFQVFSLGKTRKITEEGVHFRSPVNGDKIFMDAEKSMQIQYDLGSDVVMIFDECTPYPATHDEARISMERSIRWADRSRNEFDRQENPNALFGIVQGGVYEDLRDVSVEALTKIGFDGYAVGGLAVGEPKEDMHRILEHTCPQLPEDKPRYLMGVGKPEDLVEGVRRGIDMFDCVMPTRNARNGHLFVTGGVIKIRNAKHKIDTTPLDPECDCYTCQNYSKSYLHHLDRCNEILGARLNTIHNLRYYQRIMASIRKALEEERFEQFVEEFYARRDREVPPLKDL

SEQ ID NO: 51470 - protein, 375 aa, Aliivibrio wodanis; identical to SEQ ID NO: 51468
  misc_feature (1)..(375): tr|A0A090INT4|A0A090INT4_9GAMM Queuine tRNA-ribosyltran sferase OS=Aliivibrio wodanis OX=80852 GN=tgt PE=3 SV=1

SEQ ID NO: 51471 - protein, 376 aa, Alishewanella aestuarii
  misc_feature (1)..(376): tr|J2IHW9|J2IHW9_9ALTE Queuine tRNA-ribosyltransferase OS=Alishewanella aestuarii B11 OX=1197174 GN=tgt PE=3 S V=1
MKFELLATDGKARRGQLIFERGVVDTPAFMPVGTYGTVKGMTPEELDATGAQICLGNTFHLMLRPGTEIIRKHGDLHDFMHWHKPILTDSGGFQVFSLGELRKITEEGVKFRSPLNGEKIMLTPERSMQVQRALGSDIVMIFDECTPYPATEPQARKSMELSLRWAKRSKEAHGDNPSALFGIIQGGMYPHLRDISLQGLEEIGFDGYAIGGLSVGEPKADMINILNHTTDKMPAHKPRYLMGVGKPEDIVEAVRRGVDMFDCVMPTRNARNGHLFVSDGVVKIRNAKHKDDTAPLDKECDCYTCKNYSRAYLHHLDRCNEILGARLNTIHNLHHYQKLMQGLRAAIAAGKLDDFVADFYAKRGLPVPALADETNQ

SEQ ID NO: 51472 - protein, 376 aa, Alishewanella agri
  misc_feature (1)..(376): tr|I9P1I2|I9P1I2_9ALTE Queuine tRNA-ribosyltransferase OS=Alishewanella agri BL06 OX=1195246 GN=tgt PE=3 SV=1
MKFELLATDGKARRGQLIFQRGVVDTPAFMPVGTYGTVKGMTPEELDATGAQICLGNTFHLMLRPGTEIIRKHGDLHDFMHWHKPILTDSGGFQVFSLGELRKITEEGVKFRSPLNGEKIMLTPERSMEVQRDLGSDIVMIFDECTPYPATEPQARKSMELSLRWAKRSKDAHGDNPSALFGIIQGGMYPHLRDISLQGLEEIGFDGYAIGGLSVGEPKADMINILNHTTDKMPAQKPRYLMGVGKPEDIVEAVRRGVDMFDCVMPTRNARNGHLFVSDGVVKIRNAKHKDDTAPLDKECDCYTCKNYSRAYLHHLDRCNEILGARLNTIHNLHHYQKLMQGLRAAIAAGKLDDFVADFYAKRGLPVPALSAATNE

SEQ ID NO: 51473 - protein, 376 aa, Alishewanella jeotgali
  misc_feature (1)..(376): tr|H3ZGM4|H3ZGM4_9ALTE Queuine tRNA-ribosyltransferase OS=Alishewanella jeotgali KCTC 22429 OX=1129374 GN=tgt PE=3 SV=1
MKFELLATDGKARRGQLIFERGVVDTPAFMPVGTYGTVKGMTPEELDATGAQICLGNTFHLMLRPGTEIIRKHGDLHDFMHWHKPILTDSGGFQVFSLGELRKITEEGVKFRSPLNGEKIMLTPERSMEVQRALGSDIVMIFDECTPYPATEPQARKSMELSLRWAKRSKDAHGDNPSALFGIIQGGMYPHLRDISLQGLEEIGFDGYAIGGLSVGEPKADMINILNHTTDKMPAHKPRYLMGVGKPEDIVEAVRRGVDMFDCVMPTRNARNGHLFVSDGVVKIRNAKHKDDTAPLDKECDCYTCKNYSRAYLHHLDRCNEILGARLNTIHNLHHYQKLMQGLRAAIAAGKLDDFVADFYAKRGLPVPALADETNQ

SEQ ID NO: 51474 - protein, 376 aa, Alishewanella sp.; identical to SEQ ID NO: 51473
  misc_feature (1)..(376): tr|A0A1C2C818|A0A1C2C818_9ALTE Queuine tRNA-ribosyltran sferase OS=Alishewanella sp. HH-ZS OX=1856684 GN=tgt PE =3 SV=1

SEQ ID NO: 51475 - protein, 376 aa, Alishewanella sp.
  misc_feature (1)..(376): tr|A0A259NRZ3|A0A259NRZ3_9ALTE Queuine tRNA-ribosyltran sferase OS=Alishewanella sp. 34-51-39 OX=1970316 GN=tgt PE=3 SV=1
MKFELLATDGKARRGQLIFQRGVVDTPAFMPVGTYGTVKGMTPEELDATGAQICLGNTFHLMLRPGTEIIRKHGDLHDFMHWHKPILTDSGGFQVFSLGELRKITEEGVKFRSPLNGEKIMLTPERSMEVQRDLGSDIVMIFDECTPYPATEPQARKSMELSLRWAKRSKDAHGDNPSALFGIIQGGMYPHLRDISLQGLEEIGFDGYAIGGLSVGEPKADMINILNHTTDKMPAQKPRYLMGVGKPEDIVEAVRRGVDMFDCVMPTRNARNGHLFVSDGVVKIRNAKHKDDTAPLDKECDCYTCKNYSRAYLHHLDRCNEILGARLNTIHNLHHYQKLMQGLRAAIAAGKLDDFVADFYAKRGLPVPALTAETNE

SEQ ID NO: 51476 - protein, 378 aa, Alistipes finegoldii
  misc_feature (1)..(378): tr|I3YL34|I3YL34_ALIFI Queuine tRNA-ribosyltransferase OS=Alistipes finegoldii (strain DSM 17242 / JCM 16770 / AHN 2437 / CCUG 46020 / CIP 107999) OX=679935 GN=tgt P E=3 SV=1
MSMKFTLQHKDPATKARAGELTTDHGVIRTPIFMPVGTAATVKGIFHRDVRDEARAQIILANTYHLYMRPGMEVIEKAGGVHRFSTWEGPMLTDSGGFQVFSLAACRKLKEEGCHFRSHIDGSKHLFTPESVMDTERTIGADIMMAFDECPPGDAPREYAAKSLALTERWLERCFNRYHQTEPKYGHYQALFPIVQGCTYPDLRAHAAENVKQYDADGYAIGGLAVGEPTDVMYEMIEVVNAILPEERPRYLMGVGTPVNILEAIERGVDMFDCVMPTRNGRNGQLFTAEGVINIRNKKWEDDFSPIDPEGTAFVDTLYTKAYLHHLVTCGEMLAAQIASLHNIAFYLRLVGMAREHIAAGDFKPWKDAMVAKLTRRL

SEQ ID NO: 51477 - protein, 378 aa, Alistipes finegoldii
  misc_feature (1)..(378): tr|A0A174ZEB4|A0A174ZEB4_9BACT Queuine tRNA-ribosyltran sferase OS=Alistipes finegoldii OX=214856 GN=tgt PE=3 S V=1
MSMKFTLQHKDPASKARAGELATDHGVIRTPIFMPVGTAATVKGIFHRDVRDEARAQIILANTYHLYMRPGMEIIEKAGGVHRFSTWEGPMLTDSGGFQVFSLAACRKLKEEGCHFRSHIDGSKHLFTPESVVDTERTIGADIMMAFDECPPGDAPREYAAKSLALTERWLDRCFDRYHQTEPKYGHYQALFPIVQGCTYPDLRAHAAENVQQYGADGYAIGGLAVGEPTEVMYEMIEVVNAILPEDRPRYLMGVGTPVNILEGIERGVDMFDCVMPTRNGRNGQLFTAEGVINIRNKKWEDDFSPIDPEGTAFVDTLYTKAYLHHLVTCGEMLAAQIASLHNIAFYLRLVTMAREHIAAGDFRPWKETMVQKLTQRL

SEQ ID NO: 51478 - protein, 376 aa, Alistipes indistinctus
  misc_feature (1)..(376): tr|A0A412SFH7|A0A412SFH7_9BACT Queuine tRNA-ribosyltran sferase OS=Alistipes indistinctus OX=626932 GN=tgt PE=3 SV=1
MEFQLLHTDSRSAARAGVLSTDHGEIRTPIFMPVGTVGSVKGVFHRDLEQEVGAQIILGNTYHLYLRPGTDILEQAGGLHRFSAWNRPILTDSGGFQVFSLADCRKLAEEGCRFHSHIDGSAHLFTPERVIDIQRSIGADIMMAFDECPPGDAEYDYAKKSWELTSRWLGRCFEQYAKTEPKYGHYQSLFPIVQGCTYPDLRARSAEFVQQFGADGYAIGGLAVGEPAPVMYEMIELVNSILPQDKPRYLMGVGTPVNLLEAIERGVDMFDCVMPTRNGRNGMLFTSEGIINIRNQKWRDDFSPVDPMGHCFADTAYTKAYLRHLTIAGEMMAAQIASLHNLAFYLWLVGEAREQILQGTFSEWKPVMVEKLSRRL

SEQ ID NO: 51479 - protein, 376 aa, Alistipes indistinctus
  misc_feature (1)..(376): tr|A0A5B5UAY3|A0A5B5UAY3_9BACT Queuine tRNA-ribosyltran sferase OS=Alistipes indistinctus OX=626932 GN=tgt PE=3 SV=1
MEFQLLHTDSRSAARAGVLSTDHGEIRTPIFMPVGTVGSVKGVFHRDLEQEVGAQIILGNTYHLYLRPGTDILEQAGGLHRFSAWNRPILTDSGGFQVFSLADCRKLAEEGCRFHSHIDGSAHLFTPERVIDIQRSIGADIMMAFDECPPGDAEYDYAKKSWELTSRWLGRCFEQYAKTEPKYGHYQSLFPIVQGCTYPDLRARSAEFVQQFGADGYAIGGLAVGEPAPVMYEMIELVNSILPQDKPRYLMGVGTPVNLLEAIERGVDMFDCVMPTRNGRNGMLFTSEGIINIRNQKWRDDFSPVDPMGHCFADTAYTKAYLRHLTIAGEMMAAQIASLHNLAFYLWLVGEAREQILQGTFSEWKHVMVEKLSRRL

SEQ ID NO: 51480 - protein, 375 aa, Alistipes inops
  misc_feature (1)..(375): tr|A0A0B0BTY4|A0A0B0BTY4_9BACT Queuine tRNA-ribosyltran sferase OS=Alistipes inops OX=1501391 GN=tgt PE=3 SV=1
MTFEVEHRAAGSAARAGRFTTDHGTVETPVFMPVGTAASVKGVFHRDLAEAGARIILANTYHLYLRPGMEVIEAAGGVHRFCTWDKPMLTDSGGFQVFSLAQCRKLTEEGCRFSSHIDGSRHLFTPENVIDTQRTIGADIMMAFDECPPGDSPRDYAAKSLLLTQRWLERCFERYAATAPKYGHRQSLFPIVQGCTYPDLRAGAAEFVQQFGADGYAIGGLAVGEPAPVMYEMIEIVNGILPQDKPRYLMGVGTPVNILEAIDRGVDMFDCVMPTRNGRNGMLFTSEGIINIRNQKWREDFSPIDPMGHCFADTLYSKAYLRHLAVSGEMLAAQIASLHNIAFYMWLVDEARRRIADGTFAEWKRGMVVKLTRRL

SEQ ID NO: 51481 - protein, 52 aa, Alistipes obesi
  misc_feature (1)..(52): tr|A0A3D3YLP0|A0A3D3YLP0_9BACT tRNA guanosine(34) trans glycosylase Tgt (Fragment) OS=Alistipes obesi OX=111806 1 GN=tgt PE=4 SV=1
MQFTLRHTDTRTEARAGELATDHGVIRTPIFMPVGTAAAVKGIFHRDVRDEA

SEQ ID NO: 51482 - protein, 376 aa, Alistipes onderdonkii
  misc_feature (1)..(376): tr|A0A5B5PRK2|A0A5B5PRK2_9BACT Queuine tRNA-ribosyltran sferase OS=Alistipes onderdonkii OX=328813 GN=tgt PE=3 SV=1
MKFTLQHKDPASKARAGELATDHGVIRTPIFMPVGTAATVKGIFHRDVRDEARAQIILANTYHLYMRPGMEIIEKAGGVHRFSTWEGPMLTDSGGFQVFSLAACRKLKEEGCHFRSHIDGSKHLFTPESVVDTERTIGADIMMAFDECPPGDAPREYAAKSLALTERWLDRCFDRYHQTEPKYGHYQALFPIVQGCTYPDLRAHAAENVQQYGADGYAIGGLAVGEPTEVMYEMIEVVNAILPEDRPRYLMGVGTPVNILEGIERGVDMFDCVMPTRNGRNGQLFTAEGVINIRNKKWEDDFSPIDPEGTAFVDTLYTKAYLHHLVTCGEMLAAQIASLHNIAFYLRLVTMAREHIAAGDFRPWKETMVQKLTQRL

SEQ ID NO: 51483 - protein, 376 aa, Alistipes onderdonkii
  misc_feature (1)..(376): tr|A0A4Q5I8E3|A0A4Q5I8E3_9BACT Queuine tRNA-ribosyltran sferase OS=Alistipes onderdonkii OX=328813 GN=tgt PE=3 SV=1
MKFTLQHKDPASKARAGELATDHGVIRTPIFMPVGTAATVKGIFHRDVRDEARAQIILANTYHLYMRPGMEIIEKAGGVHRFSTWEGPMLTDSGGFQVFSLAACRKLKEEGCHFRSHIDGSKHLFTPESVVDTERTIGADIMMAFDECPPGDAPREYAAKSLALTERWLDRCFDRYHQTEPKYGHYQALFPIVQGCTYPDLRAHAAENVQQYGADGYAIGGLAVGEPTEVMYEMIEVVNAILPEDRPRYLMGVGTPVNILEGIERGVDMFDCVMPTRNGRNGQLFTAEGVINIRNKKWEDDFSPIDPEGTAFVDTLYTKAYLHHLVTCGEMLAAQIASLHNIAFYLRLVTMAREHIAAGDFRPWKEAMVGKLQRRL

SEQ ID NO: 51484 - protein, 376 aa, Alistipes putredinis
  misc_feature (1)..(376): tr|R7JP04|R7JP04_9BACT Queuine tRNA-ribosyltransferase OS=Alistipes putredinis CAG:67 OX=1263036 GN=tgt PE=3 S V=1
MKFTLQHKDPSSQARAGELQTDHGVVKTPIFMPVGTAATVKGIFHRDVRDEARAQIILANTYHLYLRPGMDILERAGGVHRFSTWDGPMLTDSGGFQVFSLAGCRKLKEEGCHFQSHIDGSRHLFTPESVIDTERTIGADIMMAFDECPPGDSPRDYAAKSLALTERWLDRCFNRYRQTSPKYGHYQALFPIVQGCTYPDLRARAAENVKQYDADGYAIGGLAVGEPTDVMYEMIEVVNAILPEDRPRYLMGVGTPINILEGIARGVDMFDCVMPTRNGRNGQIFTSEGTINIRNKKWEDDFSPIDPEGTAFVDHVYTKAYLHHLTICQEMLGAQIASLHNIAFYLRLVTEARRHIGAGDFTPWKERMVAKLGRRL

SEQ ID NO: 51485 - protein, 376 aa, Alistipes putredinis; identical to SEQ ID NO: 51484
  misc_feature (1)..(376): tr|A0A1Q6F429|A0A1Q6F429_9BACT Queuine tRNA-ribosyltran sferase OS=Alistipes putredinis OX=28117 GN=tgt PE=3 SV =1

SEQ ID NO: 51486 - protein, 376 aa, Alistipes shahii
  misc_feature (1)..(376): tr|A0A5B3GDS6|A0A5B3GDS6_9BACT Queuine tRNA-ribosyltran sferase OS=Alistipes shahii OX=328814 GN=tgt PE=3 SV=1
MKFILQHKDPSSHARAGELHTDHGVIRTPIFMPVGTAATVKGIFHRDVCDEARAQIILANTYHLYLRPGTEILERAGGVHRFSTWEGPMLTDSGGFQVFSLAACRKLKEEGCHFRSHIDGSKHLFTPESVIDTERTIGADIMMAFDECPPGDAPREYAAKSLGLTERWLDRCFNQYHRTSPKYGHYQALFPIVQGCTYPDLRARAAENVKQYDADGYAIGGLAVGEPTEVMYEMIEVVNAILPEDRPRYLMGVGTPVNILEGIERGVDMFDCVMPTRNGRNGQLFTAEGVINIRNKKWEDDFSPVDPAGTAFVDRLYSKAYLHHLCVCGEMLAAEIASLHNIAFYLRLVGAAREHILAGDFRAWKEGMVEKLTRRL

SEQ ID NO: 51487 - protein, 376 aa, Alistipes shahii
  misc_feature (1)..(376): tr|A0A5B3GUK1|A0A5B3GUK1_9BACT Queuine tRNA-ribosyltran sferase OS=Alistipes shahii OX=328814 GN=tgt PE=3 SV=1
MKFILQHKDPSSHARAGELHTDHGVIRTPIFMPVGTAATVKGIFHRDVRDEARAQIILANTYHLYLRPGMEILERAGGVHRFSTWEGPMLTDSGGFQVFSLAACRKLKEEGCHFRSHIDGSKHLFTPESVIDTERTIGADIMMAFDECPPGDAPREYAAKSLGLTERWLDRCFNQYHRTSPKYGHYQALFPIVQGCTYPDLRARAAENVKQYDADGYAIGGLAVGEPTEVMYEMIEVVNAILPEDRPRYLMGVGTPVNILEGIERGVDMFDCVMPTRNGRNGQLFTAEGVINIRNKKWEDDFSPVDPAGTAFVDRLYSKAYLHHLCVCGEMLAAEIASLHNIAFYLRLVGAAREHILAGDFRAWKEGMVEKLTRRL

SEQ ID NO: 51488 - protein, 376 aa, Alistipes sp.
  misc_feature (1)..(376): tr|R5II36|R5II36_9BACT Queuine tRNA-ribosyltransferase OS=Alistipes sp. CAG:831 OX=1262698 GN=tgt PE=3 SV=1
MRFTLLSADPASCARRGRIETDHGIIETPIFMPVGTVGSVKGVYHRDLKNDIGAQIILGNTYHLYLRPGLETLRMAGGLHKFAGWDRPILTDSGGFQVFSLADSRKLTPEGCTFRSHIDGSAHSFTPENNVDTQRIIGADIIMALDECTPGDADRNYARKSLDLTEQWLKRGIARFRETEPLYGYSQAFFPIVQGCVYPDLRIEAAENVASYDCEGYAIGGLSVGEPTDVMYGMIETVHPVLPKDRPRYLMGVGTPENLLEGIARGIDMFDCVMPTRNGRNGMLFTWEGRMNMRNKKWERDFSPIDPHGTSFVDTAYTKAYLRHLFVAGEMLAAQIASEHNLAFYLDVVAQARKHIEAGDFLPWKEAAVKRLQNRL

SEQ ID NO: 51489 - protein, 376 aa, Alistipes sp.
  misc_feature (1)..(376): tr|A0A1Q6EAI0|A0A1Q6EAI0_9BACT Queuine tRNA-ribosyltran sferase OS=Alistipes sp. 56_sp_Nov_56_25 OX=1896969 GN= tgt PE=3 SV=1
MKFTLQHKDPSSHARAGELHTDHGVIRTPIFMPVGTAATVKGIFHRDVRDEARAQIILANTYHLYLRPGTEILERAGGVHRFSTWEGPMLTDSGGFQVFSLAACRKLKEEGCHFRSHIDGSKHLFTPESVIDTERTIGADIMMAFDECPPGDAPREYAAKSLGLTERWLDRCFNQYHRTSPKYGHYQALFPIVQGCTYPDLRARAAENVKQYDADGYAIGGLAVGEPTEVMYEMIEVVNAILPEDRPRYLMGVGTPVNILEGIERGVDMFDCVMPTRNGRNGQLFTAEGVINIRNKKWEDDFSPVDPAGTAFVDRLYSKAYLHHLCVCGEMLAAEIASLHNIAFYLRLVGAAREHILAGDFRAWKEGMVEKLTRRL

SEQ ID NO: 51490 - protein, 376 aa, Alistipes timonensis
  misc_feature (1)..(376): tr|A0A1H4B0K3|A0A1H4B0K3_9BACT Queuine tRNA-ribosyltran sferase OS=Alistipes timonensis JC136 OX=1033731 GN=tgt PE=3 SV=1
MKFTLQHKDPSSRARAGELQTDHGTIRTPIFMPVGTAATVKGIFHRDVRDEARAQIILANTYHLYLRPGMEIIEKAGGVHRFSTWEGPMLTDSGGFQVFSLAACRKLKEEGCHFRSHIDGSKHLFTPESVIDTERTIGADIMMAFDECPPGDAPREYAARSLDLTERWLDRCFNQYHRTDPKYGHYQALFPIVQGCTYPDLRARAAENVKQYDADGYAIGGLAVGEPTEVMYEMIDVVNAILPEDRPRYLMGVGTPVNILEGIARGVDMFDCVMPTRNGRNGQLFTAEGVINIRNKKWEDDFSPIDPQGTAFVDTLYSKAYLHHLTVCGEMLAAQIASLHNIAFYLRLVGAAREHILAGDFAAWKEEMVAKLQKRL

SEQ ID NO: 51491 - protein, 371 aa, Aliterella atlantica
  misc_feature (1)..(371): tr|A0A0D8ZQY6|A0A0D8ZQY6_9CYAN Queuine tRNA-ribosyltran sferase OS=Aliterella atlantica CENA595 OX=1618023 GN=t gt PE=3 SV=1
MADFSFQALANCSETKARVGVFYTPHGVVETPRFMPVGTLANVKTITPKQLQETGAQMVLSNTYHLHLQPGESIVGQAGGLHAFMGWQGPMLTDSGGFQVFSLSQMRKISEAGVVFRSPHGGEIINFTPELSIQIQNILGADVIMAFDECPPYPATRGEVQAACDRTYRWLERCIVAHNRPDQALFGIVQGGVHLDLRATAAEALAALNLPGYAIGGVSVGEPPELIAKIVAATTPLLPLDKPRYLMGVGTYREMAQAIASGIDLFDCVIPTRLARHGAALVQGERWNLKNAQFRADFTPLDATCPCYACQNFTRAYISHLVRSQEILAYTLLSIHNITELVGFTQKIRDSILSDRFATDFEDWLAPTDNS

SEQ ID NO: 51492 - protein, 378 aa, Alkalibacillus haloalkaliphilus
  misc_feature (1)..(378): tr|A0A511W625|A0A511W625_9BACI Queuine tRNA-ribosyltran sferase OS=Alkalibacillus haloalkaliphilus OX=94136 GN= tgt PE=3 SV=1
MAITYELIKTCKQTGARLGKVHTPHGSFETPVFMPVGTLATVKTMAPEELKEIGANIILSNTYHLWLRPGEDVVEEAGGLHKFMNWDGSILTDSGGFQVFSLSDMRQIEEEGVHFRNHISGAKLFLSPEKAMHIQNSLGSDIMMAFDECPPYPASYDYMKASVERTSRWAERCLEAHQKPGQQGLFGIIQGGEYEELRKQSARDLTSLDFPGYAIGGLSVGEPKDVMNKVLDFTTPLLPDEKPRYLMGVGSPDSLVDGAMRGVDMFDCVLPTRIARNGTCMTSNGRLVVRNAKFAKDFTPIDENCDCYTCRNYTKAYIRHLIKANETLGIRLTTYHNLYFLVKLMGQVRNAIKEDRLGDFRDEFFEQYGFNKPDAKNF

SEQ ID NO: 51493 - protein, 370 aa, Alkalibacter saccharofermentans
  misc_feature (1)..(370): tr|A0A1M4S4S5|A0A1M4S4S5_9FIRM Queuine tRNA-ribosyltran sferase OS=Alkalibacter saccharofermentans DSM 14828 OX =1120975 GN=tgt PE=3 SV=1
MAVRYEHIKTCKQTGARLGRLHTPHGIIETPIFMPVGTQATVKSLTPEDIKSTGAQVILSNTYHLYIRPGTEVIKKAGGLHKFMNWDMPILTDSGGYQVFSLGDLRRIEEEGVTFRSHLDGSKHFISPEDAIKIQNILGSDIIMAFDECTPYPADYQYAKKSMERTLRWAQRCKDAHTNTQNQALFGIVQGGMYDDLRVESAKETVKIGFPGYAIGGLSVGEPKELMYKALDAVVPHLPEDKARYLMGVGSIDALFEGVLRGIDMFDCVLQTRIARNGTAMTSSGKVVIKNAKYEMDFSPLDPECDCYTCKNFTKAYLRHLIKANEILGLRLLSSHNLHFTLKTMGNIRKAILEDRLADYKDEFFNKYRY

SEQ ID NO: 51494 - protein, 381 aa, Alkalibacterium gilvum
  misc_feature (1)..(381): tr|A0A1H6UHL4|A0A1H6UHL4_9LACT Queuine tRNA-ribosyltran sferase OS=Alkalibacterium gilvum OX=1130080 GN=tgt PE= 3 SV=1
MSDHPVTYQLEKKEKHTGARLGKITTPHGTFETPMFMPVGTLATVKTIAPEELEEMGAGIILSNTYHLWLRPGADIVEEAGGLHEFMNWDKGILTDSGGFQVFSLSDLRDIKEEGVHFRSHLDGSKLFLSPEKAINVQNQLGPDIMMSFDECPPFDESYDYVKKSVERTSRWAERGLNAHKKPNSQGLFGIVQGAGFEDLRKQSAKDLTSMDFAGYSIGGLSVGEPKSEMYRVLDFTTPLLPENKPRYLMGVGTPDALIEGVMRGVDMFDCVLPTRIARNGTTMTSKGRLVVKNAAYARDYRPLDEKCECYTCRNYTRAYLRHLIKSNETLGLRLASYHNLYFLLNLMKNVRQAIREDNLLEFKNQFFEEYGYNEPNAKNF

SEQ ID NO: 51495 - protein, 381 aa, Alkalibacterium kapii
  misc_feature (1)..(381): tr|A0A511ATD7|A0A511ATD7_9LACT Queuine tRNA-ribosyltran sferase OS=Alkalibacterium kapii OX=426704 GN=tgt PE=3 SV=1
MSNHPVTYKLEKKEKHTGARLGTITTPHGTFDTPMFMPVGTLATVKTIAPEELEEMGAGIILSNTYHLWLRPGSDIVEEAGGLHQFMNWDKGILTDSGGFQVFSLSDLRDIKEEGVHFRSHLDGSKLFLSPEKAINVQNQLGSDIMMSFDECPPFDESYDYVKKSVERTSRWAERGLEAHKRKDTQGLFGIVQGAGFEDLRKQSAKDLTSMDFAGYSIGGLSVGEPKSEMYRVLDFTTPLLPEDKPRYLMGVGTPDALIEGVMRGVDMFDCVLPTRIARNGTTMTSKGRLVVKNAAFARDFRPLDEKCDCYTCRNYTRAYLRHLIKSNETLGLRLTSYHNLYFLLNLMKNVRQAIREDNLLEFRNQFFEEYGYNEPNAKNF

SEQ ID NO: 51496 - protein, 381 aa, Alkalibacterium olivapovliticus
  misc_feature (1)..(381): tr|A0A2T0W268|A0A2T0W268_9LACT Queuine tRNA-ribosyltran sferase OS=Alkalibacterium olivapovliticus OX=99907 GN= tgt PE=3 SV=1
MTNHPVTYQLEKKDKRTGARLGKITTPHGTFETPMFMPVGTLATVKTIAPEELEEMGAGIILSNTYHLWLRPGEDLIEEAGGLHKFMNWSKGILTDSGGFQVFSLSDMRKIEEEGVHFKSHLDGSKLFLSPEKAINIQNKLGPDIMMSFDECPPFDESFDYVKKSVERTSRWAERGLEAHQKPDSQGLFGIVQGAGFEELRKQSAKDLTSMNFAGYSIGGLSVGEPKEDMYRVLDFTTPLLPEDKPRYLMGVGTPDALIEGVMRGVDMFDCVLPTRIARNGTTMTSKGRVVIKNATYARDFRPLDEKCDCYTCRNYTRAYLRHLLKSDETFGLRLTSYHNLYFLLDLMKKVRQAIREDNLLEFKEAFFEEYGYNKPNAKNF

SEQ ID NO: 51497 - protein, 381 aa, Alkalibacterium pelagium
  misc_feature (1)..(381): tr|A0A1H7NAL6|A0A1H7NAL6_9LACT Queuine tRNA-ribosyltran sferase OS=Alkalibacterium pelagium OX=426702 GN=tgt PE =3 SV=1
MSNHPVTYTLEKKDKRTGARLGKITTPHGTFETPMFMPVGTLATVKTIAPEELEEMGAGIILSNTYHLWLRPGEDLIAEAGGLHAFMNWDKGILTDSGGFQVFSLSDMRRIEEEGVHFKSHLDGSKLFLSPEKAINIQNKLGPDIMMSFDECPPFDESYDYVKKSVERTSRWAERGLEAHQNPDRQGLFGIVQGAGFEDLRKQSAKDLTSMDFAGYSIGGLSVGEPKEDMYRVLDFTTPLLPEHKPRYLMGVGTPDALIEGVMRGVDMFDCVLPTRIARNGTTMTSKGRVVIKNAIYARDFRPLDEKCGCYTCRNYTRAYLRHLLKSDETFGLRLTSYHNLYFLLDLMKKVRQAIREDNLLEFKEQFFEEYGYNKPNAKNF

SEQ ID NO: 51498 - protein, 381 aa, Alkalibacterium putridalgicola
  misc_feature (1)..(381): tr|A0A1H7SZK7|A0A1H7SZK7_9LACT Queuine tRNA-ribosyltran sferase OS=Alkalibacterium putridalgicola OX=426703 GN= tgt PE=3 SV=1
MSNHPVTYKLEKKEKHTGARLGTITTPHGTFETPMFMPVGTLATVKTIAPEELEEMGAGIILSNTYHLWLRPGADIVEEAGGLHKFMNWDKGILTDSGGFQVFSLSDLRDIKEEGVHFRSHLDGSKLFLSPEKAINVQNQLGPDIMMSFDECPPYDESYDYVKKSVERTSRWAERGLEAHKNRDTQGLFGIVQGAGFEDLRRQSAKDLTSMDFAGYSIGGLSVGEPKSEMYRVLDFTTPLLPEDKPRYLMGVGTPDALIEGVMRGVDMFDCVLPTRIARNGTTMTSKGRLVVKNAAYARDFRPLDEKCDCYTCRNYSRAYLRHLIKSNETFGLRLTSYHNLYFLLNLMKNVRQAIREDNLLEFKEQFFEEYGYNEPNAKNF

SEQ ID NO: 51499 - protein, 381 aa, Alkalibacterium sp.
  misc_feature (1)..(381): tr|A0A011QRM8|A0A011QRM8_9LACT Queuine tRNA-ribosyltran sferase OS=Alkalibacterium sp. AK22 OX=1229520 GN=tgt P E=3 SV=1
MSNHPVTYQLEKKDKRTGARLGKITTPHGTFETPMFMPVGTLASVKTIAPEELEEMGAGIILSNTYHLWLRPGEDIVEEAGGLHQFMNWDKGILTDSGGFQVFSLSDMRKIEEEGVHFRSHLDGSKLFLSPEKAINVQNKLGPDIMMSFDECPPFDESYDYVKKSVERTSRWAERGLKAHKKPDTQGLFGIVQGAGFEELRKQSAKDLTSMDFAGYSIGGLSVGEPKPDMYRVLDFTTPLLPEDKPRYLMGVGTPDALIEGVMRGVDMFDCVLPTRIARNGTTMTSKGRVVIKNAAYARDFRPLDEKCGCYTCRNYSRAYIRHLIKSDETFGLRLTSYHNLYFLLDLMKKVRQAIREDNLTEFKEAFFEEYGYNKPNAKNF

SEQ ID NO: 51500 - protein, 381 aa, Alkalibacterium sp.
  misc_feature (1)..(381): tr|A0A1L8PKI6|A0A1L8PKI6_9LACT Queuine tRNA-ribosyltran sferase OS=Alkalibacterium sp. 20 OX=1798803 GN=tgt PE= 3 SV=1
MSDQPVTYKLEKKEKHTGARLGTITTPHGTFETPMFMPVGTLATVKTLAPEELEAMGAGIILSNTYHLWLRPGADIIEEAGGLHKFMNWDKGILTDSGGFQVFSLSDLRDIKEEGVHFRSHLDGSKLFLSPEKAINVQNQLGPDIMMSFDECPPYDESYDYVKKSVERTSRWAERGLEAHRKPDTQGLFGIVQGAGFEDLRRQSAKDLTSLDFAGYSIGGLSVGEPKSEMYRVLDFTTPLLPENKPRYLMGVGTPDALIEGVMRGVDIFDCVLPTRIARNGTTMTSKGRLVLKNAAFARDFRPLDEKCDCYTCRNYSRAYLRHLIKSNETFGLRLTSYHNLYFLINLMKNVRQAIREDNLLEFKENFFEEYGYNKPDAKNF

SEQ ID NO: 51501 - protein, 381 aa, Alkalibacterium subtropicum
  misc_feature (1)..(381): tr|A0A1I1E7R2|A0A1I1E7R2_9LACT Queuine tRNA-ribosyltran sferase OS=Alkalibacterium subtropicum OX=753702 GN=tgt PE=3 SV=1
MSNHPVTYQLEKKEKHTGARLGTITTPHGTFETPMFMPVGTLATVKTIAPEELEEMGAGIILSNTYHLWLRPGADIVEEAGGLHKFMNWDKGILTDSGGFQVFSLSDLRDIKEEGVHFRSHLDGSKLFLSPEKAINVQNQLGPDIMMSFDECPPYDESYDYVKKSVERTSRWAERGLEAHKNPDTQGLFGIVQGAGFEDLRRQSAKDLTSMDFAGYSIGGLSVGEPKSEMYRVLDFTTPLLPENKPRYLMGVGTPDALIEGVMRGVDMFDCVLPTRIARNGTTMTSQGRLVVKNAAYARDYRPLDEKCDCYTCRNYSRAYLRHLIKSNETFGLRLTSYHNLYFLLNLMKDVRQAIREDNLLEFKERFFEEYGYNKPNAKNF

SEQ ID NO: 51502 - protein, 381 aa, Alkalibacterium thalassium
  misc_feature (1)..(381): tr|A0A1G9BFV9|A0A1G9BFV9_9LACT Queuine tRNA-ribosyltran sferase OS=Alkalibacterium thalassium OX=426701 GN=tgt PE=3 SV=1
MSNHPVTYTLEKKDKHTGARLGKITTPHGTFETPMFMPVGTLATVKTIAPEELEEMGAGIILSNTYHLWLRPGEDLIAEAGGLHAFMNWDKGILTDSGGFQVFSLSDMRRIEEEGVHFKSHLDGSKLFLSPEKAINIQNKLGPDIMMSFDECPPFDESYDYVKKSVERTSRWAERGLKAHQNTDRQGLFGIVQGAGFEDLRKQSAKDLTSMDFAGYSIGGLSVGEPKEDMYRVLDFTTPLLPEDKPRYLMGVGTPDALIEGVMRGVDMFDCVLPTRIARNGTTMTSKGRVVIKNAIYARDFRPLDEKCGCYTCRNYTRAYLRHLLKSDETFGLRLTSYHNLYFLLDLMKKVRQAIREDNLLEFKEQFFEEYGYNKPNAKNF

SEQ ID NO: 51503 - protein, 372 aa, Alkalibaculum bacchi
  misc_feature (1)..(372): tr|A0A366ICR0|A0A366ICR0_9FIRM Queuine tRNA-ribosyltran sferase OS=Alkalibaculum bacchi OX=645887 GN=tgt PE=3 S V=1
MGAIKYELIKECKQTGARRGRLHTPHGIIETPIFMPVGTQATVKSMTPEELKEIGSQIILSNTYHLYLRPGHELVQKAGGLHQFMNWDKPILTDSGGFQVFSLGELRKIKEEGVTFQSHLDGSKHFLSPEKVMEIQNALGSDIIMCFDECAPYPATYEYTRDSLDRTIRWAKRCKDAHKNTENQALFGIIQGGMYRDLREKSVKEMLEIDFPGYSIGGLSVGEPKHLMYEMLEYTTPLLPKDKPRYLMGVGSPDALLEGVLRGVDMFDCVLQTRIARNGTAMTSGGRVVIRNAKYMEDFTPLDHECDCYVCKNYTRAYLRHLIKAGEILGARLLTYHNLYFSLNLMKNVRLAIEEDRLLDFKEEFFKKYGYC

SEQ ID NO: 51504 - protein, 379 aa, Alkalicoccus halolimnae
  misc_feature (1)..(379): tr|A0A5C7FMA1|A0A5C7FMA1_9BACI Queuine tRNA-ribosyltran sferase OS=Alkalicoccus halolimnae OX=1667239 GN=tgt PE =3 SV=1
MPAVTYEHIKTCKQSGARLGIVHTPHGSFETPMFMPVGTLATVKTMSPDELIEMNAQIILSNTYHLWLRPGEDIIKEAGGLHKFMNWDRPILTDSGGFQVFSLSDLRNISEDGVEFRNHLSGEKLFLTPEKSMQIQNDLGPDIMMAFDECPPYPAEFDYMKASVERTSRWAERCLEAHGRPQDQGLFGIVQGGEYPELRKQSAEDLVSLDFPGYAIGGLSVGEPKDVMNQVLEETMPFLPADKPRYLMGVGSADSLIDGAIRGVDMFDCVLPTRIARNGTLMTSSGRLVVRNAKFARDFRPLDENCSCSVCRNYSRAYIRHLIKSNEMLGLRLCSYHNLYFLLQLMENVREAIRQDRLLDYREEFFEAYGFNKPNAKNF

SEQ ID NO: 51505 - protein, 379 aa, Alkalicoccus saliphilus
  misc_feature (1)..(379): tr|A0A2T4U2P7|A0A2T4U2P7_9BACI Queuine tRNA-ribosyltran sferase OS=Alkalicoccus saliphilus OX=200989 GN=tgt PE= 3 SV=1
MPAVTYEHIKTCRQSGARLGKVHTPHGSFETPIFMPVGTLATVKTMSPDELVEMNAQIILSNTYHLWLRPGEDIIQEAGGLHKFMNWDRPILTDSGGFQVFSLSDLRNISEEGVEFRSHLSGEKLFLTPEKSMHIQNALGPDIMMAFDECPPYPAEHDYMKASVERTSRWAERCLEAHQRPHDQGLFGIVQGGEHPDLRRQSAEDLVSLDFPGYAIGGLSVGEPKDVMNRVLEETTPFLPDNKPRYLMGVGSADSLIDGAVRGVDMFDCVLPTRIARNGTLMTSSGRLVVRNAAYARDFRPLDEKCSCRVCRNYSRAYIRHLIKSNETLGLRLCSYHNLHFLLQLMENVREAIRNDRLLDFREEFFEAYGFNKPNAKNF

SEQ ID NO: 51506 - protein, 385 aa, Alkalilimnicola ehrlichii
  misc_feature (1)..(385): tr|Q0A9C3|Q0A9C3_ALKEH Queuine tRNA-ribosyltransferase OS=Alkalilimnicola ehrlichii (strain ATCC BAA-1101 / DS M 17681 / MLHE-1) OX=187272 GN=tgt PE=3 SV=1
MSDQPPIAERLDFALIAEDGLARRGRVTLPRGEIDTPAFMPVGTYGTVKAMTPEELQAMGAQIILGNTFHLWLRPGTGIIREHGDLHDFCHWQGPILTDSGGFQVFSLGELRKITEDGVHFRSPVDGSKVFMGPEESMAVQRELGSDIVMIFDECTPYPADLATARRSMELSLRWAARSKQAHGDNPAALFGIVQGGMYPELRRQSLEGLQAIGFDGYAIGGLSVGEPHEERVAVLDSLALQLPQDRPRYLMGVGKPEDIVEAVRRGVDMFDCVIPTRNARTGFLYTHEGLIRLRNARHARDTGPLDPHCDCYTCRHYSRAYLRHLDKCNEILGARLNTIHNLHYYQTLMRGLREAIAEGRLGAFMETFYALRGQAVPPAPAVPR

SEQ ID NO: 51507 - protein, 371 aa, Alkalimonas amylolytica
  misc_feature (1)..(371): tr|A0A1H4E0V0|A0A1H4E0V0_ALKAM Queuine tRNA-ribosyltran sferase OS=Alkalimonas amylolytica OX=152573 GN=tgt PE= 3 SV=1
MKFELLATDGKARRGQMMFERGVVDTPAFMPVGTYGTVKGMTPEELEQTGAQICLGNTFHLMLRPGTDIIKLHGDLHDFMHWHKPILTDSGGFQVFSLGELRKITEEGVLFRSPLNGEKIMLTPERSMEVQQALGSDIVMIFDECTPYPATEQQAKKSMELSLRWAARSKAAHGDNPSALFGIIQGGMYPGLRDVSLQGLEDIGFDGYAIGGLSVGEPKEDMINILNHTTDKMPAHKPRYLMGVGKPEDIVEAVRRGIDMFDCVMPTRNARNGHLFVSDGVVKIRNAKHKADTAPLDKNCDCYTCKNYSRAYLHHLDRCNEIQGARLNTIHNLHFYQKLMQGLREAIAAGNLDQFVADFYAARGMAVPALD

SEQ ID NO: 51508 - protein, 370 aa, Alkalinema sp.
  misc_feature (1)..(370): tr|A0A251WL41|A0A251WL41_9CYAN Queuine tRNA-ribosyltran sferase OS=Alkalinema sp. CACIAM 70d OX=1934309 GN=tgt PE=3 SV=1
MSFTFEVQATCSYTNARAGVFQTPHGVVETPRFMPVGTLANVKTVTPAQLQDTGAQMVLSNTYHLHLQPGEDIVQMAGGLHKFMGWSGPMLTDSGGFQVFSLSEINQINDDGVTFRSPRDGSLIHLTPEKSIAIQNTLGADVIMAFDECAPPGVGRDTVEKAMERTYEWLKRCVAAHSRKEDQALFGIVQGGEFLDLRAEAARQLVDLNLPGYAIGGVSVGEAPEVIDQVVQHTAPLLPQNKLRYLMGVGSYREMARAIAAGVDVFDCVIPTRLARHGCALVGGERWNLKNAKFREDFRPLDETCSCYACQNFSRAYISHLLRSQELLAYTLLSIHNITELVRFTQRIRQSILAGTFTTEFAEWIAPVTD

SEQ ID NO: 51509 - protein, 381 aa, Alkaliphilus metalliredigens
  misc_feature (1)..(381): tr|A6TQM8|A6TQM8_ALKMQ Queuine tRNA-ribosyltransferase OS=Alkaliphilus metalliredigens (strain QYMF) OX=293826 GN=tgt PE=3 SV=1
MCRKVGMYMAIRYELIKECKQSGARLGRLHTPHGVIDTPIFMPVGTQATVKTMTPEELKEMNAEIILSNTYHLYLRPGHETVERAGGLHKFMNWDGPILTDSGGFQVFSLGDMRTIKEEGVTFRSHIDGSKHFISPEKAVEIQTALGADIMMAFDECAPYPAERDYVKKSLERTSRWAKRCKEAHENTSKQALFGIIQGGMYEDLRRQSAEEIIDLDFPGYAVGGLSVGEPKALMYEVLEYTTPLMPKDKPRYLMGVGSPDDLIEGVIRGIDMFDCVLPTRIGRNGTAMTSKGKVVIKNAKYKEDFEPLDPECQCYTCKNYSRAYLRHLIKANEILGMRLMTTHNLAFLLKLMKDVRGAIIEDRLLDFRKEFFTQYGYALE

SEQ ID NO: 51510 - protein, 372 aa, Alkaliphilus oremlandii
  misc_feature (1)..(372): tr|A8MGN9|A8MGN9_ALKOO Queuine tRNA-ribosyltransferase OS=Alkaliphilus oremlandii (strain OhILAs) OX=350688 GN =tgt PE=3 SV=1
MAIRYELIKTCKQSGARLGRLHTPHGVIETPIFMPVGTQATVKAMTPEELKDMNAQIILSNTYHLYLRPGHKLIEKAGGLHKFMNWDRPILTDSGGFQVFSLGPLRKIREEGVEFRSHLDGSKHFISPEIAVEIQNSLGSDIMMAFDECAPYPADYDYVKNSLERTTRWAKRCKDAHKNTDQQALFGIIQGGMYKDLRKQSAEEIIGLDFPGYSVGGLSVGEPKDIMYDVLEYTTPLMPKDKPRYLMGVGSPDDLIEGVIRGIDMFDCVLPSRIGRNGTAMTSRGKVVIKNASHTESFEPLDTECGCYTCKNYSKAYLRHLFKANEILGLRLLTNHNLHFLLNLMEEVRQAIREDRLLDYRKDFFEKYGYNL

SEQ ID NO: 51511 - protein, 371 aa, Alkaliphilus peptidifermentans
  misc_feature (1)..(371): tr|A0A1G5L3A7|A0A1G5L3A7_9CLOT Queuine tRNA-ribosyltran sferase OS=Alkaliphilus peptidifermentans DSM 18978 OX= 1120976 GN=tgt PE=3 SV=1
MAIKYELIKECKQTGARLGKLHTPRGVIETPIFMPVGTQATVKTMTPEELKEIKSQIILSNTYHLYLRPGHKLIENAGGLHKFMNWDGPILTDSGGFQVFSLGDLRKISEEGVEFRSHLDGSKHFISPEKAVEIQNSLGSDIMMVFDECAPYPAEKQYVKNSLERTTRWAKRCKDAHKNTDKQALFGIIQGGMYEDLRKQSLEELIELDFPGYAVGGLSVGEPKPLMYEVLEYTTPFMPKNKPRYLMGVGSPDCLIEGAIRGIDMFDCVLPSRIGRNGTAMTSVGKIVIKNSAHTEAFDALDPECSCYTCKNYSRAYLRHLFKANEVLGLRLLTYHNLHFLLKLMEEVRQAIREDRLLDYRNEFFKKYGYE

SEQ ID NO: 51512 - protein, 370 aa, Alkaliphilus sp.
  misc_feature (1)..(370): tr|A0A2G2MMA8|A0A2G2MMA8_9CLOT Queuine tRNA-ribosyltran sferase OS=Alkaliphilus sp. OX=1872455 GN=tgt PE=3 SV=1
MAIRYELIKECKQSGARLGRLHTPHGVIETPIFMPVGTQATVKAMTPEELKDIKAQIILSNTYHLYLRPGHKLIEKAGGLHKFMGWDRPILTDSGGFQVFSLGDLRKITEEGVEFRSHIDGSKHFLSPEKAVEIQNSLGSDIMMVLDECPPPDADREYIKNSLERTTRWAKRCMEAHENTEVQALFGIVQGGMFEDLRRQSASELLELDFPGYAIGGLSVGEPKPLMYEVLDYTAPLLPKNKPRYLMGVGTPDVLLEAVIRGMDMFDCVLPTRIARNGTAMTSEGKVIIKNAKHKESFIPLDKECDCYTCKTYTRAYLRHLFKTNEILGLRLMTYHNLYFVLDLMKNIRNAILEDRLLDFKDEFYEKYGY

SEQ ID NO: 51513 - protein, 385 aa, Alkalispirillum mobile
  misc_feature (1)..(385): tr|A0A498C4R1|A0A498C4R1_9GAMM Queuine tRNA-ribosyltran sferase OS=Alkalispirillum mobile OX=85925 GN=tgt PE=3 SV=1
MSEQQPDQARLGFDLMATDGAARRARIHLPRGQIDTPAFMPVGTYGTVKAMTPEELEGMGAQIILGNTFHLWLRPGTDIIREHGDLHDFCHWQGPILTDSGGFQVFSLGDLRKITEEGVHFRSPVDGARVFMGPEESMAVQRALGSDIVMIFDECTPYPADHETARRSMALSLRWAARSKAAHGDNPAALFGIVQGGMYPDLRSESLEGLLEIGFDGYAIGGLSVGEPHEERVAVLDHLSGQLPTDRPRYLMGVGKPEDIVEAVRRGVDMFDCVIPTRNARTGFLYTHEGLIRLRNAKHARDTGPLDPHCDCYTCRNFSRAYLRHLDKCNEILGSRLNTIHNLHYYQDLMRGMRQAIAEGRLEAWVETFYGLRGETAPPAPSRAG

SEQ ID NO: 51514 - protein, 385 aa, Alkalispirochaeta americana
  misc_feature (1)..(385): tr|A0A1N6P856|A0A1N6P856_9SPIO Queuine tRNA-ribosyltran sferase OS=Alkalispirochaeta americana OX=159291 GN=tgt PE=3 SV=1
MKIFTIDANDKNCAARTGTLLLPHGPVSTPAFMPVGTAGTVKAVDHDQLHQMGYRLILANTYHLFLRPGMDTIGSFGGLHTFSSWNHNILTDSGGYQIFSLAPFRKITDEGASFRSHLDGSRHLLTPERTVDIQVTIGSDIQMVLDVCTGPEIDHRAALEALTTTTTWAARARRRWEEQQEESGYAGALFGIVQGNFFPDLRTQAVQRTEELDFPGLALGGLSVGEPFSTYCDILAHTAPQLPREKPRYVMGIGTPEYILAAIEQGIDMFDCVFPTRAARTGTLFTTDGRINFKSARYARTMDSPDRQIDSFGGRQYSLGYLRHLTKSNEILGCMLAAQHNLRFMKWLVDQSARAIREGTFLSFKKDFLERYTEGTKAAREASSP

SEQ ID NO: 51515 - protein, 266 aa, Alkalispirochaeta odontotermitis
  misc_feature (1)..(266): tr|A0A0A0E1T7|A0A0A0E1T7_9SPIO Queuine tRNA-ribosyltran sferase (Fragment) OS=Alkalispirochaeta odontotermitis OX=1329640 GN=JY97_01165 PE=3 SV=1
MVANDKDCSARTGTLHLPRGDVEIPTFLPVGTNGTVKAIQHSTLRHIGYSLILSNTYHLYLRPGVQVIEKYGGLHNFSSWNGSILTDSGGFQVFSLASFRKIARDGVAFTSHIDGSRHFLTPESVVDIQVALGSDIQMQLDVCTAPGIEADEAREAVELTALWAKRAKQRYLEHSASSRGYLFGIVQGNFFKELRVLSSSLLSELDLPGYAIGGLSVGEKPEVFKEFLGYTAPLLPRDKPRYIMGIGTPEYMLESIEEGIDFFDCA

SEQ ID NO: 51516 - protein, 385 aa, Alkalispirochaeta sphaeroplastigenens
  misc_feature (1)..(385): tr|A0A2S4JFE9|A0A2S4JFE9_9SPIO Queuine tRNA-ribosyltran sferase OS=Alkalispirochaeta sphaeroplastigenens OX=118 7066 GN=tgt PE=3 SV=1
MAFFSIDKTDKDCAARTGTLVLPHGPVSTPAFMPVGTAGTVKAVDHDQLHQMGYRLILANTYHLFLRPGMETIGSFGGLHNFSSWNHNILTDSGGYQIFSLAPFRKITDEGASFRSHLDGSKHLLTPERTVDIQVTIGSDIQMVLDVCTGPDIDHRAALEALDTTTRWAARARRRWTEQQQEQGYAGALFGIVQGNFFPDLRTEAVQRTEELDFPGIALGGLSVGEPFSTYCDILAHTAPLLPREKPRYVMGIGTPEYILAAIEQGIDMFDCVFPTRAARTGTLFTTEGRINFKSARYARSVDPPDRLIDSFGGRQYSLGYLRHLTKSNEILGCMLAAQHNLRFMKWLVDQSARAIREGTFRSFKKDFLERYAEGTRAAREGSSL

SEQ ID NO: 51517 - protein, 376 aa, Alkalitalea saponilacus
  misc_feature (1)..(376): tr|A0A1T5HGC9|A0A1T5HGC9_9BACT Queuine tRNA-ribosyltran sferase OS=Alkalitalea saponilacus OX=889453 GN=tgt PE= 3 SV=1
MDFVLHKKDAFSKARAGEITTDHGKIETPVFMPVGTVGSVKGIHVRDLEQEVRARIILGNTYHLYLRPGIDVLRKAGGLHKFNGWGKPILTDSGGFQVFSLSHRRKLKEEGAEFQSHIDGSKHIFTPENVVDIQRVIGADIIMAFDECPPGDSDFNYAKKSMELTHRWLLRGIERFDSTEPLYDYGQTFFPIVQGAGFPDLRRQSAEFIANQNREGNAIGGLAVGEPEEVMYEMIQVVNEILPEDKPRYLMGVGTPANILEAISLGVDMFDCVMPTRNGRNGMLFTSKGIINIRNEKWKDDFSPIDPDGNSAFDLIYSKAYLRHLFIAGEMLGPQIASIHNLSFYMWLVDEARRQINQGTFFEWKEQMVKQLKVRL

SEQ ID NO: 51518 - protein, 372 aa, Alkanindiges illinoisensis
  misc_feature (1)..(372): tr|A0A4Y7X9A5|A0A4Y7X9A5_9GAMM Queuine tRNA-ribosyltran sferase OS=Alkanindiges illinoisensis OX=197183 GN=tgt PE=3 SV=1
MKFEKLAQTGRARRGRLTLNHGVVETPAFMPVGTYGTVKGMLPRDIEDIGAHIILGNTFHLWLRPGLEVIKEHGGLHDFVKWDKPILTDSGGFQVFSLGAMRKIKEEGVTFRSPIDGSKIFLSPEKSMEIQRVLNSDIVMIFDECTPYPATYSEAQTSMQMSLRWAKRCKDAFEGNPNALFGIVQGGMYPELRQQSLDGLTEIGFDGYAIGGLSVGEPKEDMIKILDYLPTKLPEDKPRYLMGVGKPEDIVEAVRRGVDMFDCVMPTRNARNGHYFITDGIVRIRNSQYRHDMNPLDPHCDCYTCRNFTRAYLYHLDKCGEMLGAMLGTIHNLRYYQRLMQMIRESIEINEFDAFVIDFYQRRGLSVPEMAE

SEQ ID NO: 51519 - protein, 372 aa, Alkanindiges sp.
  misc_feature (1)..(372): tr|A0A1S8CTE5|A0A1S8CTE5_9GAMM Queuine tRNA-ribosyltran sferase OS=Alkanindiges sp. H1 OX=1907941 GN=tgt PE=3 S V=1
MKFEKIAQTGRARRGRLTLNHGVVETPAFMPVGTYGTVKGMLPRDIEDIGAHIILGNTFHLWLRPGLEVIKEHGGLHQFIKWDKPILTDSGGFQVFSLGAMRKIKEEGVTFRSPIDGSKIFLSPEKSMEIQKVLNSDIVMIFDECTPYPATYSEAQTSMQMSLRWAKRCKDAFEGNPNALFGIVQGGMYPELRQQSLDGLTEIGFDGYAIGGLSVGEPKEDMIKILDYLPTKLPEDKPRYLMGVGKPEDIVEAVRRGVDMFDCVMPTRNARNGHYFITDGIVRIRNSQYRHDMKALDPHCDCYTCRNFTRSYLYHLDKCGEMLGAMLGTIHNLRYYQRLMQMIRESIETNQFDSFVTDFYQRRGLAVPEMAE

SEQ ID NO: 51520 - protein, 372 aa, Allisonella histaminiformans
  misc_feature (1)..(372): tr|A0A1G5VQL7|A0A1G5VQL7_9FIRM Queuine tRNA-ribosyltran sferase OS=Allisonella histaminiformans OX=209880 GN=tg t PE=3 SV=1
MVINYELIAQDPATGARAGLLHTPHGTFKTPMFMPVGTQATVKTVTPDELEEMGAQIILGNTYHLFLRPGTELIAEAGGLHDFMNWHKGILTDSGGFQVFSLGDTRKIKEEGVYFRSILDGSKQFLSPEVATRAQEELGSDIAMAFDECIPYPAEYDYAKKSTERTTRWAERCLKAHTRKDRGMFGIIQGGMYKDLRKQSAAEITSLPFDGFAIGGLSVGEPHDLMYEILEHTTQYMPVNKARYLMGVGTPDCLVEGVARGVDMFDCVFPTRVARNGMAMVHSGRMNMKNKQYERDFTPIEEGCQCYTCRHFTRAYIRHLYKAEELLAFRLITIHNLFFLLQFMRDMRQAIIDGNFGDFRESFMAGYSARAK

SEQ ID NO: 51521 - protein, 378 aa, Allobacillus sp.
  misc_feature (1)..(378): tr|A0A556PV94|A0A556PV94_9BACI Queuine tRNA-ribosyltran sferase OS=Allobacillus sp. SKP2-8 OX=1955271 GN=tgt PE =3 SV=1
MAITYELKKVCKQTGARLGTVHTPHGSFDTPVFMPVGTLATVKTMSPEELNEIGANIILSNTYHLWLRPGEDIVKEAGGLHQFMNWDKPILTDSGGFQVFSLSDMREIKEEGVHFRNHISGAKLFLSPEKAMHIQNDLGSDIMMAFDECPPYPASFEYMKKSVERTSRWAERCLAAHQRPTEQGLFGIVQGGEYEELRKQSARDLVSLDFPGYAIGGLSVGEPKDVMNRALEFTTPLLPDEKPRYLMGVGSPDSLIDGAIRGVDMFDCVLPTRIARNGTCMTSNGRLVVRNAKFARDFTPIDENCDCYTCRNYTKAYIRHLIKANETFGIRLTTYHNLYFLVKLMKQVREAIAEDRLGDFREEFFEQYGFNKPNAKNF

SEQ ID NO: 51522 - protein, 378 aa, Allobacillus sp.
  misc_feature (1)..(378): tr|A0A556PTX4|A0A556PTX4_9BACI Queuine tRNA-ribosyltran sferase OS=Allobacillus sp. SKP4-8 OX=1955272 GN=tgt PE =3 SV=1
MAITYELKKVCKQTGARLGTVHTPHGSFDTPVFMPVGTLATVKTMSPEELNEIGANIILSNTYHLWLRPGEDIIKEAGGLHQFMNWDKPILTDSGGFQVFSLSDMREIKEEGVHFRNHISGAKLFLSPEKAMHIQNDLGSDIMMAFDECPPYPASFEYMKKSVERTSRWAERCLAAHQRPTEQGLFGIVQGGEYEELRKQSARDLVSLDFPGYAIGGLSVGEPKDVMNKVLDFTTHLLPDEKPRYLMGVGSPDSLIDGAIRGIDMFDCVLPTRIARNGTCMTSNGRLVVRNAKFARDFTPIDENCDCYTCRNYTKAYIRHLIKANETFGIRLTTYHNLYFLVKLMEQVREAIAEDRLGDFREEFFERYGFNKPNAKNF

SEQ ID NO: 51523 - protein, 366 aa, Allochromatium vinosum
  misc_feature (1)..(366): tr|D3RQF3|D3RQF3_ALLVD Queuine tRNA-ribosyltransferase OS=Allochromatium vinosum (strain ATCC 17899 / DSM 180 / NBRC 103801 / NCIMB 10441 / D) OX=572477 GN=tgt PE=3 SV=1
MHFDLLERDGLARRGRLTFARGTVETPAFMPVGTYGTVKAMTPEELLEVGAEIVLGNTFHLMLRPGTEVIRRLGDLHGFMHWDKPILTDSGGFQVFSLGELRKITEDGVKFQSPVDGSPVFLSPEISMQVQRELGSDIVMIFDECTPYPASEEQARVSMELSLRWAARSREAHGDNPAALFGIVQGGMHERPRAESLEGLMRIGFDGYAVGGLSVGEPEEDRLRVLDFLSDKLPTDRPRYLMGVGTPEDIVAAVQRGIDMFDCVMPTRNARNGHLFTHQGVVRIRNAVHRTDEGPLDPLCDCYTCRHYSRAYLHHLDRCKEILGARLATIHNLHYYQTLMRGLREAIAGGRLDHFVSDFKRQRASA

SEQ ID NO: 51524 - protein, 369 aa, Allochromatium warmingii
  misc_feature (1)..(369): tr|A0A1H3DU94|A0A1H3DU94_ALLWA Queuine tRNA-ribosyltran sferase OS=Allochromatium warmingii OX=61595 GN=tgt PE= 3 SV=1
MHFDLLKRDGLARRGRLTFARGTVETPAFMPVGTYGTVKTMTPEELLTVGAEIILGNTFHLMLRPGTEVIRRLGDLHGFMHWEKPILTDSGGFQVFSLGELRKITEEGVKFKSPIDGSPVFLSPEIAMQVQRELGSDIVMIFDECTPYPASEEQARHSMELSLRWAARSRAAHDDNPAALFGIVQGGMHERPRADSLAGLMQIGFDGYAIGGLSVGEPEADRLRVLDFLADKMPADHPRYLMGVGTPEDIVAAVERGIDMFDCVMPTRNARNGHLFTHQGVVRIRNAVHRADENPLDPLCDCYTCQHYSRAYLHHLDRCKEILGARLATIHNLHYYQTLMRGLRESIAAGQLAAFVAEFKQRRQIIECA

SEQ ID NO: 51525 - protein, 367 aa, Allofrancisella guangzhouensis
  misc_feature (1)..(367): tr|A0A0A8E9E2|A0A0A8E9E2_9GAMM Queuine tRNA-ribosyltran sferase OS=Allofrancisella guangzhouensis OX=594679 GN= tgt PE=3 SV=1
MTVMKFEVSKKQGKARRGKVIFPRGEIQTPAFMPVGTYGAVKSLSPAELKVMGADIILGNTFHLWLRPGTDIIKKHGDLHDFIGWDKPILTDSGGFQVFSLGKLRKLTEDGVTFSSPINGSKVFLSPEISMQVQKALGSDIVMCFDECTPYPATEKEAKESMELSMRWAKRSKDAHGDNSSALFGIIQGGMYESLRDESLEKLTEIGFDGYAIGGLSVGEPKEDMIRILDHIAHKMPQNKPRYLMGVGTPKDLVEAVYRGVDMFDCVMPSRNARNGHIFTSEGIIRIRNTKYKKDTFALDPICDCYTCKNFSRSYLHHLDKTKEILGSRLNTIHNLTFYQNLMKDIRKAIEEERFEEFRKSFSENYK

SEQ ID NO: 51526 - protein, 367 aa, Allofrancisella inopinata
  misc_feature (1)..(367): tr|A0A4R7LBL1|A0A4R7LBL1_9GAMM Queuine tRNA-ribosyltran sferase OS=Allofrancisella inopinata OX=1085647 GN=tgt PE=3 SV=1
MTVMKFEISKKQGKARRGTITFPRGEIQTPVFMPVGTYGAVKSLSPVELKEMGADIILGNTFHLWLRPGTDIVKKHGDLHDFIGWDKPILTDSGGFQVFSLGKLRKLTEDGVTFSSPVNGSKVFLSPEISMQVQKDLGSDIVMCFDECTPYPATEKEAKDSMELSMRWAKRSKDAHGDNLSALFGIIQGGMYEHLRDESLEKLTEIGFDGYAIGGLSVGEPKEDMIRILDYIAHKMPDSKPRYLMGVGTPKDLVEAVYRGVDMFDCVMPSRNARNGHIFTSEGVIRIRNSKYKEDTSALDPDCDCYTCKNFSKSYLHHLDKTKEILGSRLNTIHNLTFYQKLMKNIRTAIEEDRFEEFRKEFLVNYK

SEQ ID NO: 51527 - protein, 385 aa, Alloprevotella rava
  misc_feature (1)..(385): tr|G5G9K4|G5G9K4_9BACT Queuine tRNA-ribosyltransferase OS=Alloprevotella rava F0323 OX=679199 GN=tgt PE=3 SV=1
MTITDKRVGGFFTLQHSDTNSAARAGRIETDHGTIETPIFMPVGTVGSVKAVHLREIKDDINAQIILGNTYHLYLRPGLEVLEAAGGLHKFNGFDRPMLTDSGGFQVFSLTGIRKLTEDGCEFRSHIDGSKHFFSPERVMDIERTIGADIMMAFDECPPGTANYAYARKSLTLTHNWLKRCVTQFNSTQPKYGYHQALFPIVQGCIYKDLRQESAHFVTDLDAEGYAIGGLAVGEPTDMMYEMIEVVNDILPQAKPRYLMGVGTPINILEGIERGVDMFDCVMPTRNGRNAMLFTSEGIINMRNAKWAKDFSPVDPNGTSFVDLAYTKAYLHHLYKAKELLAMQIGSIHNLAFYLWLVREARKHILANDFSTWKKMMVEKLSCRL

SEQ ID NO: 51528 - protein, 392 aa, Alloprevotella sp.
  misc_feature (1)..(392): tr|A0A3P1Z1C1|A0A3P1Z1C1_9BACT Queuine tRNA-ribosyltran sferase OS=Alloprevotella sp. OH1205_COT-284 OX=2491043 GN=tgt PE=3 SV=1
MTTQHFSLRPTWRKEGRLFQLEHNDADSHARAGILTTDHGQIQTPIFMPVGTLGTVKGLHTHEIVEEVKAQIILGNTYHLYLRPGLDVLEAAGGLHKFNGFSKPMLTDSGGFQVFSLTGIRKLKEEGCEFRSHIDGSKHFFTPESVMDIERIIGADIMMAFDECPPGTADYAYARNSLGLTHRWLERCIKRFSETEDKYGHHQALFPIVQGCVYPDLRRESAEFMAEKDAEGYAIGGLAVGEPAEKMYEMIEIVNEILPTDRPRYLMGVGTPVNILEGIERGVDMFDCVMPTRNGRNGQIFTWNGIINFRNAKWAKDFSPIDPQGTAKCDHVYTKAYLHHLFKCKELLAMQIASIHNLAFYLELVRVAREHILADDFAAWKRSVMPQLATRL

SEQ ID NO: 51529 - protein, 321 aa, Alloprevotella sp.
  misc_feature (1)..(321): tr|A0A496KLZ1|A0A496KLZ1_9BACT Queuine tRNA-ribosyltran sferase (Fragment) OS=Alloprevotella sp. OX=1872471 GN= D8H91_06415 PE=3 SV=1
MSNITPSLRQTWRKGEPLFQLQHTDAGSAARAGRITTDHGTIETPIFMPVGTLGTVKGLHTHEILDEVKAQIILGNTYHLYLRPGLDVLEAAGGLHKFNGFHKPMLTDSGGFQVFSLTGIRKLSENGCEFRSHVDGSKHLFTPESVMDIERTIGADIMMAFDECPPGTADFGYARQSLDLTHRWLDRCIKRFSETEDKYGHHQALFPIVQGCVYPELRRESAQFMAERDAEGYAIGGLAVGEPAEKMYEMIEVVNEILPTDRPRYLMGVGTPMNILEGIERGVDMFDCVMPTRNGRNGQIFTWNGIINFRNAKWAKDFSPV

SEQ ID NO: 51530 - protein, 387 aa, Alloprevotella tannerae
  misc_feature (1)..(387): tr|C9LHU5|C9LHU5_9BACT Queuine tRNA-ribosyltransferase OS=Alloprevotella tannerae ATCC 51259 OX=626522 GN=tgt PE=3 SV=1
MSELITNKRAAGFFTLEHTDANSAARVGHIATDHGVIQTPIFMPVGTEATVKCVHQRELLDDIQAQIILGNTYHLYLRPGLDVLKAAGGLHRFNGFTKPMLTDSGGFQVFSLTGIRKLSAEGCEFRSHIDGSKHFFSPERVMDIERTIGADIMMAFDECPPGTADYAYARKSLDLTHDWLRRCVNRFNQTEPEYGYHQALFPIAQGCVYKDLREESARFVSELDAEGYAIGGLAVGEPTEQMYEMIEVVNAILPQDRPRYLMGVGTPINILEAIERGVDMFDCVMPTRNGRNAMLFTAEGTMNMRNAKWAKDFSPIDPAGTSYVDTSYTKAYLHHLFKAKEFLAMQIASIHNLAFYLWLAGEARRHILAGDFVAWKRDMVERMSRRL

SEQ ID NO: 51531 - protein, 424 aa, Alloscardovia macacae
  misc_feature (1)..(424): tr|A0A1Y2SSN5|A0A1Y2SSN5_9BIFI Queuine tRNA-ribosyltran sferase OS=Alloscardovia macacae OX=1160091 GN=tgt PE=3 SV=1
MLPKPKFSPLGAQPGQPGDRSAFGFEIHTRLDGKHGRTGVIHTPHGDIQTPCFIPVATQATMKAVTREQMEDNGAQAMLANAFHLYERPGEAVMNAAGGLNEFMNWDKPTFTDSGGFQVMSLGQGFKKTLAMDVEGMKSDDVIADGKERLAFVDEDGVSFKSPLNGGMHRFSAEISMRVQHNIGADIMFAFDELTTLMNTRRYQEQAVERTYRWAQRCIAEHKRLTEERVGKPYQALFGVVQGANYEDLRRLAASQIGSLDFDGFGIGGAIEKRIMGEICSWICDELPENKPRHVLGIAAVDDIFAGVENGGDTFDCVAPARTARNGAVFTKDGRWNIKRAAYKFDFSPIEEDCDCYTCRNYTRAYVNHLLRAGEMTGATLATIHNERFFIHLLEQIRESMDGGYFAEFRDAYLARFYANGSRG

SEQ ID NO: 51532 - protein, 455 aa, Alloscardovia macacae
  misc_feature (1)..(455): tr|A0A261F4L4|A0A261F4L4_9BIFI Queuine tRNA-ribosyltran sferase OS=Alloscardovia macacae OX=1160091 GN=tgt PE=3 SV=1
MTETKRRKRKKKKSAPQFTYVQVDTRAPEGTVLPKPKFSPLGAQPGQPGDRSAFGFEIHTRLDGKHGRTGVIHTPHGDIQTPCFIPVATQATMKAVTREQMEDNGAQAMLANAFHLYERPGEAVMNAAGGLNEFMNWDKPTFTDSGGFQVMSLGQGFKKTLAMDVEGMKSDDVIADGKERLAFVDEDGVSFKSPLNGGMHRFSAEISMRVQHNIGADIMFAFDELTTLMNTRRYQEQAVERTYRWAQRCIAEHKRLTEERVGKPYQALFGVVQGANYEDLRRLAASQIGSLDFDGFGIGGAIEKRIMGEICSWICDELPENKPRHVLGIAAVDDIFAGVENGGDTFDCVAPARTARNGAVFTKDGRWNIKRAAYKFDFSPIEEDCDCYTCRNYTRAYVNHLLRAGEMTGATLATIHNERFFIHLLEQIRESMDGGYFAEFRDAYLARFYANGSRG

SEQ ID NO: 51533 - protein, 483 aa, Alloscardovia omnicolens
  misc_feature (1)..(483): tr|U1RDJ1|U1RDJ1_9BIFI Queuine tRNA-ribosyltransferase OS=Alloscardovia omnicolens F0580 OX=1321816 GN=tgt PE= 3 SV=1
MTDVEKELNATPQAEATPLAEAPTPETTPRKKRKRKRKKKKSIPHFNYVQVQTKAPEGTIFPKPKFAPKGAAPGQPGDRSAFSFEIHTRLDGKHGRTGMIHTPHGDIQTPCFVPVATQATMKAVTREQMETNGAQVMLANAFHLYERPGEAVMDAAGGLNEFMNWDKPTFTDSGGFQVMSLGAGFKKTLAMDIEGMKSDDVIAEGKERLAFVDEDGVSFKSPLNGGMHRFSAEISMRVQHNIGADIMFAFDELTTLMNTRRYQEESVERTFRWAKRCVAEHQRLTQERLGKPYQALFGVVQGANYEDLRRKAASQIGSLDFDGFGIGGAIEKRILGETCAWICDELPENKPRHVLGIAAVDDIFAGVENGGDTFDCVAPARTARNGAVFTKDGRWNIKRAAFKFDFSPIEDGCDCYTCRNYTRAYVNHLLRAGEMTGATLTTIHNERFFIRLLDDIRASIDGGYFADFKDQYLARFYANGSRG

SEQ ID NO: 51534 - protein, 424 aa, Alloscardovia omnicolens
  misc_feature (1)..(424): tr|A0A2I1M4P4|A0A2I1M4P4_9BIFI Queuine tRNA-ribosyltran sferase OS=Alloscardovia omnicolens OX=419015 GN=tgt PE =3 SV=1
MFPKPKFAPKGAAPGQPGDRSAFSFEIHTRLDGKHGRTGMIHTPHGDIQTPCFVPVATQATMKAVTREQMETNGAQVMLANAFHLYERPGEAVMDAAGGLNEFMNWDKPTFTDSGGFQVMSLGAGFKKTLAMDIEGMKSDDVIAEGKERLAFVDEDGVSFKSPLNGGMHRFSAEISMRVQHNIGADIMFAFDELTTLMNTRRYQEESVERTFRWAKRCVAEHQRLTQERLGKPYQALFGVVQGANYEDLRRKAASQIGSLDFDGFGIGGAIEKRILGETCAWICDELPENKPRHVLGIAAVDDIFAGVENGGDTFDCVAPARTARNGAVFTKDGRWNIKRAAFKFDFSPIEDGCDCYTCRNYTRAYVNHLLRAGEMTGATLTTIHNERFFIRLLDDIRASIDGGYFADFKDQYLARFYANGSRG

SEQ ID NO: 51535 - protein, 441 aa, Alloscardovia sp.
  misc_feature (1)..(441): tr|A0A4R0QQ54|A0A4R0QQ54_9BIFI Queuine tRNA-ribosyltran sferase OS=Alloscardovia sp. GLDI4/2 OX=2496842 GN=tgt PE=3 SV=1
MPHFNYVKVETSAPEGTVLPKPKFSPRGAVSGQPGDRSAFSFEIHTRLEGKHGRTGVIHTPHGDIKTPCFVPVATQATMKAVTREQMEDNGAQCMLANAFHLYERPGEAVMDAAGGLNEFMNWDKPTFTDSGGFQVMSLGAGFKKTLAMDIEGMKSDDVIAEGKERLAFVDEDGVSFKSPLNGGMHRFSAEISMRVQHHIGADIMFAFDELTTLMNTRRYQEEAVERTYRWAQRCVDEHKRLTQERLGKPYQALFGVVQGANYEDLRRKAASQIGSLDFDGFGIGGAIEKRIMADICAWICDELPENKPRHVLGIAAVDDIFAGVENGGDTFDCVAPARTARNGAVFTKDGRWNIKRAAYKFDFSPIEDDCDCYTCRNYTRAYVNHLLRAGEMTGATLATIHNERFFIRLLEQIRESMDGGYFNEFRDEYLARFYANGSRG

SEQ ID NO: 51536 - protein, 424 aa, Alloscardovia sp.
  misc_feature (1)..(424): tr|A0A1F1AXU7|A0A1F1AXU7_9BIFI Queuine tRNA-ribosyltran sferase OS=Alloscardovia sp. HMSC034E08 OX=1739413 GN=t gt PE=3 SV=1
MFPKPKFATKGAAPGQPGDRSAFSFEIHTRLDGKHGRTGTIHTSHGDIQTPCFVPVATQATMKAVTREQMEANGAQVMLANAFHLYERPGEAVMDAAGGLNEFMNWDKPTFTDSGGFQVMSLGAGFKKTLAMDIEGMKSDDVIAEGKERLAFVDEDGVSFKSPLNGGMHRFSAEISMRVQHNIGADIMFAFDELTTLMNTRRYQEESVERTFRWAKRCMAEHQRLTQERLGKPYQALFGVVQGANYEDLRRKAASQIGSLDFDGFGIGGAIEKRILGETCAWICDELPENKPRHVLGIAAVDDIFAGVENGGDTFDCVAPARTARNGAVFTKDGRWNIKRAAFKFDFSPIEDGCDCYTCRNYTRAYVNHLLRAGEMTGATLTTIHNERFFIRLLDDIRASIDGGYFADFKDQYLARFYANGSRG

SEQ ID NO: 51537 - protein, 375 aa, Unknown
  misc_feature (1)..(375): tr|A0A0N1BNY3|A0A0N1BNY3_9PROT Queuine tRNA-ribosyltran sferase OS=alpha proteobacterium AAP81b OX=1523432 GN=t gt PE=3 SV=1
MTRFAFALAARDGAARTGTITMRRGVIRTPAFMPVGTAATVKAMRASEVRAAGAEIILGNTYHLMLRPGAERIARLGGLHAFMGWDRPILTDSGGYQVMSLSALTKRSEAGVAFASHLDGSRHMLSPERSIEIQRLLGSDIVMAFDELIALPAPREAVAAAMERSMRWAARSRAAFDSDADHSGRAALFGIQQGGLDERLRAESAAALTAIGFDGYAIGGLAVGEGQEAMFGVLDYATGQLPESAPRYLMGVGKPDDIVGAVVRGVDMFDCVLPTRSGRNGQAFTHDGTLNLRNARHAEDLTVLDADCTCPVCAGGTSRAYLHHLTKSGEMLGAMLLTEHNIGFYQQLMAALRAAIAGGGLTDFAATFLRRYSGG

SEQ ID NO: 51538 - protein, 375 aa, Unknown
  misc_feature (1)..(375): tr|J9DXI1|J9DXI1_9PROT Queuine tRNA-ribosyltransferase OS=alpha proteobacterium IMCC14465 OX=1220535 GN=tgt PE =3 SV=1
MEFTLHCKDGKARRGTVITPRGEIRTPAFMPVGTAGTVKAMYMDQVKDLGADIVLGNTYHLMLRPGAEEVAALGGLHEFMKWDGPILTDSGGFQVMSLSKLRKMSEEGVNFQSHIDGKSYMLTPERSIEIQTLLGANIRMILDECTPFPATEKQARESMELSTRWAERSKKAFQLYDKGEGDALFGIVQGGVYENLRLESVSNLLDIGFDGYAVGGLAVGEGQEEMMKVLDFTLPALPEDKPRYLMGVGTPEDLVLAVSKGIDMFDCVMPTRAGRHGLAYTRRGKVNLKNARHANDPRPLDEESTCPAASQYSRAYLHHLVRCGEYLAAMLLTWNNLHYYQTLMQEMRQNIEAGTFDAFVEAFYQNYNEGDIPPL

SEQ ID NO: 51539 - protein, 403 aa, Alphaproteobacteria bacterium
  misc_feature (1)..(403): tr|A0A258X9A5|A0A258X9A5_9PROT Queuine tRNA-ribosyltran sferase OS=Alphaproteobacteria bacterium 16-39-46 OX=19 70490 GN=tgt PE=3 SV=1
MNTSLYPQFSFDIQVQDLESRARCGLISTPHGTVETPNFIFCATKGAMKALRMDMVKQTGAQIILSNTYHLMLSPGADLVEKMGGLHTFMNWNGPLFTDSGGFQIFSLGHGSIASEIKGNRMQKSSRSLLKINEQGANFKSYLDGRQHLLTPEKSIEVQMKLGADLIVVLDECTPFHVDKAYTERSMEMSHRWALRSLEEFKRRSKDTQALYGIIQGGVYEDLRKASTGFVNEHPFFGHAIGGSLGASKQQMADVIGMTAPLLVRDRPIHLLGIGGISDIFEGVSMGIDTFDCVHPTRLARHGGALVQPHLLPEDKKTSSREHLNLRNASYTEDSDPIDPSCPCYTCQNLSRAYLHYLLKARELVALELLTLHNITFMVRLMMAIREGIKQKTLPSLRKEWCH

SEQ ID NO: 51540 - protein, 359 aa, Alphaproteobacteria bacterium
  misc_feature (1)..(359): tr|A0A2S6RDT1|A0A2S6RDT1_9PROT Queuine tRNA-ribosyltran sferase OS=Alphaproteobacteria bacterium MarineAlpha9_B in4 OX=2013099 GN=tgt PE=3 SV=1
MIKFEISNTFNKARAGIIKTKYGKIETPVFMPVGTLGTVKGIEKSVLEKYGFDILLANTYHLMLRPGMNVIKKFGSLNKFMSWKKSILTDSGGFQIMSLGKNVKVDDEGVTFRSHLDGSLVRLNAEKSIEIQNLLGSTITMSFDECIPHPYSYLETELSLKRSTDWTMRSLKAFQQRQGYGIFGIIQGGMHKELRKKSSLELSNMGFDGYALGGLAVGEGHELMSSITDYCTSFLPVEKPRYLMGVGYPKDILQAVKNGIDMFDCVLPTRSGRTGLAFSTQGFIKIRNSIYSKDPNPLDENCNCEICTNYSKAYLHHLVKSSEILGSVFITQHNLFFYMKLMKKIRQSIIEGNLDKLKV

SEQ ID NO: 51541 - protein, 384 aa, Alsobacter sp.
  misc_feature (1)..(384): tr|A0A2T1HND5|A0A2T1HND5_9RHIZ Queuine tRNA-ribosyltran sferase OS=Alsobacter sp. SH9 OX=2109933 GN=tgt PE=3 SV =1
MSLAEAPVRDFTFTVKATDGQARTGEIRMPRGVIRTPAFMPVGTAGTVKAMYPEQVRALGADVVLGNTYHLMLRPGAERVARLGGLHKMMNWPHPILTDSGGFQVMSLAQLRKLDENGVTFRSHVDGAKHVLTPERSIEIQGLLGSDIQMQLDECVKLPCSDKEAERAMELSLRWAERSRVAFGEQPGKALYGIVQGGAVPSLRVRSARALADMGFKGYSIGGLAVGEPQEIMLAMIETVEPWLPKEKPRYLMGVGTPDDLIESVRRGVDMFDCVMPTRAGRHGQAFTRFGKLNLRNARHADDPRPIDETSSCPAARDYSRAYLHHLVKSGEILGMMLLTWVNLAYYQDLTAGMRQAIAEGRYDDFAAHTKEGWARGDLEPWAG

SEQ ID NO: 51542 - protein, 377 aa, Altererythrobacter aquimixticola
  misc_feature (1)..(377): tr|A0A4T3EZT6|A0A4T3EZT6_9SPHN Queuine tRNA-ribosyltran sferase OS=Altererythrobacter aquimixticola OX=2489173 GN=tgt PE=3 SV=1
MADTKPRFTFTLKAIDGAARTGEIAMKRGTIRTPAFMPVGTAATVKAMKPEAVRALGADIILGNTYHLMLRPGAERVAKLGGLHKFMNWHRPILTDSGGYQVMSLSDLRKLTEEGVEFKSHLDGSRHMLSPERSMAIQRLLGSDIVMAFDECPRADRPRDEIAASMELSMRWAKRSREGFDSGEEHAARSALFGIQQGALDEDLRRISAQKLTEIGFDGYAIGGLAVGEGQEAMFATLDFAPAMLPENAPRYLMGVGKPDDLVGAVERGVDMFDCVLPTRSGRNGQAFTWNGPLNLRNARHAEDTGPLDERCSCTTCASYSRAYLHHLQKSGEILGAMLVTEHNLAFYQQLMQAMRDAIGEGHFAAFARQFRADYLG

SEQ ID NO: 51543 - protein, 374 aa, Altererythrobacter atlanticus
  misc_feature (1)..(374): tr|A0A0F7KPH8|A0A0F7KPH8_9SPHN Queuine tRNA-ribosyltran sferase OS=Altererythrobacter atlanticus OX=1267766 GN= tgt PE=3 SV=1
MTRFSFSIHARDGKARTGQITMRRGEIRTPAFMPVGTAATVKAMKPEDVRRTGADIILGNTYHLMLRPGAERVARLGGLHKFMNWERPILTDSGGYQVMSLSDLRKLTEQGVEFRSHLDGSRHMLSPERSMEIQRLLGSDIVMAFDECPRADQPPDVIAKSMELSMRWARRSRDAFDAGGEHAEGAALFGIQQGALSEDLRQASAQALTEIGFDGYAIGGLAVGEGQEAMFATLDFAPGQLPDDRPRYLMGVGKPDDLVGAVERGVDMFDCVLPTRSGRNGQAFTWSGPLNLRNARHAEDTGPLDEKCTCPTCGTYSRAYLHHLQKSGEILGAMLVTEHNLSFYQQLMQAMRLAIAEGRFSSFAAEFRRDYLRK

SEQ ID NO: 51544 - protein, 376 aa, Altererythrobacter dongtanensis
  misc_feature (1)..(376): tr|A0A1B2AEN6|A0A1B2AEN6_9SPHN Queuine tRNA-ribosyltran sferase OS=Altererythrobacter dongtanensis OX=692370 GN =tgt PE=3 SV=1
MTRFEFEIHATDGKARTGTIRMRRGEIRTPAFMPVGTAATVKAMKPESVRATGADILLGNTYHLMLRPGAERVARLGGLHRFMNWDRPILTDSGGYQVMSLAALRKLTEEGVSFQSHIDGSRHMLTPERSMEIQRLLGSDIVMAFDECPRADRPLAEIEASMELSMRWARRSRDAFDAGGEHAERSALLGIQQGALDERLRARSAEALQQIGFDGYAIGGLAVGEGQEAMFATLDFAPGQLPEDRPRYLMGVGKPDDLVGAVLRGVDMFDCVLPTRSGRNGQAFTWNGPLNMRNARHAEDTGPIDHDCFCQVCKAYSRAYLHHLHKAGEMLGAMLLTEHNLSFYQALMAGMRSSIASGTMDRFAAAFIDRYRRPPG

SEQ ID NO: 51545 - protein, 375 aa, Altererythrobacter epoxidivorans
  misc_feature (1)..(375): tr|A0A0M5L4Z4|A0A0M5L4Z4_9SPHN Queuine tRNA-ribosyltran sferase OS=Altererythrobacter epoxidivorans OX=361183 G N=tgt PE=3 SV=1
MAERFKFEISATDGKARTGRISMLRGDIRTPAFMPVGTAATVKAMKPEAVRETGADIILGNTYHLMLRPGAERVARLGGLHQFMNWERPILTDSGGYQVMSLSDLRKLTEEGVEFRSHIDGSKHMLTPERSMEIQRLLGSDIVMAFDECPRADQSREVIARSMEMSMRWAKRSRDAFDSGGEHAARAALFGIQQGALDEDLRRISAEKLTEIGFDGYAVGGLAVGEGQEAMFATLDFAPDMLPQDRPRYLMGVGKPDDLVGAVERGIDMFDCVLPTRSGRNGQAFTWDGPLNLRNARHAEDTGPLDERCACPTCGTYSRAYLHHLQKSGEILGAMLVTEHNLSFYQQLMQAMRDAIGEGRFTAFAAKFRQDYLQS

SEQ ID NO: 51546 - protein, 375 aa, Altererythrobacter ishigakiensis
  misc_feature (1)..(375): tr|A0A562UWF5|A0A562UWF5_9SPHN Queuine tRNA-ribosyltran sferase OS=Altererythrobacter ishigakiensis OX=476157 G N=tgt PE=3 SV=1
MTERFKFSINATDGRARTGRIEMQRGDIRTPAFMPVGTAATVKAMKPETVREIGADIILGNTYHLMLRPGAERVARLGGLHQFMNWQRPILTDSGGYQVMSLSELRKLTEQGVEFRSHIDGSKHMLTPERSMEIQRLLGSDIVMAFDECPRADQPRDVIAVSMELSMRWAKRSRDGFDSGEEHAAQSALFGIQQGALDEDLRKISAQKLTDIGFDGYSVGGLAVGEGQDAMFATLDFAPDQLPYDKPRYLMGVGKPDDLVGAVERGIDMFDCVLPTRSGRNGQAFTWNGPLNLRNAKHAEDTGPLDEKCTCNVCQTYSRAYLHHLQKSGEILGAMLVTEHNLSFYQQLMQGMRDAISESRFDAFASDFRREYLSA

SEQ ID NO: 51547 - protein, 273 aa, Altererythrobacter marensis
  misc_feature (1)..(273): tr|A0A2W4YKN2|A0A2W4YKN2_9SPHN Queuine tRNA-ribosyltran sferase (Fragment) OS=Altererythrobacter marensis OX=54 3877 GN=tgt PE=3 SV=1
MPEPITPDADNARPRFAFTIAARDGRARTGTIVMRRGEIRTPAFMPVGTAATVKAMKPEAVRATGADIILGNTYHLMLRPGAERVARLGGLHAFMNWQRPILTDSGGYQVMSLSELRKLTEDGVEFRSHLDGSRHMLSPERSMEIQRLLGSDIVMAFDECPRADRPLVEIGASMELSMRWAARSRSAFDAGGAHAEGAALFGIQQGALDEGLRARSAEALRAIGFDGYAIGGLAVGEGQEAMFATLDFAPAMLPEDRPRYLMGVGKPDDLVGA

SEQ ID NO: 51548 - protein, 375 aa, Altererythrobacter marensis
  misc_feature (1)..(375): tr|A0A0G3X5U3|A0A0G3X5U3_9SPHN Queuine tRNA-ribosyltran sferase OS=Altererythrobacter marensis OX=543877 GN=tgt PE=3 SV=1
MAAPRFAFRVDAVDDKARTGAIAMRRGEIRTPAFMPVGTAATVKAMKPETVRTTGADILLGNTYHLMLRPGAERVARLGGLHAFMNWDRPILTDSGGYQVMSLAALRKLDEDGVQFRSHIDGARHMLSPERSMEIQRLLGSDIVMAFDECPRADRPRDEIAASMELSMRWARRSRDAFDSGGEHAEGAALFGIQQGALDEDLRRVSAEKLIDIGFDGYAVGGLAVGEGQEAMFATLDFAPDMLPQDRPRYLMGVGKPDDLVGAVERGIDMFDCVLPTRSGRNGQAFTWNGPLNLRNARHAEDTAPLDERCKCSVCASYSRAYLHHLHKAGEILGAMLTTEHNLAFYQQLMEAMRQAIATHSFTQFAIDFRRDYLR

SEQ ID NO: 51549 - protein, 378 aa, Altererythrobacter namhicola
  misc_feature (1)..(378): tr|A0A1C7D8V3|A0A1C7D8V3_9SPHN Queuine tRNA-ribosyltran sferase OS=Altererythrobacter namhicola OX=645517 GN=tg t PE=3 SV=1
MASAPRFQFDIAATDGKARTGTIRMQRGDIRTPAFMPVGTAATVKAMKPEAVRATGADIILGNTYHLMLRPGAERMAKLGGLHKFMNWHRPILTDSGGYQVMSLSDLRKLTEEGVEFRSHIDGSKHMLTPERSMEIQRLLGSDIVMAFDECPRADQPRDVIASSMEMSMRWAKRSRDAFDAGEAHAAGAALFGIQQGALDEELRGQSAEALREIGFDGYAIGGLAVGEGQEAMFATLDFAPGQLPEDRPRYLMGVGKPDDLVGAVERGVDMFDCVLPSRSGRNGQAFTWNGPLNLRNARFAEDLAPLDERCACPTCGTYSRAYLHHLVKSQEILGAVLMTEHNIGFYQQLMQAMRDAIGEGRFAAFAADFQRDYLGAQ

SEQ ID NO: 51550 - protein, 374 aa, Altererythrobacter sp.
  misc_feature (1)..(374): tr|A0A420ECG3|A0A420ECG3_9SPHN Queuine tRNA-ribosyltran sferase OS=Altererythrobacter sp. HN-Y73 OX=2320269 GN= tgt PE=3 SV=1
MTRFSFAIHARSGKARTGTISMKRGEIRTPAFMPVGTAATVKAMKPESVRATGADIILGNTYHLMLRPGAERIARLGGLHKFMNWKRPILTDSGGYQVMSLSDLRKLTEKGVEFRSHLDGSKHMLTPERSMEIQRLLDSDIVMAFDECPRADQPRDVIETSMEMSMRWARRSRDGFDSGGEHASRSALFGIQQGALDEELRKRSADALIDIGFDGYAIGGLAVGEGQEAMFATLDFAPGQLPDDRPRYLMGVGKPDDLVGAVERGVDMFDCVLPSRSGRNGQAFTWNGPLNMRNARFGEDSGPIDERCACPTCGTYSRAYLHHLIKSGEILGAMLMTEHNISFYQQLMQAMRQAIAENRFARFAADFRHDYCRK

SEQ ID NO: 51551 - protein, 392 aa, Altererythrobacter sp.
  misc_feature (1)..(392): tr|A0A369QAB6|A0A369QAB6_9SPHN Queuine tRNA-ribosyltran sferase OS=Altererythrobacter sp. HME9302 OX=2161824 GN =tgt PE=3 SV=1
MTSAAPDPAAPTASTTPRPRFQFSIDAQDGAARRGTIRMRRGDIRTPAFMPVGTAATVKGMKPEAVRGTGADIILGNTYHLMLRPGAERMARLGGLHGFMNWPRPILTDSGGYQVMSLSDLRKLTEEGVEFRSHLDGSKHMLTPERSMEIQRLLGSDIVMAFDECPRADQPREAIAASMELSMRWAKRSRDAFDAGGDHAKNAALFGIQQGALDEELRGRSAAALREIGFDGYAIGGLAVGEGQEAMFATLNFAPGQLPEDAPRYLMGVGKPDDLVGAVERGVDMFDCVLPTRSGRNGQAFTWNGPLNLRNARFAEDTGPLDERCSCPTCATYSRAYLHHLVKSGEMLGAMLVTEHNLSFYQQLMQAMRDAIGAGRFAGFAAEFRRDYLTKR

SEQ ID NO: 51552 - protein, 377 aa, Altererythrobacter xiamenensis
  misc_feature (1)..(377): tr|A0A1Y6FI76|A0A1Y6FI76_9SPHN Queuine tRNA-ribosyltran sferase OS=Altererythrobacter xiamenensis OX=1316679 GN =tgt PE=3 SV=1
MSTRFDFEIHATDGKARTGRIRMQRGEIRTPAFMPVGTAATVKAMKPETVREIGADIILGNTYHLMLRPGAERVARLGGLHQFMNWERPILTDSGGYQVMSLSELRRLSEEGVEFRSHIDGSKHMLTPERSMEIQRLLGSDIVMAFDECPRADQSRDVIASSMELSMRWAKRSREGFDAGEEHAARSALFGIQQGALDEELRRISAEKLTEIGFDGYAVGGLAVGEGQEAMFATLEFAPGQLPEDKPRYLMGVGKPDDLVGAVERGIDMFDCVLPTRSGRNGQAFTWNGPLNLRNARHAEDTDPLDERCSCSVCGTYSRAYLHHLQKSGEILGAMLVTEHNLAFYQQLMQAMRDAIAAGTFATFASDFRRDYLSKDD

SEQ ID NO: 51553 - protein, 379 aa, Alteribacillus bidgolensis
  misc_feature (1)..(379): tr|A0A1G8N6W5|A0A1G8N6W5_9BACI Queuine tRNA-ribosyltran sferase OS=Alteribacillus bidgolensis OX=930129 GN=tgt PE=3 SV=1
MAAVTYELIKTCKQSGARLGKIHTPHGTIDTPIFMPVGTLATVKTLSPEELNDMAAQIILSNTYHLWLRPGEDIIAEAGGLHSFMNWDKPILTDSGGYQVFSLSKLRDIKEEGVHFRNHISGEKLFLSPEKAMNIQNALGPDIMMAFDECPPYPAERDYMKASVERTTRWAERCLEAHQRPIDQALFGIVQGGEYEDLRKQSANDLISLDFPGYAVGGLSVGEPKNVMNEVLDFTTPLLPENKPRYLMGVGSADSLIDGAIRGIDMFDCVLPTRIARNGTCMTSRGRLVVRNAKYTRDFRPLDDHCDCYTCKNYSRAYIRHLVKCNETFGFRLTSYHNLYFLLKLMKQVREAIEDDRLLDFKEEFFEQYGFYSQNAKNF

SEQ ID NO: 51554 - protein, 379 aa, Alteribacillus iranensis
  misc_feature (1)..(379): tr|A0A1I1Z669|A0A1I1Z669_9BACI Queuine tRNA-ribosyltran sferase OS=Alteribacillus iranensis OX=930128 GN=tgt PE =3 SV=1
MAAIEYELIKTCQQSGARLGKIHTPHGSIETPIFMPVGTLATVKTISPDELNDMAAQIILSNTYHLWLRPGEDIIHEAGGLHTFMNWDKPILTDSGGFQVFSLSKLRDIQEEGVHFRNHISGEKLFLSPEKAMAIQNALGSDIMMAFDECPPYPAEESYMKASVERTSRWAERCLEAHGRPDEQGLFGIVQGGEYESLRKQSAQDLVSLDFPGYAVGGLSVGEPKTVMNEVLEFTTPMLPSNKPRYLMGVGSADSLIDGAIRGIDMFDCVLPTRIGRNGTCMTSSGRLVVRNAKYARDFRPIDEECDCYTCKNYSRAYIRHLVKCNETFGFRLTSYHNLYFLLKLMENVREAIQNDRLLDYREEFFEQYGFNKENAKNF

SEQ ID NO: 51555 - protein, 379 aa, Alteribacillus persepolensis
  misc_feature (1)..(379): tr|A0A1G8DHD9|A0A1G8DHD9_9BACI Queuine tRNA-ribosyltran sferase OS=Alteribacillus persepolensis OX=568899 GN=tg t PE=3 SV=1
MAAISYELIKTCQQSGARLGKIHTPHGSIDTPIFMPVGTLATVKTLSPNELKDMNAQIILSNTYHLWLRPGEDIISEAGGLHTFMNWDRPILTDSGGYQVFSLSKLRDIKEEGVHFRNHISGEKLFLSPEKAMQIQNALGPDIMMAFDECPPYPAGRDYMKASVERTSRWAERCLEAHQRPNEQALFGIVQGGEYEDLRKQSANDLISLDFPGYAVGGLSVGEPKDVMNRVLEFTTPLLPKDKPRYLMGVGSADSLIDGAIRGIDMFDCVLPTRIARNGTCMTTNGRLVVRNAKYARDFKPIDEHCDCYACRNYSRAYIRHLVKCNETFGFRLTSYHNLHFLLTLMQRVRKAILEDRLLDFREEFFEQYGFNKENAKNF

SEQ ID NO: 51556 - protein, 376 aa, Alteromonadaceae bacterium
  misc_feature (1)..(376): tr|A0A495D9Q2|A0A495D9Q2_9ALTE Queuine tRNA-ribosyltran sferase OS=Alteromonadaceae bacterium 2052S.S.stab0a.01 OX=1304900 GN=tgt PE=3 SV=1
MNTTFMQFELDTTQGLARRGRLIFPRGTVETPAFMPVGTYGTVKGMLPRDIEAIGAQIILGNTFHLMLRPGTEVIKAHGDLHDFMQWSGPILTDSGGFQVFSLGDIRKITEAGVKFRSPIDGSEVFLDPERAIQVQRDLGSDIVMIFDECTPYPATEKEARDSMQLSLRWAKRSKVAHGASPSALFGIVQGGMYEGLRSESLAGLTEIGFDGYAIGGLSVGEPKADMIRILDHLGPRMPADKPRYLMGVGKPEDIVEGVCRGIDMFDCVMPTRNARNGHLFTRAGVIKIRNATHRHDTGPLDPSCDCYTCSNFSRAYLHHLDKCGEILGAQLNTIHNLRHYQLIMQELRDAIAAGRLNEYVNEFYDRQNKTRFRVE

SEQ ID NO: 51557 - protein, 370 aa, Alteromonadaceae bacterium
  misc_feature (1)..(370): tr|A0A424TWT7|A0A424TWT7_9ALTE Queuine tRNA-ribosyltran sferase OS=Alteromonadaceae bacterium TMED7 OX=1986650 GN=tgt PE=3 SV=1
MQFELLHTDGRARRGKLVFERGEVETPAFMPVGTYGTVKGMTPEELADSGAHICLGNTFHLMLRPGTGIIKEHGDLHDFMHWQKPILTDSGGFQVFSLGDLRKITEEGVTFRSPINGEKILLTPEKSMEVQRDLGSDIVMIFDECTPYPATQQEARISMELSLRWARRSKDAHGDNPSALFGIIQGGMYEDLRDISLAGLEDIGFDGYAIGGLSVGEPKEDMIRIIEHTAPKIPEHKPRYLMGVGKPEDIVEAVRRGIDMFDCVMPTRNARNGHLFVTEGVIKIRNAKHKHDTGPLDENCDCYTCKNYSRSYLHHLDKCNEILGARLNTIHNLRYYQRVMQGLRDAIASNTLDQFVSEFYAQKNMPVPAL

SEQ ID NO: 51558 - protein, 374 aa, Alteromonadales bacterium
  misc_feature (1)..(374): tr|A0A2N0WU83|A0A2N0WU83_9GAMM Queuine tRNA-ribosyltran sferase OS=Alteromonadales bacterium alter-6D02 OX=2058 087 GN=tgt PE=3 SV=1
MKFELKNTDGRARRGQLQFERGTVETPAFMPVGTYGTVKGMTPEEVSDSKAEILLGNTFHLWLRPGMEVMREHGGLHNFMNWQGPILTDSGGFQVFSLGAMRKITEEGVHFRSPINGEKVFMDAEVSMEIQYDLNSDVVMIFDECTPYPATWEEAKDSMEMSLRWAQRSRDKFDQLENPNALFGIVQGGVYEDLRDVSLAGLTDIGFDGYAVGGLAVGEPKEDMHRILRHVLPKLPTDKPRYLMGVGKPEDLVEGVRRGVDMFDCVMPTRNARNGHLFTTTEIVKIRNAKHKHDTSPLDSECDCYTCKNYTRGYLYHLDKCNEILGARLNTIHNLRFYQRVMQELRDAIEQNRLEDYVQEFYARQGKEVPELDF

SEQ ID NO: 51559 - protein, 375 aa, Alteromonadales bacterium
  misc_feature (1)..(375): tr|A0XWQ7|A0XWQ7_9GAMM Queuine tRNA-ribosyltransferase OS=Alteromonadales bacterium TW-7 OX=156578 GN=tgt PE=3 SV=1
MKFELDRTDGKARRGRLIFDRGVIETPAFMPVGTYGTVKGMTPDEVKATGAQICLGNTFHLMLRPGTEIIKQHGDLHDFMNWDFPILTDSGGFQVFSLGAMRKITEEGVLFQSPVNGDQIMMSPEKSMEVQRDLGSDIVMIFDECTPYPATEKEAKDSMELSLRWAKRSKEGHGDNPSALFGIIQGGMYPELRAQSQAGLEEIGFDGYALGGLSVGEPKNEMMNILDHCAYKMPENKPRYLMGVGKPEDLVESVRRGIDMFDCVMPTRNARNGHLFITTGIIKIRNAVHKTDTGPLDPDCDCHTCKNYSRAYLHHLDKCNEILGARLNTIHNLRYYQRVMEGLRNAISEGKLEEFVKDFYARRGQEVPELADIKN

SEQ ID NO: 51560 - protein, 370 aa, Alteromonas aestuariivivens
  misc_feature (1)..(370): tr|A0A3D8MFM8|A0A3D8MFM8_9ALTE Queuine tRNA-ribosyltran sferase OS=Alteromonas aestuariivivens OX=1938339 GN=tg t PE=3 SV=1
MQFELLNTDGAARRGRLVFERGVVETPAFMPVGTYGTVKGMTPEELADSGAHICLGNTFHLMLRPGTGIIRQHGDLHDFMHWDKPILTDSGGFQVFSLGDLRKITEEGVTFRSPINGEKILLTPEKSMEVQRDLGSDIVMIFDECTPYPATEQEARLSMEMSLRWAKRSKDAHGENPSALFGIIQGGMYEDLRDISLAGLEEIGFDGYAIGGLSVGEPKEDMIRIIQHTAPQIPADKPRYLMGVGKPEDIVEAVRRGIDMFDCVMPTRNARNGHLFVTEGVIKIRNAKHRNDTSPLDENCDCYTCKNYSRSYLHHLDKCNEILGARLNTIHNLRYYQRVMQGLRDAIAAGELDEFVKTFYAQKDMPVPAL

SEQ ID NO: 51561 - protein, 370 aa, Alteromonas australica
  misc_feature (1)..(370): tr|A0A075NXY5|A0A075NXY5_9ALTE Queuine tRNA-ribosyltran sferase OS=Alteromonas australica OX=589873 GN=tgt PE=3 SV=1
MQFELLKTDGRARRGRLVFERGVVETPAFMPVGTYGTVKGMTPEELDDSGAHICLGNTFHLMLRPGTGIIRQHGDLHDFMNWDKPILTDSGGFQVFSLGDLRKITEEGVTFRSPINGEKILLTPEKSMEVQRDLGSDIVMIFDECTPYPATEQEARVSMEMSLRWAKRSKEAHGDNPAALFGIIQGGMYEGLRDVSLAGLEAIGFDGYAIGGLSVGEPKEDMIRIIDHTAPQIPEDKPRYLMGVGKPEDLVESVRRGIDMFDCVMPTRNARNGHLFVTEGIVKIRNAKHRNDTSPLDEKCDCYTCKNYSRSYLHHLDKCNEILGARLNTIHNLRYYQRVMQGLRDAIDAGTLEQFVQEFYEQKGLPVPAL

SEQ ID NO: 51562 - protein, 370 aa, Alteromonas confluentis
  misc_feature (1)..(370): tr|A0A1E7ZAY1|A0A1E7ZAY1_9ALTE Queuine tRNA-ribosyltran sferase OS=Alteromonas confluentis OX=1656094 GN=tgt PE =3 SV=1
MQFELLKTNGKARRGRLVFDRGVVETPAFMPVGTYGTVKGMTPEELKDSGAHICLGNTFHLMLRPGTGIIKQHGDLHDFMHWDKPILTDSGGFQVFSLGDLRKITEEGVTFRSPINGEKILLTPEKSMEVQRDLGSDIVMIFDECTPYPATEQEARISMELSLRWAKRSKEAHGDNPSALFGIVQGGMYEGLRDISLAGLEDIGFDGYAIGGLSVGEPKEDMIRIIEHTAPKIPENKPRYLMGVGKPEDLVESVRRGIDMFDCVMPTRNARNGHLFVTEGVIKIRNAKHRNDTSPLDENCDCYTCKNYSRSYLHHLDKCNEILGARLNTIHNLRYYQRVMQGLRDAIDADDLEGFVKEFYAQKDMPVPAL

SEQ ID NO: 51563 - protein, 370 aa, Alteromonas lipolytica
  misc_feature (1)..(370): tr|A0A1E8FDU3|A0A1E8FDU3_9ALTE Queuine tRNA-ribosyltran sferase OS=Alteromonas lipolytica OX=1856405 GN=tgt PE= 3 SV=1
MQFELLHTDGRARRGKLVFERGVVETPAFMPVGTYGTVKGMTPEELEDSGAHICLGNTFHLMLRPGTGIIKQHGDLHDFMHWEKPILTDSGGFQVFSLGDLRKITEEGVTFRSPINGEKILLTPEKSMEVQRDLGSDIVMIFDECTPYPATEQEARISMELSLRWAKRSKDAHGDNPSALFGIIQGGMYEDLRDVSLAGLEDIGFDGYAIGGLSVGEPKEDMIRIIEHTAPKIPEHKPRYLMGVGKPEDIVEAVRRGIDMFDCVMPTRNARNGHLFVTEGVIKIRNAKHKNDTGPLDEKCDCYTCKNYSRSYLHHLDKCNEILGARLNTIHNLRYYQRVMQGLRDAIESNSLDEFVSEFYAQKNMPVPAL

SEQ ID NO: 51564 - protein, 159 aa, Alteromonas macleodii
  misc_feature (1)..(159): tr|A0A351U8H5|A0A351U8H5_ALTMA tRNA guanosine(34) trans glycosylase Tgt (Fragment) OS=Alteromonas macleodii OX= 28108 GN=tgt PE=4 SV=1
GLAVGETQEEMFNVLDHIKNFMPEDKPRYLMGVGKPEDLVESVRRGIDMFDCVMPTRNARNGHLFVTEGVVKIRNAKHRNDTSPLDENCDCYTCKNYSRSYLHHLDKCNEILGARLNTIHNLRYYQRVMQGLRDAIDAGTLDEFVQEFYEQKGLPVPAL

SEQ ID NO: 51565 - protein, 370 aa, Alteromonas macleodii
  misc_feature (1)..(370): tr|A0A126Q3X9|A0A126Q3X9_ALTMA Queuine tRNA-ribosyltran sferase OS=Alteromonas macleodii OX=28108 GN=tgt PE=3 S V=1
MQFELLKTEGRARRGRLVFERGVVETPAFMPVGTYGTVKGMTPEELKDSGAHICLGNTFHLMLRPGTGIIRQHGDLHDFMNWDKPILTDSGGFQVFSLGDLRKITEEGVTFRSPINGEKILLTPEKSMEVQRDLGSDIVMIFDECTPYPATEQEARVSMEMSLRWAKRSKEAHGDNPAALFGIIQGGMYEGLRDVSLAGLEAIGFDGYAIGGLSVGEPKEDMIRIIDHTAPKIPEDKPRYLMGVGKPEDLVESVRRGIDMFDCVMPTRNARNGHLFVTEGVVKIRNAKHRNDTSPLDENCDCYTCKNYSRSYLHHLDKCNEILGARLNTIHNLRYYQRVMQGLRDAIDAGTLDEFVQEFYEQKGLPVPAL

SEQ ID NO: 51566 - protein, 370 aa, Alteromonas marina; identical to SEQ ID NO: 51565
  misc_feature (1)..(370): tr|A0A0B3YHL8|A0A0B3YHL8_9ALTE Queuine tRNA-ribosyltran sferase OS=Alteromonas marina OX=203795 GN=tgt PE=3 SV= 1

SEQ ID NO: 51567 - protein, 370 aa, Alteromonas mediterranea; identical to SEQ ID NO: 51565
  misc_feature (1)..(370): tr|S5CBF8|S5CBF8_9ALTE Queuine tRNA-ribosyltransferase OS=Alteromonas mediterranea UM7 OX=1300258 GN=tgt PE=3 SV=1

SEQ ID NO: 51568 - protein, 370 aa, Alteromonas mediterranea; identical to SEQ ID NO: 51565
  misc_feature (1)..(370): tr|T2DM54|T2DM54_ALTMD Queuine tRNA-ribosyltransferase OS=Alteromonas mediterranea (strain DSM 17117 / CIP 110 805 / LMG 28347 / Deep ecotype) OX=1774373 GN=tgt PE=3 SV=1

SEQ ID NO: 51569 - protein, 370 aa, Alteromonas naphthalenivorans
  misc_feature (1)..(370): tr|F5ZAV0|F5ZAV0_ALTNA Queuine tRNA-ribosyltransferase OS=Alteromonas naphthalenivorans OX=715451 GN=tgt PE=3 SV=1
MQFELLKTDGKARRGRLVFDRGVVETPAFMPVGTYGTVKGMTPEELEDSGAHICLGNTFHLMLRPGTGVIRQHGDLHDFMHWDKPILTDSGGFQVFSLGDLRKITEEGVTFRSPINGEKILLTPEKSMEVQRDLGSDIVMIFDECTPFPATEQEARVSMEMSLRWAKRSKESHGDSPAALFGIIQGGMYEGLRDVSLAGLEAIGFDGYAIGGLSVGEPKEDMIRIIDHTAPQIPEDKPRYLMGVGKPEDIVEAVRRGIDMFDCVMPTRNARNGHLFVTDGVVKIRNAVHRNDTSPLDENCDCYTCKNYSRSYLHHLDKCNEILGARLNTIHNLRYYQRVMQGLRDAIEADSLDEFVHTFYEQKNMPVPAL

SEQ ID NO: 51570 - protein, 370 aa, Alteromonas pelagimontana
  misc_feature (1)..(370): tr|A0A2A6ATN0|A0A2A6ATN0_9ALTE Queuine tRNA-ribosyltran sferase OS=Alteromonas pelagimontana OX=1858656 GN=tgt PE=3 SV=1
MQFELLNTDGKARRGKLVFERGVVETPAFMPVGTYGTVKGMTPEELSDSGAHICLGNTFHLMLRPGTSIIRQHGDLHDFMHWDKPILTDSGGFQVFSLGDLRKITEEGVTFRSPINGEKILLTPEKSMDVQRDLGSDIVMIFDECTPYPATEQEARLSMELSLRWAKRSKSAHGDNPSALFGIIQGGMYESLRDVSLKGLEDIGFDGYAIGGLSVGEPKEDMIRIIDHTAPKIPQNKPRYLMGVGKPEDIVEAVRRGIDMFDCVMPTRNARNGHLFVTEGVVKIRNAKHRTDTAALDENCDCYTCKNYSRSYLHHLDKCNEILGARLNTIHNLRYYQRVMQGLRDAIAQEELDAFVETFYEQKNMPVPAL

SEQ ID NO: 51571 - protein, 370 aa, Alteromonas sp.; identical to SEQ ID NO: 51561
  misc_feature (1)..(370): tr|A0A2D5BX14|A0A2D5BX14_ALTSX Queuine tRNA-ribosyltran sferase OS=Alteromonas sp. OX=232 GN=tgt PE=3 SV=1

SEQ ID NO: 51572 - protein, 371 aa, Alteromonas sp.
  misc_feature (1)..(371): tr|A0A3N5Y5W5|A0A3N5Y5W5_9ALTE Queuine tRNA-ribosyltran sferase OS=Alteromonas sp. U0105 OX=2259342 GN=tgt PE=3 SV=1
MQFELDKTDGKARRGRLVFDRGVVETPAFMPVGTYGTVKGMTPEELADSGAHICLGNTFHLMLRPGTGIIREHGDLHDFMHWDKPILTDSGGFQVFSLGDLRKITEEGVTFRSPINGEKILLTPEKSMEVQRDLGSDVVMIFDECTPYPATEQEARLSMEMSLRWAKRSKDAHGDNPAALFGIIQGGMYENLRDVSLAGLEDIEFDGYAIGGLSVGEPKEDMIRIIEHTAPKIPENKPRYLMGVGKPEDIVEAVRRGIDMFDCVMPTRNARNGHLFVTEGVVKIRNAKHKTDTRPLDENCDCYTCKNYSRSYLHHLDKCNEILGARLNTIHNLRYYQRVMEGLRDAIDKGELDAFVEEFYANKNMPVPALS

SEQ ID NO: 51573 - protein, 370 aa, Alteromonas stellipolaris
  misc_feature (1)..(370): tr|A0A0S1YHD9|A0A0S1YHD9_9ALTE Queuine tRNA-ribosyltran sferase OS=Alteromonas stellipolaris LMG 21856 OX=11607 20 GN=tgt PE=3 SV=1
MQFELLKTDGKARRGRLVFDRGVVETPAFMPVGTYGTVKGMTPEELEDSGAHICLGNTFHLMLRPGTGVIRQHGDLHDFMHWDKPILTDSGGFQVFSLGDLRKITEEGVTFRSPINGEKILLTPEKSMEVQRDLGSDIVMIFDECTPYPATEQEARVSMEMSLRWAKRSKESHGDSPAALFGIIQGGMYEGLRDVSLAGLEAIGFDGYAIGGLSVGEPKEDMIRIIDHTAPQIPEDKPRYLMGVGKPEDIVEAVRRGIDMFDCVMPTRNARNGHLFVTDGVVKIRNAVHRNDTSPLDGNCDCYTCKNYSRSYLHHLDKCNEILGARLNTIHNLRYYQRVMQGLRDAIEADSLDDFVHTFYEQKNMPVPAL

SEQ ID NO: 51574 - protein, 376 aa, Altibacter sp.
  misc_feature (1)..(376): tr|A0A2D9N7L2|A0A2D9N7L2_9FLAO Queuine tRNA-ribosyltran sferase OS=Altibacter sp. OX=2024823 GN=tgt PE=3 SV=1
MQFTLKGKDTQSQARAGTITLDHGTVETPIFMPVGTVGTVKGVHQRELTQEIDPDIILGNTYHLYLRPQIDILEKAGGIHKFMNWDRSILTDSGGYQVYSLSANRKIKEEGVKFKSHIDGSYHVFTPENVMEIQRSIGADIIMAFDECTPYPCDYTYAKRSMHMTHRWLERCLKHLKKTPFKYDYEQTFFPIVQGSTYKDLRKQSAEYIASVGAEGNAIGGLSVGEPAEEMYEMTAVVTEILPQDKPRYLMGVGTPINILENIALGIDMFDCVMPTRNGRNGMLFTAHGTINIKNKKWEADFSPIDEMNLTWVDTAYSKAYVRHLFTVNEMLGRQIATIHNLGFYLWLVREARKHILAGDFTSWKNKMVVQMDKRL

SEQ ID NO: 51575 - protein, 371 aa, Alysiella crassa
  misc_feature (1)..(371): tr|A0A376BUJ5|A0A376BUJ5_9NEIS Queuine tRNA-ribosyltran sferase OS=Alysiella crassa OX=153491 GN=tgt PE=3 SV=1
MLKFTLHKTDGYARRGTLELNHGKVETPVFMPVGTYGSVKAMTPTDLHNIKAQIILGNTYHLWLRPGLEVIEQFGGLHDFIGWNKPILTDSGGFQVFSLSQMRKLTEDGCTFKSPINGDKLFLSPEISMKIQTVLNSDIVMQLDECTEGNATHAEARKSLQMSLRWAERSKKAFEDLKNPNALFGIIQGAMYEDLREESLLGLEDIDFKGIAIGGLSVGEPKPEMYRMLRAIAPMLPKHKPHYLMGVGTPEDLVYGVAHGVDMFDCVMPTRNARNGWLFTRFGDIKIRNAKHRFDKRPLDESCTCYACQNFSRAYLHHLDKVGEILGAQLCTIHNLHFYQVIMAEMREAIEQGKFADWQAQFHENRARGTD

SEQ ID NO: 51576 - protein, 371 aa, Alysiella filiformis
  misc_feature (1)..(371): tr|A0A286EG96|A0A286EG96_9NEIS Queuine tRNA-ribosyltran sferase OS=Alysiella filiformis DSM 16848 OX=1120981 GN =tgt PE=3 SV=1
MLKFTLHKKDGHARRGTLELNHGKIETPVFMPVGTYGSVKAMTPTDLHNIKAQIILGNTYHLWLRPGLEVIEQFGGLHQFIGWNKPILTDSGGFQVFSLSEMRKLTEEGCTFKSPINGDKLFLSPEISMKIQTVLNSDIAMQLDECTEGNASHAEAKKSLQMSLRWAERSKKAFEDLKNPNALFGIVQGAMYEDLREESLRGLEEIGFAGLAIGGLSVGEPKPEMYRMIRAVAPILPEHKPHYLMGVGTPEDLVYGVAYGVDMFDCVMPTRNARNGWLFTRFGDIKIKNAKHRMDKRPLDESCTCYTCQNFSRAYLYHLHKVGEILGAQLNTIHNLHFYQVIMAEMREAIEQGKFADWQAQFHENRARGTD

SEQ ID NO: 51577 - protein, 377 aa, Amantichitinum ursilacus
  misc_feature (1)..(377): tr|A0A0N0XLA0|A0A0N0XLA0_9NEIS Queuine tRNA-ribosyltran sferase OS=Amantichitinum ursilacus OX=857265 GN=tgt PE =3 SV=1
MATTFNGLDFELKATSGGARRGQVTLNHGVVQTPVFMPVGTYGTVKAMTPRDLNEIEAQIILGNTFHLWLRPGTEVISQYGGLHGFMGWDKPILTDSGGFQVFSLGELRKITEEGVKFQSPVNGDKLFLTPEESMRIQRALNSDVVMIFDECTPYPATRQEAADSMRMSARWARRSRDEFDRLENPNALFGIVQGGMYEDLRNESLAGLDEIGFHGMAIGGLSVGEPREEFYRVLAQTAPRLPVHKPRYLMGVGTPEDLVYGVSQGIDMFDCVMPTRNARNGMLFTRFGDIKIKNARHRTDTRPLDETCDCYACRNFSRGYLHHLFRAGEILGAQLNTIHNLRYYQVLMAEMRTAIEEDAFPAFVAQFHSGRARGTE

SEQ ID NO: 51578 - protein, 375 aa, Amaricoccus sp.
  misc_feature (1)..(375): tr|A0A501WK19|A0A501WK19_9RHOB Queuine tRNA-ribosyltran sferase OS=Amaricoccus sp. HB172011 OX=2589815 GN=tgt P E=3 SV=1
MDRIEFHIAARDGRARTGALRTPRGEIRTPAFMPVGTAATVKAMLPESVRATGADILLGNTYHLMLRPGAERVARLGGLHAFMNWDRPILTDSGGFQVMSLADLRKLTEEGVTFRSHVDGARHFLSPETSMEIQRLLGSDIVMAFDECPALPATEETVAKSMRLSMRWAARSRDAFGDRPGHALFGIQQGGVTRELREESAEALTAIGFDGYAIGGLAVGEGQEAMFGVLDYAPGFLPEDRPRYLMGVGKPDDIVGAVMRGVDMFDCVLPSRSGRTGQVFTRRGVVNIKNARHADDPRPLDETCGCPACRSYSRAYLHHVFKSGEIIASMLLTWHNLHYYQELMAGLRGAIAEGRLAAFAAGFAAERAAGDLPPL

SEQ ID NO: 51579 - protein, 374 aa, Aminicella lysinilytica
  misc_feature (1)..(374): tr|A0A4R6PXI7|A0A4R6PXI7_9FIRM Queuine tRNA-ribosyltran sferase OS=Aminicella lysinilytica OX=433323 GN=tgt PE= 3 SV=1
MTNAVTYELLHRDKKTGARRGVIHTPHGDIQTPVFMPVGTQGAVKAMRPEQVADMGAEIILANTYHLYLRPGHEIVKEAGGLHKFMNWDRAILTDSGGFQVFSLGQLRKITEEGVSFQSHIDGSRHMLSPEKAVEIQNALGSDIMMAFDECAPYPADRSYIKDSMERTCRWLERCKAAHKDVERQSLFGIMQGGMYKDLRRESAERIVDMDLPGYSIGGLSVGEPKELMLDILDDCVDLLPEDKPRYLMGVGTPDYLFEGVERGLDMFDCVEPTRIARHGLATTSHGRINIKNAKFERDFTPLDPECDCYTCRNYSRAYIRHMMKSGEMMSAMLISNHNLHFLIHMMAGIREAIEEDRFTEFKKEFYEKYGGFK

SEQ ID NO: 51580 - protein, 373 aa, Aminipila sp.
  misc_feature (1)..(373): tr|A0A410PV08|A0A410PV08_9FIRM Queuine tRNA-ribosyltran sferase OS=Aminipila sp. JN-39 OX=2507160 GN=tgt PE=3 S V=1
MKHAVTYELLKKDSRTKARRGRVHTPHGTIETPVFMPVGTAATVKAMRPEQVKEMGAQIILSNTYHLYLRPGHEIVREAGGLHKFMNWDRAILTDSGGFQVFSLGALRKITEEGVQFRSHIDGSKHMLSPEKSMEIQNALGSDIMMAFDECAPYPSDRDYVKNSLERTTRWLKRCKEYHKDTERQSLFGIMQGGMYKDLRYESAMQVVDLDLPGYAIGGLSVGEPKELMLDILDDCVDYLPEEKARYLMGVGSPDYLFEGVERGVDMFDCVLPTRIARHGMAMTSYGRVNIKNAKYERDFEALDPECDCYTCRNYSKAYLRHLYKCDEMLSAMLLSNHNLHFLVNMMGNIRKAIEEDRFLEYKNEFYTKYGRF

SEQ ID NO: 51581 - protein, 383 aa, Aminivibrio pyruvatiphilus
  misc_feature (1)..(383): tr|A0A4R8M599|A0A4R8M599_9BACT Queuine tRNA-ribosyltran sferase OS=Aminivibrio pyruvatiphilus OX=1005740 GN=tgt PE=3 SV=1
MNFPDTAFSFTLDAVCPVTGARAGTLHTPRGDIQTPVFMPVGTQATVKAMAPFELEEMGARIILANTYHLYLRPGADIVAEGGGLHGFMQWKRPILTDSGGFQVFSLSTLNRISDEGVWCRSHHDGTPHVMNPEWSMSVQKQLGSDIAMCFDQCAPWPCSREEAEGAVRRTALWAARSKEAHAREWQGERRQALFGIVQGSVWEDLRLRSAKDIIPMDFPGYAVGGLSVGEPHGDMYRILDSLKGVLPSGKPRYLMGVGRPDNLVEGVARGIDMFDCVLPTRNGRNGTLFTPYGAVNIKKKQYERDFTPVDPECDCYACRTFTRAYIRHLYRSGEILASRLCSWHNLRFLIRLGEEMRKAILEGRFPEFRRAFLGRFSGGEAE

SEQ ID NO: 51582 - protein, 378 aa, Aminobacter aminovorans
  misc_feature (1)..(378): tr|A0A380WLC6|A0A380WLC6_AMIAI Queuine tRNA-ribosyltran sferase OS=Aminobacter aminovorans OX=83263 GN=tgt PE=3 SV=1
MSSEFTFKLLATDGKARRGEITMPRGTIRTPAFMPVGTGGTVKAMYMDQVRGVGADIILGNTYHLMLRPGAERVAKLGGLHDFARWPHPILTDSGGFQVMSLSKLRKISEKGVTFRSHIDGAPYEMSPERSIEIQGLLDSDIQMQLDECTALPSTPKEIQRAMEMSLRWAERCKTAFGDQPGKAMFGIVQGGDIPDMRVRSAQALKALELKGYAVGGLAVGEPQEVMLDMLDITCPELPQEKPRYLMGVGTPDDIIKSVARGIDMFDCVMPTRAGRHGLAYTRRGKVNLRNARHADDPRPLDEESDCPAARDYSRAYLHHLVRSGEALGAMLLTWNNLSYYQHLMSEIRASIEVGRFADQTAEISEGWARGDIPLHNG

SEQ ID NO: 51583 - protein, 378 aa, Aminobacter aminovorans
  misc_feature (1)..(378): tr|A0A142M8H6|A0A142M8H6_AMIAI Queuine tRNA-ribosyltran sferase OS=Aminobacter aminovorans OX=83263 GN=tgt PE=3 SV=1
MSSEFTFKLLATDGKARRGEITMPRGTIRTPAFMPVGTGGTVKAMYMDQVRGVGADIILGNTYHLMLRPGAERVAKLGGLHDFARWPHPILTDSGGFQVMSLSKLRKISEKGVTFRSHIDGAPYEMSPERSIEIQGLLDSDIQMQLDECTALPSTPKEIQRAMEMSLRWAERCKTAFGDQPGKAMFGIVQGGDIPDMRVRSAQALTGLELKGYAVGGLAVGEPQEVMLDMLDITCPELPQEKPRYLMGVGTPDDIIKSVARGIDMFDCVMPTRAGRHGLAYTRRGKVNLRNARHADDPRPLDEESDCPAARDYSRAYLHHLVRSGEALGAMLLTWNNLSYYQHLMSEIRASIEAGRFADRTTEISEGWARGDISLHKG

SEQ ID NO: 51584 - protein, 379 aa, Aminobacter sp.
  misc_feature (1)..(379): tr|A0A316GXR1|A0A316GXR1_9RHIZ Queuine tRNA-ribosyltran sferase OS=Aminobacter sp. AP02 OX=2135737 GN=tgt PE=3 SV=1
MSEEFKFNVLATDGKARRGEITMPRGTIRTPAFMPVGTGGTVKAMYMDQVRGVGADIILGNTYHLMLRPGAERVARLGGLHEFARWPHPILTDSGGFQVMSLSKLRKLSEKGVTFRSHIDGAAYEMSPERSIEIQGLLDSDIQMQLDECTALPATPKEIERAMELSLRWADRCKTAFGHQPGKAMFGIVQGGDIPDMRVRSAQALKGLDLKGYAVGGLAVGEPQEVMLDMLDITCPELPQEKPRYLMGVGTPDDIIKSVARGIDMFDCVMPTRAGRHGLAYTRRGKVNLRNARHADDPRPLDEESDCPAARDYSRAYLHHLVKSGEALGAMLLTWNNLSYYQQLMGEIRVSIEAGKFVDRAAEITEGWVRGDLPVHSGL

SEQ ID NO: 51585 - protein, 376 aa, Aminobacter sp.
  misc_feature (1)..(376): tr|A0A562FI01|A0A562FI01_9RHIZ Queuine tRNA-ribosyltran sferase OS=Aminobacter sp. J15 OX=935260 GN=tgt PE=3 SV =1
  misc_feature (223)..(223): Xaa can be any naturally occurring amino acid
MTEQFSFKVLATDGKARRGEITMPRGTIRTPAFMPVGTGGTVKAMYMDQVRDLGADIILGNTYHLMLRPGAERVARLGGLHEFARWPYPILTDSGGFQVMSLAQLRKLNEQGVTFQSHIDGRRYEMSPERSIEIQGLLDSDIQMQLDECVALPASEKEIERAMELSLRWAERCKVAFGDQPGKAMFGIVQGGDVPRLRERSAEALKAMDLKGYAVGGLAVGEXQEVMLDMLDITCPVLPADKPRYLMGVGTPDDILKSVARGIDMFDCVMPTRAGRHGLAFTRRGKVNLRNARHADDPRPLDEESPCPAARDYSRAYLHHLVKSGEALGAMLLTWNNLSYYQQLMADIRAAIESGRFVERAAEITAGWAAGDIAPL

SEQ ID NO: 51586 - protein, 378 aa, Aminobacterium colombiense
  misc_feature (1)..(378): tr|D5EDX0|D5EDX0_AMICL Queuine tRNA-ribosyltransferase OS=Aminobacterium colombiense (strain DSM 12261 / ALA-1 ) OX=572547 GN=tgt PE=3 SV=1
MFEFRLQAQCPVTGARAGEFVTPHGVIKTPVFMPVGTQATVKAMAPFELEEIGAQIILSNTYHLYLRPGADIVEEAGGLHSFMDWHHPILTDSGGFQVFSLATLNRVTDEGVECQSHIDGSRHMMDPEWSMEVQQKLGSDIAMCFDQCLHYPTTKEEAETALARTTRWARRSKDAHTREDQALFGIIQGSVYEDLRRRSAEDITSIGFPGYGIGGLSVGEPHHIMYEMLDVLQHVMPFDKPRYLMGVGHPSNLVEGVARGVDMFDCVLPTRNGRTGTVFVSTGRINIKNQVYARDFTPLDPSCDCYVCRHFTKAYIRHLYKAGEILAARLCSWHNLHFLIKLMEGVRESILNGTFPAFRKNFIEVFHGEGDSVENESL

SEQ ID NO: 51587 - protein, 373 aa, Aminomonas paucivorans
  misc_feature (1)..(373): tr|E3CUU5|E3CUU5_9BACT Queuine tRNA-ribosyltransferase OS=Aminomonas paucivorans DSM 12260 OX=584708 GN=tgt PE =3 SV=1
MSFRLLAECPVTGARAGEYSTPHGTLRTPVFMPVGTQATVKAMAPFELEQMGAQILLGNTYHLFLRPGEDLVERAGGLHRFMDWPHPILTDSGGFQVFSLAELRTLSDEGVVFRSHRDGSRHLMTPERSVKIQEKLGSDIAMCFDECVPYPSTPEASREGMERTLRWAVRCREAHARPGQDLFGIVQGSVYEDQRVLCARELVRLDFPGYAIGGLSVGESHGEMYRILDCLAPEMPRTKPRYLMGVGHPANLVEGIARGVDLFDCVLPTRNGRNGTVFTSTGRLNVKNQALAEDFRPLDETCDCYVCRHYTRAYLRHLYKAGEILAARLCTWHNLHFLLSLVEGARNAILEGTFPAYREAFHARFDDVREAEA

SEQ ID NO: 51588 - protein, 336 aa, Ammonifex degensii
  misc_feature (1)..(336): tr|C9R7V6|C9R7V6_AMMDK Queuine tRNA-ribosyltransferase OS=Ammonifex degensii (strain DSM 10501 / KC4) OX=42900 9 GN=tgt PE=3 SV=1
MPVGTQATVKGLTPDELGALGTQILLCNTYHLYLRPGVSIVEEAGGLHRFMRWSGPILTDSGGFQVLSLTPLRKVTDEGVIFRSHLDGSEHFFTPEKVVDLQERLGPDIAMVLDECPPYPASREEIEKAVKRTSAWAERSRKAWRRKEVTFFGIVQGGVYRDLREKSAEELVALDFPGYAIGGLSVGEPKELTYAVLDWVVPLLPPDKPRYLMGVGTPEDILEGVARGIDMFDCVLPTRLGRHATAFTRRGRINIRRAAYARDFGPLEEGCQCYTCRHYTRAYLHHLFRAEEMLGPRLLTLHNLHFLFRLMERIREAIASGTFHHLYETWLQERGG

SEQ ID NO: 51589 - protein, 365 aa, Ammonifex thiophilus
  misc_feature (1)..(365): tr|A0A3D8P2Z3|A0A3D8P2Z3_9THEO Queuine tRNA-ribosyltran sferase OS=Ammonifex thiophilus OX=444093 GN=tgt PE=3 S V=1
MRFEVLAQEGKARWGRLFTPHGVVDTPVFMPVGTQATVKGLTPEELGALGTQILLCNTYHLYLRPGVSIVEEAGGLHRFMRWFGPILTDSGGFQVLSLAPLRKVTDEGVIFRSHLDGSEHLFTPEKVVDLQERLGPDIAMVLDECPPYPASREEIERAVKRTSAWAERSLKVWRRKEVTFFGIVQGGVYRDLRERSVKELVALDFPGYAIGGLSVGEPKELTYAVLDWVVPLLPPDKPRYLMGVGTPEDILEGVARGVDMFDCVLPTRLGRHATVFTRRGRINIRRAAYARDFGPLEEGCQCYTCRHYTRAYLHHLFRAEEMLGPRLLTLHNLHFLFRLMERIREAIASGTFAHLYETWLRGGGE

SEQ ID NO: 51590 - protein, 376 aa, Ammoniphilus oxalaticus
  misc_feature (1)..(376): tr|A0A419SIZ1|A0A419SIZ1_9BACL Queuine tRNA-ribosyltran sferase OS=Ammoniphilus oxalaticus OX=66863 GN=tgt PE=3 SV=1
MAVTYELIKTCKQTGARRGRLHTPHGTIETPIFMPVGTLATVKAMSPEELKEMDAQIILSNTYHLFLRPGHDIVKKAGGLHQFMNWDRPILTDSGGFQVFSLSKLRQIEEEGVHFRSHLSGAKLFLSPERATEIQNDLGADIIMAFDECAPYPAEHDYVKRSLERTTRWLERCIAAHDRSEDQALFGIVQGGMYRDLREQSAKEITSFDLPGYAIGGLSVGEPKSIMDEVLDYTVPLLPAGKPRYLMGVGSPDALIDASIRGIDMFDCVLPTRIARNGTCMTSEGRLVIRNAKFKEDFTPLDPQCDCYTCRNYTKAYIRHLFHADEILGLRLTSYHNLHFLIRLMENVRDAIMNDCLLDFRNEFFEQYGLSEERSF

SEQ ID NO: 51591 - protein, 376 aa, Ammoniphilus sp.
  misc_feature (1)..(376): tr|A0A4Q1TBN1|A0A4Q1TBN1_9BACL Queuine tRNA-ribosyltran sferase OS=Ammoniphilus sp. CFH 90114 OX=2493665 GN=tgt PE=3 SV=1
MAVKYELLKVCKQTGARRGRLHTPHGTIETPIFMPVGTLATVKAMSPEELKDMNAQIILSNTYHLFLRPGHDIVKKAGGLHQFMNWDRPILTDSGGFQVFSLSNLRKIEEEGVHFRSHLSGAKLFIGPEVAMEIQNALGADIIMAFDECAPYPADHAYVKSSLERTTRWLERCIKAHERPQDQALFGIVQGGMYRDLREQSAREIVPFDLPGYAIGGLSVGEPKALMDEVLEYTVPLLPENKPRYLMGVGSPDALIDGAIRGIDMFDCVLPTRIARNGTCMTSQGRLVIRNAKFKEDFTPLDPNCDCYTCRNYTRAYIRHLFNADEIFGLRLTSYHNLHFLLSLMEKVREAIMEDRLMDFRNEFFAQYGLNEERSF

SEQ ID NO: 51592 - protein, 376 aa, Amoebophilaceae bacterium
  misc_feature (1)..(376): tr|A0A3R7UW84|A0A3R7UW84_9BACT Queuine tRNA-ribosyltran sferase OS=Amoebophilaceae bacterium TMED152 OX=1986680 GN=tgt PE=3 SV=1
MEFKLNFKDSKTKARACTLITDHGKVETPIFMPVGTAATIKGVHQTDLKKDINPDIILSNTYHLYLRPSEKIIEKAGGIHKFMNWDRNILTDSGGYQVYSLSNNTKISEEGVKFKSHIDGSSHIFSPERAINIQKSIGADIIMAFDECPPYPCDYSYVQSSMHLTHRWLDRCIKEFSNTPSKYEYNQTLFPIVQGGTYKDLRKRSAEYISSANCHGNAIGGLSVGEPAEEMYEMTDLVCDILPNNKPRYLMGVGTPINLLENISLGVDMFDCVMPSRNARNGMLFTIDGTINIKNKKWKDDFSAIDENNYSFVDLNYSKAYLRHLFISKESLGKQIATLHNLAFYMWLVREARKQIINGSFEKWKTITVKRMNNRI

SEQ ID NO: 51593 - protein, 203 aa, Amoebophilaceae bacterium
  misc_feature (1)..(203): tr|A0A3C1MCK7|A0A3C1MCK7_9BACT tRNA guanosine(34) trans glycosylase Tgt (Fragment) OS=Amoebophilaceae bacterium OX=2053498 GN=tgt PE=4 SV=1
MNFEVQRVDPYSQARAGLITTSRGQIHTPIFMPVGTAGTVKAVPQKALYEDIQAEIILGNAYHLYLRPGLEILEAAGGLHQFMGWDKPILTDSGGYQVYSLAQRRKLTEEGVTFRSHIDGSQHTFTPERAVDIQRSIGADVIMALDECTPHPCSYAYAKSSMGLTHRWLKRGVDHFDATIAEHNHYQTLFPIVQGSVYKDLRE

SEQ ID NO: 51594 - protein, 374 aa, Amoebophilus asiaticus
  misc_feature (1)..(374): tr|B3EU64|B3EU64_AMOA5 Queuine tRNA-ribosyltransferase OS=Amoebophilus asiaticus (strain 5a2) OX=452471 GN=tgt PE=3 SV=1
MQFELQHVDASSKARAGIITTAHGKIHTPIFMPVGTAGTVKAVEQRNLHQDVEAEIILGNTYHLYLRPGTQVLDAAAGLHQFINWHKPILTDSGGYQVYSLTQRRKITEQGVTFCSHIDGSKHTFTPENAVDIQRSIGSDIMMVLDECTPYPCTYAYARQSMEMTHRWLQRGIAQFNKTTNDINNYQNLFPIVQGSIYKDLRVQSAETIAAANQPGNAIGGVCHPTGQLYEVTEWVCDILPNDKPRYLMGVGTPRDLLECIALGVDMFDCVMPTRSGRNGRLYTTEGIINIKNKKWRHDFSVIDLQLNSYVSNHYTKAYLHHLFKAQEILGAQIASIHNLTFYLSLVKQARQHILSNTFVPWKTSILRKIMEKL

SEQ ID NO: 51595 - protein, 379 aa, Amphibacillus marinus
  misc_feature (1)..(379): tr|A0A1H8P0A7|A0A1H8P0A7_9BACI Queuine tRNA-ribosyltran sferase OS=Amphibacillus marinus OX=872970 GN=tgt PE=3 SV=1
MSAVTYELIKTCKQTGARLGRVHTPHGTFETPVFMPVGTLATVKTMSPEELKELGAGIILSNTYHLWLRPGEDIVREAGGLHKFMNWDGSILTDSGGFQVFSLSDLREIEEQGVHFRNHISGEKLFLSPEKAMQIQNALGSDIMMAFDECPPYPAEYKYMKDSVERTSRWAERCLTAHERPDDQGLFGIVQGGEYEDLRKQSARDLTALDFPGYAIGGLSVGEPKDVMNRVLEFTTPYLPTEKPRYLMGVGSPDSLIDGAIRGIDMFDCVLPTRIARNGTCMTSNGRLVVRNAKFARDFSPLDPNCDCHTCRNYSRAYIRHLIKADETFGLRLTTYHNLYFLVKLMEQVREAIRADRLGDFRDQFFEQYGFNKPNAKNF

SEQ ID NO: 51596 - protein, 379 aa, Amphibacillus xylanus
  misc_feature (1)..(379): tr|K0IXJ0|K0IXJ0_AMPXN Queuine tRNA-ribosyltransferase OS=Amphibacillus xylanus (strain ATCC 51415 / DSM 6626 / JCM 7361 / LMG 17667 / NBRC 15112 / Ep01) OX=698758 G N=tgt PE=3 SV=1
MTAIRYELIKTCKQTGARLGRVHTPHGSFETPIFMPVGTLATVKTMSPEELKEINAQIILSNTYHLWLRPGEDIIKEAGGLHQFMNWDRPILTDSGGFQVFSLSDLRKIEEEGVHFRNHISGEKLFLTPEKATQIQNALGSDIMMAFDECPPYPAEHKYMKNSVERTSRWAERCLEAHERPEDQGLFGIIQGGEYKDLRKQSAQDLTSLDFPGYAIGGLSVGEPKDIMNDILEFTTPLLPSDKPRYLMGVGSADSLIDGAIRGIDMFDCVLPTRVARNGTLMTSQGRLVVRNAKFARDFSPLDPNCDCYTCKNYSRAYIRHLIKTDEIFGLRLTTYHNLYFLLNLMEQVREAIKADRLGDFREEFFESYGFNKPNAKNF

SEQ ID NO: 51597 - protein, 375 aa, Amphiplicatus metriothermophilus
  misc_feature (1)..(375): tr|A0A239PTZ7|A0A239PTZ7_9PROT Queuine tRNA-ribosyltran sferase OS=Amphiplicatus metriothermophilus OX=1519374 GN=tgt PE=3 SV=1
MSDGFSFTLEASDGPARLGVIETPRGKIRTPAFMPVGTAGTVKAMPPDNVRATGADIVLGNTYHLMLRPGAERVAALGGLHKFMNWPHAILTDSGGFQVMSLAKLRKLTEEGVAFQSHIDGAPHMLTPERSIEIQCLLGADIQMQLDECPAIPIAHGAARESMLLSVRWAERSRRAFEEKAAPGQALFGIVQGANYDDLRRESLARLLELDFPGYAVGGLAVGEGRAEMFRVLEIVAPEMPAGRPRYLMGVGKPADIVGAVARGMDMFDCVAPTRSGRHGQAWTRRGPINIKNAAFADDPEPLDPSLDCPASRDYSKAYLHHLFRAGEYLGPMLLTWHNLAYYQALMAGMRAAIAAGRFGAFVARFREETGETIL

SEQ ID NO: 51598 - protein, 374 aa, Amphritea atlantica
  misc_feature (1)..(374): tr|A0A1H9JST1|A0A1H9JST1_9GAMM Queuine tRNA-ribosyltran sferase OS=Amphritea atlantica OX=355243 GN=tgt PE=3 SV =1
MTFERLATDGKARRGRLSFPRGDVETPAFMPVGTYGSVKGMLPKDIEAIGAQIILGNTFHLMLRPGTEVVKAHGDLHDFMNWKGPILTDSGGFQVFSLGAMRKITEAGVHFQSPVNGSKVFMGPEESMQVQRDLGSDIVMIFDECTPYPATEVEAADSMRLSLRWAKRSKEAHGDSPSALFGIVQGGMYPHLRDESIEGLNEIGFDGYAIGGLSVGEPKEEMVKVLDHLAYKMPEDKPRYLMGVGKPEDIVEGVRRGVDMFDCVMPTRNARNGHLFTRHGVVKLRNSANKTDTRPLDEQCSCYTCQNFSRAYLHHLDKCKEIVGSQLNTIHNLHYYQELMAGLRQAIEQGKLDDFVDQFYHLKGMETPPLDSEI

SEQ ID NO: 51599 - protein, 376 aa, Amphritea balenae
  misc_feature (1)..(376): tr|A0A3P1SR70|A0A3P1SR70_9GAMM Queuine tRNA-ribosyltran sferase OS=Amphritea balenae OX=452629 GN=tgt PE=3 SV=1
MKFERTASDGKARRARLSFPRGDVETPAFMPVGTYGTVKGMLPKDIEAIGAHIILGNTFHLMLRPGTEVIKQHGGLHEFMNWKGPILTDSGGFQVFSLGAMRKITEAGVTFQSPVNGSKVFMGPEESMQVQKDLGSDIVMIFDECTPYPATEVEAAESMRLSLRWAKRSKEAHGDSPSALFGIVQGGMYPHLRDESMAGLNEIDFDGYAIGGLSVGEPKEEMVKVLDHLAHQMPEDKPRYLMGVGKPEDIVEAVRRGVDMFDCVMPTRNARNGHLFTRDGVVRLRNSANKTDTRPLDEQCSCYTCQNFSRAYLHHLDKCKEIVGSQLNTIHNLHYYQELMAGLRQAIEQGKLDAFVDEFYRLKGMETPPFDAESIV

SEQ ID NO: 51600 - protein, 374 aa, Amphritea sp.
  misc_feature (1)..(374): tr|A0A430KTM0|A0A430KTM0_9GAMM Queuine tRNA-ribosyltran sferase OS=Amphritea sp. MCCC 1K03512 OX=2490544 GN=tgt PE=3 SV=1
MKFERLATDGKARRARLSFPRGDVETPAFMPVGTYGSVKGMLPKDIEAIGAQIILGNTFHLMLRPGTEVIKAHGDLHDFMHWKGPILTDSGGFQVFSLGAMRKITEAGVHFQSPVNGSKVFMGPEESMQVQRDLGSDIVMIFDECTPYPATETEAAESMRLSLRWAKRSKAAHGDSPSALFGIVQGGMFPHLRDESIEGLNDIGFDGYAIGGLSVGEPKDEMVKVLDHLAYKMPEDKPRYLMGVGKPEDIVEGVRRGVDMFDCVMPTRNARNGHLFTRNGVVKLRNAANKTDTRPLDEECTCYTCQNFSRAYLHHLDKCKEIVGSQLNTIHNLHYYQELMAGLRKAIEQGKLDDFVDQFYHLKGMDVPPLNVEV

SEQ ID NO: 51601 - protein, 376 aa, Amylibacter cionae
  misc_feature (1)..(376): tr|A0A2N5IEA7|A0A2N5IEA7_9RHOB Queuine tRNA-ribosyltran sferase OS=Amylibacter cionae OX=2035344 GN=tgt PE=3 SV =1
MSNTFGFNISARQGRARTGVVSTPKGEIRTPAFMPVGTAATVKAMMPENVRETGADILLGNTYHLMLRPGAERIHNLGGLHRFMNWDRPILTDSGGFQVMSLTDLRKLTEEGVKFRSHIDGSEHNLTPERSMEIQKLLGSDIVMCFDECPALPADRKRIEESMQLSMRWAQRSRDAFGDRPGYALFGIQQGGLEEDLRAQSAEALRSIEFDGYAIGGLAVGEGQEAMFGCLDYAPGQLPEDKPRYLMGVGKPDDIVGAVQRGVDMFDCVLPSRSGRTGQAQTRMGAINLRNARHKDDPRPLDADCSCPACANYSRAYLHHVIKSQEIIGSMLLTWHNLHYYQELMAGLRDAIASGSLDDFVAVFHARRAQGDIEPC

SEQ ID NO: 51602 - protein, 376 aa, Amylibacter kogurei
  misc_feature (1)..(376): tr|A0A2G5K4Y0|A0A2G5K4Y0_9RHOB Queuine tRNA-ribosyltran sferase OS=Amylibacter kogurei OX=1889778 GN=tgt PE=3 S V=1
MSKSFSFHISANDGRARTGIVSTPKGDIRTPAFMPVGTAATVKAMMPENVRETGADILLGNTYHLMLRPGAERIHNLGGLHKFMNWDRPILTDSGGFQVMSLTDLRKLTEEGVKFRSHIDGSEYNLTPERSMEIQRLLGSDIVMCFDECPALPADRARINESMQLSMRWAQRSRDAFGDRPGYALFGIQQGGLEQDFREESAEALQKIGFDGYAIGGLAVGEGQDAMFGVLDYAPNQLPQDKPRYLMGVGKPDDIVGAVQRGVDMFDCVLPSRSGRTGQALTRFGAVNLRNARHKDDPRPLDENCTCPACSNYSRAYLHHVHKAGEIIGSMLLTWHNLHYYQELMQGLRDAIAAGELDAFVAQFHATRAQGDIDPI

SEQ ID NO: 51603 - protein, 383 aa, Anabaena cylindrica
  misc_feature (1)..(383): tr|K9ZKD5|K9ZKD5_ANACC Queuine tRNA-ribosyltransferase OS=Anabaena cylindrica (strain ATCC 27899 / PCC 7122) O X=272123 GN=tgt PE=3 SV=1
MTNFSFECLASCSQTKARAGIFFTPHGVVETPRFMPVGTLANVKTITPAQLKDTGAQMVLSNTYHLHLQPGEAIVAGGGGLHKFMGWNGPMLTDSGGFQVFSLSEMRKITEEGVTFRSPRDGQIIKLTPERSIEIQNILGADVIMAFDECPPYPATREEVEAATDRTYRWLERCIVAHQRSDQALFPIVQGGVYLDLRARAANALAELDMPGYAIGGVSVGEPTELMAQIVKTTAPLLPVNKPRYLMGVGTYREMAIAIASGIDLFDCVIPTRWARHGTAIVSGERWNLKNAKFREDFAPLDETCPCYACQNFSRAYISHLVRSQEILAYTLLSIHNITELIRFTQKIRESILSDRFLTDFGHWLTDDKGQGAGEQGSRGEFF

SEQ ID NO: 51604 - protein, 378 aa, Anabaena sp.
  misc_feature (1)..(378): tr|A0A1B7VKW8|A0A1B7VKW8_9NOST Queuine tRNA-ribosyltran sferase OS=Anabaena sp. WA113 OX=1710889 GN=tgt PE=3 SV =1
MSANFSFECLATCSQTKARAGIFSTPHGPVETPRFMPVGTLANVKTITPAQLGATGAQMVLANTYHLHLQPGEAIVAGGGGLHKFMGWPGPMLTDSGGFQVFSLSEMRKITEEGVTFRSPHDGQMIKLTPERSIEIQNILGADVIMAFDECPPYPATRQEVEAATDRTYRWLKRSISAHQRPDQALFPIVQGGVYLDLRARAAAELAELDMPGYAIGGVSVGEPTDLMAQIVQTTAPLLPVNKPRYLMGVGTYREMAIAIASGVDLFDCVIPTRWARHGTAIVSGERWNLKNAKFREDFTPLDTTCPCYTCENFSRAYISHLVRSQEILAYTLLTIHNITELIRFTQKIRASILSDRFITDFGHWLQPSAIDLEKTQD

SEQ ID NO: 51605 - protein, 378 aa, Anabaena sp.
  misc_feature (1)..(378): tr|A0A1B7V5D2|A0A1B7V5D2_9NOST Queuine tRNA-ribosyltran sferase OS=Anabaena sp. AL09 OX=1710891 GN=tgt PE=3 SV= 1
MSANFSFESLATCSQTKARAGIFSTPHGIVETPRFMPVGTLANVKTITPAQLGATGAQMVLANTYHLHLQPGEAIVAGGGGLHKFMGWSGPMLTDSGGFQVFSLSEMRKITEEGVTFRSPHDGQIIKLTPERSIEIQNILGADVIMAFDECPPYPATRQEVEAATDRTYRWLKRSISAHQRQDQALFPIVQGGVYLDLRARAAQELAQLDMPGYAIGGVSVGEPTDLMAQIVQTTAPLLPVNKPRYLMGVGTYREMAIAIASGVDLFDCVIPTRWARHGTAIVSGERWNIKNAKFREDFTPLDTTCPCYTCENFSRAYLAHLVRSQEILAYTLLTIHNITELIRFTQKIRASILSDRFVTDFGHWLEPSAIDLEKTED

SEQ ID NO: 51606 - protein, 343 aa, Anabaenopsis circularis
  misc_feature (1)..(343): tr|A0A1Z4GFS5|A0A1Z4GFS5_9CYAN Queuine tRNA-ribosyltran sferase OS=Anabaenopsis circularis NIES-21 OX=1085406 G N=tgt PE=3 SV=1
MPVGTLANVKTVTPAQLKDTGAQMVLSNTYHLHLQPGEAIVAGGGGLHKFMGWDGPMLTDSGGFQVFSLSEMRKITEEGVTFRSPHDGQIINLTPERSIEIQNTLGADVIMAFDECPPYPATRQEVETATERTYRWLERCIAAHQRQDQALFGIVQGGVYLDLRSQAAVALAKLDLPGYAIGGVSVGEPAELMAQIVQATAPLLPPEKPRYLMGVGTYREMAIAIASGIDLFDCVIPTRWARHGTAMVQGERWNLKNAKFREDFTPLDETCPCYACQNFSRAYISHLVRSQEILAYTLLSIHNITELIRFTQKIRQAILNDSFLAEFGHWLNSPETGELEEYS

SEQ ID NO: 51607 - protein, 379 aa, Anaerobacillus alkalidiazotrophicus
  misc_feature (1)..(379): tr|A0A1S2MDM8|A0A1S2MDM8_9BACI Queuine tRNA-ribosyltran sferase OS=Anaerobacillus alkalidiazotrophicus OX=47296 3 GN=tgt PE=3 SV=1
MVAIRYEHIKTCRQSGARLGKVHTPHGTFETPIFMPVGTLATVKTMSPEELKEIGSQIILSNTYHLWLRPGHEIVKEAGGLHKFMNWDRPILTDSGGFQVFSLSALRKIEEEGVNFRNHLNGEKLFLSPEGAMEIQNALGSDIMMAFDECPPYPATHEYMLKSVERTSRWAERCLEGHKRPEAQGLFGIVQGGEYEDLRKLSAQDLVSLDFPGYAIGGLSVGEPKDVMNRVLEFTTPHLPFDKPRYLMGVGSPDALIDGAIRGIDMFDCVLPTRIGRNGTCMTSTGRLVVRNAKYARDFTPLDENCDCHVCKNYTRAYIRHLVKCDETFGFRLTSYHNLYFLLNLMEKVREAIREDRLLDFKEEFFEMYGFNKPNAKNF

SEQ ID NO: 51608 - protein, 379 aa, Anaerobacillus alkalilacustris
  misc_feature (1)..(379): tr|A0A1S2LW86|A0A1S2LW86_9BACI Queuine tRNA-ribosyltran sferase OS=Anaerobacillus alkalilacustris OX=393763 GN= tgt PE=3 SV=1
MVAIRYEHIKTCRQSGARLGKVHTPHGTFETPIFMPVGTLATVKTMSPEELKEIGSQIILSNTYHLWLRPGHEIVKEAGGLHKFMNWDRPILTDSGGFQVFSLSALRKIEEEGVNFRNHLNGEKLFLSPEGAMEIQNALGSDIMMAFDECPPYPATHEYMLKSVERTSRWAERCLEGHKRPEAQGLFGIVQGGEYEDLRKLSAQDLVSLDFPGYAIGGLSVGEPKDVMNRVLEFTTPHLPFDKPRYLMGVGSPDALIDGAIRGIDMFDCVLPTRIGRNGTCMTSTGRLVVRNAKYARDFTPLDENCDCHVCKNYSRAYIRHLVKCDETFGFRLTSYHNLYFLLNLMEKVREAIREDRLLDFKEDFFEMYGFNKPNAKNF

SEQ ID NO: 51609 - protein, 379 aa, Anaerobacillus arseniciselenatis
  misc_feature (1)..(379): tr|A0A1S2L7G7|A0A1S2L7G7_9BACI Queuine tRNA-ribosyltran sferase OS=Anaerobacillus arseniciselenatis OX=85682 GN =tgt PE=3 SV=1
MVAIRYEHIKTCRQSGARLGKVHTPHGTFETPIFMPVGTLATVKTMSPEELKEIGSQIILSNTYHLWLRPGHDIVKEAGGLHKFMNWDRPILTDSGGFQVFSLSALRKIEEEGVHFRNHLSGEKLFLSPEGAMEIQNALGSDIMMAFDECPPYPATYEYMLKSVERTSRWAERCLEGHKRPEDQGLFGIVQGGEYEDLRKKSAEDLVSLDFPGYAVGGLSVGEPKDVMNRVLEFTTPHLPHDKPRYLMGVGSPDALIDGTIRGIDMFDCVLPTRIARNGTCMTSSGRLVVRNAKYAKDYRPLDEKCDCHVCKNYTRAYIRHLVKCDETFGFRLTSYHNLYFLLKLMEQVREAIRQDRLLDFKEEFFEMYGLNKPNAKNF

SEQ ID NO: 51610 - protein, 379 aa, Anaerobacillus isosaccharinicus
  misc_feature (1)..(379): tr|A0A1S2KVI8|A0A1S2KVI8_9BACI Queuine tRNA-ribosyltran sferase OS=Anaerobacillus isosaccharinicus OX=1532552 G N=tgt PE=3 SV=1
MVAIRYEHIKTCRQSGARLGKVHTPHGTFETPIFMPVGTLATVKTMSPEELKEIGSQIILSNTYHLWLRPGHEIVKEAGGLHKFMNWDRPILTDSGGFQVFSLSALRRIEEEGVHFRNHLNGDKLFLSPEGAMEIQNALGSDIMMAFDECPPYPETHEYMLKSVQRTSRWAERCLEGHKRPEDQGLFGIVQGGEYEDLRKMSAEDLVSMDFPGYAVGGLSVGEPKDVMNRVLEFTTPHLPTNKPRYLMGVGSPDALIDGTIRGIDMFDCVLPTRIGRNGTCMTSTGRLVVRNAKYARDFKPLDENCDCHVCKNYSRAYIRHLVKCDETFGFRLTSYHNLYFLLKLMEQVRDAIRQDRLLDFREEFFEMYGLNKPNAKNF

SEQ ID NO: 51611 - protein, 380 aa, Anaerobacillus macyae
  misc_feature (1)..(380): tr|A0A0J6CWJ3|A0A0J6CWJ3_9BACI Queuine tRNA-ribosyltran sferase OS=Anaerobacillus macyae OX=157733 GN=tgt PE=3 SV=1
MTEPIRYELIKTCKQSGARLGKLHTPHGTFETPMFMPVGTLATVKTMSPEELKEMGAGVILSNTYHLWLRPGHDIVKEAGGLHKFMNWDQPILTDSGGFQVFSLSDLRQIEEKGVHFRNHLSGEKLFLSPEGAMDIQNALGSDIMMAFDECPPYPAEYDYMKSSVERTSRWAERCLTAHARKDVQGLFGIVQGGEYEELRKQSAQDLVSLDFPGYAIGGLSVGEPKDVMNRVLDFTTPHLPSDKPRYLMGVGSPDSLIDGAIRGIDMFDCVLPTRIARNGTLMTSNGRLVVRNAKYARDFGPLDENCDCKVCRNYSRAYIRHLVKANETFGFRLTTYHNLYFLLNLMKQVRQAIMDDRLLDFKEEFFEQYGFNKPNAKNF

SEQ ID NO: 51612 - protein, 370 aa, Anaerobacterium chartisolvens
  misc_feature (1)..(370): tr|A0A369AP49|A0A369AP49_9FIRM Queuine tRNA-ribosyltran sferase OS=Anaerobacterium chartisolvens OX=1297424 GN= DFR58_12718 PE=3 SV=1
MESLKAAHGTIELPAFFPDGTFGVVRSIDSVDLESTGTPGVVMNCYHLMQKPGTSTIKSLGGLHGFTNWSKPILTDSGGFQVFSLIKENPKYGEIRNNGIIFRPSMEEQKVILTPEKCIQAQLGFGSDIMMCLDYCIHPDSPYETNKLSVDMTVRWAAACKKEYDLILKQKAGNLPKRPLLFGIIQGGNDKALRKECSEALIDIGFDGFGFGGWPMDGNGNLLEDILAYTASLVPDSLPKYAMGVGKPDEIVQCVKMGYNLFDCVIPTREARHHRLMAFRGDELEDIDLNQKGFYKYIYIMDEKYIRDEKPISDICDCYSCKNYSRAFLRHLFKTGDSLAYRLASIHNLRFYSSLMELIRMKNKINWQGK

SEQ ID NO: 51613 - protein, 372 aa, Anaerobacterium chartisolvens
  misc_feature (1)..(372): tr|A0A369AWQ3|A0A369AWQ3_9FIRM Queuine tRNA-ribosyltran sferase OS=Anaerobacterium chartisolvens OX=1297424 GN= tgt PE=3 SV=1
MAAVKYELIKTCGQTGARLGRVHTPHGSFDTPAFMPVGTQATVKGMSPAELKDVEAQIILSNTYHLYMRPGSDIVREAGGLHGFMGWDRPILTDSGGFQVFSLGGMRSIKEEGVTFKSHIDGSSHFISPERAIEIQNDLGADIIMAFDECIPYPCDYNYAKNSLERTSRWAKRCRDVHSDTERQSLFGIVQGGTFKDLRVQSANELLELDFPGYAIGGLSVGEPAAEMYDMLDVTVPLLPGDKPRYLMGVGSPDYLIEGSIRGIDMFDCVLPTRIGRNGTVMTGAGRIIIRDAKYARDYSPMDPECDCYACKNFTRSYIRHLIKAGEVLGIRLTTWHNLRFLLNLMKNVREAISEDRLGDFRNKFFSAFGYK

SEQ ID NO: 51614 - protein, 374 aa, Anaerobiospirillum thomasii
  misc_feature (1)..(374): tr|A0A2X0V4H1|A0A2X0V4H1_9GAMM Queuine tRNA-ribosyltran sferase OS=Anaerobiospirillum thomasii OX=179995 GN=tgt PE=3 SV=1
MEFKIHATDGKARQGELIFRRGVVRTPAFMPVGTLGTVKGLRPDQVSELGADILLGNTFHLWLRPGTEVIKAHGDLHDFMRWDKPILTDSGGFQVFSLSGLRKVTEEGVKFSHPINGSKLFLSPEVSMQVQYDLGSDIVMQFDECIGLPAPYERMEQAMELSLRWGRRCRDEFDRLGNKNSLFGIIQGGSNEQLRERSLKGLTDIGFDGYAIGGLAVGEPKDVMYRSLAHIGPIMPYDKPRYLMGVGRPEDILQGVLNGVDMFDCVMPSRNARNGHLFTSEGVVKIRNAKYAKDTSPLDPNCDCYTCRNFSRAYLHHLDKCNEMLGAHLNTIHNIRYYEKFMADIREAIAKGMLEKFASNFYNNVLKSEFKLDF

SEQ ID NO: 51615 - protein, 374 aa, Anaerobium acetethylicum
  misc_feature (1)..(374): tr|A0A1D3TP67|A0A1D3TP67_9FIRM Queuine tRNA-ribosyltran sferase OS=Anaerobium acetethylicum OX=1619234 GN=tgt P E=3 SV=1
MYNLLTQDGKAKRGELHTVHGVIQTPVFMNVGTIAAIKGAVATTDLQEIKTQVQLSNTYHLHVRPGDKIVKKLGGLHKFMNWDKPILTDSGGFQVFSLSGLRKIKEEGVYFRSHIDGKKIFMGPEESMQIQSNLASTIAMAFDECPPHPATREYMQASVDRTTRWLERCKKEMDRLNALPDTINKNQMLFGINQGGTYEDIRIEHAKRISEMDLDGYALGGLAVGESHEEMYRILDETVPYLPVDKPTYLMGVGTPANILEAVDRGVDFFDCVYPSRNGRHGHVYTDHGKMNMFNAKYELDSRPIDENCQCPTCRSYSRAYIRHLLKAKEMLGMRLCVLHNLYFYNNMMEEIRNAIEEGRYQEYKKAKLEGFQL

SEQ ID NO: 51616 - protein, 374 aa, Anaerobranca californiensis
  misc_feature (1)..(374): tr|A0A1M6LPA6|A0A1M6LPA6_9FIRM Queuine tRNA-ribosyltran sferase OS=Anaerobranca californiensis DSM 14826 OX=112 0989 GN=tgt PE=3 SV=1
MAVKYTLLKECPHTGARAGILHTPHGDIETPIFMPVGTLATVKTMEPKDLKEIGAQIILSNTYHLYLRPGHQLVKKAGGLHKFMNWDRPILTDSGGFQVFSLGDLRKITEEGVEFRSHLDGSKHFFTPEKVMEIQNALGSDIIMAFDECIPYPATYEYAKNSLERTTRWLKRCIAAHENPHSQALFGIIQGGMYLDLRTQSAEEILALDLPGYAVGGLSVGEPKEEMYRVLEHTVPMMPKDKPRYLMGVGSDDALLEGVYRGIDMFDCVLPTRIARNGTAMTSHGRVVVRNAAYSEDFTPLDQNCNCYVCQNFTRAYIRHLVKCNEILGLKLISYHNLYYLLDFMRKIRQSILDGNFPQYYKEKIKLINEGREK

SEQ ID NO: 51617 - protein, 379 aa, Anaerobranca gottschalkii
  misc_feature (1)..(379): tr|A0A1I0BJN1|A0A1I0BJN1_9FIRM Queuine tRNA-ribosyltran sferase OS=Anaerobranca gottschalkii DSM 13577 OX=11209 90 GN=tgt PE=3 SV=1
MAVKYTLLKQCPDTGARAGILHTPHGDIETPIFMPVGTLATVKTMEPKDLKEIGAQIILSNTYHLYLRPGHQLVEKAGGLHKFMNWDRPILTDSGGFQVFSLGDLRKISEEGVEFRSHLDGSKHFFTPEKVMEIQNALGSDIIMAFDECIPYPATYEYAKNSLERTTRWLKRCIAAHKNPHSQALFGIIQGGMYLDLRTQSAEEILALDLPGYAVGGLSVGEPKEEMYKVLEHTVPMMPKDKPRYLMGVGSDDALLEGVYRGIDMFDCVLPTRIARNGTAMTSHGRVVVRNAAYSEDFTPLDHNCDCYVCQNFTRAYIRHLVKCNEILGLKLISYHNLYYLLDFMRKIRQSILDGTFPQYYKEKIKLINEGREKQCKDY

SEQ ID NO: 51618 - protein, 380 aa, Anaerobutyricum hallii
  misc_feature (1)..(380): tr|C0EW87|C0EW87_9FIRM Queuine tRNA-ribosyltransferase OS=Anaerobutyricum hallii DSM 3353 OX=411469 GN=tgt PE= 3 SV=1
MYKLLTKDGMAKRGEFETVHGTIQTPVFMNVGTVGAIKGAVSTDDLRTIGTQVELSNTYHLHVRTGDKLIKQFGGLHKFMGWDKPILTDSGGFQVFSLSGLRKIKEEGVYFQSHIDGHHIFMGPEESMQIQSNLGSTIAMAFDECPSSRADRTYIQNSVDRTTRWLERCKKKMQELNSLPDTVNPHQMLFGINQGGVFADIRIEHAKRISELDLDGYAVGGLAVGETHDEMYYILDEVVPYLPENKPTYLMGVGTPANIIEAVDRGIDFFDCVYPSRNGRHGHVYTHHGKLNLFNKKFELDPRPIEEGCQCPACRTYSRAYIRHLLKAKEMLGMRLCVLHNLYFYNHLMEEIRGAIDEHRYKEFKKTTLEGFLTPEEEYR

SEQ ID NO: 51619 - protein, 380 aa, Anaerobutyricum hallii
  misc_feature (1)..(380): tr|A0A173U3Y8|A0A173U3Y8_9FIRM Queuine tRNA-ribosyltran sferase OS=Anaerobutyricum hallii OX=39488 GN=tgt PE=3 SV=1
MYKLLTKDGMAKRGEFETVHGTIQTPVFMNVGTVGAIKGAVSTDDLRTIGTQVELSNTYHLHVRTGDKLIKQFGGLHKFMGWDKPILTDSGGFQVFSLSGLRKIKEEGVYFQSHIDGHHIFMGPEESMQIQSNLGSTIAMAFDECPSSRADRTYIQNSVDRTTRWLERCKKKMQELNSLPDTVNPHQMLFGINQGGIFADIRIEHAKRISELDLDGYAVGGLAVGETHDEMYYILDEVVPYLPENKPTYLMGVGTPANIIEAVDRGIDFFDCVYPSRNGRHGHVYTHHGKLNLFNKKFELDPRPIEEGCQCPACRTYSRAYIRHLLKAKEMLGMRLCVLHNLYFYNHLMEEIRGAIDEHRYKEFKKTTLEGFLTPEEEYR

SEQ ID NO: 51620 - protein, 374 aa, Anaerococcus hydrogenalis
  misc_feature (1)..(374): tr|A0A133M737|A0A133M737_9FIRM Queuine tRNA-ribosyltran sferase OS=Anaerococcus hydrogenalis OX=33029 GN=tgt PE =3 SV=1
MPIKYELIKKDKYSNARCGIIHTDHGDIPTPIFMPVGTKATVKTMSVEELKEIDAKIILGNTYHLYLRPGMDIMKKAGGLHKFMNWNGPILTDSGGFQVFSLSDTRDISEKGVVFRSHIDGSKHLFTPEKSIEIQNDIHSDIMMSFDECIPYPADYKYVEESVERTIRWAKRGLDYHKKNSHKDQSLFGIIQGGMFEDLRKRSVEETCAMDFDGYSLGGLSVGEPKEEMIRLLNYTTPLLPEDKPRYNMGVGSPDYLFESFEAGIDMADCVLPTRIARNGTAITSEGRLVVRNAKYKEDFTPLDHDCDCYTCRNYSRAYIRHLVNVNEILGARLLTYHNLYFLLKLCEDIRKSIMEDRFLEFKKEFYKKYGYES

SEQ ID NO: 51621 - protein, 374 aa, Anaerococcus hydrogenalis
  misc_feature (1)..(374): tr|B6W863|B6W863_9FIRM Queuine tRNA-ribosyltransferase OS=Anaerococcus hydrogenalis DSM 7454 OX=561177 GN=tgt PE=3 SV=1
MAIKYELIKKDKYSNARCGVIHTDHGDIPTPIFMPVGTKATVKTMSVEELKEIDAKIILGNTYHLYLRPGMDIMKKAGGLHKFMNWNGPILTDSGGFQVFSLSENRDISEKGVVFRSHIDGSKHLFTPEKSIEIQNDIHSDIMMSFDECIPYPADYKYVEDSVARTVRWAKRGLDYHKANSHKDQSLFGIIQGGMYEDLRKRSVEETCAMDFDGYSLGGLSVGEPKEEMIRLLKYTTPLLPEDKPRYNMGVGSPDYLFESFEAGIDMADCVLPTRIARNGTAITSEGRLVVRNAKYKDDFTPLDHDCDCYTCKNYSRAYIRHLVNVNEILGARLLTYHNLYFLLKLCEDIRKSIMEDRFLDFKKEFYKKYGYES

SEQ ID NO: 51622 - protein, 372 aa, Anaerococcus lactolyticus
  misc_feature (1)..(372): tr|C2BDC8|C2BDC8_9FIRM Queuine tRNA-ribosyltransferase OS=Anaerococcus lactolyticus ATCC 51172 OX=525254 GN=tg t PE=3 SV=1
MPLKYELIKKDKYTNARVGVIHTASGDIPTPIFMPVGTVGTVKTMTVDDLKEMDAKIILGNTYHLYLKPGMDIMKKAGGLHKFMNWDRPILTDSGGFQVFSLADNRKISEEGVMFRSHIDGSKHFFTPEKSIEIQNDIHSDIMMSFDECVDANASYDYVKNSMERTLRWAQRGLDYHKANSHPDQSLFGIVQGGMFKDLREISARETVAMNFDGYSIGGLSVGETKEEMIDILNFTTPLLPEDKPRYNMGVGTPDYLFESFQAGIDMADCVLPTRIARNGTAITSHGRVVIKNATYKEDFSPLDPECDCYTCKNHSRAYLRHLVNAKEILGARLLSYHNLYFLLKMCENIREAIMNDSFLDYKKEFYEKYGY

SEQ ID NO: 51623 - protein, 372 aa, Anaerococcus lactolyticus; identical to SEQ ID NO: 51622
  misc_feature (1)..(372): tr|A0A095Z3Q2|A0A095Z3Q2_9FIRM Queuine tRNA-ribosyltran sferase OS=Anaerococcus lactolyticus S7-1-13 OX=1284686 GN=tgt PE=3 SV=1

SEQ ID NO: 51624 - protein, 372 aa, Anaerococcus nagyae
  misc_feature (1)..(372): tr|A0A3E2TJZ8|A0A3E2TJZ8_9FIRM Queuine tRNA-ribosyltran sferase OS=Anaerococcus nagyae OX=1755241 GN=tgt PE=3 S V=1
MGLKFEVIKKDKNSNARVGVIHTAHGDIPTPIFMPVGTLGTVKTMSVEELDQMGAKIILGNTYHLYLKPGMNIMRQAGGLHKFMNWNKPILTDSGGFQVFSLSERRKINENGVEFRSHIDGSKHFFTPEKSIEIQNDIHSDIMMSFDECVEVPADYDYVKQSMERTIRWAKRGLDYHKEHSYKDQSLFGIVQGGMYKDLREKSAIETTAMDFDGFSIGGLSVGETKEEMIDILNFTTPLLPEDKPRYNMGVGTPDYLFESYQAGIDMADCVLPTRIARNGTAITSHGRLVVRNAAYMDDFTPLDSECDCYTCRNYSRAYIRHLVNVNEILGARLLSYHNLYFLLKMCENIRQAIMEDRFLEYKEEFYSKYGY

SEQ ID NO: 51625 - protein, 372 aa, Anaerococcus octavius
  misc_feature (1)..(372): tr|A0A2I1M9X7|A0A2I1M9X7_9FIRM Queuine tRNA-ribosyltran sferase OS=Anaerococcus octavius OX=54007 GN=tgt PE=3 S V=1
MGLTFEVIKKDKNSNARVGVIHTAHGDIPTPIFMPVGTLGTVKTMSVEELKEMDAKIILGNTYHLYLKPGMDIMKKAGGLHNFMNWDRPILTDSGGFQVFSLAERRKINENGVEFRSHIDGSKHFFTPEKAISIQNDIHSDIMMSFDECVEAPADYDYVKQSMERTIRWAKRGLDYHKEHSHPDQSLFGIVQGGMYKDLREKSACQTTAMDFDGFSIGGLSVGETKEEMIDILNFTTPLLPENKPRYNMGVGTPDYLFESYQAGIDMADCVLPTRIARNGTALTSQGRLVVRNAVYKDDFSPIDHACDCYTCRNYSRAYLRHLINANEILGARLLTYHNLYFLLKLCENIRQSIMEDRFLEYKEEFYSKYGY

SEQ ID NO: 51626 - protein, 372 aa, Anaerococcus octavius
  misc_feature (1)..(372): tr|A0A380WVE2|A0A380WVE2_9FIRM Queuine tRNA-ribosyltran sferase OS=Anaerococcus octavius OX=54007 GN=tgt PE=3 S V=1
MGLTFEVIKKDKNSNARVGVIHTAHGDIPTPIFMPVGTLGTVKTMSVEELKEMDAKIILGNTYHLYLKPGMDIMKKAGGLHNFMNWDRPILTDSGGFQVFSLAERRKINENGVEFRSHIDGSKHFFTPEKAISIQNDIHSDIMMSFDECVEAPADYGYVKQSMERTIRWAKRGLDYHKEHSHPDQSLFGIVQGGMYKDLREKSACQTTAMDFDGFSIGGLSVGETKEEMIDILNFTTPLLPENKPRYNMGVGTPDYLFESYQAGIDMADCVLPTRIARNGTALTSQGRLVVRNAVYKDDFSPIDHACDCYTCRNYSRAYLRHLINANEILGARLLTYHNLYFLLKLCENIRQSIMEDRFLEYKEEFYSKYGY

SEQ ID NO: 51627 - protein, 372 aa, Anaerococcus prevotii
  misc_feature (1)..(372): tr|C7RHH4|C7RHH4_ANAPD Queuine tRNA-ribosyltransferase OS=Anaerococcus prevotii (strain ATCC 9321 / DSM 20548 / JCM 6508 / PC1) OX=525919 GN=tgt PE=3 SV=1
MALKYELIKKDKYSNARVGVIHTAHGDIPTPIFMPVGTLGTVKTMTPEDLLGMGAKIILGNTYHLYLKPGMDIMKKAGGLHKFMNWDKPILTDSGGFQVFSLSDNRKITEEGVTFRSHIDGSKHLFTPEKSISIQNDIHSDIMMSFDECVDARADYDYVENSMKRTLRWAKRGLDYHKEHSHPDQSLFGIVQGGMFKDLRERSARETTAMDFDGFSIGGLSVGETKEEMIDILNFTTPFLPKDKPRYNMGVGTPDYLFESFEAGIDMADCVLPTRIARNGTALTSRGRLVVKNAAYKEDFTSLDHECDCYTCRNYSRAYIRHLMNVNEILGARLLSYHNLYFLLKMCENIREAIMEDRFLDYKKEFYDKYGY

SEQ ID NO: 51628 - protein, 375 aa, Anaerococcus prevotii
  misc_feature (1)..(375): tr|A0A449IAI0|A0A449IAI0_9FIRM Queuine tRNA-ribosyltran sferase OS=Anaerococcus prevotii OX=33034 GN=tgt PE=3 S V=1
MFSFELIKKDSRTKARLGKITTDHGEIQTPIFMPVGTKATVKTMKTDELKNLKAQIILGNTYHLYLRPGTEVIEKAGGLHKFMNWDRPILTDSGGFQVFSLANIRNIVEEGVEFRSHIDGSKQFLTPEKSMEIQHVLGSDIMMCFDECAPYPSSYDYIKNSMERTSRWAERCKEYHNDKEDQALFGIVQGGMYKDLRKISAQDLVSLDFPGYAVGGLSVGEPLDLMNEILDYTSDYLPENKPRYLMGVGTPDYLFEAVERGIDMADCVLPTRIARNGTLMTSKGRLVIKNARYKDDFSKPDDECDCEVCQNYSRAYLRHLFNVDEILGLRLATIHNLHFLIHLMEEIRKSIANDYFLEFKSDFYKKYGYNNSSII

SEQ ID NO: 51629 - protein, 374 aa, Anaerococcus sp.
  misc_feature (1)..(374): tr|A0A1E9DB04|A0A1E9DB04_9FIRM Queuine tRNA-ribosyltran sferase OS=Anaerococcus sp. HMSC068A02 OX=1739286 GN=tg t PE=3 SV=1
MPIKYELIKKDKYSNARCGIIHTDHGDIPTPIFMPVGTKATVKTMSVEELKEIDAKIILGNTYHLYLRPGMNIMKKAGGLHKFMNWNGPILTDSGGFQVFSLSDTRDISEKGVVFRSHIDGSKHLFTPEKSIEIQNDIHSDIMMSFDECIPYPADYKYVEESVERTIRWAKRGLDYHKKNSHKDQSLFGIIQGGMFEDLRKRSVEETCAMDFDGYSLGGLSVGEPKEEMIRLLKYTTPLLPEDKPRYNMGVGSPDYLFESFEAGIDMADCVLPTRIARNGTAITSEGRLVVRNAKYKEDFTPLDHDCDCYTCRNYSRAYLRHLVNVNEILGARLLTYHNLYFLLKLCENIRKAIMEDRFLEFKKEFYKKYGYES

SEQ ID NO: 51630 - protein, 374 aa, Anaerococcus sp.
  misc_feature (1)..(374): tr|A0A1E8RB56|A0A1E8RB56_9FIRM Queuine tRNA-ribosyltran sferase OS=Anaerococcus sp. HMSC065G05 OX=1739356 GN=tg t PE=3 SV=1
MPIKYELIKKDKYSNARCGIIHTDHGDIPTPIFMPVGTKATVKTMSVEELKEIDAKIILGNTYHLYLRPGMDIMKKAGGLHKFMNWNGPILTDSGGFQVFSLSDTRDISEKGVVFRSHIDGSKHLFTPEKSIEIQNDIHSDIMMSFDECIPYPADYKYVENSVERTVRWAKRGLDYHKKNSHKDQSLFGIIQGGMFEDLRKRSVEETCAMDFDGYSLGGLSVGEPKEEMIRLLKYTTPLLPEDKPRYNMGVGSPDYLFESFEAGIDMADCVLPTRIARNGTAITSEGRLVVRNAKYKEDFTPLDHDCDCYTCRNYSRAYLRHLVNVNEILGARLLTYHNLYFLLKLCENIRKAIMEDRFLEFKKEFYKKYGYES

SEQ ID NO: 51631 - protein, 372 aa, Anaerococcus tetradius
  misc_feature (1)..(372): tr|C2CFR0|C2CFR0_9FIRM Queuine tRNA-ribosyltransferase OS=Anaerococcus tetradius ATCC 35098 OX=525255 GN=tgt P E=3 SV=1
MALKYELIKKDKYSNARVGVIHTAHGDIPTPIFMPVGTLGTVKTMTPEDLKEMGAKIILGNTYHLYLKPGMDIMKKAGGLHKFMNWDRPILTDSGGFQVFSLSDNRKITEEGVTFRSHIDGSKHLFTPEKSISIQNDIHSDIMMSFDECVDARASYDYVEDSMKRTLRWAKRGLEYHKTHSHPDQSLFGIVQGGMFKDLREISAKETTAMDFDGYSIGGLSVGETKEEMIDILNFTTPLLPEDKPRYNMGVGTPDYLFESFQAGIDMADCVLPTRIARNGTALTSRGRLVVKNAPYKDDFTALDHDCDCYTCRNYSRAYIRHLMNVNEILGARLLSYHNLYFLLKMCENIREAIMNDQFLDYKKEFYEKYGY

SEQ ID NO: 51632 - protein, 372 aa, Anaerococcus tetradius; identical to SEQ ID NO: 51631
  misc_feature (1)..(372): tr|A0A133KDC2|A0A133KDC2_9FIRM Queuine tRNA-ribosyltran sferase OS=Anaerococcus tetradius OX=33036 GN=tgt PE=3 SV=1

SEQ ID NO: 51633 - protein, 374 aa, Anaerococcus vaginalis
  misc_feature (1)..(374): tr|C7HTY7|C7HTY7_9FIRM Queuine tRNA-ribosyltransferase OS=Anaerococcus vaginalis ATCC 51170 OX=655811 GN=tgt P E=3 SV=1
MPIKYELIKKDKYSNARCGIIHTDHGDIPTPIFMPVGTKATVKTMSVEELKEIDAKIILGNTYHLYLRPGMDIMKKAGGLHKFMNWNGPILTDSGGFQVFSLSDTRDISEKGVVFRSHIDGSKHLFTPEKSIEIQNDIHSDIMMSFDECIPYPADYKYVENSVERTIRWAKRGLDYHKKNSHKDQSLFGIIQGGMFEDLRKRSVEETCAMDFDGYSLGGLSVGEPKEEMIRLLKYTTPLLPEDKPRYNMGVGSPDYLFESFEAGIDMADCVLPTRIARNGTAITSEGRLVVRNAKYKEDFTPLDHDCDCYTCRNYSRAYLRHLVNVNEILGARLLTYHNLYFLLKLCENIRKAIMEDRFLEFKKEFYKKYGYES

SEQ ID NO: 51634 - protein, 377 aa, Anaerocolumna aminovalerica
  misc_feature (1)..(377): tr|A0A1I5C5Y9|A0A1I5C5Y9_9FIRM Queuine tRNA-ribosyltran sferase OS=Anaerocolumna aminovalerica OX=1527 GN=tgt P E=3 SV=1
MYKLICRDGNAKRGEFHTVHGTIQTPVFMNVGTVAAIKGAVSTTDLQQLKTQVELSNTYHLHVRTGDKVIKKLGGLHKFMVWDKPILTDSGGFQVFSLAGLRKIKEEGVYFNSHIDGSKIFMGPEESMQIQSNLASTIAMAFDECPPHPATREYMQNSVDRTTRWLERCKKEMKRLNSLEDTINRNQMLFGINQGGTFEDIRIEHAKRITDLDLDGYALGGLAVGESHEEMYRIIEETVPYLPLEKPTYLMGVGTPANILEAVDRGVDFFDCVYPSRNGRHGHAYTNHGKMNLMNARYELDDRPIEEGCQCPACKHYSRAYIRHLLKAKEMLGLRLLVMHNLYFYNNMMEEIRNAIEEKRYKEYKKAKLEGFAEGEA

SEQ ID NO: 51635 - protein, 377 aa, Anaerocolumna jejuensis
  misc_feature (1)..(377): tr|A0A1M6R862|A0A1M6R862_9FIRM Queuine tRNA-ribosyltran sferase OS=Anaerocolumna jejuensis DSM 15929 OX=1121322 GN=tgt PE=3 SV=1
MYKLLAKDGRAKRGEFHTVHGTIQTPVFMNVGTTAAIKGAVSTQDLQEMKTQVELSNTYHLHVRPGDEVIKKLGGLHKFMVWDKPILTDSGGFQVFSLAGLRKIKEEGVYFNSHVDGRKIFMGPEESMRIQSNLASTIAMAFDECPPHPAERSYMQDSVDRTTRWLIRCREELNRLNTLEDTINKNQMLFGINQGGTYRDIRIEHAKRISELDLNGYALGGLAVGESHAEMYYIIEETMPYLPLEKPTYLMGVGTPENILESVERGVDFFDCVYPARNGRHGHAYTNHGKMNLLNAKYELDSAPIEEGCGCPVCRHYSRAYIRHLLKAKEMLGLRLMVTHNLYFYNNMMEEIRGAIEEQRYAEYKKNKLNGFAQGEE

SEQ ID NO: 51636 - protein, 377 aa, Anaerocolumna xylanovorans
  misc_feature (1)..(377): tr|A0A1M7YDJ7|A0A1M7YDJ7_9FIRM Queuine tRNA-ribosyltran sferase OS=Anaerocolumna xylanovorans DSM 12503 OX=1121 345 GN=tgt PE=3 SV=1
MYKLLAKDGRAKRGEFHTVHGVIQTPVFMNVGTAAAIKGAVSTQDLQGIKTQVELSNTYHLHVRPGDEVIKKLGGLHKFMVWDKPILTDSGGFQVFSLAGLRKIKEEGVYFNSHVDGRKIFMGPEESMRIQSNLASTIAMAFDECPPHPAERSYMQDSVDRTTRWLIRCKEELNRLNSLPDTINKNQMLFGINQGGTYKDIRIEHAKKISEFDLNGYALGGLAVGESHAEMYYIIEETVPYLPLEKPTYLMGVGTPENILESVERGIDFFDCVYPARNGRHGHAYTNHGKMNLMNAKYELDDAPIERGCGCPVCKYYSRAYIRHLLKAKEMLGLRLLVTHNLYFYNNMMEEIRAAIEEQRYAEYKKNKLNGFAQGEE

SEQ ID NO: 51637 - protein, 377 aa, Anaerofilum sp.
  misc_feature (1)..(377): tr|A0A1Y4GZE5|A0A1Y4GZE5_9FIRM Queuine tRNA-ribosyltran sferase OS=Anaerofilum sp. An201 OX=1965588 GN=tgt PE=3 SV=1
MAYTLIKTEHSARRGEFATPHGTVQTPAFMNVATAAAIKGGLSAFDLKEIGCQVMLCNTYHLHLRPGDKLVAELGGLHKFTRWDGPILTDSGGFQVFSLAELRKITEEGVTFRSHLDGHKIFMGPEESMQIQANLGSTIAMAFDECIKNPAEHEYAKDSCARTVRWLKRCKTELDRLKNEGKAVNPQQMLFGINQGCCYDDLRTEHMKQIAELDLDGYALGGLAVGEPTEEMYRVISVVEPHMPKDKIRYLMGVGTPGNIIEAVSRGVDLFDCVMPSRNARHGHLNTWSGIINIKNLKYEKDETPIDPQCDCPVCRNFTRAYIRHLFKADEMLGMRLAVMHNLYFYNHLMQRIRDELDAGTFQAFHDRYVTLLDSRI

SEQ ID NO: 51638 - protein, 372 aa, Anaerofustis stercorihominis
  misc_feature (1)..(372): tr|A0A3E3DUA7|A0A3E3DUA7_9FIRM Queuine tRNA-ribosyltran sferase OS=Anaerofustis stercorihominis OX=214853 GN=tg t PE=3 SV=1
MSAIKYELIKEDKRSGARVGKIITPHGEIPTPIFMPVGTRATVKAMLPESLKEINSKIILGNTYHLYLRPGDDIIKKAGGLHKFMNWDRPILTDSGGFQVFSLSKTNDITEEGVTFRSHIDGSRHFISPEKSMEIQNNLGSDIMMAFDECVPYGADKKYTKDSLEMTTRWAKRCKEAHKNTENQGLFGIVQGGMFKDLRKQSAEQLIDLDFPGYALGGLSVGEPMDMMFDLLDYTTPLLPKDKPRYLMGVGSPDALLEGVKSGIDMFDCVLQTRMARNGTALTSTGKVTLKNAKYKEDFTPLDGKCDCYVCRNYTKAYLRHLVVCKEILSSMLVSYHNLYFTLKLMENMRNAIMEDRFLEFKHEFEKEYGII

SEQ ID NO: 51639 - protein, 372 aa, Anaerofustis stercorihominis
  misc_feature (1)..(372): tr|B1C5L6|B1C5L6_9FIRM Queuine tRNA-ribosyltransferase OS=Anaerofustis stercorihominis DSM 17244 OX=445971 GN= tgt PE=3 SV=1
MSAIKYELIKEDKRSGARVGKIITPHGEIPTPIFMPVGTRATVKAMLPESLKEINAKIILGNTYHLYLRPGDDIIKKAGGLHKFMNWDRPILTDSGGFQVFSLSKTNDITEEGVTFRSHIDGSRHFISPEKSMEIQNNLGSDIMMAFDECVPYGADKKYTKDSLEMTTRWAKRCKEAHKNTEHQGLFGIVQGGMFKDLRKQSAEQLIDLDFPGYALGGLSVGEPMDMMFDLLDYTTPLLPKDKPRYLMGVGSPDALLEGVKSGIDMFDCVLQTRMARNGTALTSAGKVTLKNAKYKEDFTPLDDKCDCYVCRNYTKAYLRHLVICKEILSSMLVSYHNLYFTLKLMENMRNAIMEDRFLEFKHEFEKEYGII

SEQ ID NO: 51640 - protein, 368 aa, Anaeroglobus geminatus
  misc_feature (1)..(368): tr|G9YFF3|G9YFF3_9FIRM Queuine tRNA-ribosyltransferase OS=Anaeroglobus geminatus F0357 OX=861450 GN=tgt PE=3 S V=1
MVIEYELQAECGGARAGLLRTPHGTFKTPMFMPVGTQATVKTLTPEELYDMGAQVILSNTYHLFLRPGEDLVREAGGLHRFMNWKRAVLTDSGGFQVFSLGRMRRITEEGVTFRSHIDGSEKFLSPEVSMTVQMALNADIAMTFDECIPYPSDYEYTRLSTERTSRWARRCLDSHRSDTQGLFGIVQGGMYKDLRKKSAADLVAMNFEGYGIGGLSVGESKDIMYDILDGTVPYLPREKARYLMGVGTPDCLIEGVARGIDMFDCVFPTRVARNGMAMTGTGRVNVRNAGYARDFGPLEESCGCYTCRNYTRAYIRHLFKAEELLAYRLVSIHNLYFLLNFMRRMRESVLNGTFAAFRENFWSRYRDS

SEQ ID NO: 51641 - protein, 381 aa, Anaerolinea thermolimosa
  misc_feature (1)..(381): tr|A0A3D1JG55|A0A3D1JG55_9CHLR Queuine tRNA-ribosyltran sferase OS=Anaerolinea thermolimosa OX=229919 GN=tgt PE =3 SV=1
MFAFNFDLLTTSGKARAGVFHTPHGDLPTPIFAPVGTQATVKALTPAQLEEVGAVLVLSNTYHLYLRPGAELVEAMGGLHQFMQWPHPILTDSGGFQVFSLAQMRQIDEDGVTFKSHIDGSMHRFTPEVSIQVQEKLGADIIMAFDECAPPYDRAYNEQAVARTHAWAERCLRAKTRSDQALFGIVQGGVFPDLREHSAEYLSSLGFPGYAIGGLSVGETKAEMHAMLEIVNGILPADKPRYLMGVGSPEDLIHAIARGVDIFDCVLPTRLARHAAAITFRGRLNLINAVFARDPAPIDEQCTCYTCRHFSRAYLRHLFVAREMLASTLLSIHNIHSLLELVRQARQAILEQRYADFADQFLASYQPRVTRNPSPQLRKQP

SEQ ID NO: 51642 - protein, 373 aa, Anaerolinea thermophila
  misc_feature (1)..(373): tr|A0A101FZ25|A0A101FZ25_9CHLR Queuine tRNA-ribosyltran sferase OS=Anaerolinea thermophila OX=167964 GN=tgt PE= 3 SV=1
MDNFTYHIEAQDGNARAGIFKTPHADIPTPIFMPVGTQATVKAVTPEQLQEIGASIILSNTYHLYLRPGEDLIQELGGLHRFMHWDGAILTDSGGFQVFSLGGLRKIDEDGVTFKSHIDGSTHRFTPERSIAIQEALGADIIMAFDECADPTDHDYNVRSMQRTHQWAERCLAAKTRPDQALFGIVQGGIYKDLREQSARFISSLDFPGHAIGGLSVGENKDEMLASIEVVNAILPENKPRYLMGVGTPYDLIEGIRRGVDMFDCVLPTRLARHSAAQTLSGRMNLMNAQYARDEHPIDEHCACYTCRNYSRAYLRHLIRAREMLGATLISIHNIHTLLHLTQTLRQAILAGTFEQTAAALLANIPASERNNA

SEQ ID NO: 51643 - protein, 371 aa, Anaerolineaceae bacterium
  misc_feature (1)..(371): tr|A0A1B3WQ56|A0A1B3WQ56_9CHLR Queuine tRNA-ribosyltran sferase OS=Anaerolineaceae bacterium oral taxon 439 OX= 1889813 GN=tgt PE=3 SV=1
MTKKNFEFDLIGRDGNARAGVFYTPHGPIETPVFAPVGTQATVKSLTASQLEAENISFILNNTYHLYLRPGDELIASLGGVHGFMNWKGPILTDSGGFQVFSLNELRKIDEQGVTFRSHLDGSTHRFTPEKSIAIQENLGSDIIMAFDECAPPLDYDYNVAAMNRTHRWLERCLKAKKRPDQALFGIIQGGVFADLRERSAAFVSEMNTPGIAIGGLSVGETKAQMIATLDALTPILPEARPRYLMGVGSPEDLVQGIRRGVDIFDCVLPTRLARHGAAMTRRGQMNLVNRQYRDDPRPLVEGCQCYACRNHSRAYIHHLFRCRENLSGTLLSIHNIHTLITIVRDARKAILAGTYDQFADAFLANYPLKP

SEQ ID NO: 51644 - protein, 375 aa, Anaerolineaceae bacterium
  misc_feature (1)..(375): tr|A0A351X3V8|A0A351X3V8_9CHLR Queuine tRNA-ribosyltran sferase OS=Anaerolineaceae bacterium OX=2024896 GN=tgt PE=3 SV=1
MIKNNLFQFNRIAQDKRARAGVFTTPHGDLLTPVFAPVGTQATVKAVSPDQLRAAGASLVLSNTYHLYLRPGAELVAELGGLHRFMQWDGPMLTDSGGFQVFSLADMRKIDADGVTFKSHIDGSTHRFTPEKAIQIQEDLGADIIMAFDECAPPYDREYNQRAVARTHVWAERCHTTQSRRDQALFGIVQGGIFPDLREQSAEFISALGFPGHAIGGLSVGETKAEMHAMIEVVDAILPEDKPRYLMGVGSPEDLIHGIRRGIDIFDCVLPTRLARHQAAMTLTGRINLMNAANAHDPQPIDENCTCYTCSHFTRAYLRHLIVAKEMLAATLISIHNIHTLVSLVNDAREAIIAGQFDHFADSFLATYNPQDKTS

SEQ ID NO: 51645 - protein, 373 aa, Anaerolineae bacterium
  misc_feature (1)..(373): tr|A0A3D2UQG6|A0A3D2UQG6_9CHLR Queuine tRNA-ribosyltran sferase OS=Anaerolineae bacterium OX=2052143 GN=tgt PE= 3 SV=1
MFEFKITAKNNKSRTGIFSTPHGDLITPVFAPVGTQATVKTLTPEHLKEINASLVLSNTYHLYLRPGDELVRDMGGLHNFMQWHKPMLTDSGGFQVFSLAQTRKIDEDGVTFKSHIDGSTHRFTPEKSIAIQENLGADIIMAFDECADPNDHAYIKKAMERTHRWAERSVKAKTRSDQALFGIVQGGVNPTLRAESAAFISSLGTPGIAIGGLSVGETKQEMHDTLDVVMPLLPENKPCYLMGVGTPEDLINGVARGVDIFDCVLPTRLARHHSAFAPEGRLNLMNASFSRDEHPIDETCDCYACKTFTRAYIRHLIVAKELLAGTLISIHNLRALIRLMEQIRIYIADGSFESRVPELLGQWANNAKRKISE

SEQ ID NO: 51646 - protein, 375 aa, Anaerolineae bacterium
  misc_feature (1)..(375): tr|A0A1J4RYG1|A0A1J4RYG1_9CHLR Queuine tRNA-ribosyltran sferase OS=Anaerolineae bacterium CG1_02_58_13 OX=18050 02 GN=tgt PE=3 SV=1
MFDFTITARNGRARTGTFSTPHGTLQTPVFAPVGTQATVKTLTPAQVADLGATLVLSNTYHLYLRPGDDLISELGGLHRFMKWPRPMLTDSGGFQVFSLAQTRKIDDEGVTFKSHIDGSTHYFTPERAIRIQESLGADIIMAFDECSDPNDHEYSRVAMERTHYWAERCLKAKRRADQALFGIVQGGVNPDLRAASAKFIASLDTPGIAIGGLSVGETKDEMHAMLDVVTPLLPESKPRYLMGVGTPEDLINGVARGIDIFDCVLPTRLARHNSAFSPEGRLNLMNATFARDASPIDETCDCYTCKTFTRAYIRHLIVAKELLAGTLLSIHNLRALIRLMESIRGYIADGSFETRVPELLRQWQGNAERNTPVEP

SEQ ID NO: 51647 - protein, 389 aa, Anaerolineales bacterium
  misc_feature (1)..(389): tr|A0A524AN27|A0A524AN27_9CHLR Queuine tRNA-ribosyltran sferase OS=Anaerolineales bacterium OX=2073117 GN=tgt P E=3 SV=1
MPFGFATEKKDERSQARAGLIQTPHGEIPTPAFAPVGTQATVKSVSPQELRELKAPIIMVNAYHLYLRPGPDTIARAGGLHSFMAWDGPIMTDSGGFQVFSLEHLRYIGDDGVTFRSHIDGSEHTFTPEKVIEIQEKLGADIIMCFDECPDPSDYEYNVQAMKRTHHWAERCRRAQKRDDQALFGIVQGGAFSDLRQESARFLASLDFLGYAIGGLSVGEPKETMHEMLEVTISLLPEDKPRHLLGVGSPEDLFECVARGIDTFDCVLPTRIARNGAFLTRQGRLNIRNARFVEDLAPVEEGCQCYTCRTFSRAYLRHLIKAEEILGLHLATIHNLHFLLNLTRQIRQSILDGTFADFKEGFLANYKIIPHEVRQRNKELRLKKLREKA

SEQ ID NO: 51648 - protein, 394 aa, Anaerolineales bacterium
  misc_feature (1)..(394): tr|A0A363U9C5|A0A363U9C5_9CHLR Queuine tRNA-ribosyltran sferase OS=Anaerolineales bacterium OX=2073117 GN=tgt P E=3 SV=1
MSLRFSLIIDPMFEFQIASNTGGKNAGSSNNRARTGVFSTPHGDLLTPVFAPVGTQATVKTLTPEHLKNINATLVLSNTYHLYLRPGDELVRDMGGLHKFMQWHRPMLTDSGGFQVFSLAQTRKIDDDGVTFKSHIDGSTHRFTPEKSIAIQENLGADIIMAFDECSDPNDHAYSKLAMERTHRWAERSLKAQTRRDQALFGIVQGGVQADLRAASAKFIASLDTPGIAIGGLSVGETKKEMHDTLDVVVPLLPENKPRYLMGVGTPEDLINGVARGIDIFDCVLPTRLARHHSAFAPEGRLNLMNATFARDERPIDETCDCYACKTFTRAYIRHLIVAKELLAGTLISIHNLRALIRLMERIRVYISDGSFGSRVPELLKQWENNAKRKQTAL

SEQ ID NO: 51649 - protein, 376 aa, Anaeromassilibacillus sp.
  misc_feature (1)..(376): tr|A0A1Y4ETG4|A0A1Y4ETG4_9FIRM Queuine tRNA-ribosyltran sferase OS=Anaeromassilibacillus sp. An250 OX=1965604 G N=tgt PE=3 SV=1
MYRLIKQVGKARRGEFVTPHGIIQMPAFMNVATAGAIKGAVSALDLKELKCQVQLCNTYHLHLRPGDETVKKLGGLHTFTRWQGPILTDSGGFQVFSLAKLRNIKEEGVTFASHIDGHRIFMGPEESMRIQSNLGSTIAMAFDECMENPAEYNYARASCQRTVRWLYRCKEEHDRLNALPDTVNPKQMLWGINQGSTYEDLRIENMREIRKLDLDGYAIGGLAVGEPAEEMYRIIEAVEPEMPADKPRYLMGVGTPVNILEAVKRGVDIFDCVMPSRNARHGHAFTWEGCRNLMNAKYELDTLPLDPTCDCPACRNFSRAYIHHLFKSGEMLAMRLCVMHNIYFYNTLLERIRAALDNDQFDAFYEENVAKLGKRI

SEQ ID NO: 51650 - protein, 376 aa, Anaeromassilibacillus sp.
  misc_feature (1)..(376): tr|A0A1Y4NFI4|A0A1Y4NFI4_9FIRM Queuine tRNA-ribosyltran sferase OS=Anaeromassilibacillus sp. An172 OX=1965570 G N=tgt PE=3 SV=1
MYKLIKTEGSARRAEFITPHGTVQTPAFMNVATCGAIKGAVSALDLKDLKCQVQLCNTYHLHLRPGDKVIKQLGGLHKFTRWDGPILTDSGGFQVFSLAKLRNIKEEGVYFSSHIDGRKIFMGPEESMQIQSNLGSTIAMAFDECIENPAPYDYTKKSIERTVRWLERCKKEMTRLNSLEDTINKEQMLFGINQGSTYKDLRIEHMKTIADLDLDGYAIGGLAVGEPAEVMYEIIEAVEPYAPKDKIRYLMGVGTPVNILEAVYRGVDLFDCVMPSRNARHGHLFTKSGIINISNAKYELDDTPIDSQCQCPVCKNFSRAYIRHLLKSGEMLGMRLAVMHNLYFYNNLMEEIRNALDNGEFESYYRHYREILGKRI

SEQ ID NO: 51651 - protein, 372 aa, Anaeromicrobium sediminis
  misc_feature (1)..(372): tr|A0A267MMT0|A0A267MMT0_9CLOT Queuine tRNA-ribosyltran sferase OS=Anaeromicrobium sediminis OX=1478221 GN=tgt PE=3 SV=1
MAIKYELIKVCKQSGARLGKIHTPHGVIETPIFMPVGTQATVKAMTPEELKKIEAQIILSNTYHLYLRPGHKLVEKAGGLHKFMNWDKPILTDSGGFQVFSLGDLRKISEEGVEFRSHIDGSKHFLSPEKAIEIENSLGADIIMAFDECAPYPADRQYVKNSLERTTRWLKRCIDAHKYPERQALFGIIQGGMYKDLRHQSLNEILSFDLPGYAVGGLSVGEPKDLMYEVLEYTTPLMPKDKPRYLMGVGSPDCLIEGVIRGIDMFDCVHPTRIGRNGTAMTSIGRVVIKNAKYAEDFMPLDPNCDCYTCKSYSRAYIRHLFKAGEILASRLVTYHNLHFLLNLMKEIRQAIMEDRLLDYRREFFQKYGYTL

SEQ ID NO: 51652 - protein, 677 aa, Anaeromyxobacter dehalogenans
  misc_feature (1)..(677): tr|Q2IHR7|Q2IHR7_ANADE Queuine tRNA-ribosyltransferase OS=Anaeromyxobacter dehalogenans (strain 2CP-C) OX=2903 97 GN=tgt PE=3 SV=1
MPFRFHPGPRDAETRARRGTLETTHGRVETPAFMPVGTRASVTGLTPADVREAGAEIILGNTYHLLLRPGPEAFRTLGGIHRFMRWDGPVLTDSGGFQIFSLSHDRVITEAGARFRSYVDGRPQLLTPESSIAMQTAIGSDVMMVLDVCLPSTAEAPELRAAMERTHRWALRSLAARTNPEQALFAIVQGGLDPALRAASAGFLTQHPFDGFAIGGLAVGDTREERGDVVARAAELLPPDRPRYLMGVGTPPDLLEAIGHGVDMFDCILPTTLAWQGTAFTSSGRVRLTRTEHRLSELPLDAACACETCRGWSRAYLHHLFKCREPLGPRLVSVHNLRHYLDLMRGARAAIEAGRYRAYQRERLEALDRHEHDRSARPPGRRRLPEPAPAPAPAPDAPPEGARFHLVVTSLGAPAVRDAESGEVMHPVIGPAVEAERLYVAQSRLRERLAEPGPPLVLLDVGLGAGANALAALRAAAAAPPGGRALEVVSFERDLGALALATSDEGAARLGLGPADVAAARALLRDGAWGSARARWRLVVGDLQETLPRQDLRADLIFWDPFSPRANPGLWTLAAFGDAWARSGPRCALYTYSTATATRSALLLAGFHVGVGDPSGPKEQTTAAATDPALLARPLDARWLARLERSSAPFPPDAPPDALARVRAHPQFAARRAEEVA

SEQ ID NO: 51653 - protein, 387 aa, Anaeromyxobacter dehalogenans
  misc_feature (1)..(387): tr|B8JH50|B8JH50_ANAD2 Queuine tRNA-ribosyltransferase OS=Anaeromyxobacter dehalogenans (strain 2CP-1 / ATCC B AA-258) OX=455488 GN=tgt PE=3 SV=1
MIRFQLLAEDAAARRGRLETAHGTIETPVFMPVGTAATVKTLEPRDLQALGAGIVLANTYHLYLRPGHERIQRLGRLHRFMSWPGAVLTDSGGFQVFSLGEKGAGRERGGPGLVEIAEEGVTFRSHLDGSRHFLSPERAIEVQEALGADVIMAFDECPPALADRAYHELSLARTQRWLVRCREAWREIEAREGPRCALFGIAQGGLFGDLRARAIEEAAALDLPGYALGGYAVGETPAEMWDGVARDAPRLPREKPRYLMGVGTPEDLLAGIAAGVDLFDCVLPTRTARNGLLFTSRGKLVIRNARYADDERPADPECGCYACRTFTRAYLRHLFKAGEILALRANTLHNLHFYLSLMADARRAIEEGRFAAFRAERLAAWRADGDG

SEQ ID NO: 51654 - protein, 726 aa, Anaeromyxobacter sp.
  misc_feature (1)..(726): tr|A7HD07|A7HD07_ANADF Queuine tRNA-ribosyltransferase OS=Anaeromyxobacter sp. (strain Fw109-5) OX=404589 GN=t gt PE=3 SV=1
MPFAYHPGPKDGATRARRGAITTPRGRIETPAFMPVGTRASVTGMTPDDLHALGAEIILGNTYHLLLRPGPGLVREMGGLHRFMRWPGPILTDSGGFQIFSLSHDRVVSEEGARFRSYVDCSRQLLSPERSIEVQTALGSDVMMVLDVCLPSTAEPAAIREAMDRTHRWALRSLAARTDPEQALFAIVQGGLVPGLRADSARFLTQHAFDGFAIGGLAVGDTRTERFDVVGRTAELLPEDRPRYLMGVGTPPDLLEAIGHGVDMFDCVLPTTMAWQGTAFTSTGRVRLTRGEHRASQAPLDSRCGCATCRTYTRGYLHHLVKCKEPLGPRLLSIHNLHHYLELMREARAAIEAGTYGAFARAKLGELDRHEHDASRRPPGRRASSTSTATPTLAGSLEAGHPEPFDSAASGRYAQDGLRDAASAAARSRRASTATSTATLTPTPIPTSTDTPTDPPARPRFEIVTTSLGAAAVRDGEAGEVMHPVIGPDVESERLYVAQSRLRERLAPPGPRLVLLDVGLGAAANALAALRAAEALPAAGRALEIVSFERELGALALAVSAEGAARLSLDPASLAAARALLAHGRHESPRVLWRLVQGDLLETLPREQVRADVVFWDPFSPRANPALWTWAAFAAARARCGDAATLYTYSTATATRAALLLAGFFVGQGDPSGPKEQTTAAATDPALLARPLDARWLARLSRSSAPFPDDAPPDALDRIRKHPQFR

SEQ ID NO: 51655 - protein, 387 aa, Anaeromyxobacter sp.
  misc_feature (1)..(387): tr|A0A0D6QKP6|A0A0D6QKP6_9DELT Queuine tRNA-ribosyltran sferase OS=Anaeromyxobacter sp. PSR-1 OX=1300915 GN=tgt PE=3 SV=1
MIRFQLLAEDGAARRGRLETAHGTIETPVFMPVGTAATVKTLEPRDLQALGAGIVLANTYHLYLRPGHERVQRLGRLHRFMSWPGAVLTDSGGFQVFSLGEKGAGRERGGPGLVEIAEEGVTFRSHLDGSRHFLSPEKAIEVQEALGADVIMAFDECPPALADRAYHELSLARTQRWLVRCRDAWRAIEAREGPRCALFGIAQGGLHGDLRARAIEEAAALDLPGYALGGYAVGETPAEMWDGVARDAPRLPREKPRYLMGVGTPEDLLAGIAAGVDMFDCVLPTRTARNGLLFTSRGKVVIRNARYADDERPADPECGCYACRTFTRAYLRHLFKAGEILALRANTLHNLHFYLSLMADARRAVEEGRFAAFRAERLSAWRAAGDG

SEQ ID NO: 51656 - protein, 376 aa, Anaeroplasma bactoclasticum
  misc_feature (1)..(376): tr|A0A397S035|A0A397S035_9MOLU Queuine tRNA-ribosyltran sferase OS=Anaeroplasma bactoclasticum OX=2088 GN=tgt P E=3 SV=1
MEPVWYELKHVCKQTGARYGILHTPHGDFETPIFMPVGTKANVKTLIPSEIREISDGLILGNTYHLWLQPGDNLIHEFGGIRGFMNWDGALLTDSGGFQVFSLSSIRKIKEEGVYFRHHKSGAKLFLSPEKSIEIQNNLGADIIMSFDECPPFDSSEKYMRESVERTIRWAKRGKDAHKNPDTQALFGIVQGGGNKEIRKHCLEELEKIGFPGYSIGGLSVGESKEDMYEMLEYLKTIMPTNKPRYLMGVGSPDDLIVGSMNGIDMFDCVLPTRNARHGCAFTSYGKIQIKNSKYVRLHTPLDPECNCYVCKTFSMAYLNHLIREEEILGMRLVSYHNLYFLKNLMHQIRDAIKEDRLLDFKNEFFKKFGYTKEEN

SEQ ID NO: 51657 - protein, 384 aa, Anaerorhabdus furcosa
  misc_feature (1)..(384): tr|A0A1T4LJM7|A0A1T4LJM7_9BACT Queuine tRNA-ribosyltran sferase OS=Anaerorhabdus furcosa OX=118967 GN=tgt PE=3 SV=1
MYNKPGDIMEKFKFELTHICKQTGARLGVIHTPHGSVETPMFMPVGTLATVKFVSPEELKEIGAQVVLSNTYHLWLRPGEDIVERAGGVQKFMNYNGPMLTDSGGFQVFSLSDARKIKEEGVTFKSHLNGDTLFLSPELSIQIQNKIGADMIMSFDECIPYPASYDYVKNSVERTLRWAKRGLDAHQRKEDQALFGIVQGGDYEDLRKHCAEELVKMDFPGYSIGGTSVGEDKETMTRMIQYSVKYLPENKPRYLMGVGAVNDILVAIENGIDMMDCVLPTRIARHGTLMTSEGRINIKRAIYKDDFRPLDPECDCECCRKYTRAYLNHLYRCNEGLGNRLMSIHNLRFLLRLTEQARQAIKEDRFGDFKKEILEKYAFDERGF

SEQ ID NO: 51658 - protein, 371 aa, Anaerosphaera aminiphila
  misc_feature (1)..(371): tr|A0A1M5RFG9|A0A1M5RFG9_9FIRM Queuine tRNA-ribosyltran sferase OS=Anaerosphaera aminiphila DSM 21120 OX=112099 5 GN=tgt PE=3 SV=1
MFEFELIKESKECKARLGKIKTNHGEIETPIFMPVGTRATVKTMTPEELKEIEAQIILSNTYHLFLKPGTDIIKEAGGLHKFMNWDKPILTDSGGFQVFSLSDNRKITEEGVEFRSHIDGSKKFLSPEISVDIQNILGSDIMMCFDECAPYPASHEYIEHSMNRTTRWAKRCKEHHKNTDNQALFGIIQGGMYKDLRRQSAEALVEFDFPGYAVGGLSVGEPLELMNEVLDYTTDYMPKDKPRYLMGVGTPDYLFEAVERGIDMADCVLPTRIARNGTVMTSSGKLVIKNGKYKSDFTPLDSECDCYVCKNYSRAYIRHLFNVDEILGLRLATIHNLHFLITLMKNIRESIKNDNFLEFKDDFYGKYGYNS

SEQ ID NO: 51659 - protein, 371 aa, Anaerosphaera sp.
  misc_feature (1)..(371): tr|A0A437S8W7|A0A437S8W7_9FIRM Queuine tRNA-ribosyltran sferase OS=Anaerosphaera sp. GS7-6-2 OX=2487351 GN=tgt PE=3 SV=1
MFEFELLKESKECKARLGEIKTNHGEIETPIFMPVGTRATVKTMAPEELKVIGAQIILSNTYHLFLKPGTDIIKEAGGLHKFMNWDKPILTDSGGFQVFSLSDNRKITEEGVEFRSHIDGSKKFLSPEVSIDIQNILGSDIIMCFDECAPYPATYEYIEHSMNRTTRWAKRCKEHHKNTDNQALFGIIQGGMFKDLREESAKALVELDFPGYAVGGLSVGEPLDLMNEILDYTTDFMPKDKPRYLMGVGTLDYLFEAVERGIDMADCVLPTRIARNGTVMTSKGRLVIKNGKYKADFKPLDEECDCYVCKNYSRAYIRHLFNVDEILGLRLATIHNLYFLLKLMENIRTSIRNDNFLEFKDDFYSKYGYNS

SEQ ID NO: 51660 - protein, 370 aa, Anaerosphaera sp.
  misc_feature (1)..(370): tr|A0A1E9AIF9|A0A1E9AIF9_9FIRM Queuine tRNA-ribosyltran sferase OS=Anaerosphaera sp. HMSC064C01 OX=1739304 GN=t gt PE=3 SV=1
MEFELIKKDSKTKARAGLMKLKHGVVETPIFMPVGTRATVKTMTPDELKDLGAQIILSNTYHLHLRPGEDIVQKAGGLHKFMNWDKPILTDSGGFQVFSLGKMRKITEEGVEFRSHIDGSKLFISPEKSIEIQTKLGSDIMMAFDECAPYPASREYIINSMHRTTRWLERCKEAWTDRENQNLFGIIQGGLYKDLRKEHAKEICSIDLPGYAVGGLSVGEPVELMNEVLDYVTDYMPEDKPRYNMGVGTPLYLFESVERGIDMADCVLPTRISRNGTLMTSHGRLVIKNAKYKEDFTKPDPECDCYTCRHYSRAYLRHLFNVDEILAYRLATIHNLTFLLKMMKNIRESILGDYFLEYKHEFYKKYGYLK

SEQ ID NO: 51661 - protein, 370 aa, Anaerospora hongkongensis
  misc_feature (1)..(370): tr|A0A4R1PWA4|A0A4R1PWA4_9FIRM Queuine tRNA-ribosyltran sferase OS=Anaerospora hongkongensis OX=244830 GN=tgt P E=3 SV=1
MAITYELIKKCSQTGARVGRIYTPHGVFDTPMFMPVGTQATVKAVSPDELKAMGASIVLSNTYHLYLRPGADLVAEAGGLHKFMKWDGGILTDSGGFQVFSLGPLRKITEEGVSFRSHIDGSKHFLSPEKAIEVQMALGADIIMAFDECVPYPAEFEYARASTERTTRWAERCQKAHTRKDQALFGIVQGGMYKDLRTKSAQDLVKMDFPGYAVGGLSVGEPKQLMYEMLEHTVPQLPHNKPRYLMGVGTPDCLVEGVMHGIDMFDCVFPTRVARNGTAMTSKGRLVVKNAQYARDFRPIDADCDCYTCRNFSRAYVRHLLKTEEIFGLRLTTIHNLHFLIHFMKKMRQAILDDRFLAFRQEFWAHYQSH

SEQ ID NO: 51662 - protein, 378 aa, Anaerosporobacter mobilis
  misc_feature (1)..(378): tr|A0A1M7KQT5|A0A1M7KQT5_9FIRM Queuine tRNA-ribosyltran sferase OS=Anaerosporobacter mobilis DSM 15930 OX=11209 96 GN=tgt PE=3 SV=1
MYKLIKRDGMAKRGEFHTVHGTIQTPVFMNVGTCAAIKGGVSTEDLQGLKTQVELSNTYHLHVRPGDKVIKQLGGLHKFMVWDKPILTDSGGFQVFSLSGLRKIKEEGVYFNSHIDGRKIFMGPEESMQIQSNLASTIAMAFDECPPHPATREYMQNSVDRTTRWLERCKKEMARLNSLEDTINKNQMLFGINQGGTFEDIRIEHAKRISELNLDGYALGGLAVGESHSEMYRIIEETVPYLPVEKPTYLMGVGTPANILEAVDRGVDFFDCVYPTRNGRHGHAYTNLGKLNLLNARFELDTRPIEEGCNCPACQKYSRAYIRHLLKAKEMLGLRLLVMHNLYFYNTMMEEIREAIEQGRYKEYKKAKLAGFEANGES

SEQ ID NO: 51663 - protein, 374 aa, Anaerosporomusa subterranea
  misc_feature (1)..(374): tr|A0A154BU71|A0A154BU71_ANASB Queuine tRNA-ribosyltran sferase OS=Anaerosporomusa subterranea OX=1794912 GN=tg t PE=3 SV=1
MTDAIRYELVKQCAHTGARAGILHTPHGSFNTPMFMPVGTQATVKAMSPRELTEMGAGIILSNTYHLFLRPGHELVAEAGGLHKFMGWDRGILTDSGGFQVFSLGDLRKISEEGVAFRSHIDGSRQFLSPEIATQVQNALGSDILMAFDECVPYPAEYDYAKRSTERTTRWAERCLKAHSRADQGLFGIVQGGMYKDLRAQSAAELTSLDFPGYGIGGLSVGEPKHLMYEMLEHTTPRLPTNKPRYLMGVGTADCLVEGVMRGVDMFDCVFPTRVARNGTTMTKNGRLVVKNAEFARDLRPIDPDCGCYACQNFSRAYIRHLFKADEIFGLRLTTIHNLYHLLDFMRRMRQAIIEDRFLAFREEFWEYYPKEEN

SEQ ID NO: 51664 - protein, 375 aa, Anaerostipes caccae
  misc_feature (1)..(375): tr|B0MBX6|B0MBX6_ANACD Queuine tRNA-ribosyltransferase OS=Anaerostipes caccae (strain DSM 14662 / NCIMB 13811 / L1-92) OX=411490 GN=tgt PE=3 SV=1
MYQLIKKDGKAKRGRFTTVHGTIETPVFMNVGTVAAIKGAVSTDDLKEIRTQVELSNTYHLHVRPGDRLIKEFGGLHKFMNWDRPILTDSGGFQVFSLAKLRKIKEEGVSFSSHIDGRKIFMGPEESMQIQSNLGSTIAMAFDECPPHPAERKYMQDSVDRTTRWLYRCKKEMDRLNRLPDTVNPHQMLFGINQGGTYEDIRISHAKEISRLDLDGYALGGLAVGESHAEMYRILDETVPYLPEAKPTYLMGVGTPANILEAVDRGVDFFDCVYPTRNGRHGHVYTNHGKMNLFNKKYELDHRPIEEGCQCPACRSYSRAYIRHLLKAKEMLGMRLCVLHNLYFYNTMMEEIRDAIEQGQYREYKERKLSGMENK

SEQ ID NO: 51665 - protein, 375 aa, Anaerostipes hadrus
  misc_feature (1)..(375): tr|A0A174FAA3|A0A174FAA3_ANAHA Queuine tRNA-ribosyltran sferase OS=Anaerostipes hadrus OX=649756 GN=tgt PE=3 SV =1
MYELIKKDGRAKRGRLTTVHGVIETPVFMNVGTVAAIKGAVSTDDLREIGTQVELSNTYHLHVRTGDKLIKEFGGLHKFMNWDRPILTDSGGFQVFSLAKLRKIKEEGVSFSSHIDGRKIFMGPEESMQIQSNLGSTIAMAFDECPPHPATREYMQNSVDRTTRWLVRCKKEMDRLNSLEDTVNPHQMLFGINQGGTFEDIRIEHAKEISKLNLDGYALGGLAVGETHDEMYHIIEETVPYLPEDKPTYLMGVGTPVNILEAVDRGVDFFDCVYPTRNGRHGHVYTNQGKLNMFNKKYELDHRPIEEGCQCPACRSYSRAYIRHLLKAKEMLGMRLCVLHNLYFYNTMMSEIRQAIEEGNYKEYKKRKIDGMMNQ

SEQ ID NO: 51666 - protein, 375 aa, Anaerostipes hadrus
  misc_feature (1)..(375): tr|D4MVT5|D4MVT5_ANAHA Queuine tRNA-ribosyltransferase OS=Anaerostipes hadrus OX=649756 GN=tgt PE=3 SV=1
MYELIKKDGRAKRGRLTTVHGVIETPVFMNVGTVAAIKGAVSTDDLKDIGTQVELSNTYHLHVRTGDKLIKEFGGLHKFMHWDRPILTDSGGFQVFSLAKLRKIKEEGVSFASHIDGRKIFMGPEESMQIQSNLGSTIAMAFDECPPHPATREYMQNSVDRTTRWLRRCKKEMDRLNSLEDTVNPHQMLFGINQGGTFEDIRIEHAKEISKMDLDGYALGGLAVGETHEEMYNILEKTVPYLPEDKPTYLMGVGTPVNILEAVDRGVDFFDCVYPTRNGRHGHVYTNQGKLNMFNKKYELDHRPIEEGCQCPACRSYSRAYIRHLLKAKEMLGMRLCVLHNLYFYNTMMSEIRQAIEEGNYKEYKKRKIDGMMNQ

SEQ ID NO: 51667 - protein, 375 aa, Anaerostipes rhamnosivorans
  misc_feature (1)..(375): tr|A0A4P8IA30|A0A4P8IA30_9FIRM Queuine tRNA-ribosyltran sferase OS=Anaerostipes rhamnosivorans OX=1229621 GN=tg t PE=3 SV=1
MYQLIKKDGKAKRGRLTTVHGTIETPVFMNVGTVAAIKGAVSTDDLRQIKTQVELSNTYHLHVRTGDRLIKEFGGLHKFMNWDRPILTDSGGFQVFSLAKLRKIKEEGVSFSSHIDGRKIFMGPEESMQIQSNLGSTIAMAFDECPPHPATREYMQNSVDRTTRWLVRCKKEMERLNSLPDTVNPHQMLFGINQGGTFEDIRINHAKEISRLDLDGYALGGLAVGESHSEMYRILDETVPFLPEAKPTYLMGVGTPANILEGVDRGVDFFDCVYPTRNGRHGHVYTNHGKMNLFNKKYELDHRPIEEGCQCPACRSYSRAYIRHLLKAKEMLGMRLCVLHNLYFYNTMMEEIREAIEQGCYKEYKERKLFGMENK

SEQ ID NO: 51668 - protein, 375 aa, Anaerostipes sp.
  misc_feature (1)..(375): tr|R6QPY7|R6QPY7_9FIRM Queuine tRNA-ribosyltransferase OS=Anaerostipes sp. CAG:276 OX=1262699 GN=tgt PE=3 SV=1
MYQLIKKDGKAKRGRFTTVHGTIETPVFMNVGTVAAIKGAVSTDDLKEIRTQVELSNTYHLHVRPGDRLIKEFGGLHKFMNWDRPILTDSGGFQVFSLAKLRKIKEEGVSFSSHIDGRKIFMGPEESMQIQSNLGSTIAMAFDECPPHPAERKYMQDSVDRTTRWLYRCKKEMDRLNRLPDTVNPHQMLFGINQGGTYEDIRISHAKEISRLDLDGYALGGLAVGESHEEMYRILDETVPYLPEAKPTYLMGVGTPANILEAVDRGVDFFDCVYPTRNGRHGHVYTNHGKMNLFNKKYELDHRPIEEGCQCPACRSYSRAYIRHLLKAKEMLGMRLCVLHNLYFYNTMMEEIRDAIEQGQYREYKERKLSGMENK

SEQ ID NO: 51669 - protein, 378 aa, Anaerostipes sp.
  misc_feature (1)..(378): tr|A0A1Q9K5A1|A0A1Q9K5A1_9FIRM Queuine tRNA-ribosyltran sferase OS=Anaerostipes sp. 992a OX=1261637 GN=tgt PE=3 SV=1
MYELLKKDGRAKRGRLTTVHGVIETPVFMNVGTVAAIKGAVSTDDLKEIKTQVQLSNTYHLHVRTGDQLIKQFGGLHKFMVWDRPILTDSGGFQVFSLAGLRKIKEEGVYFQSHIDGHKIFMGPEESMQIQSNLGSTIAMAFDECPPHPATREYMQNSVDRTTRWLERCKKEMARLNTLEDTVNPHQLLFGINQGGTFEDIRIQHAKTISEMDLDGYALGGLAVGESHEEMYRILDETVPYLPENKPTYLMGVGTPANILESVERGVDFFDCVYPTRNGRHGHVYTNEGKLNLFNKKYELDARPIQEGCQCPACRSYSRAYIRHLLKAKEMLGLRLCVLHNLYFYNTMMEEIRLAIEEGRFQEYKKAKLEGFQINDKK

SEQ ID NO: 51670 - protein, 377 aa, Anaerotignum lactatifermentans
  misc_feature (1)..(377): tr|A0A1M6TWK9|A0A1M6TWK9_9FIRM Queuine tRNA-ribosyltran sferase OS=Anaerotignum lactatifermentans DSM 14214 OX= 1121323 GN=tgt PE=3 SV=1
MYKLLKTCGRAKRGEFHTPHGVIQTPVFMNVGTIAAIKGALSTEDLERVKCQVELSNTYHLHVRPGDEIIKKLGGLHKFMVWDKPILTDSGGFQVFSLTTLRKITEEGVYFSSHVDGRKIFMGPEESMRIQSNLGSTIAMAFDECIGIPAERTYVENSVARTTRWLERCKKEMARLNSLDDTINKQQMLFGINQGATYEDIRIEHAKRIAEMDLDGYAIGGLAVGESHAEMYHIIEEVVPYLPQNKPTYLMGVGTPENILEAVERGVDFFDCVLPSRNGRHAHVYTNAGKLNLMNAKYELDERPIDETCTCPACSRYSRAYIRHLFKAKEMLAMRLCVLHNLHFFNTMMEEIRQAMDEDRFPQYKKEKLEGFRRNGM

SEQ ID NO: 51671 - protein, 377 aa, Anaerotignum lactatifermentans
  misc_feature (1)..(377): tr|A0A1Y3U3J1|A0A1Y3U3J1_9FIRM Queuine tRNA-ribosyltran sferase OS=Anaerotignum lactatifermentans OX=160404 GN= tgt PE=3 SV=1
MYKLLKTCGRAKRGEFHTPHGVIQTPVFMNVGTIAAIKGALSTEDLERVKCQVELSNTYHLHVRPGDENIKKLGGLHKFMVWDKPILTDSGGFQVFSLTTLRKITEEGVYFSSHVDGRKIFMGPEESMRIQSNLGSTIAMAFDECIGIPAERTYVENSVARTTRWLERCKKEMARLNSLDDTINKQQMLFGINQGAIYEDIRIEHAKRIAEMDLDGYAIGGLAVGESHAEMYHIIEEVVPYLPQNKPTYLMGVGTPENILEAVERGVDFFDCVLPSRNGRHAHVYTNAGKLNLMNAKYELDERPIDETCTCPACSRYSRAYIRHLFKAKEMLAMRLCVLHNLHFFNTMMEEIRQAMDEDRFPQYKKEKLEGFRRNGM

SEQ ID NO: 51672 - protein, 381 aa, Anaerotignum neopropionicum
  misc_feature (1)..(381): tr|A0A136WFW7|A0A136WFW7_9FIRM Queuine tRNA-ribosyltran sferase OS=Anaerotignum neopropionicum OX=36847 GN=tgt PE=3 SV=1
MYKLLKTCGRAKRGEFHTPHGVIQTPVFMNVGTLAAIKGALSTEDLEQIKCQVELSNTYHLHLRPGDKIVKQLGGLHKFMVWDRPILTDSGGFQVFSLTSLRKITEEGVHFSSHIDGRKIFMGPEESMQIQSNLASTIAMAFDECIGIPAERPYVEASVERTTRWLERCKKEMTRLNSLEDTINKKQMLFGINQGAIYADIRIEHAKRISELDLDGYAVGGLAVGETHAEMYHILEEVVPFLPQKKPTYLMGVGTPENILESVERGIDFFDCVLPARNGRHAHVYTNAGKLNLLNAKFELDETPIDATCDCPVCRRYTKAYIRHLFKAKEMLAMRLCVMHNLYFFNTMMEEIRLALDENRFPEYKKAKLEGFSASQRQIIP

SEQ ID NO: 51673 - protein, 378 aa, Anaerotignum propionicum
  misc_feature (1)..(378): tr|A0A0X1U881|A0A0X1U881_ANAPI Queuine tRNA-ribosyltran sferase OS=Anaerotignum propionicum DSM 1682 OX=991789 GN=tgt PE=3 SV=1
MYKLLKTCGRAKRGEFHTPHGVIQTPVFMNVGTLAAIKGALSTEDLEQIKCQVELSNTYHLHLRPGDKVVKQLGGLHKFMVWDKPILTDSGGFQVFSLTSLRKITEEGVLFNSHIDGRKIFMGPEESMQIQSNLASTIAMAFDECIGIPAERPYVEASVARTTRWLERCKKEMSRLNNLDDTINKKQMLFGINQGAIYPDIRIEHAKRISELDLDGYAVGGLAVGETHAEMYHVLEEVVPYLPQNKPTYLMGVGTPENILESVERGIDFFDCVLPARNGRHAHVYTNKGKLNLMNAKYELDEAPIDESCDCPVCRRYTRAYIRHLFKAKEMLAMRLCVMHNLYFFNTMMEEIRQALDEDRFPAYKKAKLNGFEKSKGK

SEQ ID NO: 51674 - protein, 377 aa, Anaerotignum sp.
  misc_feature (1)..(377): tr|A0A401LF59|A0A401LF59_9FIRM Queuine tRNA-ribosyltran sferase OS=Anaerotignum sp. KCTC 15736 OX=2358141 GN=tg t PE=3 SV=1
MYKVLKKCGRAKRAEFHTPHGVIQTPVFMNVGTAGAIKGAVSTEDLEQLKCQVELSNTYHLHLRPGDKLIKEMGGLHKFMVWDKPILTDSGGFQVFSLGLLRKIKEEGVYFSSHIDGRKIFMGPEESMQIQSNLGSTIAMAFDECIGLPAERPYVEASVARTTRWLERCKKEMHRLNQLEDTVNPKQMLFGINQGATFEDIRIEHAKRISEMELDGYAIGGLAVGESHAEMYRILDEVVPYLPEEKPTYLMGVGTPENILEAVERGVDFFDCVLPARNGRHAHVYTNKGKLNLLNAKYEKDDSPIDDTCGCPACRRYSRAYIRHLFKAKEMLAMRLCVMHNLYFFNSMMEEIRQAIEEDRFHAYKAAKLDGFRENGK

SEQ ID NO: 51675 - protein, 376 aa, Anaerotruncus colihominis
  misc_feature (1)..(376): tr|B0PB29|B0PB29_9FIRM Queuine tRNA-ribosyltransferase OS=Anaerotruncus colihominis DSM 17241 OX=445972 GN=tgt PE=3 SV=1
MYKLLKQEGRARRGEFKTVHGTVQTPAFMNVGTSAAIKGGISSIDLVDLKCQVELCNTYHLHVRPGDDVIRAMGGLHQFMNWHRPILTDSGGFQVFSLAKLRKIKEEGVTFACHLDGKRIFMGPEESMRIQSNLGSTIAMAFDECIENPAPYDYTERSIARTTRWLARCKREMARLNELPDTINPNQMLFGINQGSTYADLRIRHMQEIAALDLNGYAIGGLAVGETAQEMYDTIEAVEPYMPMDKPRYLMGVGTPVNILEGVYRGVDLFDCVMPSRNARHGTLFTWEGIRIMHNEKYKTDSRPLDEHCGCPTCQNYSRGYLRHLFRVNEMLAMRLGVQHNLYFYNTLMEKIREALDTGTYEAFYRTWVPILGKRI

SEQ ID NO: 51676 - protein, 376 aa, Anaerotruncus colihominis; identical to SEQ ID NO: 51675
  misc_feature (1)..(376): tr|A0A174PYW1|A0A174PYW1_9FIRM Queuine tRNA-ribosyltran sferase OS=Anaerotruncus colihominis OX=169435 GN=tgt P E=3 SV=1

SEQ ID NO: 51677 - protein, 376 aa, Anaerotruncus sp.
  misc_feature (1)..(376): tr|A0A498CPR8|A0A498CPR8_9FIRM Queuine tRNA-ribosyltran sferase OS=Anaerotruncus sp. 22A2-44 OX=2321404 GN=tgt PE=3 SV=1
MYTLLKQDGHARRGTFETVHGAVQTPAFMNVGTSAAIKGGISSTDLVELKCQVELCNTYHLHVRPGDDVIRAMGGLHKFMNWHRPILTDSGGFQVFSLAKLRKIKEEGVTFACHLDGKRIFMGPEESMRIQSNFGSTIAMAFDECIENPAPYDYTERSIARTTRWLVRCKEEMARLNAQPDTLNPRQMLFGINQGSTYADLRVRHMQEIAALGLDGYAIGGLAVGETAQEMYDTIEAVEPHMPADRPRYLMGVGTPVNIIEGVYRGIDLFDCVMPSRNARHGTLFTWDGIRILHNEKYKTDESPLDEHCGCPTCRNFSRGYLRHLFRVNEMLGMRLGVQHNLYFYNTLMEKIREAIEQGTYDAFRRHWVPILGRRI

SEQ ID NO: 51678 - protein, 376 aa, Anaerotruncus sp.
  misc_feature (1)..(376): tr|A0A3A9J3C2|A0A3A9J3C2_9FIRM Queuine tRNA-ribosyltran sferase OS=Anaerotruncus sp. 1XD22-93 OX=2320082 GN=tgt PE=3 SV=1
MYKLLKQEGHARRGEFETVHGTVQTPAFMNVGTSAAIKGGISSIDLVDLKCQVELCNTYHLHVRPGDDVIRGLGGLHKFMNWKRPILTDSGGFQVFSLAKLRKIKEEGVTFACHLDGHRIFMGPEESMRIQSNLGSTIAMAFDECIENPAPFEYTERSIERTTRWLARCKTEMARLNSLPDTLNPHQLLFGINQGSTYHSLRIRHMQEIAALELDGYAIGGLAVGETAQEMYDTIEAVEPYMPKEKIRYLMGVGTPVNILEGVYRGVDLFDCVMPSRNARHGTLFTWEGIRILHNEKYKTDSEPLDPQCGCPVCQNHSRGYLRHLFRANEILASRLGVMHNLYFYNTLMEKIRESLDNGTYSAFYQHWVPILGRRI

SEQ ID NO: 51679 - protein, 378 aa, Anaerovibrio lipolyticus
  misc_feature (1)..(378): tr|A0A1M6EMS7|A0A1M6EMS7_9FIRM Queuine tRNA-ribosyltran sferase OS=Anaerovibrio lipolyticus DSM 3074 OX=1120997 GN=tgt PE=3 SV=1
MPAITYELIKQDPATGARAGIIHTPHGSFPTPIFMPVGTQASVKGVSPEELHDMGAGIILSNTYHLFLRPGSDLVREAGGLHKFMNWDGAILTDSGGFQVFSLGDLRKITEEGVTFRSHIDGSKKFLSPEVSMKVQMDLGSDIVMAFDECIPYPADYDYAKASTARTTRWAQRCKEVMTSPHQGLFGIVQGGMYKDLRTRSVNELVEMDFPGYAVGGLSVGEPKELMYEMLDHTVEQLPKDKPRYLMGVGTPDCLVEGVMHGIDMFDCVFPTRVARNGTAMTWNGRLVMKNAEFTSDFRPLEEGCDCYACRNFSRAYIRHLVRANEIFGLRLLSLHNLRFLQRFMHEMRQSIIEERFGEFRRNFLDNYNYGAKSHSCN

SEQ ID NO: 51680 - protein, 378 aa, Anaerovibrio lipolyticus; identical to SEQ ID NO: 51679
  misc_feature (1)..(378): tr|A0A0B2JW18|A0A0B2JW18_9FIRM Queuine tRNA-ribosyltran sferase OS=Anaerovibrio lipolyticus OX=82374 GN=tgt PE= 3 SV=1

SEQ ID NO: 51681 - protein, 378 aa, Anaerovibrio sp.
  misc_feature (1)..(378): tr|A0A3D4ALY2|A0A3D4ALY2_9FIRM Queuine tRNA-ribosyltran sferase OS=Anaerovibrio sp. OX=1872532 GN=tgt PE=3 SV=1
MPAITYELIKQDPATGARAGIIHTPHGSFPTPIFMPVGTQASVKGVSPEELHDMGAGIILSNTYHLFLRPGSALVREAGGLHKFMNWDGAILTDSGGFQVFSLGDLRKITEEGVTFRSHIDGSKKFLSPEVSMRVQMDLGSDIVMAFDECIPYPADYDYAKASTARTTRWAQRCKEVMTSPQQGLFGIVQGGMYKDLRTRSVNELVEMDFPGYAVGGLSVGEPKELMYEMLDHTVGQLPKNKPRYLMGVGTPDCLVEGVMHGIDMFDCVFPTRVARNGTAMTWNGRLVMKNAEFTSDFRPLEEDCDCYACRNFSRAYIRHLVRANEIFGLRLLSLHNLRFLQRFMHEMRQSIIEERFGEFRRNFLDNYNYGAKSHSCN

SEQ ID NO: 51682 - protein, 376 aa, Anaerovibrio sp.
  misc_feature (1)..(376): tr|A0A1X1Q5W0|A0A1X1Q5W0_9FIRM Queuine tRNA-ribosyltran sferase OS=Anaerovibrio sp. JC8 OX=1240085 GN=tgt PE=3 SV=1
MPAITYELIKQDPATGARAGIIHTPHGSFPTPIFMPVGTQASVKGVSPEELHDMGAGIILSNTYHLFLRPGSDLVREAGGLHKFMNWDGAILTDSGGFQVFSLGDLRKITEEGVTFRSHIDGSKKFLSPEVSMKVQMDLGSDIVMAFDECIPYPADYDYAKASTARTTRWAQRCKEVMTSEHQGLFGIVQGGMYKDLRTRSVNELVEMDFPGYAVGGLSVGEPKELMYEMLDHTVEQLPKDKPRYLMGVGTPDCLVEGVMHGIDMFDCVFPTRVARNGTAMTWHGRLVMKNAEFTSDFRPLEEGCDCYACRNFSRAYIRHLVRANEIFGLRLLSLHNLRFLQRFMHEMRQSIIEDRFGEFRRNFLDSYNYSAKRAD

SEQ ID NO: 51683 - protein, 372 aa, Anaerovirgula multivorans
  misc_feature (1)..(372): tr|A0A239DQM6|A0A239DQM6_9FIRM Queuine tRNA-ribosyltran sferase OS=Anaerovirgula multivorans OX=312168 GN=tgt P E=3 SV=1
MALTYELIKECKQSGARLGKIHTSRGIIETPIFMPVGTQATVKTMAPEELKEIKSQIILSNTYHLYLRPGHHLIEKAGGLHKFMNWDKPILTDSGGFQVFSLGDLRKISEEGVEFRSHLDGSKHFISPEKAVEIQNALGSDIMMVFDECAPYPADTSYVKSSLERTTRWAKRCKEAHKNTETQNLFGIIQGGMYADLRKQSAEELIELDFPGYALGGLSVGEPKPLMYEVLETTTPLMPKNKPRYLMGVGSPDALIEGVIRGIDMFDCVLPTRIARNGTAMTSHGKVVIKNAKYTENFEGLDLECSCYTCKNYSKAYLRHLFKANEVLGLRLLSYHNLYFLLKLMEEIREAIKKDRLLDYRKNFFEKYGYEV

SEQ ID NO: 51684 - protein, 420 aa, Anaplasma centrale
  misc_feature (1)..(420): tr|D1AU65|D1AU65_ANACI Queuine tRNA-ribosyltransferase OS=Anaplasma centrale (strain Israel) OX=574556 GN=tgt PE=3 SV=1
MYARLYQNFNFHVLLQHNRARVGVISTPHGVLYTPAFIFCATKAAIKSLDMKTVKECGTQIVLSNTYHLMLQPGAETVAALGGLHNMLGWKGPMLTDSGGYQIFSLGYGSVSEELKGKRKRANSSLIKIDESGAIFRSYINGQLHHLTPEKSMHIQRMLGADLVVVLDECTPFHTSYEYTAQSMHMSNRWALRSLEEFQKTADGTQALYCVIQGGVHSDLRRVSCEFANSSPFFGNAIGGSLGSHKQQMYDTVSLTTSLLDKSRPVHLLGIGNVCDILHGVMNGVDTFDCVYPTRIARHGAALVRPENRISPDREYVNLYNSEFARSLAPIEQDCGCYTCNHHSRGYLHHLLKAKELLAYTLITIHNVYFMNSLMQRVRRAIAGETLEQEYEYWLGGRGAAPDSASPQPPPSGKTPTAPR

SEQ ID NO: 51685 - protein, 420 aa, Anaplasma marginale
  misc_feature (1)..(420): tr|B9KJ31|B9KJ31_ANAMF Queuine tRNA-ribosyltransferase OS=Anaplasma marginale (strain Florida) OX=320483 GN=tg t PE=3 SV=1
MYARLYQNFNFHVLLQHNRARVGVISTPHGVLYTPAFIFCATKAAIKSLDMKTVKECGTQIVLSNTYHLMLQPGAETVAALGGLHNMLGWKGPMLTDSGGYQIFSLGYGSVSEELKGKRRRANSSLIKIDESGAIFRSYINGQLHHLTPEKSMHIQRMLGADLVVVLDECTPFHTSYEYTAQSMHMSNRWALRSLEEFQKTADGTQALYCVIQGGVHSDLRRVSCEFANSSPFFGNAIGGSLGSHKQQMYDTVSLTTSLLDKSRPVHLLGIGNVCDILHGVMNGVDTFDCVYPTRIARHGAALVRPENRISPDREYVNLYNSKFARSLAPIEQDCGCYTCNHHSRGYLHHLLKAKELLAYTLITIHNVYFMNSLMQRVRRAIAGETLEQEYEYWLGKRGAAPDSASPQPPPSGKTPTAPR

SEQ ID NO: 51686 - protein, 420 aa, Anaplasma marginale
  misc_feature (1)..(420): tr|A0A5D8YBI3|A0A5D8YBI3_ANAMA Queuine tRNA-ribosyltran sferase OS=Anaplasma marginale OX=770 GN=tgt PE=3 SV=1
MYARLYQNFNFHVLLQHNRARVGVISTPHGVLYTPAFIFCATKAAIKSLDMKTVKECGTQIVLSNTYHLMLQPGAETVAALGGLHNMLGWKGPMLTDSGGYQIFSLGYGSVSEELKGKRRRANSSLIKIDESGAIFRSYINGQLHHLTPEKSMHIQRMLGADLVVVLDECTPFHTSYEYTAQSMHMSNRWALRSLEEFQKTADGTQALYCVIQGGVHSDLRHVSCEFANSSPFFGNAIGGSLGSHKQQMYDTVSLTTSLLDKSRPVHLLGIGNVCDILHGVMNGVDTFDCVYPTRIARHGAALVRPENRISPDREYVNLYNSKFARSLAPIEQDCGCYTCNHHSRGYLHHLLKAKELLAYTLITIHNVYFMNSLMQRVRRAIAGETLEQEYEYWLGGRGAAPDSASPQPPPSGKTPTAPR

SEQ ID NO: 51687 - protein, 420 aa, Anaplasma ovis
  misc_feature (1)..(420): tr|A0A2N4SUX9|A0A2N4SUX9_9RICK Queuine tRNA-ribosyltran sferase OS=Anaplasma ovis OX=142058 GN=tgt PE=3 SV=1
MYARLYQNFNFHVLLQHNRARVGVISTPHGVLYTPAFIFCATKAAIKSLDMKTVKECGTQIVLSNTYHLMLQPGAETVAALGGLHNMLGWKGPMLTDSGGYQIFSLGYGSVSEELKGKRRRANSSLIKIDESGAIFRSYINGQLHHLTPEKSMHIQRMLGADLVVVLDECTPFHTSYEYTAQSMHMSNRWALRSLEEFQKTADGTQALYCVIQGGVHSDLRRVSCEFANSSPFFGNAIGGSLGSHKQQMYDTVSLTTSLLDKSRPVHLLGIGNVCDILHGVMNGVDTFDCVYPTRIARHGAALVRPENRISPDREYVNLYNSKFARSLAPIEQDCGCYTCNHHSRGYLHHLLKAKELLAYTLITIHNVYFMNSLMQRVRRAIAGETLEQEYEYWLGGRGAAPDSASPQPPPSGKTPTAPR

SEQ ID NO: 51688 - protein, 417 aa, Anaplasma ovis
  misc_feature (1)..(417): tr|A0A2Z4VBK7|A0A2Z4VBK7_9RICK Queuine tRNA-ribosyltran sferase OS=Anaplasma ovis str. Haibei OX=1248439 GN=tgt PE=3 SV=1
MYTRLYQNFNFHVLLQHNRARVGVISTPHGTLYTPAFIFCATKAAVKSLDMKVVKECGTQIVLSNTYHLMLQPGEETVAALGGLHNMLGWTGPMLTDSGGYQIFSLGYGSVSEELKGKRRRANPSLIKIDESGAIFRSYINGQLYHLTPEKSIHIQRMLGADLVVVLDECTPFHTSYEYTAQSMHMSNRWALRSLEEFQKTSDGTQALYCVIQGGVHSDLRHVSCEFANSSPFFGNAIGGSLGSCKQQMYDTVSLTTSLLDRNRPVHLLGIGNVCDILHGVMNGVDTFDCVYPTRIARHGAALVKPENRTSPDREYINLYNSEFTRSLAPIEQDCGCYTCNHHSRGYLHHLLKAKELLAYTLITTHNVYFMNSLMQRIRRAIVQETLEQEYEYWLGGYGVPESASPQSVTQENPNCA

SEQ ID NO: 51689 - protein, 392 aa, Anaplasma phagocytophilum
  misc_feature (1)..(392): tr|A0A181ZIU7|A0A181ZIU7_ANAPH Queuine tRNA-ribosyltran sferase OS=Anaplasma phagocytophilum OX=948 GN=tgt PE=3 SV=1
MYRNFNFKVLLESGKARVGTITTPHGSIFTPAFIFCATKASIKSLTIQDVQECGTQIILSNTYHLMLQPGEQVVESLGGLHKMMGWNGPMLTDSGGYQIFSLGYGSVSEELKGKLRKSSGTSLIKIDESGARFRSYINGSTYHLTPERSVEIQRKLGADLVVVLDECTPFHTSYEYTNQSMLMSTRWAQRSLEAFKSTDDGSQALYCVIQGGVYPDLRKTSCEFANNSPFFGHAIGGSLGACKQQMYDIVSLTYDMLDKTRPVHLLGIGNVIDIFHGVLQGIDTFDCVYPTRIARHGAALVKPENRDMHGREYINLNSAKFRTSTDAIEQDCICYTCRTHSKGYLHHLLKAKEILAYSLITIHNIQFMNDLMQLIRKSISNNSLQQELARWS

SEQ ID NO: 51690 - protein, 392 aa, Anaplasma phagocytophilum
  misc_feature (1)..(392): tr|A0A181ZRD2|A0A181ZRD2_ANAPH Queuine tRNA-ribosyltran sferase OS=Anaplasma phagocytophilum OX=948 GN=tgt PE=3 SV=1
MYRNFNFKVLLESGKARVGTITTPHGSIFTPAFIFCATKASIKSLTIQDVQECGTQIILSNTYHLMLQPGEQVVESLGGLHKMMGWNGPMLTDSGGYQIFSLGYGSVSEELKGKLRKSSGTSLIKIDESGARFRSYINGSTYHLTPERSVEIQRKLGADLVVVLDECTPFHTSYEYTNQSMLMSTRWAQRSLEAFKSTDDGSQALYCVIQGGVYPDLRKTSCEFANNSPFFGHAIGGSLGACKQQMYDIVSLTYDMLDKTRPVHLLGIGNVIDIFHGVLEGIDTFDCVYPTRIARHGAALVKPENRDMHGREYINLNSAKFRTSTDAIEQDCICYTCRTHSKGYLHHLLKAKELLAYPLITIHNIQFMNDLMQLIRKSISNNSLQQELARWS

SEQ ID NO: 51691 - protein, 416 aa, Ancrocorticia populi
  misc_feature (1)..(416): tr|A0A2V1K668|A0A2V1K668_9ACTO Queuine tRNA-ribosyltran sferase OS=Ancrocorticia populi OX=2175228 GN=tgt PE=3 SV=1
MENTGFTLQNRLENGLGRTGIIHTPHGDIETPAFIPVGTKATVKAVLPESVASIGAQAVLANAYHLYLQPGSDIVDGAGGLSKFMNWPGPTYTDSGGFQVLSLGSGFKKVLSEEFSGKGKSDLDVAPSKERLANVDDDGVSFRSHLDGSMHRFTPEVSMKIQHELGADIMFAFDELTTLLNSRGYQEEALERTRLWAERCLVAHRELTEARSNKPYQQLFGVIQGAQYEDLRRKAARDLGAMEVNGQRFDGFGIGGALEKENLGTIVGWVSEELPEDRARHLLGISEPDDFFAAVEAGADTFDCVNPSRVARNAAIYSPDGRFNVTRQQFKRDFGPLVPGCACYTCTHYSRAYLHHAFKAKEMISSTLATIHNEYYTVQLVASIRRAMQDGTYAEFKAETLGRFYAGEWGRVDSAN

SEQ ID NO: 51692 - protein, 384 aa, Ancylobacter aquaticus
  misc_feature (1)..(384): tr|A0A4R1I2U4|A0A4R1I2U4_ANCAQ Queuine tRNA-ribosyltran sferase OS=Ancylobacter aquaticus OX=100 GN=tgt PE=3 SV =1
MNNPDRREQTDFHYRLHATDGAARHGEVVTPRGVIRTPAFMPVGTAGTVKGMYPEQVRDLGADILLGNTYHLMLRPGAERVARLGGLHELMRWPHPILTDSGGFQVMSLAGLRKMSEKGVTFRSHIDGAYHELTPERSIEIQGLLGADIQMQLDECVRLPASKDEISRALQLSLRWAERSKKAFEAQPKERALFGIVQGGDDAELRIESARGLIDIDFPGYSIGGLAVGEPQAVMLAMLEVVTPILPVDKPRYLMGVGTPDDMIESVARGVDMFDCVMPTRAGRHAQAFTRFGKINLKNARHADDPRPLDAESDCPAARDYSRAYLHHLVRCEEMLGSMLLTWVNLAYYQSLMAGIRAAIAQGRFEAFKAEVKEGWARGDIPAR

SEQ ID NO: 51693 - protein, 384 aa, Ancylobacter aquaticus
  misc_feature (1)..(384): tr|A0A431QTK8|A0A431QTK8_ANCAQ Queuine tRNA-ribosyltran sferase OS=Ancylobacter aquaticus OX=100 GN=tgt PE=3 SV =1
MNTPDFREQTDFHYRLHATDGAARLGEVVTPRGVIRTPAFMPVGTAGTVKGMYPEQVRELGADILLGNTYHLMLRPGAERVARLGGLHALMRWPHPILTDSGGFQVMSLASLRKMSEKGVTFRSHIDGAYHELTPERSIEIQGLLGADIQMQLDECVRLPASQDEIARALRLSLRWAERSKRAFEAQPKGRALFGIVQGGDDAELRTESARGLIDIDFPGYSIGGLAVGEPQAVMLAMLEVVTPILPAGKPRYLMGVGTPDDLIESVARGVDMFDCVMPTRAGRHAQAFTRFGKINLKNARHAEDPRPLDEASDCPAARDYSRAYLHHLVRCDEMLGSMLLTWVNLAYYQSLMAGIRAAIAEGRFEAFKAEVKEGWARGDIAAR

SEQ ID NO: 51694 - protein, 384 aa, Ancylobacter rudongensis
  misc_feature (1)..(384): tr|A0A1G4QP57|A0A1G4QP57_9RHIZ Queuine tRNA-ribosyltran sferase OS=Ancylobacter rudongensis OX=177413 GN=tgt PE =3 SV=1
MNTPDFREQTDFHYSLHATDGAARLGEVVTPRGVIRTPAFMPVGTAGTVKGMYPEQVRELGADILLGNTYHLMLRPGAERVARLGGLHTLMRWPHPILTDSGGFQVMSLASLRKMSEKGVTFRSHIDGAYHELTPERSIEIQGLLGADIQMQLDECVRLPASQDEIARALRLSLRWAERSKKAFEAQPKGRALFGIVQGGDDAELRTESARGLIDIDFPGYSIGGLAVGEPQEVMLAMLEVVTPILPAGKPRYLMGVGTPDDLIESVARGVDMFDCVMPTRAGRHAQAFTRFGKINLKNARHAEDPRPLDETSDCPAARDYSRAYLHHLVRCDEMLGSMLLTWVNLAYYQSLMAGIRAAIAEGRFEAFKAEVKEGWARGDIAAR

SEQ ID NO: 51695 - protein, 376 aa, Ancylomarina sp.
  misc_feature (1)..(376): tr|A0A4Q1JIL3|A0A4Q1JIL3_9BACT Queuine tRNA-ribosyltran sferase OS=Ancylomarina sp. SHSM-M15 OX=2501299 GN=tgt PE=3 SV=1
MDFKLHNTDDRSGARTGELTTDHGTIQTPIFMPVGTLGSVKGVHQHELKEDVDAEIILGNTYHLYLRPGLDVLEQAGGLHKFNGWDRPILTDSGGFQVFSLAENRKLTEEGAIFRSHIDGSKHMFTPENVMDTQRTIGADIIMAFDECPPGTSSYEYAKTSLGLTQRWLERCVDRFDSTEGKYGYSQTLFPIVQGCVYKDLRIKAAEHAASLNREGYAIGGLAVGEPTQDMYDMIEVVNQVLPVDKPRYLMGVGTPINILEAISRGVDMFDCVMPTRNGRNGMIFTSEGTLNMRNQKWANDFSLLDPNGTSYVDRFYSKAYVRHLIRSNELLGGQICSIHNLAFYLWLVREAREQINNGTFSDWKEVMVEKLGRRL

SEQ ID NO: 51696 - protein, 376 aa, Ancylomarina sp.
  misc_feature (1)..(376): tr|A0A425Y5M3|A0A425Y5M3_9BACT Queuine tRNA-ribosyltran sferase OS=Ancylomarina sp. M1P OX=2283627 GN=tgt PE=3 SV=1
MDFKLHNTDDRSGARTGEITTDHGKIKTPIFMPVGTLGSVKGIHQHELKEDINAEIILGNTYHLYLRPGLDVLEQAGGLHKFNGWDRPILTDSGGFQVFSLAENRKLTEEGAMFRSHIDGSKHMFTPENVMDTQRTIGADIIMAFDECPPGTSSYEYAKNSLGLTQRWLERCVDRFDSTKGKYGYSQALFPIVQGCVYKDLRIKAAEHAASLNREGYAIGGLAVGEPTQDMYEMIEVVNQVLPENKPRYLMGVGTPINILEAISRGVDMFDCVMPTRNGRNGMIFTSEGTLNMRNQKWANDFTPLDPNGTSYVDSFYSKAYVRHLIRSNELLGGQICSIHNLAFYLWLVREAREKIDEGTFYEWKNVMVEKLGRRL

SEQ ID NO: 51697 - protein, 376 aa, Ancylomarina subtilis
  misc_feature (1)..(376): tr|A0A4Q7VBW8|A0A4Q7VBW8_9BACT Queuine tRNA-ribosyltran sferase OS=Ancylomarina subtilis OX=1639035 GN=tgt PE=3 SV=1
MDFKLHNTDDRSGARTGELTTDHGTIQTPIFMPVGTLGSVKGVHQNELKEDINAEIILGNTYHLYLRPGLDILEQAGGLHKFNGWDRPILTDSGGFQVFSLAENRKLTEEGAIFRSHIDGSKHMFTPENVMDTQRTIGADIIMAFDECPPGTSSYEYAKTSLGLTQRWLERCVDRFDRTEGKYGYSQTLFPIVQGCVYKDLRIKAAEHAASLNREGYAIGGLAVGEPTQDMYDMIDVVNQVLPEDKPRYLMGVGTPINILEAISRGVDMFDCVMPTRNGRNGMIFTSEGTLNMRNQKWANDFSPLDPNGTSYVDRFYSRAYVRHLIRSNELLGGQICSIHNLAFYLWLVREAREQINKGTFSDWKKVMVEKLGRRL

SEQ ID NO: 51698 - protein, 376 aa, Anditalea andensis
  misc_feature (1)..(376): tr|A0A074KX14|A0A074KX14_9BACT Queuine tRNA-ribosyltran sferase OS=Anditalea andensis OX=1048983 GN=tgt PE=3 SV =1
MKFTIEATDPKSKARAGLVKTDHGDIETPIFMPVGTAGSVKAVHQRELTYDVKAQIILGNTYHLYLRPGLDVLEKAGGLHKFNGWSRPILTDSGGYQVFSLSGTRKIAEEGVMFKSHIDGSKHHFSPENVMDIQRTIGADIIMAFDECTPYPCEYNYAEKSMHMTHRWLKRCIERFDTTEGKYGYSQTLFPIVQGSVYKDLRKQSAEFIASCGRDGNAIGGLSVGEPAEMMYEMTELVTDILPTDKPRYLMGVGTPANILEGIALGVDMFDCVMPTRNARNGMLFTSEGIMNMRNEKWKDDFSPIDPNINSYVSTFYSKAYLRHLTVSKEILAAQIASIHNLSFYLWLVGQAREKIQTGEFATWKDMMVKKVSTRL

SEQ ID NO: 51699 - protein, 384 aa, Andreesenia angusta
  misc_feature (1)..(384): tr|A0A1S1V7M1|A0A1S1V7M1_9FIRM Queuine tRNA-ribosyltran sferase OS=Andreesenia angusta OX=39480 GN=tgt PE=3 SV= 1
MNSPIKYELIKESSETKARLGKIHTPHGEIETPIFMPVGTRATVKAMTPEELKEINAQIILSNTYHLYLKPGHDIVEEAGGLHKFMNWDRPILTDSGGFQVFSLGNMRKINEDGVEFKSHIDGSKHFITPEKSIEIQNALGSDIMMAFDECVSYPSDWHYVKDSMERTTRWAKRCKDANKNPDKQAIFGIIQGGMYKDLREQSARELLELDFPGYAVGGLSVGEPADILMQVLDYTVPLMPADKPRYFMGAGSPDYLIELAIRGIDMADCVLPTRIARNGTVMTSRGKVVIRNAKHKRDFTPLDPECSCYACKNYSKAYIRHLFNVDEILGSRLATIHNLHFLIKLMEDLRESIREDRVLEFRRDFYLKYGGFDYLGKLDNYRL

SEQ ID NO: 51700 - protein, 370 aa, Andreprevotia lacus
  misc_feature (1)..(370): tr|A0A1W1XK67|A0A1W1XK67_9NEIS Queuine tRNA-ribosyltran sferase OS=Andreprevotia lacus DSM 23236 OX=1121001 GN= tgt PE=3 SV=1
MQFQLKTTSGGARRGTLTLNHGVVETPVFMPVGTYGTVKAMTPRDLNEINAQICLGNTFHLWLRPGLDVIGKFGGLHDFMGWHKPILTDSGGFQVFSLGAMRKITEHGVTFQSPINGDKLLLTPEESMRIQTVLNSDVVMIFDECTPYPATRQQAADSMRMSYRWARRSKDEFTARENHNALFGIVQGGMYEDLRDESLAGLNDIDFHGMAIGGLSVGEPKEDFARILAHTAPRLPEHKPRYLMGVGTPEDLVYGVSQGIDMFDCVMPTRNARNGMLFTRFGDIKIKNAKYKLDQRPLDESCECYACRNFSRAYLHHLFRAGEILGSQLNTIHNLHYYQVIMREMREAIEADRFTAHVVQFHADRARGVD

SEQ ID NO: 51701 - protein, 343 aa, Aneurinibacillus aneurinilyticus
  misc_feature (1)..(343): tr|U1X4M0|U1X4M0_ANEAE Queuine tRNA-ribosyltransferase OS=Aneurinibacillus aneurinilyticus ATCC 12856 OX=64974 7 GN=tgt PE=3 SV=1
MPVGTLATVKTMTPEDLKEMNAQIILSNTYHLFLRPGHELVAEAGGLHSFMNWDRAILTDSGGFQVFSLSNLRQIDEEGVAFRSHLSGEKLFLSPEKAMEIQNALGADIMMAFDECAPYPAEPEYVKPSMERTTRWAERCLKAHKRPHDQALFGIVQGGMYRELREQSARDITSLDFPGYAIGGLSVGEPHQLMYEVLDYTVPLLPSNKPRYLMGVGSPDALIEGAIRGIDMFDCVLPTRIARNGTCMTSEGRLVIRNAKYAHDFTPLDPNCDCYTCRNYTRAYIRHLIRCDEILGVRLTTYHNLHFLLNMMEQVRQAIMEDRLRDFRDEFFARYGITETKGF

SEQ ID NO: 51702 - protein, 376 aa, Aneurinibacillus danicus
  misc_feature (1)..(376): tr|A0A511V4Q5|A0A511V4Q5_9BACL Queuine tRNA-ribosyltran sferase OS=Aneurinibacillus danicus OX=267746 GN=tgt PE =3 SV=1
MAVRYELIKTCKQTGARLGKLHTPHGTIDTPIFMPVGTLATVKTMTPEELKEMEAQIILGNTYHLLLRPGHDLVAEAGGLHSFMNWDRAILTDSGGFQVFSLSNLRQIDEEGVSFRSHLSGEKLFISPEKAIEIQNALGADIIMAFDECAPYPADPEYVKPSMERTTRWAERCLKAHKRPHDQALFGIVQGGMYRELREQSARDITSLDFPGYAIGGLSVGEPHHLMYEVLDYTVPLLPANKPRYLMGVGSPDALIEGAIRGIDMFDCVLPTRIARNGTCMTSQGRLVIRNAKYARDFSPLDPNCDCYTCRNYTRAYIRHLIHCDEILGVRLTTYHNLHFLINMMKQVRQAIMDDRLGDFRDEFFARYGITETRGF

SEQ ID NO: 51703 - protein, 343 aa, Aneurinibacillus migulanus
  misc_feature (1)..(343): tr|A0A0K2WAU9|A0A0K2WAU9_ANEMI Queuine tRNA-ribosyltran sferase OS=Aneurinibacillus migulanus OX=47500 GN=tgt P E=3 SV=1
MPVGTLATVKTMTPEDLKEMNAQIILSNTYHLFLRPGHELVAEAGGLHSFMNWDRAILTDSGGFQVFSLSNLRQIDEEGVAFRSHLSGEKLFLSPEKAMEVQNALGADIMMAFDECAPYPAEPEYVKPSMERTTRWAERCLKAHKRPHDQALFGIVQGGMYRDLREQSARDITSLDFPGYAIGGLSVGEPHQLMYEVLDYTVPLLPSNKPRYLMGVGSPDALIEGAIRGIDMFDCVLPTRIARNGTCMTSEGRLVIRNAKYAHDFTPLDPNCDCYTCRNYTRAYIRHLIRCDEILGVRLTTYHNLHFLLNMMEQVRQAIMEDRLRDFRDEFFARYGITETRGF

SEQ ID NO: 51704 - protein, 376 aa, Aneurinibacillus migulanus
  misc_feature (1)..(376): tr|A0A0D1XEL6|A0A0D1XEL6_ANEMI Queuine tRNA-ribosyltran sferase OS=Aneurinibacillus migulanus OX=47500 GN=tgt P E=3 SV=1
MAVRYELIKTCKQTGARLGKLHTPHGTIDTPIFMPVGTLATVKTMTPEDLKEMNAQIILSNTYHLFLRPGHELVAEAGGLHSFMNWDRAILTDSGGFQVFSLSNLRQIDEEGVAFRSHLSGEKLFLSPEKAMEIQNALGADIMMAFDECAPYPAEPEYVKPSMERTTRWAERCLKAHKRPHDQALFGIVQGGMYRDLREQSARDITSLDFPGYAIGGLSVGEPHQLMYEVLDYTVPLLPSNKPRYLMGVGSPDALIEGAIRGIDMFDCVLPTRIARNGTCMTSEGRLVIRNAKYAHDFTPLDPNCDCYTCRNYTRAYIRHLIRCDEILGVRLTTYHNLHFLLNMMEQVRQAIMEDRLRDFRDEFFARYGITETRGF

SEQ ID NO: 51705 - protein, 376 aa, Aneurinibacillus soli
  misc_feature (1)..(376): tr|A0A0U5AXQ7|A0A0U5AXQ7_9BACL Queuine tRNA-ribosyltran sferase OS=Aneurinibacillus soli OX=1500254 GN=tgt PE=3 SV=1
MAVRYELIKTCKQTGARLGKLHTPHGTIDTPIFMPVGTLATVKTMTPEELKEMNAQIILSNTYHLFLRPGHELVAEAGGLHKFMNWDRAILTDSGGFQVFSLSNLRQIDEEGVAFRSHLSGEKLFISPEKAMEIQNALGADIMMAFDECAPYPAEKDYVRPSMERTTRWAERCLKAHKRPHDQALFGIVQGGMYRDLREQSARDITSLDFPGYAIGGLSVGEPHHLMYEVLDYTVPLLPDNKPRYLMGVGSPDALIEGAIRGIDMFDCVLPTRIARNGTCMTSQGRLVIRNAKYANDFTPLDPNCDCYTCRNYTRAYIRHLIRCDEILGVRLTTTHNLHFLLKMMEQVREAIMEDRLGDFRDEFFARYGITETRGF

SEQ ID NO: 51706 - protein, 376 aa, Aneurinibacillus sp.
  misc_feature (1)..(376): tr|A0A0X8D7A2|A0A0X8D7A2_9BACL Queuine tRNA-ribosyltran sferase OS=Aneurinibacillus sp. XH2 OX=1450761 GN=tgt P E=3 SV=1
MAVRYELIKTCKQTGARLGKLHTPHGTIDTPVFMPVGTLATVKTMTPEELKEMNAQIILSNTYHLFLRPGHELVAEAGGLHSFMNWDRAILTDSGGFQVFSLSNLREIDEEGVAFRSHLSGEKLFISPEKATEIQNALGADIIMAFDECAPYPAEREYVRPSMERTTRWAERCLKAHKRPHDQALFGIVQGGMYRDLREQSARDITSLDFPGYAIGGLSVGEPHQLMYEVLDYTVPLLPANKPRYLMGVGSPDALIEGAMRGIDMFDCVLPTRIARNGTCMTSEGRLVIRNAKYARDFTPLDPNCDCYTCRNYTRAYIRHLIRCDEILGVRLTTYHNLYFLLNLMKQVRQAIMEDRLRDFRDEFFAKYGITETRGF

SEQ ID NO: 51707 - protein, 376 aa, Aneurinibacillus thermoaerophilus; identical to SEQ ID NO: 51706
  misc_feature (1)..(376): tr|A0A1G7YAB5|A0A1G7YAB5_ANETH Queuine tRNA-ribosyltran sferase OS=Aneurinibacillus thermoaerophilus OX=143495 GN=tgt PE=3 SV=1

SEQ ID NO: 51708 - protein, 380 aa, Anoxybacillus amylolyticus
  misc_feature (1)..(380): tr|A0A4R1GH49|A0A4R1GH49_9BACI Queuine tRNA-ribosyltran sferase OS=Anoxybacillus amylolyticus OX=294699 GN=tgt PE=3 SV=1
MTTPIRFELIKTCRQTGARLGILHTPHGSFETPMFMPVGTLATVKTLSPEELKTMGAGVILSNTYHLWLRPGHDIVAEAGGLHAFMNWDRGILTDSGGFQVFSLSEFRRIEEEGVYFRNHLNGDKLFLSPEKAVEIQNALGADIIMAFDECPPYPATYKYMKQSIERTSRWAERCLKAHRRPNEQGLFGIVQGGEYEDLRRQSARDLVSLDFPGYAVGGLSVGEPKEVMNRVLEFTTPLLPADKPRYLMGVGSPDSLIDGAIRGIDMFDCVLPTRIGRNGTVMTSEGRVVIKNAQYARDFSPLDPNCDCYTCRNYTRAYIRHLIKCDETFGIRLTSYHNVYFLIKLMEQVRQAIREDRLADFREEFFERYGFNKPNAKNF

SEQ ID NO: 51709 - protein, 378 aa, Anoxybacillus amylolyticus
  misc_feature (1)..(378): tr|A0A160F7B4|A0A160F7B4_9BACI Queuine tRNA-ribosyltran sferase OS=Anoxybacillus amylolyticus OX=294699 GN=tgt PE=3 SV=1
MAIRYELIKTCKQTGARLGMIHTPHGSFETPMFMPVGTLATVKTLSPEELKEMGAGIILSNTYHLWLRPGHEIVKEAGGLHSFMNWDRGILTDSGGFQVFSLSEFRKIEEEGVYFRNHLNGDKLFLSPEKAMEIQNALGSDIMMAFDECPPYPATYEYMKRSVERTSRWAERCLKAHQRPNEQGLFGIVQGGEFEDLRKQSAQDLVSLDFPGYAVGGLSVGEPKEVMNRVLEFTTPLLPANKPRYLMGVGSPDSLIDGAIRGIDMFDCVLPTRIGRNGTVMTSEGRVVIKNAQYARDFTPLDPNCDCYTCRNYTRAYIRHLIKCDETFGIRLTSYHNVYFLIKLMEQVRQAIREDRLGDFRDEFFERYGFNKPNAKNF

SEQ ID NO: 51710 - protein, 379 aa, Anoxybacillus ayderensis
  misc_feature (1)..(379): tr|A0A0D0HWF0|A0A0D0HWF0_9BACI Queuine tRNA-ribosyltran sferase OS=Anoxybacillus ayderensis OX=265546 GN=tgt PE =3 SV=1
MTPIRYELIKTCKQTGARLGILHTPHGSFETPMFMPVGTLATVKTLSPEELKEMGAGVILSNTYHLWLRPGHDIVKEAGGLHSFMNWDRGILTDSGGFQVFSLSEFRRIEEEGVYFRNHLNGDKLFLSPEKAMEIQNALGSDIMMAFDECPPYPATYEYMKQSVERTSRWAERCLKAHQRPNEQGLFGIVQGGEFEDLRKQSAQDLVSLDFPGYAVGGLSVGEPKDVMNRVLEFTTPLLPANKPRYLMGVGSPDSLIDGAIRGIDMFDCVLPTRIGRNGTVMTSEGRVVIKNAKYARDFSPLDPNCDCYTCRNYTRAYIRHLIKCDETFGIRLTSYHNVYFLIKLMEQVRQAIREDRLGDFREQFFEQYGFHGPNAKNF

SEQ ID NO: 51711 - protein, 379 aa, Anoxybacillus ayderensis
  misc_feature (1)..(379): tr|A0A1X6MG19|A0A1X6MG19_9BACI Queuine tRNA-ribosyltran sferase OS=Anoxybacillus ayderensis OX=265546 GN=tgt PE =3 SV=1
MTPIRYELIKTCKQTGARLGILHTPHGSFETPMFMPVGTLATVKTLSPEELKEMGAGVILSNTYHLWLRPGHDIVKEAGGLHSFMNWDRGILTDSGGFQVFSLSEFRRIEEEGVYFRNHLNGDKLFLSPEKAMEIQNALGSDIMMAFDECPPYPATYEYMKQSVERTSRWAERCLKAHQRPNEQGLFGIVQGGEFEDLRKQSAQDLVSLDFPGYAVGGLSVGEPKEVMNRVLEFTTPLLPANKPRYLMGVGSPDSLIDGAIRGIDMFDCVLPTRIGRNGTVMTSEGRVVIKNAKYARDFSPLDPNCDCYTCRNYTRAYIRHLIKCDETFGIRLTSYHNVYFLIKLMEQVRQAIREDRLGDFREQFFEQYGFHAPNAKNF

SEQ ID NO: 51712 - protein, 379 aa, Anoxybacillus flavithermus
  misc_feature (1)..(379): sp|B7GFN1|TGT_ANOFW Queuine tRNA-ribosyltransferase OS= Anoxybacillus flavithermus (strain DSM 21510 / WK1) OX= 491915 GN=tgt PE=3 SV=1
MTPIRYELIKTCKQTGARLGILHTPHGSFETPMFMPVGTLATVKTLSPEELKEMGAGVILSNTYHLWLRPGHDIVKEAGGLHSFMNWDRGILTDSGGFQVFSLSEFRRIEEEGVYFRNHLNGDQLFLSPEKAMEIQNALGSDIMMAFDECPPYPATYEYMKRSVERTSRWAERCLKAHQRPNEQGLFGIVQGGEFEDLRKQSAQDLVSLDFPGYAVGGLSVGEPKEVMNRVLEFTTPLLPANKPRYLMGVGSPDSLIDGAIRGIDMFDCVLPTRIGRNGTVMTSEGRVVIKNAKYARDFTPLDPNCDCYTCRNYTRAYIRHLIKCDETFGIRLTSYHNVYFLIKLMEQVRQAIREDRLGDFREQFFEQYGFNKPNAKNF

SEQ ID NO: 51713 - protein, 379 aa, Anoxybacillus flavithermus
  misc_feature (1)..(379): tr|R4G0P1|R4G0P1_9BACI Queuine tRNA-ribosyltransferase OS=Anoxybacillus flavithermus NBRC 109594 OX=1315967 GN =tgt PE=3 SV=1
MTPIRYELIKTCKQTGARLGILHTPHGSFETPMFMPVGTLATVKTLSPEELKEMGAGVILSNTYHLWLRPGHDIVKEAGGLHSFMNWDRGILTDSGGFQVFSLSEFRRIEEEGVYFRNHLNGDKLFLSPEKAMEIQNALGSDIMMAFDECPPYPATYEYMKRSVERTSRWAERCLKAHQRPNEQGLFGIVQGGEFEDLRKQSAQDLVSLDFPGYAVGGLSVGEPKEVMNRVLEFTTPLLPANKPRYLMGVGSPDSLIDGAIRGIDMFDCVLPTRIGRNGTVMTSEGRVVIKNAKYARDFTPLDPNCDCYTCRNYTRAYIRHLIKCDETFGIRLTSYHNVYFLIKLMEQVRQAIREDRLGDFREQFFEQYGFNKPNAKNF

SEQ ID NO: 51714 - protein, 379 aa, Anoxybacillus gonensis
  misc_feature (1)..(379): tr|M5R9A3|M5R9A3_9BACI Queuine tRNA-ribosyltransferase OS=Anoxybacillus gonensis OX=198467 GN=tgt PE=3 SV=1
MTPIRYELIKTCKQTGARLGILHTPHGSFETPMFMPVGTLATVKTLSPEELKEMGAGVILSNTYHLWLRPGHDIVKEAGGLHSFMNWDRGILTDSGGFQVFSLSEFRRIEEEGVYFRNHLNGDKLFLSPEKAMEIQNALGSDIMMAFDECPPYPATYEYMKQSVERTSRWAERCLKAHQRPNEQGLFGIVQGGEFEDLRKQSAQDLVSLDFPGYAVGGLSVGEPKEVMNRVLEFTTPLLPANKPRYLMGVGSPDSLIDGAIRGIDMFDCVLPTRIGRNGTVMTSQGRVVIKNAKYARDFSPLDPNCDCYTCRNYTRAYIRHLIKCDETFGIRLTSYHNVYFLIKLMEQVRQAIREDRLGDFREQFFEQYGFYAPDAKNF

SEQ ID NO: 51715 - protein, 379 aa, Anoxybacillus kamchatkensis; identical to SEQ ID NO: 51714
  misc_feature (1)..(379): tr|A0A4S3L5W3|A0A4S3L5W3_9BACI Queuine tRNA-ribosyltran sferase OS=Anoxybacillus kamchatkensis OX=196180 GN=tgt PE=3 SV=1

SEQ ID NO: 51716 - protein, 379 aa, Anoxybacillus kamchatkensis; identical to SEQ ID NO: 51714
  misc_feature (1)..(379): tr|A0A346DHS7|A0A346DHS7_9BACI Queuine tRNA-ribosyltran sferase OS=Anoxybacillus kamchatkensis G10 OX=1212546 G N=tgt PE=3 SV=1

SEQ ID NO: 51717 - protein, 379 aa, Anoxybacillus pushchinoensis
  misc_feature (1)..(379): tr|A0A1I0T916|A0A1I0T916_9BACI Queuine tRNA-ribosyltran sferase OS=Anoxybacillus pushchinoensis OX=150248 GN=tg t PE=3 SV=1
MTPIRYELIKTCKQTGARLGILHTPHGSFETPMFMPVGTLATVKTLSPEELKEMGAGVILSNTYHLWLRPGHDIVKEAGGLHTFMNWDRGILTDSGGFQVFSLSEFRRIEEEGVYFRNHLNGDKLFLSPEKAMEIQNALGSDIMMAFDECPPYPATYEYMKRSVERTSRWAERCLKAHQRPNEQGLFGIVQGGEFEELRKQSAQDLVSLDFPGYAVGGLSVGEPKDVMNRVLEFTTPLLPANKPRYLMGVGSPDSLIDGAIRGIDMFDCVLPTRIGRNGTVMTSEGRVVIKNAKYARDFTPLDPNCDCYTCRNYTRAYIRHLIKCDETFGIRLTSYHNVYFLIKLMEQVRQAIREDRLGDFREQFFEQYGFNQPNAKNF

SEQ ID NO: 51718 - protein, 379 aa, Anoxybacillus sp.
  misc_feature (1)..(379): tr|A0A094K0V2|A0A094K0V2_9BACI Queuine tRNA-ribosyltran sferase OS=Anoxybacillus sp. KU2-6(11) OX=1535751 GN=tg t PE=3 SV=1
MTPIRYELIKTCKQTGARLGILHTPHGSFETPMFMPVGTLATVKTLSPEELKEMGAGVILSNTYHLWLRPGHDIVKEAGGLHSFMNWDRGILTDSGGFQVFSLSEFRRIEEEGVYFRNHLNGDKLFLSPEKAMEIQNALGSDIMMAFDECPPYPATYEYMKRSVERTSRWAERCLKAHQRPNEQGLFGIVQGGEFEDLRKQSAQDLVSLDFPGYAVGGLSVGEPKDVMNRVLEFTTPLLPANKPRYLMGVGSPDSLIDGAIRGIDMFDCVLPTRIGRNGTVMTSEGRVVIKNAKYARDFSPLDPNCDCYTCRNYTRAYIRHLIKCDETFGIRLTSYHNVYFLIKLMEQVRQAIREDRLGDFREQFFEQYGFNKPNAKNF

SEQ ID NO: 51719 - protein, 379 aa, Anoxybacillus sp.; identical to SEQ ID NO: 51713
  misc_feature (1)..(379): tr|A0A1V3FL53|A0A1V3FL53_9BACI Queuine tRNA-ribosyltran sferase OS=Anoxybacillus sp. 103 OX=1919277 GN=tgt PE=3 SV=1

SEQ ID NO: 51720 - protein, 379 aa, Anoxybacillus suryakundensis
  misc_feature (1)..(379): tr|A0A0K6GQD7|A0A0K6GQD7_9BACI Queuine tRNA-ribosyltran sferase OS=Anoxybacillus suryakundensis OX=1325335 GN=t gt PE=3 SV=1
MTPIRYELIKTCKQTGARLGILHTPHGSFETPMFMPVGTLATVKTLSPEELKEMGAGVILSNTYHLWLRPGHDIVKEAGGLHSFMNWDRGILTDSGGFQVFSLSEFRRIEEEGVYFRNHLNGDKLFLSPEKAMEIQNALGSDIMMAFDECPPYPATHEYMKRSVERTSRWAERCLKAHQRPNEQGLFGIVQGGEFEDLRKQSAQDLVSLDFLGYAVGGLSVGEPKEVMNRVLEFTTPLLPANKPRYLMGVGSPDSLIDGAIRGIDMFDCVLPTRIGRNGTVMTSEGRVVIKNAKYARDFSPLDPNCDCYTCRNYTRAYIRHLIKCDETFGIRLTSYHNVYFLIKLMEQVRQAIREDRLGDFREQFFEQYGFNKPNAKNF

SEQ ID NO: 51721 - protein, 379 aa, Anoxybacillus thermarum
  misc_feature (1)..(379): tr|A0A0D0S046|A0A0D0S046_9BACI Queuine tRNA-ribosyltran sferase OS=Anoxybacillus thermarum OX=404937 GN=tgt PE= 3 SV=1
MTPIRYELIKTCKQTGARLGILHTPHGSFETPMFMPVGTLATVKTLSPEELKEMGAGVILSNTYHLWLRPGHEIVKEAGGLHSFMNWDRGILTDSGGFQVFSLSEFRRIEEEGVYFRNHLNGDKLFLSPEKAMEIQNALGSDIMMAFDECPPYPATYEYMKQSVERTSRWAERCLKAHQRPNEQGLFGIVQGGEFEDLRKQSAQDLVSLDFPGYAVGGLSVGEPKNVMNRVLEFTTPLLPANKPRYLMGVGSPDSLIDGAIRGIDMFDCVLPTRIGRNGTVMTSEGRVVIKNAKYARDFSPLDPNCDCYTCRNYTRAYIRHLIKCDETFGIRLTSYHNVYFLIKLMEQVRQAIREDRLGDFREQFFEQYGFHAPNAKNF

SEQ ID NO: 51722 - protein, 379 aa, Anoxybacillus vitaminiphilus
  misc_feature (1)..(379): tr|A0A327YBW9|A0A327YBW9_9BACI Queuine tRNA-ribosyltran sferase OS=Anoxybacillus vitaminiphilus OX=581036 GN=tg t PE=3 SV=1
MTPIRYELIKTCKQTGARLGIIHTPHGSFETPMFMPVGTLATVKTLSPEELKEMGAGIILSNTYHLWLRPGHEIVKEAGGLHRFMNWDRGILTDSGGFQVFSLSEFRKIEEEGVYFRNHLNGDKLFLSPEKAMEIQNALGSDIMMAFDECPPYPATYEYMKKSVERTSRWAERCLKAHKRPNEQGLFGIVQGGEFEDLRKQSAQDLVSLDFPGYAVGGLSVGEPKDVMNRILEFTTPLLPANKPRYLMGVGSPDSLIDGVIRGIDMFDCVLPTRIGRNGTAMTSEGRVVIKNAQYARDFTPLDPNCDCYTCRNYTRAYIRHLIKCDETFGIRLTSYHNVYFLIKLMEQVRQAIREDRLGDFREEFFDRYGFNKPNAKNF

SEQ ID NO: 51723 - protein, 371 aa, Anoxybacter fermentans
  misc_feature (1)..(371): tr|A0A3Q9HQG7|A0A3Q9HQG7_9FIRM Queuine tRNA-ribosyltran sferase OS=Anoxybacter fermentans OX=1323375 GN=tgt PE= 3 SV=1
MSFEFRLLKTDSNSKARLGELYTPHGKIETPIFMPVGTQATVKTMTPEELKEVGAQIILSNTYHLYLRPGHELIKKAGGLHSFMNWDRPILTDSGGFQVFSLSDLREITEEGVTFRSHIDGSYHFISPEKAIEIQMALGADIIMAFDECPPYPADYDYVKESLKRTTRWLKRCKEAHTRKDQALFGIIQGGMYKDLREESVKETTEVDLPGYAIGGLSVGEPKDIMYDILEYTTSLLPVDKPRYLMGVGTPEDLIEGVLRGVDMFDCVLPTRIARNGSVFTKFGQMTVRNAKYEADFTPLDPYCDCYTCRNYTRAYIRHLIKRNEILGLRLTTYHNLYFLLKLMERIREAIREDKFLEYREEFYRQYKGKI

SEQ ID NO: 51724 - protein, 345 aa, Anseongella ginsenosidimutans
  misc_feature (1)..(345): tr|A0A4R3KTS8|A0A4R3KTS8_9SPHI Queuine tRNA-ribosyltran sferase OS=Anseongella ginsenosidimutans OX=496056 GN=t gt PE=3 SV=1
MPVGTAGTVKAVHQRELKEDIRAQIILGNTYHLYLRPGLDTLHKAGGLHQFNGWDAPILTDSGGYQVFSLSGTRKIKEEGVTFRSHIDGSRHLFTPENTMDTQRIIGADIIMALDECTPYPCSYRYAETSLQLTHRWLERCINHFKATEPLYGYDQMLFPIVQGSTYKDLRKASAETIASFGQEGNAIGGLSVGEPAEEMYEMTEIVCEILPADKPRYLMGVGTPANILECISLGIDMFDCVMPTRNARNGMLFTRNGIINIRNEKWKNDFSPIDEESDLWADKHYSKAYLRHLVTSKEILGAQIASLHNLHFYLWLTGESRKRIIDGTFARWKDQMVKAVSARI

SEQ ID NO: 51725 - protein, 376 aa, Antarcticibacterium flavum
  misc_feature (1)..(376): tr|A0A5B7X4V0|A0A5B7X4V0_9FLAO Queuine tRNA-ribosyltran sferase OS=Antarcticibacterium flavum OX=2058175 GN=tgt PE=3 SV=1
MTFDLLTTDPGSQARAGKLTTDHGTIETPIFMPVGTVGSVKGVHQRELKEEINPDIILGNTYHLYLRPQTEILQKAGGLHKFINWDRNILTDSGGYQVYSLSERRKIKEEGVKFKSHIDGSYHTFTPENVMEIQRTIGADIIMAFDECTPYPCDYRYAKRSMHMTHRWLDRCIAHLEKTPFEYDYSQAFFPIVQGSTYKDLRQQSAEYIASVGAEGNAIGGLSVGEPAEEMYAMTEVVTAILPEDKPRYLMGVGTPINILENIALGIDMFDCVMPTRNARNGMLFTAHGTINIKNKKWEDDFSPIDEMDITWVDKEYSKAYLKHLFSVNEMLGKQIATIHNLGFYLWLVREARKHILAGDFTTWKNMMVKQMDKRL

SEQ ID NO: 51726 - protein, 376 aa, Antarcticibacterium sp.
  misc_feature (1)..(376): tr|A0A5B8YEM1|A0A5B8YEM1_9FLAO Queuine tRNA-ribosyltran sferase OS=Antarcticibacterium sp. PAMC 28998 OX=258577 1 GN=tgt PE=3 SV=1
MNFELLATDPGSKARAGKITTDHGTIETPIFMPVGTVGSVKGVHQRELKEEINPDVILGNTYHLYLRPQTEILKKAGGLHKFINWDRNILTDSGGYQVYSLSERRKIKEEGVKFKSHIDGSYHTFTPENVMEIQRTIGADIIMAFDECTPYPCDYRYAKRSMHMTHRWLDRCITHLEKTPFAYDYSQAFFPIVQGSTYKDLRQQSAEYIASVGAEGNAIGGLSVGEPAEEMYAMTEVVTAILPEDKPRYLMGVGTPVNILENIALGIDMFDCVMPTRNARNGMLFTAHGTINIKNKKWEDDFSAIDDMAITWVDTEYSKAYLKHLFSVNEMLGKQIATIHNLGFYLWLVREARKHILAGDFYTWKNKMVAQMDKRL

SEQ ID NO: 51727 - protein, 375 aa, Antarctobacter heliothermus
  misc_feature (1)..(375): tr|A0A239D3G1|A0A239D3G1_9RHOB Queuine tRNA-ribosyltran sferase OS=Antarctobacter heliothermus OX=74033 GN=tgt PE=3 SV=1
MAQTSFELTARDGRARRGVIRTPRGEIRTPAFMPVGTAATVKGMMPESVAATGADILLGNTYHLMLRPGAERVARLGGLHKFMNWSGPILTDSGGFQVMSLAELRKLTEDGVSFRSHIDGSKHMLSPERSMEIQKLLGSDIVMAFDECPALPADRDRIAQSMRLSMRWAARSREAFGDRPGHMLFGIQQGGLEQDLRGESAEALKGIGFDGYAVGGLAVGEGQEAMFGCLDYAPDMLPEDRPRYLMGVGKPDDIVGAVKRGIDMMDCVLPSRSGRTGQAWTRRGQVNIKNARHADDPRPLDENCTCPACRGYSRAYLHHVFRAGEMISGMLLTWHNLHYYQELMAGMREAISGARFDAFEAEFHAVRAEGDIDPL

SEQ ID NO: 51728 - protein, 375 aa, Antarctobacter heliothermus
  misc_feature (1)..(375): tr|A0A222E6C3|A0A222E6C3_9RHOB Queuine tRNA-ribosyltran sferase OS=Antarctobacter heliothermus OX=74033 GN=tgt PE=3 SV=1
MAQTSFELIARDGRARRGVIRTPRGEIRTPAFMPVGTAATVKGMMPESVAATGADILLGNTYHLMLRPGAERVARLGGLHTFMNWSGPILTDSGGFQVMSLAELRKLTEDGVTFRSHIDGSKHMLSPERSMEIQKLLGSDIVMAFDECPALPADRDRIAQSMRLSMRWAARSREAFGDRPGHMLFGIQQGGLEEDLRGESAEALKGIGFDGYAVGGLAVGEGQEAMFGCLDYAPGMLPEDRPRYLMGVGKPDDIVGAVKRGIDMMDCVLPSRSGRTGQAWTRRGQVNIKNARHADDPRPLDENCTCPACRGYSRAYLHHVFRAGEMISGMLLTWHNLHYYQELMAGMREAISDGRFEAFETEFHAMRAEGDIEPL

SEQ ID NO: 51729 - protein, 409 aa, Antricoccus suffuscus
  misc_feature (1)..(409): tr|A0A2T0Z037|A0A2T0Z037_9ACTN Queuine tRNA-ribosyltran sferase OS=Antricoccus suffuscus OX=1629062 GN=tgt PE=3 SV=1
MNKQAGFEVGTRLGEGTLARTGTITTPHGQIQTPAFIAVGTKATVKTVLPETVKEVGAQAVLANAYHLYLQPGADIVDEAGGLGRFMHWDGPTYTDSGGFQVMSLGVGFKKVLAMDAKGVVSDDVIAEGKERLAHVDDDGVTFKSHLDGSMHRFTPEVSMQIQHQLGADIIFAFDECTTLMNTRAYQEHSLDRTQAWAKRCVVEHARLTTSHPERPYQMLCGVVQGAQYEDLRRKAARDLVSLGFDGFGIGGALEKESLGTIVRWVNEELPEDKPRHLLGIGEPDDIFTAIENGVDTFDCVSPSRVARNAALYTPDGRFNVNTAKHRRAFAPIDEDCDCYTCQHFTKAYLHHLFKAKEMLAFTLATIHNERFILRLVDDVRRSMVDGQFFEFKADTLGRYYANRAPASD

SEQ ID NO: 51730 - protein, 378 aa, Aphanizomenon flosaquae
  misc_feature (1)..(378): tr|A0A1B7VIW4|A0A1B7VIW4_APHFL Queuine tRNA-ribosyltran sferase OS=Aphanizomenon flos-aquae LD13 OX=1710894 GN= tgt PE=3 SV=1
MSANFSFECLATCSQTKARAGIFSTPHGPVETPRFMPVGTLANVKTITPAQLGATGAQMVLANTYHLHLQPGEAIVAGGGGLHKFMGWPGPMLTDSGGFQVFSLSEMRKITEEGVTFRSPHDGQMIKLTPERSIEIQNILGADVIMAFDECPPYPATRQEVEAATDRTYRWLKRSISAHQRPDQALFPIVQGGVYLDLRARAAAELAALDMPGYAIGGVSVGEPTDLMAQIVQTTAPLLPVNKPRYLMGVGTYREMAIAIASGVDLFDCVIPTRWARHGTAIVSGERWNLKNAKFREDFTPLDTTCPCYTCENFSRAYISHLVRSQEILAYTLLTIHNITELIRFTQKIRASILSDRFITDFGHWLQPSAIDLEKTQD

SEQ ID NO: 51731 - protein, 378 aa, Aphanizomenon flosaquae; identical to SEQ ID NO: 51604
  misc_feature (1)..(378): tr|A0A1B7X5F0|A0A1B7X5F0_APHFL Queuine tRNA-ribosyltran sferase OS=Aphanizomenon flos-aquae WA102 OX=1710896 GN =tgt PE=3 SV=1

SEQ ID NO: 51732 - protein, 373 aa, Aphanocapsa feldmannii
  misc_feature (1)..(373): tr|A0A524RQI0|A0A524RQI0_9CYAN Queuine tRNA-ribosyltran sferase OS=Aphanocapsa feldmannii 277cV OX=2507553 GN=t gt PE=3 SV=1
MAFTFDILQRCPRTRARIGRFQTCHGAVETPRFMPVGTLATVKGLTVEQLHACDAQMVLANTYHLHLQPGESIIAEAGGLHRFMGWDRPILTDSGGYQVFSLGAINRIEESGVTFRSPRDGAMIEITPERAITIQNALGADVVMAFDQCPPHAASYGQVKEATERTHRWLERCIKAHRRDDQALFGIVQGGVHDDLRLRSASFVSAMDLPGYAIGGVSVGEPSEEIQRIVRSVTPLLPDHRPRYLMGVGSLPEMAHAVANGMDLFDCVIPTRLGRHGTALVGGESWNIRNARLRHDHTPLDASCPCFACRHHTRAYLHHLIRSQELLGQILLSLHNVTHLIRFTRAMTKAITAGTFSEDFTPWDPASPAADTW

SEQ ID NO: 51733 - protein, 373 aa, Aphanocapsa feldmannii; identical to SEQ ID NO: 51732
  misc_feature (1)..(373): tr|A0A524RVM5|A0A524RVM5_9CYAN Queuine tRNA-ribosyltran sferase OS=Aphanocapsa feldmannii 277cI OX=2507554 GN=t gt PE=3 SV=1

SEQ ID NO: 51734 - protein, 373 aa, Aphanothece cf.
  misc_feature (1)..(373): tr|A0A2T1EY43|A0A2T1EY43_9CHRO Queuine tRNA-ribosyltran sferase OS=Aphanothece cf. minutissima CCALA 015 OX=210 7695 GN=tgt PE=3 SV=1
MAFDFTITARCPRTRARCGCFTTPHGTVHTPRFMPVGTAATVKGVSTPQLGETGAEMVLANTFHLHLQPGETVVAEAGGLHRFMGWEGPLLTDSGGFQVFSLDAINRIDDDGVVFRSPRDGSRIDLTPERSMAIQRALGADVAMAFDQCPPYPATEAAVAEACRRTHRWLERCVACHGGGDQALFGIVQGGCFPHLREASARLVASMDLPGIAVGGVSVGEPAEEMHRVVRQVGPLLPQERPHYLMGVGSLREMAIAVANGFDLFDCVLPTRLGRHGTALVGGERWNLRNARFRHDHGPLDPSCGCLACRHHSRSYLHHLFRSDELLGRTLLSLHNLTTLLRFTSAMARAISEGCFAEDFAPWEPGSPAAHTW

SEQ ID NO: 51735 - protein, 375 aa, Aphanothece hegewaldii
  misc_feature (1)..(375): tr|A0A2T1LY96|A0A2T1LY96_9CHRO Queuine tRNA-ribosyltran sferase OS=Aphanothece hegewaldii CCALA 016 OX=2107694 GN=tgt PE=3 SV=1
MGFSYKLIAKCSKTQARVGIWHTPHGIVETPRFMPVGTVGTIKGLTPSQVATTGAQMILANTYHLHLQPGESIVEKAGGLHSFMGWNGPILTDSGGFQVFSLSELRDIKETGVTFRSPRDGRIIELTPERSIQIQNKLGADVIMAFDECPPANASRSDVTKATERTYRWLERCIEAHQRPQDQALFPIVQGGIYLDLRSKAAKDLSVLDLPGYAIGGVSVGEAPELIHQIVAHTAPLLPPHKPRYLMGVGTYREMARAIASGIDLFDCVIPTRFGRHGTAMVQGERWNLKNARFKEDFTPLDAKCPCYTCQTFTRAYLNHLIKSREMLGYILLSLHNITELVRFTMKIREAIEGDRFVDEFGHWLNDHSSNHDTI

SEQ ID NO: 51736 - protein, 333 aa, Aphanothece sacrum
  misc_feature (1)..(333): tr|A0A401IEA0|A0A401IEA0_APHSA Queuine tRNA-ribosyltran sferase OS=Aphanothece sacrum FPU1 OX=1920663 GN=tgt PE =3 SV=1
MPVGTLATVKGLTPAQLETTGAQMILANTYHLHLQPGESIIQQAGGLHRFMGWNGPVLTDSGGFQVFSLSALRKIKEFGVTFRSPRDGRIIELTPERSIQIQNALGADVIMAFDECPPGDADYATVAAATERTYRWLERCITAHQRPDTQALFGIVQGGTYPELRQKAVNALKELNLPGYAIGGVSVGEDPALVREIVQFTAPLLPFEKPRYLMGVGTYKEMAMAIASGIDLFDCVIPTRFGRHGTALVKGERWNLKNAPFREDFTPLDDSCACYTCQTFTRAYLNHLIRSREMLGYILLSLHNIAELIRFTQQIREAILSDRFVTEFAHWLS

SEQ ID NO: 51737 - protein, 377 aa, Apibacter adventoris
  misc_feature (1)..(377): tr|A0A2S8ADV0|A0A2S8ADV0_9FLAO Queuine tRNA-ribosyltran sferase OS=Apibacter adventoris OX=1679466 GN=tgt PE=3 SV=1
MFFKLGNEDRNSKARAGIITTEHGIIETPIFMPVGTIGSVKSVHQRELKEDIQAQIILGNTYHLYLRPGTNILYKAGGLHKFINWDRPILTDSGGFQVFSLSQTRSKIQEEGVKFKSHIDGSYHFFTPEKSMEIQRFIGGDIFMAFDECTPYPCDYSYAKKSLSITHQWLQRCCKWCNENPELYGYKQHLFPIVQGSTFDDLRKISAEFISSVNADGNAIGGLSVGEPEEEMYRITELVTDILPKDKPRYLMGVGTPWNILESISLGIDMMDCVMPTRNARNGMLFTWNGVINIKNKKWAEDFSELDSKGTSFVDHDYTKAYLRHLFSVNEFLGKQIASIHNLSFYLDLVKTARKHIINGDFYTWKKSIIPTLKTRL

SEQ ID NO: 51738 - protein, 376 aa, Apibacter mensalis
  misc_feature (1)..(376): tr|A0A0X3ARH6|A0A0X3ARH6_9FLAO Queuine tRNA-ribosyltran sferase OS=Apibacter mensalis OX=1586267 GN=tgt PE=3 SV =1
MFFSSNIKDKNSKARAGILQTDHGKIETPIFMPVGTVGSVKSVHQRELKEDINAQIILGNTYHLYLRPGTDILYKAGGLHKFINWNRPVLTDSGGYQVFSLSQTRKIQEEGVKFKSHIDGSYHFFTPEKSMEIQRFIGGDIFMAFDECTPYPCDYSYAKNSLTITHQWLKRCVKWCDENPEFYNYKQHLFPIVQGSTFDDLRKFSAEFISSVHADGNAIGGLSVGEPEEEMYRITDLVTDILPLDKPRYLMGVGTPWNILESISLGIDMMDCVMPTRNARNGMLFTWDGVINIKNKKWADDFSELDTKGTAFVDHDYSKAYLRHLFSANEFLGKQIASVHNLAFYLDLVKTARKHIIEGDFTSWKKSVIPQLRNRL

SEQ ID NO: 51739 - protein, 376 aa, Apibacter sp.
  misc_feature (1)..(376): tr|A0A563DGI2|A0A563DGI2_9FLAO Queuine tRNA-ribosyltran sferase OS=Apibacter sp. AL1 OX=2509005 GN=tgt PE=3 SV= 1
MFFTISETDKSSKARAGILKTDHGDIQTPIFMPVGTVGTVKSVHQRELKDDIKAQIILGNTYHLYLRPGTEILHKAGGLHKFINWDSPILTDSGGYQVFSLSQTRKIQEDGVKFKSHIDGSYHFFSPEKSMEIQRYIGGDIFMAFDECTPYPCDYSYAKNSLEITHKWLKRCVKWCDENPELYGYKQHLFPIVQGSTYGDLRKQSAEFISSINADGNAIGGLSVGEPEEEMYRITDIVTDILPKNKPRYLMGVGTPWNILESISLGIDMMDCVMPTRNARNGMLFTWNGVINIKNKKWQDDFSPLDEDGTAFVDKEYSKAYLRHLFAANEFLGKQIASIHNLAFYLDLVTVARKHILEGDFNSWKNSTIPKLRTRL

SEQ ID NO: 51740 - protein, 376 aa, Apibacter sp.
  misc_feature (1)..(376): tr|A0A2S8AD26|A0A2S8AD26_9FLAO Queuine tRNA-ribosyltran sferase OS=Apibacter sp. wkB309 OX=1679467 GN=tgt PE=3 SV=1
MFFSSNVKDKNSKARAGILQTDHGKIETPIFMPVGTVGSVKSVHQRELKEDIKAQIILGNTYHLYLRPGTDILYKAGGLHKFIHWDRPILTDSGGYQVFSLSQTRKIQEEGVKFKSHIDGSYHFFTPEKSMEIQRYIGGDIFMAFDECTPYPCDYSYAKNSLEITHKWLKRCVKWCDENPEFYNYKQHLFPIVQGSTFDDLRKFSAEFISSVNADGNAIGGLSVGEPEEEMYRITDLVTDILPLEKPRYLMGVGTPWNILESISLGIDMMDCVMPTRNARNGMLFTWDGVINIKNKKWADDFSELDPKGTAFVDHDYSKAYLRHLFSANEFLGKQISSVHNLAFYLDLVKTARKHIVEGDFTSWKKSVIPQLRNRL

SEQ ID NO: 51741 - protein, 377 aa, Aquabacter spiritensis
  misc_feature (1)..(377): tr|A0A4R3LKX3|A0A4R3LKX3_9RHIZ Queuine tRNA-ribosyltran sferase OS=Aquabacter spiritensis OX=933073 GN=tgt PE=3 SV=1
MTGFSFAVAATDGAARTGEISTPRGTIRTPAFMPVGTAATVKGVYCDQVRATGADILLGNTYHLMLRPGAERVAALGGLHRFMQWDRPILTDSGGFQVMSLSQLRKLDPDGVTFRSHVDGAMHRLTPERAMEIQGLLGADIQMQLDECVGLPCTDEDTARAMRLSLAWAERSKRAFEQQPKGRAVFGIVQGGAVEALRIESARALVAMDFPGYSIGGLAVGEPQDIMLRMIETVAPELPVHKPRYLMGVGTPDDLLEAVGRGIDMFDCVMPTRSGRHALAFTRFGKINLKNARHQDDPRPLDETSDCPALRDYSRAYLHHLIRCDEMLGPMLLSWANLHYYQDLMRGARAAIAEGRYEDFKAAAKAGWARGDLPPLG

SEQ ID NO: 51742 - protein, 383 aa, Aquabacterium commune
  misc_feature (1)..(383): tr|A0A4R6RHS2|A0A4R6RHS2_9BURK Queuine tRNA-ribosyltran sferase OS=Aquabacterium commune OX=70586 GN=tgt PE=3 S V=1
MLQFDLLKTEGHARRGTLTLNHGVVQTPIFMPVGTYGTVKGVMPQSLHDMGAQIILGNTFHLWMRPGLDVMQQFGGLHKFENWHKPILTDSGGFQVWSLGEMRKISEEGVRFASPVNGDKLFLTPEISMQIQTILNSDIVMQFDECTPYWKNGGKGDKGQGNITTEKEARASMELSLRWAKRCQTEFDKLENPNALFGIVQGGMFEHLREESLAALADMDLPGYAVGGVSVGEPKDEMLRVMNHIGPKLPPHKPRYLMGVGTPEDLVAGVAAGIDMFDCVMPTRNARNGHLFTRFGDLRLRNARNKSDERPIDMTCACYTCRNFSRAYLHHLDRCGEMLGPMLTTIHNLHYYLNLMQEVRDALDAGRFAEFQRQFAEDRARGV

SEQ ID NO: 51743 - protein, 379 aa, Aquabacterium olei
  misc_feature (1)..(379): tr|A0A2U8FP62|A0A2U8FP62_9BURK Queuine tRNA-ribosyltran sferase OS=Aquabacterium olei OX=1296669 GN=tgt PE=3 SV =1
MLNFELLKTEGHARRGRLTLNHGVVETPIFMPVGTYGTVKGVMPRSLEEMGAQIILGNTFHLWMRPGLDIMQQFGGLHKFENWHKPILTDSGGFQVWSLGDMRKISEEGVRFASPVNGDKLFLTPEISMQIQTILNSDIVMQFDECTPYWKGDKSLGHITTEKEARASMELSLRWARRCITEFQRLQNPNALFGIVQGGMFEHLREESLAGLVDLDLPGYAIGGVSVGEPKDEMMRVMNHISPKLPAHKPRYLMGVGTPEDLVAGVATGVDMFDCVMPTRNARNGHLFTRFGDLRLRNARNKSDERPIDETCTCYTCANFSRAYLHHLDRCGEMLGPMLTTIHNLHYYLNLMKEVRQALDEGRFAAFQQQFAADRARGV

SEQ ID NO: 51744 - protein, 296 aa, Aquabacterium sp.
  misc_feature (1)..(296): tr|A0A521Z400|A0A521Z400_9BURK Queuine tRNA-ribosyltran sferase (Fragment) OS=Aquabacterium sp. OX=1872578 GN=E PO09_18560 PE=3 SV=1
MLTFDLIKTEGEARRGRLTLNHGVVQTPIFMPVGTYGTVKGVMPRSLEEMGAQIILGNTFHLWMRPGLDIMKQFGGLHKFESWNKPILTDSGGFQVWSLGEMRKISEEGVRFASPVNGDKLFLTPEISMQIQTILNSDIVMQFDECTPYWKGDKSLGHITTEREARLSMELSLRWAKRCITEFDKLQNPNALFGIVQGGMFPNLREESLAGLVDLNLPGYAIGGVSVGEPKDEMLRVMNHITPKLPANKPRYLMGVGTPEDLIAGVATGVDMFDCVMPTRNARNGHLFTRYGDLRL

SEQ ID NO: 51745 - protein, 379 aa, Aquabacterium sp.
  misc_feature (1)..(379): tr|A0A0A0DNQ4|A0A0A0DNQ4_9BURK Queuine tRNA-ribosyltran sferase OS=Aquabacterium sp. NJ1 OX=1538295 GN=tgt PE=3 SV=1
MLKFDLLKTEGEARRGQLTLNHGVVQTPIFMPVGTYGTVKGVMPRSLEEMGAQIILGNTFHLWMRPGLDIMKQFGGLHKFESWNKPILTDSGGFQVWSLGEMRKISEEGVRFASPVNGDKLFLTPEISMQIQTILNSDIVMQFDECTPYWKGDKSLGHITTEKEARASMELSLRWAKRCIAEFTKLQNPNALFGIVQGGMFPNLREESLAGLVELDLPGYAIGGVSVGEPKDEMLRVMNHITPKLPANKPRYLMGVGTPEDLVAGVATGVDMFDCVMPTRNARNGHLFTRFGDLRLRNSRYKADERPIDETCTCHTCSNFSRAYLHHLDRCGEMLGPMLTTIHNLHYYLNLMQEVRDALDAGRFGEFQKQFSADRARGV

SEQ ID NO: 51746 - protein, 376 aa, Aquamicrobium aerolatum
  misc_feature (1)..(376): tr|A0A1I3PET9|A0A1I3PET9_9RHIZ Queuine tRNA-ribosyltran sferase OS=Aquamicrobium aerolatum DSM 21857 OX=1121003 GN=tgt PE=3 SV=1
MSENFTFKLLATDGKARRGEISMPRGTIRTPAFMPVGTGGTVKAMYMDQVRDLGADIILGNTYHLMLRPGAERVARLGGLHEFGGWSGPILTDSGGFQVMSLAKLRKLNEQGVTFRSHIDGAKYEMSPERSIEIQGLLDSDIQMQLDECVALPTTEKDMARAMELSLRWAERCKVAFGDQRGKAMFGIVQGGDNAALRERSAEALKAMDLKGYAVGGLAVGEPQEVMLEMLDVTCPVLPHDKPRYLMGVGTPDDMLKSVARGIDMFDCVMPTRAGRHGLAYTRRGKVNLRNARHAEDHRPLDEESDCPAARDYSRAYLHHLVKSGEALGGMLLTWNNLAYYQSLMADIRAAIEAGCFATRAQVITAAWDAGDLPPL

SEQ ID NO: 51747 - protein, 376 aa, Aquamicrobium defluvii
  misc_feature (1)..(376): tr|A0A011SRP0|A0A011SRP0_9RHIZ Queuine tRNA-ribosyltran sferase OS=Aquamicrobium defluvii OX=69279 GN=tgt PE=3 SV=1
MTTSFSFRLIATDGGARRGEVSMPRGTVRTPAFMPVGTGGTVKAMYMDQVRGTGADIILGNTYHLMLRPGAERVARLGGLHELARWPWPILTDSGGFQVMSLSKLRKLTENGVTFRSHIDGAPYEMTPERSIEIQGLLDSDIQMQLDECTALPAKHSEIERAMELSLRWAERCKVAFGDQPGKAMFGIVQGGDDAGLRVRSAQALKVMDLKGYAVGGLAVGEPQPVMLDMLEITCPELPGDKPRYLMGVGTPDDILKSVARGIDMFDCVMPTRAGRHGLAYTRRGKVNLRNARHADDHRPLDEESDCPAARDYSRAYLHHLVRSQEALGAMLLTWNNLAYYQRLMQDIRDAIEAGQFADRAASITEGWARGDIPAL

SEQ ID NO: 51748 - protein, 376 aa, Aquamicrobium sp.
  misc_feature (1)..(376): tr|A0A4U6C731|A0A4U6C731_9RHIZ Queuine tRNA-ribosyltran sferase OS=Aquamicrobium sp. LC103 OX=1120658 GN=tgt PE =3 SV=1
MTETFSFRILATDGTARRGEITMPRGTVRTPAFMPVGTGGTVKAMYLDQVRALGSDIILGNTYHLMLRPGAERVARLGGLHDFARWPYPILTDSGGFQVMSLAKLRKLNENGVTFRSHIDGAAYEMTPERSIEIQGLLDSDIQMQLDECTALPAKPKEIERAMELSLRWAERCKAAFGEQAGKAMFGIVQGGDIGELREKSAAALTAMDLKGYAVGGLAVGEPQEVMLDMLEATCPVLPEDKPRYLMGVGTPDDILKSVARGIDMFDCVMPTRAGRHGLAYTRRGKINLRNARHADDPRPLDEESECPAARDYSRAYLHHLVKSGEALGAMLLTWNNLAYYQRLMADIREAIAAGRFSDRAAELTEGWARGDIAPL

SEQ ID NO: 51749 - protein, 371 aa, Aquaspirillum sp.
  misc_feature (1)..(371): tr|A0A1U9JJT8|A0A1U9JJT8_9NEIS Queuine tRNA-ribosyltran sferase OS=Aquaspirillum sp. LM1 OX=1938604 GN=tgt PE=3 SV=1
MLQFTLHSTSAGARRGTLVLNHGTIETPTFMPVGTYGSVKAMSPLELNEIGAQIILGNTFHLWLRPGLDVVAEFGGLHQFIGWDKPILTDSGGFQVFSLGDLRKITEDGVTFQSPINGDKLFLSPEKSMEIQRVLNSDIVMIFDECTPYPADEKTAADSMRMSLRWAERSRKAFDDQGNPNALFGIVQGSMYPAMREESLRELMAIGFDGIAIGGLSVGEPKHEMQRMLQVMQPMLPADKPHYLMGVGTPEDLVYGVAHGIDMFDCVMPTRNARNGWIFTRFGDIKIKNAKYRNDTRPLDETCQCYACRNFSRAYLHHLHRAGEILGARLNTVHNLHYYQQLMADMRQAIEADQFESFVATFHAERQRGVD

SEQ ID NO: 51750 - protein, 378 aa, Aquibacillus sp.
  misc_feature (1)..(378): tr|A0A516KH52|A0A516KH52_9BACI Queuine tRNA-ribosyltran sferase OS=Aquibacillus sp. TKL69 OX=2594883 GN=tgt PE= 3 SV=1
MPITYEHIKTCKQTGARLGIVHTPHGSFETPIFMPVGTLATVKTMSPEELEEIGAKIILSNTYHLWLRPGEDIIQEAGGLHSFMNWDGAILTDSGGFQVFSLSDLRQIEEEGVHFRNHISGEKLFLSPEKAMHIQNALGSDIMMAFDECPPFPATHEYMKSSVERTSRWAERCLQAHQNPSKQGLFGIVQGGEYEDLRRLSAQDLTSLDFSGYAVGGLSVGEPKEVMNRVLEFTTPLLPHDKPRYLMGVGSPDSLIDGAIRGIDMFDCVLPTRIARNGTCMTSNGRLVVRNAKYARDFGPLDEKCDCHVCRNYSRAYIRHLVKSNETFGLRLTTYHNLYFLLKLMEQVREAIRNDRLGDFREEFFEQYGFNRPDAKNF

SEQ ID NO: 51751 - protein, 409 aa, Aquicella lusitana
  misc_feature (1)..(409): tr|A0A370GC92|A0A370GC92_9COXI Queuine tRNA-ribosyltran sferase OS=Aquicella lusitana OX=254246 GN=C8D86_12031 PE=3 SV=1
MWVRACFTSYAGGRLPVVSAKLPAMKNSYHSELVKKHASLPARVMRFETPHGEVFTPSFMPVGTRAMLNYLTPADVEQNGSQIILGGNTYHMLCSPGMEVIEKAGGMHPFMGWHKAMLTDSGGFQVLSLSKKGTVCLIEEEGAVFKHPITGKIIHLNSHTSIQAQKIIGADIIMAFDQCTPETGGREAALAALDRTHRWLVASREEHEKNPYSAYGKKQALFGIIQGGSFRDLREQSTAFVLQQALDGIAIGGEVIGFDMPKTGEIIDWVRPMLPEDKIRYTMGVGLNPQDLIDVVAKGIDIFDCVAPTRNARHGTLYFGQIVEQNGWLRFESEGDNCRILIKKSQYARDENPILPGCACYTCQHFSRSYLHYLFKEGLIAYFHLASIHNVHVMQTVCTRMRELILSSG

SEQ ID NO: 51752 - protein, 384 aa, Aquicella siphonis
  misc_feature (1)..(384): tr|A0A5E4PE93|A0A5E4PE93_9COXI Queuine tRNA-ribosyltran sferase OS=Aquicella siphonis OX=254247 GN=tgt PE=3 SV= 1
MSNIFHSEVVKKHASLPARVMRMVTPHGEVLTPAFMPVGTRAMLNYLTPADLDLTGSEIILGGNTYHMLCTPGMETIEAVGGMHQFMGWHKAMLTDSGGFQVLSLSKKGTICIIDDHGAHFKHPITGKILHLNSQTSIQAQKIIGADIIMAFDQCTPETGGREAALAALDRTHRWLVLSKEEQLKNPHSAYGFRQALFGIIQGGSFRDLREQSTEFVLSQELDGLAIGGEVIGFDMPKTCEIIDWVRPMLPDDKVRYTMGVGLHPQDLIDVVAKGIDIFDCVAPTRNARHGTLYCGSIVERDGWLSFEGENGQSRILIKKSQYARDTSPVMPGCDCYTCGHFSRAYLHYLFKEGLIAYFHLSSIHNIHVMQKVCRRMRDLILAS

SEQ ID NO: 51753 - protein, 376 aa, Aquicoccus porphyridii
  misc_feature (1)..(376): tr|A0A5A9ZTH1|A0A5A9ZTH1_9RHOB Queuine tRNA-ribosyltran sferase OS=Aquicoccus porphyridii OX=1852029 GN=tgt PE= 3 SV=1
MTGRFEFKLLGRDGAARVGKIATPRGDIATPAFMPVGTAGTVKAMLPESVRATGADIVLGNTYHLMLRPGAERVARLGGLHRFMNWERPILTDSGGFQVMSLAGLRKLTEEGVTFKSHIDGARHHLTPERSMEIQRLLGSDIVMCFDECPALPADRGRIEESMRLSMRWAARSRDAFGDRPGHALFGIQQGGLERDLREESAEALKAIGFEGYAIGGLAVGEGQAAMFDVLDHAPGMLPEDRPRYLMGVGKPDDIVGAVKRGVDMMDCVLPSRSGRTGQVFTRRGVVNIKNARHADDPRPLDEACICPACRGYSRAYLHHVFRSKEIIASMLLTWHNLHYFQEIMAGMRGAIVEARFEAWEAEFHATRALGDIERI

SEQ ID NO: 51754 - protein, 375 aa, Aquicoccus sp.
  misc_feature (1)..(375): tr|A0A4U7J4D5|A0A4U7J4D5_9RHOB Queuine tRNA-ribosyltran sferase OS=Aquicoccus sp. SCR17 OX=2541728 GN=tgt PE=3 SV=1
MTRFAFTLQATDGRARTGVIDTPRGQIRTPAFMPVGTAATVKAMMPESVAATGADILLGNTYHLMLRPGAERIDRLGGLHRFMNWDKPILTDSGGFQVMSLADLRKLTETGVTFRSHIDGSKHELTPERSMEIQRLLGSDIVMAFDECPSLPAEESRVAESMRLSMRWAQRSRDAFGDRPGHALFGIQQGGVTPELREESAEKLKEIGFDGYAVGGLAVGEGQEAMFGVLDYAPGQLPADKPRYLMGVGKPDDILGAVKRGIDMMDCVLPSRSGRTGQAWTRRGQVNIKNARHADDPRPLDEHCTCPACRNYSRAYLHHVMRAGEMISGMLLTWHNLHYYQELMADIRGAIAAGEFAAFETEFHAQRAEGDIPPL

SEQ ID NO: 51755 - protein, 378 aa, Aquifex aeolicus
  misc_feature (1)..(378): sp|O67331|TGT_AQUAE Queuine tRNA-ribosyltransferase OS= Aquifex aeolicus (strain VF5) OX=224324 GN=tgt PE=3 SV= 1
MFKFHLITKDGKARRGRIYTPHGVIETPVFMPVGTQGTVKAMLHKLLDEIGTQIILGNTYHLYLRPGTEIIKKAGGLHRFISWNKPILTDSGGYQVFSLAKGKFGNRKAKVKVSDEGVEFQDHLQGDKHFFTPEKVVEIQEIFGSDIMMPLDECVEYPVDKNYAEKALKRTINWLERSIKAKKREDQVLFGIVQGAFWKDLRKKAVEETLKFDEFLFGYSIGGLSVGEPKEIMYGMTEVVCELLPEKKPRYLMGVGKPEDILEAVERGVDMFDCVVPTRNARTGTLYTSQGVVDIRHSKWKEDFSPLDPECDCYTCRNFSKAYLRHLFVAEEISAYVLNTIHNLRFYLKMMEEVRKAIEEKRFKELKEKYLQRVKNKL

SEQ ID NO: 51756 - protein, 378 aa, Aquifex sp.
  misc_feature (1)..(378): tr|A0A432PWS4|A0A432PWS4_9AQUI Queuine tRNA-ribosyltran sferase OS=Aquifex sp. OX=313370 GN=tgt PE=3 SV=1
MFKFHLIAKDGKARRGRIYTPHGVIETPVFMPVGTQGTVKAMLHKLLEEIGTQIILGNTYHLFLRPGTEIIKKAGGLHKFISWDKPILTDSGGYQVFSLAKGRFGNRKAKVKITEEGVEFQDHLQGDKHFFTPEKVIEIQEIFGSDIIMPLDECVEYPTTKEYAKQALERTIRWLDKSINAKKREDQVLFGIVQGAFWKDLRKEAVDKTLQFDEFLFGYSIGGLSVGEPKEIMYEMTEVVCDLLPENKPRYLMGVGKPEDILEAIERGVDMFDCVVPTRNARTGTLYTSQGVIDIRHAKWKEDFSTLDPECDCYTCRNFSKAYLRHLFTAEEISAYVLNTIHNLRFYLKMMEEVRRAIEEGNFKILKEKYLEKVKRKL

SEQ ID NO: 51757 - protein, 369 aa, Aquificaceae bacterium
  misc_feature (1)..(369): tr|A0A432F770|A0A432F770_9AQUI Queuine tRNA-ribosyltran sferase OS=Aquificaceae bacterium OX=2053503 GN=tgt PE= 3 SV=1
MKFDLYNTDNKARRGKITFSRGTIQTPAFMPVGTYGTVKSMTPEELKGLGAEIILGNTFHLMLRPGTEIIQKHGDLHDFMHWDKPILTDSGGFQVFSLAKMRKLTEEGALFNSPVNGEKVMLTPEYSMQIQRELGSDIVMIFDECTPYPATHTEARDSMELSLRWAKRSKIAHADNPAALFGIVQGGMYDDLRQKSAEGLREIDFDGYAIGGLSVGEPKDERDQVLDSTTPLLPEDKPRYLMGVGKPEDIVEAVKRGIDMFDCVIPTRNARNGFLFTHNGTVKIRNSKHQNDTNPIDKDCGCYTCQNYSRAYLRHLDKCKEMLGAHLNTIHNLYYYQELMHNIRQAIEENRFEAFEKAFYAKRERAEGI

SEQ ID NO: 51758 - protein, 384 aa, Aquificaceae bacterium
  misc_feature (1)..(384): tr|A0A432F6X7|A0A432F6X7_9AQUI Queuine tRNA-ribosyltran sferase OS=Aquificaceae bacterium OX=2053503 GN=tgt PE= 3 SV=1
MAVSYDPKLFEFKIVASDGNARAGILKTPHGEIETPVYMPVGTLGTVKAVTHREVEEIGYNIILGNTYHLYLRPGLEVIREAGGLHKFISWKGAILTDSGGFQVFSLARKKGQASVEVTEEGVIFRDHLAGDLHLFTPEFVAYAEEVIGADIIMPLDVVVPYPTSYENANEALNRTIRWLKRFIDARTRQDQALFGIVQGAFWKDLRRESALKTLEYDQYLFGYAIGGLSVGETAEIMYEMTEVVTDLLPWNKPRYLMGVGKPENIVESVERGIDMFDCVFPTRVARTGTLYTTYGKLNIGNKRFAKDFSPPDPECDCYTCRNYSRAYLRHLFNVDEITAYILNTIHNLSFYKRLMKQMREAIIRGEFQKWKKSFYEKYFSQKF

SEQ ID NO: 51759 - protein, 371 aa, Aquificae bacterium
  misc_feature (1)..(371): tr|A0A3M0WIZ9|A0A3M0WIZ9_9BACT Queuine tRNA-ribosyltran sferase OS=Aquificae bacterium OX=2202151 GN=tgt PE=3 S V=1
MFKFKLIKKDGNARLGKLYTKHGEIETPVFMPVGTQGTVKAITKQQLLETKPQIILGNTYHLYLRPGIEVLKHFKGLHNFMNWEKPILTDSGGFQVFSLANNRDREKGHKPEVVLSEEGVKFKSHLDGSWHFFTPEFVVEIQEIVGSDIMMPLDVCPPYPVSYEYAKDAVEKTIRWLKRSKKAKKNSWQALFGIIQGSTYEDLRKESALMTVELDMDGYSIGGLSVGEPHEYMYAMTEVVIPLIPENKPRYLMGVGTPENIIESVDRGVDMFDCVMPTRNARNGTLFTHFGKVNIKSAKYKLSEEPIDGICDCYTCKNFSKGYIRHLYHAQEITAMILGTIHNLRFYNKLMEDIRNSIKNDKFKEYKNKKS

SEQ ID NO: 51760 - protein, 378 aa, Aquificae bacterium
  misc_feature (1)..(378): tr|A0A3M0WLP6|A0A3M0WLP6_9BACT Queuine tRNA-ribosyltran sferase OS=Aquificae bacterium OX=2202151 GN=tgt PE=3 S V=1
MFRFELIDRDSNARLGKIYTKHGEIETPVFMPVGTQGTVKAITKEQLLSTNPQIILGNTYHLYLRPGTEVLSFFGGLHRFMNWEKPILTDSGGFQVFSLAQGKNRSGKHKAEVILTEEGVKFKSHLDGSWHFFTPELVVEIQEIIGSDIMMPLDVCPPYPVSHTTAKDAVDKTIRWLNRSKKAKKNHWQALFGIVQGSVYEDLRKESALKTVELDMDGYSIGGLSVGEPSQEMYAMTEIVTELLPENKPRYLMGVGTPENIIESVDRGVDMFDCVMPTRNARNGTLFTTYGRINIKAAKHKFSDEPVDSECDCYTCKNFSRGYLRHLFNAEEITGMTLATIHNLRFYNRLMENIRKSIKEKHFKEFKKVFYEKYNSDR

SEQ ID NO: 51761 - protein, 376 aa, Aquiflexum balticum
  misc_feature (1)..(376): tr|A0A1W2H3L4|A0A1W2H3L4_9BACT Queuine tRNA-ribosyltran sferase OS=Aquiflexum balticum DSM 16537 OX=758820 GN=t gt PE=3 SV=1
MKFKLEVTDPKSKARAGMLTTAHGEIETPIFMPVGTAGSVKAVHQRELSDDIHAQIILGNTYHLYLRPGLDVLEKAGGLHKFNGWGKPILTDSGGYQVFSLANNRKLTEEGAIFKSHIDGSKHVFSPEGVMDIQRIIGADIIMAFDECPPYPCDYEYARKSMELTHRWLQRCIDRFDSTKGKYGYEQTLFPIVQGSVFKDLRKQSAEFVASCERDGNAIGGLSVGEPAEMMYEMTEMVTDILPKDKPRYLMGVGTPANILEAIALGVDMFDCVMPTRNARNGMLFTSEGIINIRNEKWKEDFSPIDPYINSYVSTFYSKAYLRHLVISKEILAAQIASIHNLSFYLWLVGQAREQIKIGKYADWKNLMVEKVSRRL

SEQ ID NO: 51762 - protein, 376 aa, Aquimarina aggregata
  misc_feature (1)..(376): tr|A0A162X6J6|A0A162X6J6_9FLAO Queuine tRNA-ribosyltran sferase OS=Aquimarina aggregata OX=1642818 GN=tgt PE=3 SV=1
MQFDLLSKDPQSKARAGKITTDHGVIETPIFMPVGTVATVKGVHQRELKNDINPDIILGNTYHLYLRPKTTILEKAGGLHKFMNWDRNILTDSGGYQVYSLSANRKIKEEGVKFKSHIDGSYHVFTPENVMEIQRTIGADIIMAFDECTPYPCDYNYAKRSMHMTHRWLDRCMQHLEKIPVKYGYDQAFFPIVQGSTYKDLRKQSAEYIANAGAVGNAIGGLSVGEPAEEMYAMTEVVTDILPEDKPRYLMGVGTPINILENIALGVDMFDCVMPTRNARNGMLFTAHGTINMKNKKWEDDFSPIDEMGITFVDTEYSKAYLKHLFSVNELLGKQIATIHNLGFYMWLVREARKHILAGDFYSWKNMMVKQMDKRL

SEQ ID NO: 51763 - protein, 376 aa, Aquimarina algiphila
  misc_feature (1)..(376): tr|A0A554VKQ0|A0A554VKQ0_9FLAO Queuine tRNA-ribosyltran sferase OS=Aquimarina algiphila OX=2047982 GN=tgt PE=3 SV=1
MQFDLLSKDSQSKARAGKITTDHGIIETPIFMPVGTVATVKGVHQRELKNDINPDIILGNTYHLYLRPQTPILEKAGGLHKFMNWDRNILTDSGGYQVYSLSANRKIKEEGVKFKSHIDGSYHVFTPENVMEIQRTIGADIIMAFDECTPYPCDYRYAKRSMHMTHRWLDRCMQHLEKIPVKYGYDQAFFPIVQGSTYKDLREQSAEYIANAGAVGNAIGGLSVGEPAEEMYAMTEVVTNILPEDKPRYLMGVGTPINILENIALGVDMFDCVMPTRNARNGMLFAAHGTINIKNKKWEDDFSAIDEMGITFVDTEYSKAYLRHLFSVNELLGKQIATIHNLGFYLWLVREARKHILAGDFNSWKNMMVKQMDKRL

SEQ ID NO: 51764 - protein, 376 aa, Aquimarina amphilecti
  misc_feature (1)..(376): tr|A0A1H7TJN6|A0A1H7TJN6_9FLAO Queuine tRNA-ribosyltran sferase OS=Aquimarina amphilecti OX=1038014 GN=tgt PE=3 SV=1
MQFDLLSTDPESKARAGKITTDHGVIETPIFMPVGTVATVKGVHQRELKNDINPDIILGNTYHLYLRPQTPILEKAGGLHKFMNWDRNILTDSGGYQVYSLSANRKIKEEGVKFKSHIDGSYHVFTPENVMEIQRTIGADIIMAFDECTPYPCDYRYAKRSMHMTHRWLDRCMQHLEKVPVKYGYDQTFFPIVQGSTYKDLRRQSAEYIANAGAEGNAIGGLSVGEPAEEMYAMTEVVTEILPEDKPRYLMGVGTPINILENIALGIDMFDCVMPTRNGRNGMLFTAHGTINIKNKKWEDDFSPIDEMAITYVDTEYSKAYLKHLFSVNEMLGRQIATIHNLGFYLWLTREARKHILAGDFYSWKNMMVKQMDKRL

SEQ ID NO: 51765 - protein, 376 aa, Aquimarina atlantica
  misc_feature (1)..(376): tr|A0A023BTY0|A0A023BTY0_9FLAO Queuine tRNA-ribosyltran sferase OS=Aquimarina atlantica OX=1317122 GN=tgt PE=3 SV=1
MQFDLLSKDSLSKARAGKISTDHGVIETPIFMPVGTVATVKGVHQRELKNDINPDIILGNTYHLYLRPQTPILEKAGGLHKFMNWDRNILTDSGGYQVYSLSANRKIKEEGVKFKSHIDGSYHIFTPENVMEIQRTIGADIIMAFDECTPYPCDYRYAKRSMHMTHRWLDRCMQHLEKIPVKYGYDQAFFPIVQGSTYKDLRKQSAEYIANAGAVGNAIGGLSVGEPAEEMYAMTEVVTDILPEDKPRYLMGVGTPINILENIALGVDMFDCVMPTRNARNGMLFTAHGTINIKNKKWEDDFSAIDEMGITFVDTEYSKAYLRHLFSVNELLGKQIATIHNLGFYLWLVREARKHILAGDFNSWKNMMVKQMDKRL

SEQ ID NO: 51766 - protein, 376 aa, Aquimarina brevivitae
  misc_feature (1)..(376): tr|A0A4Q7P0B1|A0A4Q7P0B1_9FLAO Queuine tRNA-ribosyltran sferase OS=Aquimarina brevivitae OX=323412 GN=tgt PE=3 SV=1
MKFEIKSKDPLTKARAGTITTDHGTIETPIFMPVGTVASVKGVHQRELKNDINPDIILGNTYHLYLRPQTTILEKAGGLHKFMNWDRNILTDSGGYQVYSLSANRKIKEEGVKFKSHIDGSYHVFTPENVMEIQRTIGADIIMAFDECTPYPCDFKYAKRSMHMTHRWLERCLQHLKKVPVKYGYEQTFFPIVQGSTYKELRKQSAEYIAGVGAEGNAIGGLSVGEPAEEMYAMTEVVTEILPEDKPRYLMGVGTPINILENIALGVDMFDCVMPTRNARNGMLFTAYGTINIKNKKWEDDFSPIDEMGITFVDTDYSKAYLRHLFTVNELLGKQIATIHNLGFYLWLVREARKHILAGDFESWKNKMVKQMDRRL

SEQ ID NO: 51767 - protein, 376 aa, Aquimarina sp.; identical to SEQ ID NO: 51762
  misc_feature (1)..(376): tr|A0A3A9VBU5|A0A3A9VBU5_9FLAO Queuine tRNA-ribosyltran sferase OS=Aquimarina sp. AD10 OX=1714849 GN=tgt PE=3 S V=1

SEQ ID NO: 51768 - protein, 376 aa, Aquimarina sp.
  misc_feature (1)..(376): tr|A0A3A9VXF0|A0A3A9VXF0_9FLAO Queuine tRNA-ribosyltran sferase OS=Aquimarina sp. BL5 OX=1714860 GN=tgt PE=3 SV =1
MQFDLLSKDPQSKARAGKITTDHGAIETPIFMPVGTVGTVKGVHQRELKNDINPDIILGNTYHLYLRPQTPILEKAGGLHKFMNWDRNILTDSGGYQVYSLSANRKIKEEGVKFKSHIDGSYHVFTPENVMEIQRTIGADIIMAFDECTPYPCDYRYAKRSMHMTHRWLDRCMQHLEKIPVKYGYDQTFFPIVQGSTYKDLRRQSAEYIANAGAEGNAIGGLSVGEPAEEMYAMTEVVTEILPEDKPRYLMGVGTPINILENIALGVDLFDCVMPTRNGRNGMLFTAHGTINIKNKKWEDDFSPIDEMGITYVDTEYSKAYLKHLFTVNELLGKQIATIHNLGFYLWLTREARKHILAGDFNSWKNMMVKQMDKRL

SEQ ID NO: 51769 - protein, 376 aa, Aquimarina spongiae
  misc_feature (1)..(376): tr|A0A1M6D1E1|A0A1M6D1E1_9FLAO Queuine tRNA-ribosyltran sferase OS=Aquimarina spongiae OX=570521 GN=tgt PE=3 SV =1
MQFDLLSKDPQSKARAGKITTDHGVIETPIFMPVGTVASVKGVHQRELKNDINPDIILGNTYHLYLRPQTPILEKAGGLHKFMNWDRNILTDSGGYQVYSLSANRKIKEEGVKFKSHIDGSYHVFTPENVMEIQRTIGADIIMAFDECTPYPCDYQYAKRSMHMTHRWLDRCMQHLEKIPVKYGYEQAFFPIVQGSTYKDLRKQSAEYIANAGAVGNAIGGLSVGEPAEEMYAMTEVVTDILPEDKPRYLMGVGTPINILENIALGVDMFDCVMPTRNGRNGMLFTAHGTINIKNKKWEDDFSPIDEMGITFVDTEYSKAYLRHLFTVNEMLGRQIATIHNLGFYLWLVREARKHILAGDFYSWKNMMVKQMDKRL

SEQ ID NO: 51770 - protein, 380 aa, Aquimixticola soesokkakensis
  misc_feature (1)..(380): tr|A0A1Y5SMQ3|A0A1Y5SMQ3_9RHOB Queuine tRNA-ribosyltran sferase OS=Aquimixticola soesokkakensis OX=1519096 GN=t gt PE=3 SV=1
MTQSQTQRFSFSLEATDGKARSGRISTPRGEIRTPAFMPVGTAATVKAMMPESVAATGADILLGNTYHLMLRPTAERIAALGGLHKFMNWDKPILTDSGGFQVMSLAGLRKLSEEGVRFASHVDGSKHMLSPERSMEIQKLLGSDIVMAFDECPALPATEAEVAKSMQLSMRWAQRSRDAFGDRPGHALFGIQQGGVTQDLRAQSAEALRAIEFDGYAVGGLAVGEGQEAMFGVLDYAPDMLPVQKPRYLMGVGKPDDIVGAVKRGIDMMDCVLPSRSGRTAQGWTRRGQVNLRNARHQDDPRPLDADCTCPCCAKYSRAYLHHVFRAKEMIGGMLLTWHNLHYFQELMAGMRAAIASGTFDTWEAAFQIEFASGDIERL

SEQ ID NO: 51771 - protein, 373 aa, Aquimonas voraii
  misc_feature (1)..(373): tr|A0A1G6RPY9|A0A1G6RPY9_9GAMM Queuine tRNA-ribosyltran sferase OS=Aquimonas voraii OX=265719 GN=tgt PE=3 SV=1
MSRLHFDLLTTDGAARRGRLTFPRGTVETPAFMPVGTYGTVKAMFPEDLRALGAEIILGNTFHLYLRPGLEVIRAHEGLHGFARWDGPILTDSGGFQVFSLAHRRKITEEGVTFASPVDGSKVFLSPEVSMEIQRVLDSDVVMIFDECTPYPATEKQAATSMQLSLRWAERSKRAHEGNDAALFGIVQGGVYHDLRSVSARGLIDIGFDGYAVGGLAVGEPEAERNAMLEHTCPQLPADRPRYLMGVGRPEDIVEAVARGIDMFDCVMPTRNARNGHYFTKHGAIRIRNAKYEKDTRPIEEGCGCYACVRGFSRAYLRHLERCNEILGAMLATQHNLFHYQALMRDIRAAIDAGRFEDFRAEFYRLRQTPAPE

SEQ ID NO: 51772 - protein, 379 aa, Aquisalibacillus elongatus
  misc_feature (1)..(379): tr|A0A3N5BDK9|A0A3N5BDK9_9BACI Queuine tRNA-ribosyltran sferase OS=Aquisalibacillus elongatus OX=485577 GN=tgt PE=3 SV=1
MTAVSYELIKTCKQTGARLGRVTTPHGSFETPVFMPVGTLATVKTMAPEELKDIGANIILSNTYHLWLRPGEDIVEEAGGLHQFMNWDGSILTDSGGFQVFSLSDMREIKEEGVHFRNHINGEKLFLSPEGAMQIQNSLGSDIMMAFDECPPYPASHEYMKSSVERTSRWAERCLEAHQKPDQQGLFGIIQGGEYEDLRKQSARDLVSMDFPGYAIGGLSVGEPKDVMNRVLEFTSPLLPQNKPRYLMGVGSPDSLVDGAIRGVDMFDCVLPTRIARNGTCMTSNGRVVVRNAKFARDFTPLDENCDCYTCRNYTKAYIRHLIKTNETLGIRLTTYHNLYFLVKLMENVREAIKEDRLGDFRDQFFDQYGFNKPNAKNF

SEQ ID NO: 51773 - protein, 371 aa, Aquisalimonas asiatica
  misc_feature (1)..(371): tr|A0A1H8PLN5|A0A1H8PLN5_9GAMM Queuine tRNA-ribosyltran sferase OS=Aquisalimonas asiatica OX=406100 GN=tgt PE=3 SV=1
MMEFQRLSSDGAARRGRLTFPRGTVETPTFMPVGTYGTVKAMTPGELKDLGAEIILGNTFHLMLRPGTEIIEAHGDLHDFTQWHGPILTDSGGFQVFSLGALRKIREEGVTFQSPVDGSRVFMGPEESMAVQRALGSDMVMIFDECTPHPATETEARQSMELSLRWAERSRKAHGDNPNALFGIVQGGMYDHLRSRSVQGLRSIGFEGYAVGGLAVGETEEERNRVLEHLEPELPAGCPRYLMGVGRPQDIVEAVRRGIDMFDCVMPTRNARNGYLFTRGGMLRIRNSRFARDTRPIEPGCECHACQYYSRAYLKHLDRCNEILGKRLATIHNLAFYQRLMAELRAAIEAGRLDAYVDDFYARQAAGIDAL

SEQ ID NO: 51774 - protein, 373 aa, Aquisphaera giovannonii
  misc_feature (1)..(373): tr|A0A5B9W6Q1|A0A5B9W6Q1_9BACT Queuine tRNA-ribosyltran sferase OS=Aquisphaera giovannonii OX=406548 GN=tgt PE= 3 SV=1
MVSTRPVRFTTLSRDPATSARVGRLETPHGALETPAFMPVGTQATVKGLTPDLVRESGTRMLLANTYHLALRPGEETVRALGGLHAFMGWDGPILTDSGGFQVFSMADRSKITDRGVSFRSHLDGRLLELTPERAVAIQEALGPDVAMCLDHCPALPASREDIAAAVDRTIAWAGRCKRAHSRPDQSLFGIVQGGSVADLRGRCAEALVAMDFDGYAVGGVSVGESREEVRKALEVTTHLLPADRPRYLMGVGRPQDILAAVATGIDLFDCVLPTRNGRNATCFTARGPVKLRNAAHARDPGPIEEGCPCLACRRFSRAYLRHLFNAREMLGPILATIHNLTYLHRLTAAIREAIRAGRLVQLHREVLEALGP

SEQ ID NO: 51775 - protein, 371 aa, Aquitalea magnusonii
  misc_feature (1)..(371): tr|A0A318JB23|A0A318JB23_9NEIS Queuine tRNA-ribosyltran sferase OS=Aquitalea magnusonii OX=332411 GN=tgt PE=3 S V=1
MLKFTVHKTSGGARRGTLQLNHGTVETPVFQPVGTYGSVKAMSPVELNDIGAQIILGNTFHLWLRPGLEVIEQFGGLHDFIGWDKPILTDSGGFQVFSLSDMRKLTEEGCTFQSPINGDKLFLSPEISMKIQTVLNSDIVMQLDECTPGQVDHSTAQKSLQMSLRWAERSRRAFDDLKNPNALFGIVQGNLYTDLRQESLEGLLQVGFDGYAIGGLSVGEPKPEMYRMLNELNGMLPADKPHYLMGVGTPEDLVHGVANGIDMFDCVMPTRNARNGWIFTQHGDIKIKNARYKDDKKPLDEECSCYACRNFSRAYLHHLHRVGEILGARLNTIHNLHYYQELMREMRKAIEEDRFEDFRLEFADKRARGVS

SEQ ID NO: 51776 - protein, 371 aa, Aquitalea magnusonii
  misc_feature (1)..(371): tr|A0A0F3KR74|A0A0F3KR74_9NEIS Queuine tRNA-ribosyltran sferase OS=Aquitalea magnusonii OX=332411 GN=tgt PE=3 S V=1
MLKFTVHKTSGGARRGTLELNHGTVETPVFQPVGTYGSVKAMSPVELNDIGAQIILGNTFHLWLRPGLEVIEQFGGLHEFIGWDKPILTDSGGFQVFSLADMRKLTEEGCTFQSPINGNKLFLSPEISMKIQTVLNSDIVMQLDECTPGQVDHATAQKSLQMSLRWAERSRRAFDDLKNPNALFGIVQGNLYTDLRQESLEGLLQVGFDGYAIGGLSVGEPKPEMYRMLNELNGMLPADKPHYLMGVGTPEDLVHGVANGIDMFDCVMPTRNARNGWIFTQYGDVKIKNARYKDDKKPLDEECGCYACRNFSRAYLHHLHRVGEILGARLNTIHNLYYYQELMREMRKAIEEDRFEDFRLEFAAKRARGVA

SEQ ID NO: 51777 - protein, 371 aa, Aquitalea sp.
  misc_feature (1)..(371): tr|A0A454JHE9|A0A454JHE9_9NEIS Queuine tRNA-ribosyltran sferase OS=Aquitalea sp. MWU14-2217 OX=2480983 GN=tgt P E=3 SV=1
MLKFTVHKTSGGARRGTLELNHGSVETPVFQPVGTYGSVKAMSPVELNDIGAQIILGNTFHLWLRPGLEVIEQFGGLHDFIGWDKPILTDSGGFQVFSLSDMRKLTEEGCTFQSPINGDKLFLSPEISMKIQTVLNSDIVMQLDECTPGQVDHATAQKSLQMSLRWAERSRRAFDDLKNPNALFGIVQGNLYTDLRQESLEGLLQVGFDGYAIGGLSVGEPKPEMYRMLNELNGMLPADKPHYLMGVGTPEDLVHGVANGIDMFDCVMPTRNARNGWIFTQHGDIKIKNARYKDDKKPLDEECACYACRNFSRAYLHHLHRVGEILGARLNTIHNLHYYQELMREMRKAIEEDRFEDFRLEFADKRARGVS

SEQ ID NO: 51778 - protein, 371 aa, Aquitalea sp.
  misc_feature (1)..(371): tr|A0A3N7EPH1|A0A3N7EPH1_9NEIS Queuine tRNA-ribosyltran sferase OS=Aquitalea sp. FJL05 OX=2153366 GN=tgt PE=3 S V=1
MLKFTVHKTSGGARRGTLELNHGTVETPVFQPVGTYGSVKAMSPVELNDIGAQIILGNTFHLWLRPGLEVIEQFGGLHDFIGWDKPILTDSGGFQVFSLSDMRKLTEEGCTFQSPINGDKLFLSPEISMKIQTVLNSDIVMQLDECTPGQVDHATAQKSLQMSLRWAERSRRAFDDLKNPNALFGIVQGNLYTDLRQESLEGLLQVGFDGYAIGGLSVGEPKPEMYRMLNELNGMLPADKPHYLMGVGTPEDLVHGVANGIDMFDCVMPTRNARNGWIFTQHGDIKIKNARYKDDKKPLDEECACYACRNFSRAYLHHLHRVGEILGARLNTIHNLHYYQELMREMRKAIEEDRFEDFRLEFADKRARGVS

SEQ ID NO: 51779 - protein, 379 aa, Arachidicoccus rhizosphaerae
  misc_feature (1)..(379): tr|A0A1H3VKI4|A0A1H3VKI4_9BACT Queuine tRNA-ribosyltran sferase OS=Arachidicoccus rhizosphaerae OX=551991 GN=tg t PE=3 SV=1
MATLQYKLAKKDSASAARAGVITTDHGQILTPIFMPVGTVGSVKAVNQQQLEHIVKAQIILGNTYHLYLRPGTNILEKAGGLHQFNGWHHPILTDSGGYQVFSLAGTRKIKEEGVLFQSHIDGSRHLFSPEKVMDIQRSIGADIIMAFDECPPAGCEYSYALKSMELTHRWLDRCITRLAETPDKYGYTQNLFPIVQGSTYKDLRTASAEYIASKGAAGNAIGGLSVGEPEEEMYRFTDLCCSILPEDKPRYLMGVGTPWNILEGISLGVDMFDCVMPTRNGRNGMLFTTNGVINIKNKKWEADFSAIDDGFSCETSNYYSKAYLRHLFVAKELLAGQLASLHNLAFYLWLVGQAREHILAGDFTSWKEQMIPRLKTRL

SEQ ID NO: 51780 - protein, 376 aa, Arachidicoccus sp.
  misc_feature (1)..(376): tr|A0A386HU24|A0A386HU24_9BACT Queuine tRNA-ribosyltran sferase OS=Arachidicoccus sp. KIS59-12 OX=2341117 GN=tg t PE=3 SV=1
MQFHLQKNDNQTKARAGKITTDHGEILTPIFMPVGTVGSVKAVNQQQLKSIVKAQIILGNTYHLYLRPGIEILEQAGGLHRFNGWDRPILTDSGGYQVFSLAGTRKIKEEGVIFQSHIDGSRHLFSPENVMDTQRSIGADIIMAFDECPPAGCEYIYAKKSMQLTHRWLDRCIQQLAETEDKYGYTQNLFPIVQGSTFKDLRTESAQYIASKDAAGNAIGGLSVGEPEDKMYEFTELCCDNLPTDKPRYLMGVGTPWNILEGIALGVDMFDCVMPTRNGRNGMLFTTQGVINIRNKKWATDFSSIDEGFDCETSNFYSKAYLRHLFISGELLGGQLASLQNLSFYLWLVENARKHIIAGDFKSWKEAMVVKLKQRL

SEQ ID NO: 51781 - protein, 376 aa, Arachidicoccus sp.
  misc_feature (1)..(376): tr|A0A191TPS3|A0A191TPS3_9BACT Queuine tRNA-ribosyltran sferase OS=Arachidicoccus sp. BS20 OX=1850526 GN=tgt PE =3 SV=1
MQFSLRSKDNHTKARAGKITTDHGEILTPIFMPVGTVGSVKAVNQQQLKSIVAAQIILGNTYHLYLRPGTDVLEQAGGLHKFNGWDKPILTDSGGYQVFSLSGTRKIKEEGVIFQSHIDGSRHLFSPEKVMDIERSIGADIIMAFDECPPAGCEYIYAKKSMELTHRWLDRCVARVNETEGKYGYTQNLFPIVQGNTFKDLRTASAEYIASKNAVGNAIGGLSVGEPEDVMYEFTALCCDILPQAKPRYLMGVGTPWNILEGISLGVDMFDCVMPTRNGRNGMLFTSQGVINIKNKKWATDFSPIDDGFVCETSNYYSKAYLRHLFVSQELLGLQLASIHNLAFYLWLVGEARKHILEGDFASWKNEMVVRLKQRL

SEQ ID NO: 51782 - protein, 382 aa, Arboricoccus pini
  misc_feature (1)..(382): tr|A0A212R6F3|A0A212R6F3_9PROT Queuine tRNA-ribosyltran sferase OS=Arboricoccus pini OX=1963835 GN=tgt PE=3 SV= 1
MPEFRFELMAVDGAARRGRLHTAWGVIDTPTFMPVGTAATVKAMTFEMVRQTGAQIVLGNTYHLMLRPGAERIARLGGLRRFMGWDGPILTDSGGFQVMSLAARRKLDEKGVVFSSHIDGSRHELTPERSIEIQHLLDATITMQLDECIRLPSERHETERAMELSLRWAERSKQAFQPRQGYGLFGIVQGGTDLELRARSAKGLAAIGFDGYAVGGLAVGEPQALMFETLEGTCPHLPTTHPRYLMGVGKPADMAGAVLRGIDMFDCVMPTRSGRTAQAFTKRGPLNMRNARHADDPRPLDPEADCPATRDYSRAYLHHLVKSEEILGATLLSWNNVWYYQEVMRGLRQAIEDGRSQQFVADMLASEAAGDIPPLPIQKDAR

SEQ ID NO: 51783 - protein, 407 aa, Arcanobacterium haemolyticum
  misc_feature (1)..(407): tr|D7BLD5|D7BLD5_ARCHD Queuine tRNA-ribosyltransferase OS=Arcanobacterium haemolyticum (strain ATCC 9345 / DSM 20595 / NBRC 15585 / NCTC 8452 / 11018) OX=644284 GN=t gt PE=3 SV=1
MSFSLDTRLDGQLGRTGTIHTPHGDIQTPAFIPVATKATVKSVLPETMREIGAQALLSNAYHLYLQPGSDVVDAAGGVAAFENWHGPTFTDSGGFQVLSLGSGFKKVLSEEFNGKAHVDGQVATNKERLANVDDDGVWFRSHLNGSKHRFTPEVSMRIQHELGADIIFAFDELTTLLNSRGYQEEALERTRLWAERCLRAHKELTEERADKPYQQLFGVIQGAQYEDLRRKAARDLGSMEIDGQRFDGFGVGGALEKENLGTIVRWVNEELPEDRARHLLGISEPDDLFVGVENGVDTFDCVNPSRVARNAAIYSPDGRFNANRAQYKRDFSPLVEGCECYTCTHYTRAYIHHLFKAKEMVVNTLTTIHNEHFTIKLVDDIRAHMKAGTYWEFKEETLGRFYGTKNK

SEQ ID NO: 51784 - protein, 406 aa, Arcanobacterium phocae
  misc_feature (1)..(406): tr|A0A1H2LCF1|A0A1H2LCF1_9ACTO Queuine tRNA-ribosyltran sferase OS=Arcanobacterium phocae OX=131112 GN=tgt PE=3 SV=1
MFDIKTRLEGHLGRTGTIHTPHGDIQTPAFIPVATKATVKAVLPETMREIGAQALLSNAYHLYLQPGSDIVDEAGGVAAFENWHGPTFTDSGGFQVLSLGSGFKKVLSEEFNGKAHVDGQVAGKKERLANVDDDGVWFRSHLNGSKHRFTPEVSMRIQHELGADIIFAFDELTTLLNSRGYQEEALERTRLWAQRCLRAHKQLTEEREGKPYQQLFGVIQGAQYEDLRRKAARDLGNMEIDGQRFDGFGVGGALEKENLGTIVGWVNEELPEDRARHLLGISEPDDLFVGVENGIDTFDCVNPSRVARNAAIYSPDGRFNVNRARHRRDFTPLVDGCECYTCTHYTKAYLHHLFKAKEMVVNTLTTIHNEYFTIKLVDDIRHHMEAGTYWEFKEETLGRFYDKRDI

SEQ ID NO: 51785 - protein, 409 aa, Arcanobacterium sp.
  misc_feature (1)..(409): tr|A0A095X7Q2|A0A095X7Q2_9ACTO Queuine tRNA-ribosyltran sferase OS=Arcanobacterium sp. S3PF19 OX=1219585 GN=tgt PE=3 SV=1
MTFEIQKRLVSRTGHLGRAGVIHTPHGDILTPAFIPVGTKASVKAVLPESIAQTGAQAVLANAYHLYLQPGSDVLDEAGGLGKFMNWQRPTYTDSGGFQVMSLGSGFKKILSQEFAGKPADDNAVARGKERLANVDDDGVWFRSHLNGVRHRFTPEISMRIQHELGADIIFAFDELTTLMNTRAYQEESLERTRRWAQRCLRAHKELTHSRADKPYQQLFGVIQGAQYEDLRRKAARDLGSMEIDGQQFDGFGIGGALEKYRLGTIVGWVCEELPENRARHLLGISEPDDLFRAVENGADTFDCVNPSRVARNGAIYSPDGRFNVTRAEFKRSFTPVVEGCECYTCTHYTKAYLHHGFKAKEMITYTLATIHNEYFTVQLAEGIRKAILEDRYEEFREETLGRFYAKKR

SEQ ID NO: 51786 - protein, 409 aa, Arcanobacterium sp.
  misc_feature (1)..(409): tr|A0A4Q9UZ28|A0A4Q9UZ28_9ACTO Queuine tRNA-ribosyltran sferase OS=Arcanobacterium sp. C605018/01/1 OX=2529275 GN=tgt PE=3 SV=1
MTFEIQQRLETSAGKALGRTGVIHTPHGDIQTPAFIPVGTKATVKAVLPDSVKALGAQAVLANAYHLYLQPGSDVLDEAGGLAAFMNWGGPTYTDSGGFQVMSLGSGFKKVLSQEFSGKTVADDAVAGKRERLANVDDDGVWFRSHLNGTKHRFTPEISMRIQHELGADIIFAFDELTTLLNSRAYQEESLERTRLWAQRCLRAHKQLTEEREGKAYQQLFGVIQGAQYEDLRRKAARDLGAMEIDGQCFDGFGIGGALEKENLGTIVGWVCEELPENRARHLLGISEPDDFFRAIESGADTFDCVNPSRVARNAAIYSPDGRFNITRAQFKRDFSPVVEGCECYTCTHYSKAYLHHTFKAKEMISSTLATIHNEYFTVKLVDDIRKAINEGYYEAFKAETLGRFYSQN

SEQ ID NO: 51787 - protein, 388 aa, Archangium gephyra
  misc_feature (1)..(388): tr|A0A2W5TFL9|A0A2W5TFL9_9DELT Queuine tRNA-ribosyltran sferase OS=Archangium gephyra OX=48 GN=tgt PE=3 SV=1
MSLPTPDKRGDQRVEPSTVRFELLHTCAQTGARRGRVHTPHGTIETPVFMPVGTAGSVKAIAPDDLHTLDAKIILGNTYHLMLRPGEQLVGDLGGLHKFISWDRAMLTDSGGFQVYSLSEKRKITEEGATFQSHLDGSKHVLTPERSIEIQEVLGADIIMAFDECPPALSERSYMEPSMARTTRWLSRCIKAWSRQRSSLFGIVQGGLYEDLRKRHAEEICAMDLPGYALGGFAVGEEPAQMHAGVAFSAPLLPKDKPRYLMGVGTPLDLVTCVGHGIDMFDCVLPTRSARNALLFTSEGKLTIKNARYARDERPLDPRCSCYTCRTFSRAYLRHLFVAQELVAMRLNTLHNLHFFLNLMKEARVAIEQDRYGDFLREFHARPQTPPE

SEQ ID NO: 51788 - protein, 392 aa, Archangium gephyra
  misc_feature (1)..(392): tr|A0A0G2ZT66|A0A0G2ZT66_9DELT Queuine tRNA-ribosyltran sferase OS=Archangium gephyra OX=48 GN=tgt PE=3 SV=1
MAVRFELVTTDPTGARAGVLHTRRGSIPTPVFMPVGTHASFRHLGMEEVKATGAKIILSNTYHLMLKPGIDVFKRFGGIHPFMQWDGAVLTDSGGFQIFSLPEDRLITEKGAHFRSFHDNSRQLLSPESSIAMQQAINSEIMMVLDVCIDSRTDEAGTREAMERTHRWALRSLAAKNQVDTGQALFAIVQGGVHPNLRDESAAFLTQHPFDGFAIGGLAVGETNEERKAMTARAAASLPQDKPRYLMGVGTPTDLLEAVLRGVDMFDCIIPTKMAQQGYAYTFQGLVRITRQVFRLSDEPLDPTCDCPVCKRFSRGYLQHLMSGKHHIGSRMLSVHNVHHYQQLTWKMRDAIVRGSYAQAYRELKQAVATPKDLKDAKLEVGPGAVTLKEVG

SEQ ID NO: 51789 - protein, 394 aa, Archangium sp.
  misc_feature (1)..(394): tr|A0A1Q3HFL0|A0A1Q3HFL0_9DELT Queuine tRNA-ribosyltran sferase OS=Archangium sp. Cb G35 OX=1920190 GN=tgt PE=3 SV=1
MGEPRKEKGDTRVPPSLVRYELLHEDASGSRARRGRLHTPHGLIETPIFMPVGTVGSVKGVGPDDLLTLDAQIILGNTYHLMLRPGDDLVGEMGGLHRFISWDRPMLTDSGGFQVFSLAEKRKITEEGAAFQSHLDGRHILLTPERSIEIQETLGADIIMAFDECPPSTEDRAYLEKSLARTTRWLQRCVKAWSRERSSLFGIVQGGLDKNLRKSHAEDVCAVDLPGYALGGYSVGETPEAMHEGVAFSAPLLPRDKPRYLMGVGTPVDLVTCVEHGVDMFDCVLPTRCARNGLLFTSEGKVVIRNATYAKDPRPADPACSCYTCRNFSRAYLRHLFVAGEILAMRLNTLHNLHYFLNLMKDVRQAIAEDRYTAFARDFRDKARAQESERTRSK

SEQ ID NO: 51790 - protein, 392 aa, Archangium sp.
  misc_feature (1)..(392): tr|A0A1Q3HF88|A0A1Q3HF88_9DELT Queuine tRNA-ribosyltran sferase OS=Archangium sp. Cb G35 OX=1920190 GN=tgt PE=3 SV=1
MAVRFELVTTDPTGARAGVLHTRRGSIPTPVFMPVGTHASFRHLGMEEVKATGAKIILSNTYHLMLKPGIDVFKRFGGIHPFMQWDGAVLTDSGGFQIFSLPEDRLITEKGAHFRSFHDNSRQLLSPESSIAMQQAINSEIMMVLDVCIDSRTDEAGTREAMERTHRWAVRSLAAKNQVDTGQALFAIVQGGVHPNLRDESSAFLTQHPFDGFAIGGLAVGETNEERKTMTARAAASLPQDKPRYLMGVGTPTDLLEAVLRGVDMFDCIIPTKMAQQGYAYTFQGLVRITRQVFKLSDEPLDPTCDCYVCKRFSRGYLQHLMSGKHHIGSRMLSVHNVHHYQQLTWKMRDAILRGSYAQAYRELKQAVATPKDLKEAKLEVGPGAVTLKEVG

SEQ ID NO: 51791 - protein, 392 aa, Archangium violaceum
  misc_feature (1)..(392): tr|A0A084SEY2|A0A084SEY2_9DELT Queuine tRNA-ribosyltran sferase OS=Archangium violaceum Cb vi76 OX=1406225 GN=t gt PE=3 SV=1
MAVRFELVTTDPTGARAGVLHTRRGSIPTPVFMPVGTHASFRHLGMEEVKATGARIILSNTYHLMLKPGIEVFKRFGGIHPFMQWDGAVLTDSGGFQIFSLPEDRLITEKGAHFRSFHDNSRQLLSPESSIAMQQAINSEIMMVLDVCIDSRTDEAGTREAMERTHRWALRSLAAKNQVDTGQALFAIVQGGVHPNLRDESSAFLTQHPFDGFAIGGLAVGETNEERKTMTARAAASLPQDKPRYLMGVGTPTDLLEAVLRGVDMFDCIIPTKMAQQGYAYTFQGLVRITRQVFRLSDEPLDPTCDCPVCKRFSRGYLQHLMSGKHHIGSRMLSVHNVHHYQQLTWKMRDAILRGSYAQAYRELKQAVATPKDLKEAKLEVGPGAVTLKEVG

SEQ ID NO: 51792 - protein, 394 aa, Archangium violaceum; identical to SEQ ID NO: 51789
  misc_feature (1)..(394): tr|A0A084T1T2|A0A084T1T2_9DELT Queuine tRNA-ribosyltran sferase OS=Archangium violaceum Cb vi76 OX=1406225 GN=t gt PE=3 SV=1

SEQ ID NO: 51793 - protein, 377 aa, Arcicella aurantiaca
  misc_feature (1)..(377): tr|A0A316EDG5|A0A316EDG5_9BACT Queuine tRNA-ribosyltran sferase OS=Arcicella aurantiaca OX=591202 GN=tgt PE=3 S V=1
MTFDIQTTDPNSKARAGVITTDHGQIQTPIFMPVGTAGSVKAVHQRELKEDIKAQIILGNTYHLYLRPTLDIIEKAGGLHKFNGWDKPILTDSGGYQVYSLAGTGRKIKEEGVTFKSHIDGSTHFFTPEGVMDIQRTIGADIMMAFDECTPYPCEYGYARESMEMTHRWLKRCCDHFDKTEPKYGYSQTLFPIVQGSVYKDLRVKSAEVIASFEREGNAIGGLSVGEPAEMMYEMTDMVTDILPKDKPRYLMGVGTPANILEGIALGIDMFDCVMPTRNARNGMLFTTEGTINMKNEKWKDDFSPLDSGLNSYASNFYTKAYVRHLLKADEMLGAMICSVHNLTFYLWLVGQAREQIIAGTFKTWKDSMVVKLMQRL

SEQ ID NO: 51794 - protein, 377 aa, Arcobacter anaerophilus
  misc_feature (1)..(377): tr|A0A4Q0XZK3|A0A4Q0XZK3_9PROT Queuine tRNA-ribosyltran sferase OS=Arcobacter anaerophilus OX=877500 GN=tgt PE= 3 SV=1
MEFKIDGKSYNKARACTIKTAHSTIQTPVFMPVGTQATVKALDANDLLDMGAKIILGNTYHLYLRPGSKLIKKFGGLHGFSKFPNSFLTDSGGFQAFSLSDNSKPDENGITFKSHIDGSKHYFTPQSVLDTQYELGSDIMMILDDLVALPNTRERIKKSIERTTKWAEEAIKYHKEQQKKGIGVNQNIFAIIQGGTDKEFRKLSATQLCALEDYDGYAIGGLSVGEPNEEMYETVEWTTDFMPQNKPRYLMGVGTPEDLIENIERGVDMFDCVMPTRNARNGTLFTSFGRVNIKKATFKEDPLPIDSECDCYTCRNFSRAYLNHLFRAGEITYYRLSSIHNIHYYLNLMRQAREAILADNWLEFKKEFYQKRENTGK

SEQ ID NO: 51795 - protein, 373 aa, Arcobacter aquimarinus
  misc_feature (1)..(373): tr|A0A4Q0UWF2|A0A4Q0UWF2_9PROT Queuine tRNA-ribosyltran sferase OS=Arcobacter aquimarinus OX=1315211 GN=tgt PE= 3 SV=1
MEFKIDATSQGARACTIKTAHSTILTPVFMPVGTQGTVKALDANDMLELGAKIILGNTYHLYLRPGSKLIKKFGGLHGFSKFPNSFLTDSGGFQAFSLSDNSKPDENGIMFKSHIDGSKHYFTPQSVLDTQYDLGSDIMMILDDLVALPNTKERIQKSIERTTKWAKEAIEYHMSQKEKGIGVNQNIFAIIQGGTDKEFRKMSAEQLCALSDYDGFAIGGLSVGEPNQDMYDTVEWTTQFMPKNKPRYLMGVGTPEDLIENIERGVDMFDCVMPTRNARNGTLFTSFGRLNIKKAEFKEDENPIDSECECYTCKNFSRAYLNHLYRAGEITYFRLGSIHNIHYYLNLMKQARTAILNDNWVEFKKEFYAKRSK

SEQ ID NO: 51796 - protein, 374 aa, Arcobacter bivalviorum
  misc_feature (1)..(374): tr|A0A345J0I5|A0A345J0I5_9PROT Queuine tRNA-ribosyltran sferase OS=Arcobacter bivalviorum OX=663364 GN=tgt PE=3 SV=1
MEFKIDATSHHKARACTIKTAHSEIKTPVFMPVGTQATVKALDANDLLSMGAKIILGNTYHLYLRPGSKLVKKFGGLHGFSKFPNSFLTDSGGFQAFSLSDNSKPDENGIMFKSHIDGSKHYFTPQSVLDTQYDLGSDIMMILDDLVALPNTKERIKKSIERTTKWAQEAITYHKEQQAKGIGVEQNIFAIIQGGTDKEFRKMSAQQLCALTDFDGFAIGGLSVGEPNQDMYDTVEWTTDFMPLDKPRYLMGVGTPEDLIENIERGVDMFDCVMPTRNARNGTLFTSIGRVNIKKAMYKEDASPVDEECDCYTCQNFTKAYLNHLFKANEITYFRLASMHNIRYYLNLMTKAREAILADNWVEFKKEFYAKRGK

SEQ ID NO: 51797 - protein, 373 aa, Arcobacter butzleri
  misc_feature (1)..(373): sp|A8ERD1|TGT_ARCB4 Queuine tRNA-ribosyltransferase OS= Arcobacter butzleri (strain RM4018) OX=367737 GN=tgt PE =3 SV=1
MEFKIDGTSQGARACTIKTAHSTILTPVFMPVGTQGTVKALDANDMLELGAKIILGNTYHLYLRPGSKLIKKFGGLHGFSKFPNSFLTDSGGFQAFSLSNNSKPDENGITFKSHIDGSRHYFTPKSVLDTQYDLNSDIMMILDDLVALPNTDERIKTSIQRTTKWAQEAINYHMEQKQKGIGTHQNIFAIIQGGTSKEFRKLSAQQLCDMSDFDGFAIGGLSVGEPNEQMYETVEWTTQFMPKDKPRYLMGVGTPEDLIENIERGVDMFDCVMPTRNARNGTLFTSFGKLNIKKAEFKDDANPIDNECSCYTCKNFSRAYLNHLFRAAEITYFRLASIHNIHYYLNLMKQAREAILADNWSEFKKEFYVKRSK

SEQ ID NO: 51798 - protein, 373 aa, Arcobacter butzleri
  misc_feature (1)..(373): tr|A0A0M1UKI4|A0A0M1UKI4_9PROT Queuine tRNA-ribosyltran sferase OS=Arcobacter butzleri ED-1 OX=944546 GN=tgt PE =3 SV=1
MEFKIDGTSQGARACTIKTAHSTILTPVFMPVGTQGTVKALDANDMLELGAKIILGNTYHLYLRPGSNLIKKFGGLHGFSKFPNSFLTDSGGFQAFSLSNNSKPDENGITFKSHIDGSKHYFTPKSVLDTQYDLNSDIMMILDDLVALPNTDERIKTSIERTTKWAQEAIDYHMEQKQKGIGTHQNIFAIIQGGTSKEFRKLSAQQLCAMSDFDGFAIGGLSVGEPNEQMYETVEWTTQFMPKDKPRYLMGVGTPEDLIENIERGVDMFDCVMPTRNARNGTLFTSFGKLNIKKAEFKDDENPIDNECSCYTCKNFSRAYLNHLFRAAEITYFRLASIHNIHYYLNLMKQTREAILADNWSEFKKEFYAKRSK

SEQ ID NO: 51799 - protein, 374 aa, Arcobacter canalis
  misc_feature (1)..(374): tr|A0A2G1CX25|A0A2G1CX25_9PROT Queuine tRNA-ribosyltran sferase OS=Arcobacter canalis OX=1912871 GN=tgt PE=3 SV =1
MQFTIDATQNKARACTIKTAHSTIQTPVFMPVGTQATVKALDANDLLSMGAKIILGNTYHLYLRPGSKLIKKFGGLHGFSKFPNSFLTDSGGFQAFSLSDNSKPDENGIMFRSHIDGSKHYFTPQSVLDTQYDLGSDIMMILDDLVALPNTKERIKKSIERTTKWAKEAITYHKQQQEKGIGVNQNIFAIIQGGTDKEFRKMSAQQLCALEDFDGYAIGGLSVGEPNQDMYDTVEWTTTFMPENKPRYLMGVGTPEDLIENIHRGVDMFDCVMPTRNARNGTLFTNFGRVNIKKAMYKEDPLPIDEECDCYTCKNFTKAYLSHLYRAGEITYFRLASIHNINYYLTLMRKAREAILENKWEEFREKFYEKRAKK

SEQ ID NO: 51800 - protein, 373 aa, Arcobacter cibarius
  misc_feature (1)..(373): tr|A0A5J6RK68|A0A5J6RK68_9PROT Queuine tRNA-ribosyltran sferase OS=Arcobacter cibarius OX=255507 GN=tgt PE=4 SV =1
MEFKIDATSKGARACTIKTAHSTILTPVFMPVGTQGTVKALDANDMLEMGAKIILGNTYHLYLRPGSKLIKKFGGLHGFSKFPNSFLTDSGGFQAFSLSDNSKPDENGIMFKSHIDGSRHYFTPKSVLDTQYDLNSDIMMILDDLVALPNTKERIAKSIERTTKWAKEAIEYHMEQKAKGIGTKQNIFAIIQGGTDKEFRKMSAEQLCALTDYDGFAIGGLSVGEPNQDMYDTVEWTTQFMPKYKPRYLMGVGTPEDLIENIERGVDMFDCVMPTRNARNGTLFTSFGRLNIKKAEFKEDASAIDENCECYTCKNFTRAYLNHLLRAGEITYFRLASIHNIHYYLDLMRQARQAILNDNWVEFKKEFYTKRGK

SEQ ID NO: 51801 - protein, 373 aa, Arcobacter cloacae
  misc_feature (1)..(373): tr|A0A4Q0ZJE6|A0A4Q0ZJE6_9PROT Queuine tRNA-ribosyltran sferase OS=Arcobacter cloacae OX=1054034 GN=tgt PE=3 SV =1
MEFKIDATSNGARACTIKTAHSTILTPVFMPVGTQGTVKALDANDMLELGAKIILGNTYHLYLRPGSKLIKKFGGLHGFSKFPNSFLTDSGGFQAFSLSDNSKPDENGIMFKSHIDGSKHYFTPKSVLDTQYDLNSDIMMILDDLVALPNTQERIAKSIERTTKWAKEAIEYHMEQKSKGIGTHQNIFAIIQGGTDKNFRKLSAEQLCSLTDFDGFAIGGLSVGEPNADMYETVEWTTQFMPKEKPRYLMGVGTPEDLIENIERGVDMFDCVMPTRNARNGTLFTSFGRLNIKKAEFKEDENPIDSECECYTCKNFSRAYLNHLYRAGEITYFRLGSIHNIHYYLNLMKQARTAILNDNWVEFKKEFYAKRSK

SEQ ID NO: 51802 - protein, 373 aa, Arcobacter cloacae
  misc_feature (1)..(373): tr|A0A4Q0V7C9|A0A4Q0V7C9_9PROT Queuine tRNA-ribosyltran sferase OS=Arcobacter cloacae OX=1054034 GN=tgt PE=3 SV =1
MEFKIDATSNGARACTIKTAHSTIQTPVFMPVGTQGTVKALDANDMLELGAKIILGNTYHLYLRPGSKLIKKFGGLHGFSKFPNSFLTDSGGFQAFSLSDNSKPDENGIMFKSHIDGSKHYFTPKSVLDTQYDLNSDIMMILDDLVALPNTQERIAKSIERTTKWAKEAIEYHMEQKSKGIGTHQNIFAIIQGGTDKNFRKLSAEQLCSLTDFDGFAIGGLSVGEPNADMYETVEWTTQFMPKEKPRYLMGVGTPEDLIENIERGVDMFDCVMPTRNARNGTLFTSFGRLNIKKAEFKEDENPIDSECECYTCKNFSRAYLNHLYRAGEITYFRLGSIHNIHYYLNLMKQARTAILNDNWVEFKKEFYAKRSK

SEQ ID NO: 51803 - protein, 373 aa, Arcobacter cryaerophilus
  misc_feature (1)..(373): tr|A0A494T0G8|A0A494T0G8_9PROT Queuine tRNA-ribosyltran sferase OS=Arcobacter cryaerophilus D2610 OX=1032071 GN =tgt PE=3 SV=1
MEFQINATSQGARACTIKTAHSTILTPVFMPVGTQGTVKALDANDMLEMGAKIILGNTYHLYLRPGSKLIKKFGGLHGFSKFPNSFLTDSGGFQAFSLSDNSKPDENGIMFKSHIDGSKHYFTPKSVLDTQYDLGSDIMMILDDLVALPNTKERIAKSIERTTKWAKEAIEYHMEQKSKGIGVNQNIFAIIQGGTDKEFRKLSAEQLCAMSDYDGFAIGGLSVGEPNALMYETVEWTTQFMPKDKPRYLMGVGTPEDLIENIERGVDMFDCVMPTRNARNGTLFTSFGRLNIKKAEFKEDIKPIDETCSCYTCKNFTRAYLNHLLRAGEITYFRLASIHNIYYYLDLMKQAREAILKDNWIEFKKDFYAKRGK

SEQ ID NO: 51804 - protein, 373 aa, Arcobacter cryaerophilus
  misc_feature (1)..(373): tr|A0A5B7XBK9|A0A5B7XBK9_9PROT Queuine tRNA-ribosyltran sferase OS=Arcobacter cryaerophilus ATCC 43158 OX=10320 70 GN=tgt PE=3 SV=1
MEFQIDATSNGARACTIKTAHSTILTPVFMPVGTQGTVKALDATDLLEMGTKIILGNTYHLYLRPGSKLIKKFGGLHGFSKFPNSFLTDSGGFQAFSLSDNSKPDENGIMFKSHIDGSRHYFTPKSVLDTQYELNSDIMMILDDLVALPNTNERIKLSIERTTKWAKEAIDYHMEQKARGIGTKQNIFAIIQGGTDKEFRKQSATSLCAMSDYDGFAIGGLSVGEPNAIMYETVEWTTQFMPKEKPRYLMGVGTPEDLIENIERGVDMFDCVMPTRNARNGTLFTSFGRMNIKKAEFKEDSKPIDETCSCYTCKNFTRAYLNHLLRAGEITYFRLASIHNIYYYLDLMKQAREAILENNWLEFKKDFYAKRGK

SEQ ID NO: 51805 - protein, 373 aa, Arcobacter defluvii
  misc_feature (1)..(373): tr|A0A4Q0UPA1|A0A4Q0UPA1_9PROT Queuine tRNA-ribosyltran sferase OS=Arcobacter defluvii OX=873191 GN=tgt PE=3 SV =1
MEFKIDATSNGARACTIKTAHSTILTPVFMPVGTQGTVKALDANDMLELGAKIILGNTYHLYLRPGSKLIKKFGGLHGFSKFPNSFLTDSGGFQAFSLSDNSKPDENGITFKSHIDGSKHYFTPQSVLNTQYDLGSDIMMILDDLVALPNTKERIQKSIERTTKWAKEAIEYHMSQKEKGIGVNQNIFAIIQGGTDKEFRKMSAEQLCAMTDYDGYAIGGLSVGEPNQDMYETVEWTTQFMPKDKPRYLMGVGTPEDLIENIERGVDMFDCVMPTRNARNGTLFTTFGRLNIKKAEFKEDTNPIDNACECYTCKNFSRAYLNHLFRASEITYFRLASIHNIHYYLQLMKDAREAILANNWTEFKKEFYAKRSK

SEQ ID NO: 51806 - protein, 376 aa, Arcobacter ebronensis
  misc_feature (1)..(376): tr|A0A4Q0YC60|A0A4Q0YC60_9PROT Queuine tRNA-ribosyltran sferase OS=Arcobacter ebronensis OX=1462615 GN=tgt PE=3 SV=1
MEFKIDGKSHHKARACTIKTAHSTIQTPVFMPVGTQAIVKALDANDMLELGAKIILGNTYHLYLRPGSKTVKKFGGLHGFSKFPNSFLTDSGGFQAFSLSDNSKPDENGITFKSHIDGSKHYFTPQSVLDTQYDLGSDIMMILDDLVALPNTKERIQKSIERTTKWAREAITYHKEQQSKGIGIDQNIFAIIQGGTDKEYRKLSATQLCELDFDGFAIGGLSVGEPNEQMYETVEWTTDFMPLDKPRYLMGVGTPEDLIENIERGVDMFDCVMPTRNARNGTLFTSYGKINIKNAKYKEDEAPIDPECDCYTCRNFSKAYLNHLFRAGEISYFRLGSMHNIRYYLNLMKQAREAILADNWLEFKKEFYAKRGITKE

SEQ ID NO: 51807 - protein, 376 aa, Arcobacter ebronensis
  misc_feature (1)..(376): tr|A0A4Q1AKE8|A0A4Q1AKE8_9PROT Queuine tRNA-ribosyltran sferase OS=Arcobacter ebronensis OX=1462615 GN=tgt PE=3 SV=1
MEFKIDGKSHHKARACTIKTAHSTIQTPVFMPVGTQAIVKALDANDMLELGAKIILGNTYHLYLRPGSKTVKKFGGLHGFSKFPNSFLTDSGGFQAFSLSDNSKPDENGITFKSHIDGSKHYFTPQSVLDTQYDLGSDIMMILDDLVALPNTKERIKKSIERTTKWAKEAITYHKEQQSKGIGVDQNIFAIIQGGTDKEFRKLSATQLCELDFDGFAIGGLSVGEPNEDMYETVEWTTDFMPLDKPRYLMGVGTPEDLIENIERGVDMFDCVMPTRNARNGTLFTSYGKINIKNAKYKEDEAPIDPECDCYTCKNFSKAYLNHLFRAGEISYFRLGSMHNIRYYLNLMKQAREAILADNWLEFKKEFYAKRGVTKE

SEQ ID NO: 51808 - protein, 373 aa, Arcobacter ellisii
  misc_feature (1)..(373): tr|A0A347U5E0|A0A347U5E0_9PROT Queuine tRNA-ribosyltran sferase OS=Arcobacter ellisii OX=913109 GN=tgt PE=3 SV= 1
MEFKIDATSNGARACTIKTAHSTILTPVFMPVGTQGTVKALDANDMLELGAKIILGNTYHLYLRPGSKLVKKFGGLHGFSKFPNSFLTDSGGFQAFSLSDNSKPDENGIMFKSHIDGSRHYFTPQSVLDTQYDLGSDIMMILDDLVALPNTKERIQKSIERTTKWAKEAIEYHMEQKSKGIGVNQNIFAIIQGGTDKEFRKMSAEQLCSLTDFDGFAIGGLSVGEPNADMYETVEWTTQFMPKDKPRYLMGVGTPEDLIENIERGVDMFDCVMPTRNARNGTLFTTFGRLNIKKAEFKEDVNPIDNACECYTCKNFSRAYLNHLFRAAEITYFRLASIHNIHYYLQLMRESREAILANNWTEFKKEFYAKRSK

SEQ ID NO: 51809 - protein, 374 aa, Arcobacter halophilus
  misc_feature (1)..(374): tr|A0A2N1J5C1|A0A2N1J5C1_9PROT Queuine tRNA-ribosyltran sferase OS=Arcobacter halophilus OX=197482 GN=tgt PE=3 SV=1
MQFTIDATQNKARACTIKTAHSTIQTPVFMPVGTQATVKALDANDLLSMGAKIILGNTYHLYLRPGSKLIKKFGGLHGFSKFPNSFLTDSGGFQAFSLSDNSKPDENGIMFRSHIDGSKHYFTPQSVLDTQYELGSDIMMILDDLVALPNTKERIKKSIERTTKWAKEAITYHKQQQEKGIGVHQNIFAIIQGGTDKEFRKMSAQQLCALEDFDGYAIGGLSVGEPNQDMYDTVEWTTTFMPENKPRYLMGVGTPEDLIENIHRGVDMFDCVMPTRNARNGTLFTNFGRVNIKKAMYKEDALPIDEECDCYTCKNFTKAYLSHLYRAGEITYFRLASIHNINYYLTLMRKAREAILENRWEEFRKEFYEKRATK

SEQ ID NO: 51810 - protein, 374 aa, Arcobacter marinus
  misc_feature (1)..(374): tr|A0A347TNM9|A0A347TNM9_9PROT Queuine tRNA-ribosyltran sferase OS=Arcobacter marinus OX=505249 GN=tgt PE=3 SV= 1
MQFTIDATQNKARACTIKTAHSTIQTPVFMPVGTQATVKALDANDLLSMGAKIILGNTYHLYLRPGSKLIKKFGGLHGFSKFPNSFLTDSGGFQAFSLSDNSKPDENGIMFRSHIDGSKHYFTPQSVLDTQYDLGSDIMMILDDLVALPNTKERIKKSIERTTKWAKEAITYHKQQQEKGIGVNQNIFAIIQGGTDKEFRKMSAQQLCALEDFDGYAIGGLSVGEPNQDMYDTVEWTTTFMPENKPRYLMGVGTPEDLIENIHRGVDMFDCVMPTRNARNGTLFTSFGRVNIKKAMYKEDALPIDEECDCYTCKNFTKAYLSHLYRAGEITYFRLASIHNINYYLTLMRKAREAILENKWEEFRENFYEKRAKK

SEQ ID NO: 51811 - protein, 374 aa, Arcobacter marinus
  misc_feature (1)..(374): tr|A0A1T5ALG6|A0A1T5ALG6_9PROT Queuine tRNA-ribosyltran sferase OS=Arcobacter marinus OX=505249 GN=tgt PE=3 SV= 1
MQFTIDATQNKARACTIKTAHSTIQTPVFMPVGTQATVKALDANDLLSMGAKIILGNTYHLYLRPGSKLIKKFGGLHGFSKFPNSFLTDSGGFQAFSLSDNSKPDENGIMFRSHIDGSKHYFTPQSVLDTQYDLGSDIMMILDDLVALPNTKERIKKSIERTTKWAKEAITYHKQQQEKGIGVNQNIFAIIQGGTDKEFRKMSAQQLCTLEDFDGYAIGGLSVGEPNQDMYDTVEWTTTFMPENKPRYLMGVGTPEDLIENIHRGVDMFDCVMPTRNARNGTLFTNFGRVNIKKAMYKEDPLPIDEECDCYTCKNFTKAYLSHLYRAGEITYFRLASIHNINYYLTLMRKAREAILENKWEEFRESFYEKRAKK

SEQ ID NO: 51812 - protein, 376 aa, Arcobacter molluscorum
  misc_feature (1)..(376): tr|A0A2G1DHK4|A0A2G1DHK4_9PROT Queuine tRNA-ribosyltran sferase OS=Arcobacter molluscorum LMG 25693 OX=870501 G N=tgt PE=3 SV=1
MQFKIDATQNKARACTIQTAHSTITTPVFMPVGTQATVKALDANDLLSMSAKIILGNTYHLYLRPGSKLIKKFGGLHGFSKFPNSFLTDSGGFQAFSLSDNSKPDENGIMFRSHIDGSKHYFTPQSVLDTQYDLGSDIMMILDDLVALPNTKERIKKSIERTTKWAKEAITYHKQQQEKGIGVNQNIFAIVQGGTDKEFRKMSAEQLAQLDGFDGYAIGGLSVGEPNVEMYETVEWTTQFLPENKPRYLMGVGTPEDLIENIHRGVDMFDCVMPTRNARNGTLFTSLGRVNIKKAAYKEDATPIDEECDCYTCKNFNKAYLNHLFRAGEITYFRLASIHNINYYLTLMRSAREAILEGKWDDFRKEFYEKRGVSID

SEQ ID NO: 51813 - protein, 376 aa, Arcobacter mytili
  misc_feature (1)..(376): tr|A0A345J864|A0A345J864_9PROT Queuine tRNA-ribosyltran sferase OS=Arcobacter mytili LMG 24559 OX=1032238 GN=tg t PE=3 SV=1
MQFTIDATQNKARACTIKTAHSTILTPVFMPVGTQATVKALDANDMLSLGAKIILGNTYHLYLRPGSKLIKKFGGLHGFSKFPNSFLTDSGGFQAFSLSDNSKPDENGIMFRSHIDGSKHYFTPQSVLDTQYDLGSDIMMILDDLVALPNTKERIKKSIERTTKWAKEAITYHKEQQAKGIGVNQNIFAIIQGGTDKEFRQMSAQQLCALTDFDGYAIGGLSVGEPNQDMYDTVEWTTQFMPEDKPRYLMGVGTPEDLIENIHRGVDMFDCVMPTRNARNGTLFTSFGRVNIKKASYKEDATPIDETCECYTCKNFNKAYLNHLFRAGEITYFRLASMHNIHYYLDLMRQARQAILEKRWEEFRKEFYEKRGVTIS

SEQ ID NO: 51814 - protein, 376 aa, Arcobacter nitrofigilis
  misc_feature (1)..(376): tr|D5V779|D5V779_ARCNC Queuine tRNA-ribosyltransferase OS=Arcobacter nitrofigilis (strain ATCC 33309 / DSM 729 9 / LMG 7604 / NCTC 12251 / CI) OX=572480 GN=tgt PE=3 S V=1
MQFKIDGKSFHKTRACTIKTAHSTIQTPVFMPVGTQATVKALDANDMLSLGAKIILGNTYHLYLRPGSEIIKKFGGLHGFSKFPNSFLTDSGGFQAFSLGDNSKPDENGIMFKSHHDGSKHYFTPESVLDTQYELGSDIMMILDDLVALPNTKERIKKSIERTTDWAEKAITYHKSQQEKGIGINQNIFAIIQGGTDKEFRKLSATQLCALTDFDGFAIGGLSVGEPNAAMYETVEWTTDFMPEDKPRYLMGVGTPEDLIENIERGVDMFDCVMPTRNARNGSLFTTYGKIAIKNAKFKEDAEPIDKACECYTCKNFTKAYLNHLFRAGEITYYRLATLHNIHYYLTLMREAREAILADNWVEFKKEFYKKRGIEI

SEQ ID NO: 51815 - protein, 374 aa, Arcobacter pacificus
  misc_feature (1)..(374): tr|A0A5C2H954|A0A5C2H954_9PROT Queuine tRNA-ribosyltran sferase OS=Arcobacter pacificus OX=1080223 GN=tgt PE=3 SV=1
MEFKLDATSNGARACTIKTAHSTITTPVFMPVGTQATVKALDANDMLSMGAKIILGNTYHLYLRPGSKLIKKFGGLHGFSKFPNSFLTDSGGFQAFSLSDNSKPDENGIMFKSHIDGSKHYFTPQSVLDTQYDLGSDIMMILDDLVALPNTSERIQKSIERTTKWAKEAIEYHKSQQEKGIGVNQNIFAIIQGGTDKEFRKMSAEQLCALEDYDGFAIGGLSVGEPNQDMYDTVEWTTQFMPKDKPRYLMGVGTPEDLIENIERGVDMFDCVMPTRNARNGTLFTSFGRMNIKGAKFKEDEKPIDEECDCYTCQNFTRAYLNHLYRAGEMTYYRLGSMHNIHYYLNLMKQAREAILADNWVEFKKEFYEKRSQK

SEQ ID NO: 51816 - protein, 373 aa, [Arcobacter] porcinus
  misc_feature (1)..(373): tr|A0A1C0AWU9|A0A1C0AWU9_9PROT Queuine tRNA-ribosyltran sferase OS=[Arcobacter] porcinus OX=1935204 GN=tgt PE=3 SV=1
MEFKIDATSKGARACTIKTANSTILTPVFMPVGTQGTVKALDATDLLQMGAKIILGNTYHLYLRPGSKIIKKLGGLHGFSKFPNSFLTDSGGFQAFSLSDNSKPDENGIMFKSHIDGSKHYFTPKSVLDTQYELNSDIMMILDDLVALPNTDERIKKSIERTTKWAKEAISYHMEQKSKGIGTHQNIFAIIQGGTSKEFRKLSATQLCALEDFDGFAIGGLSVGEPNQDMYDTVEWTTQFMPKDKPRYLMGVGTPEDLIENIERGIDMFDCVMPTRNARNGTLFTSFGRLNIKKAQFKEDILPIDEECSCFTCKNFTRAYLNHLLRAGEITYFRLSSIHNIFYYLNLMNQARIAILDDKWQEFKEEFYAKRAK

SEQ ID NO: 51817 - protein, 373 aa, [Arcobacter] porcinus
  misc_feature (1)..(373): tr|A0A5C2HAD3|A0A5C2HAD3_9PROT Queuine tRNA-ribosyltran sferase OS=[Arcobacter] porcinus OX=1935204 GN=tgt PE=3 SV=1
MEFKIDATSKGARACTIKTANSTILTPVFMPVGTQGTVKALDATDLLQMGAKIILGNTYHLYLRPGSKIIKKLGGLHGFSKFPNSFLTDSGGFQAFSLSDNSKPDENGIMFKSHIDGSKHYFTPKSVLDTQYELNSDIMMILDDLVALPNTDERIKKSIERTTKWAKEAISYHMEQKSKGIGTHQNIFAIIQGGTSKEFRKLSATQLCALEDFDGFAIGGLSVGEPNQDMYDTVEWTTQFMPKDKPRYLMGVGTPEDLIENIERGIDMFDCVMPTRNARNGTLFTSFGRLNIKKAQFKEDILPIDEECSCFTCKNFTRAYLNHLLRAGEITYFRLASIHNIFYYLNLMNQARTAILDDKWQEFKEEFYAKRAK

SEQ ID NO: 51818 - protein, 372 aa, Arcobacter skirrowii
  misc_feature (1)..(372): tr|A0A2U2C305|A0A2U2C305_9PROT Queuine tRNA-ribosyltran sferase OS=Arcobacter skirrowii OX=28200 GN=tgt PE=3 SV =1
MEFKIDATSQGARACTIKTANSTILTPVFMPVGTQGTVKALDANDMLELGAKIILGNTYHLYLRPGSKLIKKFGGLHGFSKFPNSFLTDSGGFQAFSLSDNSKPDENGIMFKSHIDGSRHYFTPKSVLDTQYDLNSDIMMILDDLVALPNTKERIAKSIERTTKWAKEAITYHMEQKSRGIGTHQNIFAIIQGGTDKEFRKQSAQQLCAMSDYDGFAIGGLSVGEPNALMYETVEWTTQFMPKDKPRYLMGVGTPEDLIENIERGVDMFDCVMPTRNARNGTLFTSFGRLNIKKAEFKEDIKPIDESCSCYTCKNFTRAYLNHLLRAGEITYFRLASIHNIFYYLDLMRQAREAILKDNWVEFKKDFYAKRG

SEQ ID NO: 51819 - protein, 373 aa, Arcobacter skirrowii
  misc_feature (1)..(373): tr|A0A4Q0UFN7|A0A4Q0UFN7_9PROT Queuine tRNA-ribosyltran sferase OS=Arcobacter skirrowii CCUG 10374 OX=1032239 G N=tgt PE=3 SV=1
MEFKIDATSQGARACTIKTANSTILTPVFMPVGTQGTVKALDANDMLELGAKIILGNTYHLYLRPGSKLIKKFGGLHGFSKFPNSFLTDSGGFQAFSLSDNSKPDENGIMFKSHIDGSRHYFTPKSVLDTQYDLNSDIMMILDDLVALPNTKERIAKSIERTTKWAKEAITYHMEQKSRGIGTHQNIFAIIQGGTDKEFRKQSAEQLCSLTDYDGFAIGGLSVGEPNQDMYETVEWTTQFMPKEKPRYLMGVGTPEDLIENIERGVDMFDCVMPTRNARNGTLFTSFGRLNIKKAEFKEDIKPIDESCSCYTCRNFTRAYLNHLLRAGEITYFRLASIHNIHYYLDLMRQAREAILKDNWVEFKKDFYAKRGK

SEQ ID NO: 51820 - protein, 376 aa, Arcobacter sp.
  misc_feature (1)..(376): tr|A0A2N6FT52|A0A2N6FT52_9PROT Queuine tRNA-ribosyltran sferase OS=Arcobacter sp. OX=1872629 GN=tgt PE=3 SV=1
MEFKIDATSTHKARACTIKTAHSTIQTPVFMPVGTQATVKALDANDMLSMGAKIILGNTYHLYLRPGSKIIKKFGGLHGFSKFPNSFLTDSGGFQAFSLSDTSKADEDGIMFKSHIDGSKHYFTPQSVLDTQYDLGSDIMMILDDLVALPNTKERIQKSIERTTAWAKEAITYHMAQKEKGIGLNQNIFAIIQGGTDKEFRKMSAQQLCSLTDFDGYAIGGLSVGEPNADMYETVEWTTDFMPKDKPRYLMGVGTPEDLIENIERGVDMFDCVMPTRNARNGTLFTSFGRLNIRGAKFKEDSKPIDEECDCYTCKNFSRAYLNHLYRAGEMTYFRLGSMHNIHYYLNLMKQARNAILEDKWIEFKTEFYKKREVEI

SEQ ID NO: 51821 - protein, 374 aa, Arcobacter sp.
  misc_feature (1)..(374): tr|A0A1Y5DVC1|A0A1Y5DVC1_9PROT Queuine tRNA-ribosyltran sferase OS=Arcobacter sp. 31_11_sub10_T18 OX=1856277 GN =tgt PE=3 SV=1
MQFQIDSTHNKARACTIKTAHSTIQTPVFMPVGTQGTVKTLDANDMLSLGAKIILGNTYHLYLRPGSKLVKKLGGLHGFSKFPNSFLTDSGGFQAFSLSNNSKPDSNGIMFKSHIDGSKHYFTPQSVLDTQYELGSDIMMILDDLVALPNTKERIQLSIERTTQWAQEAITYHKEQQTKGIGTEQNIFAIIQGGTDKEFRKMSAEQLCSLTDYDGYAIGGLSVGEANQDMYDTVEWTTQFMPENKPRYLMGVGLPEDLIENIDRGVDMFDCVMPTRNARNGTLFTSFGRINIKNANFKEDAGPIDDECTCYTCTNFSRAYLSHLYRAGEMTYFRLGSYHNLHYYLNLMREARAAIVEGSWDEYKLEFYKKRKKK

SEQ ID NO: 51822 - protein, 373 aa, Arcobacter suis
  misc_feature (1)..(373): tr|A0A443TP55|A0A443TP55_9PROT Queuine tRNA-ribosyltran sferase OS=Arcobacter suis OX=1278212 GN=tgt PE=3 SV=1
MEFTINATSNNARACTIVTAHSTIQTPVFMPVGTQGTVKALDANDMLELGAKIILGNTYHLYLRPGSKLVKKFGGLHGFSKFPNSFLTDSGGFQAFSLSSNSKPDENGIMFKSHIDGSKHYFTPKSVLDTQYDLNSDIMMILDDLVALPNTKERIAKSIERTTKWAKEAIEYHMEQKAKGIGTHQNIFAIIQGGTDKEFRKQSAEQLCALSDYDGFAIGGLSVGEPNADMYETVEWTTQFMPKDKPRYLMGVGTPEDLIENIERGVDMFDCVMPTRNARNGTLFTTFGRLNIKKAEYKDDITPIDEACDCYTCKNFSKAYLNHLYRAKEITYFRLGSIHNIHYYLSLMKQAREAILSNNWVEFKKDFYAKRSK

SEQ ID NO: 51823 - protein, 373 aa, Arcobacter thereius
  misc_feature (1)..(373): tr|A0A1C0B9G6|A0A1C0B9G6_9PROT Queuine tRNA-ribosyltran sferase OS=Arcobacter thereius OX=544718 GN=tgt PE=3 SV =1
MEFKIDATSKGARACTIKTANSTILTPVFMPVGTQGTVKALDATDLLKMGAKIILGNTYHLYLRPGSKIIKKLGGLHGFSKFSNSFLTDSGGFQAFSLSDNSKPDENGIMFKSHIDGSKHYFTPKSVLDTQYELNSDIMMILDDLVALPNTDERINKSIERTTKWAKEAISYHMEQKSKGIGTHQNIFAIIQGGTSKEFRKLSATQLCALEDFDGFAIGGLSVGEPNQDMYDTVEWTTKFMPINKPRYLMGVGTPEDLIENIERGIDMFDCVMPTRNARNGTLFTSFGRLNIKKAQFKEDILPIDEECSCFTCKNFTRAYLNHLLRAGEITYFRLASIHNIFYYLNLMNQARVAILENKWQEFKNEFYAKRAK

SEQ ID NO: 51824 - protein, 373 aa, Arcobacter thereius; identical to SEQ ID NO: 51817
  misc_feature (1)..(373): tr|A0A1C0B452|A0A1C0B452_9PROT Queuine tRNA-ribosyltran sferase OS=Arcobacter thereius OX=544718 GN=tgt PE=3 SV =1

SEQ ID NO: 51825 - protein, 373 aa, Arcobacter trophiarum
  misc_feature (1)..(373): tr|A0A4Q0ZYL3|A0A4Q0ZYL3_9PROT Queuine tRNA-ribosyltran sferase OS=Arcobacter trophiarum LMG 25534 OX=1032241 G N=tgt PE=3 SV=1
MEFQINATSNGARACTIKTAHSTIVTPVFMPVGTQGTVKALDANDLLEMGAKIILGNTYHLYLRPTSKLIKKFGGLHGFSKFPNSFLTDSGGFQAFSLSDNSKPDENGIMFKSHIDGSRHYFTPKSVLDTQYELNSDIMMILDDLVALPNTDERIKLSIERTTKWAKEAIDYHMEQKARGIGTEQNIFAIIQGGTSKEFRKLSATQLCAMSDFDGFAIGGLSVGEPNIDMYDTVEWTTQFMPKEKPRYLMGVGTPEDLIENIERGVDMFDCVMPTRNARNGTLFTSFGRLNIKKAEFKEDIRPIDENCSCYTCKNFTRAYLNHLLRAGEITYFRLASIHNIFYYLDLMKKAREAILKDNWVEFKKDFYAKRGK

SEQ ID NO: 51826 - protein, 373 aa, Arcobacter venerupis
  misc_feature (1)..(373): tr|A0A443TUQ8|A0A443TUQ8_9PROT Queuine tRNA-ribosyltran sferase OS=Arcobacter venerupis OX=1054033 GN=tgt PE=3 SV=1
MEFKIDATSNKARACTIVTAHSTIETPVFMPVGTQGTVKALDANDMLELGAKIILGNTYHLYLRPGSKLIKKFGGLHGFSKFPNSFLTDSGGFQAFSLSSNSKPDENGIMFKSHIDGSKHYFTPKSVLDTQYDLNSDIMMILDDLVALPNTKERISKSIERTTKWAKEAIEYHMEQKAKGIGTHQNIFAIIQGGTDKEFRKQSAEQLCALSDYDGFAIGGLSVGEPNADMYETVEWTTQFMPKDKPRYLMGVGTPEDLIENIERGVDMFDCVMPTRNARNGTLFTTFGRLNIKKADYKDDMTPIDEACDCYTCKNFSKAYLNHLYRAKEITYFRLGSIHNIHYYLSLMKEARTAILNDNWVEFKKEFYAKRSK

SEQ ID NO: 51827 - protein, 376 aa, Arcticibacter pallidicorallinus
  misc_feature (1)..(376): tr|A0A2T0UC39|A0A2T0UC39_9SPHI Queuine tRNA-ribosyltran sferase OS=Arcticibacter pallidicorallinus OX=1259464 G N=tgt PE=3 SV=1
MKFKLEAKDQQSQARAGEITTDHGNIKTPIFMPVGTAGTVKAVHQRELKNDIKAQIILGNTYHLYLRPGLETLERAGGLHKFNGWDGPILTDSGGYQVYSLSDVRKIKEEGVTFRSHIDGSKHLFTPEAAMDIQRVIGGDIIMAFDECTPYPCDYNYAKRSIEMTHRWLKRCCDRFDSTEPKYGYSQTLFPIVQGSVYKDLRVRSAEVIASFGREGNAIGGLSVGEPAEEMYAMTELVCNILPQDKPRYLMGVGTPVNILENIALGVDMFDCVMPTRNARNGMLFTKNGILNMRNEKWKNDFSPIEADSDLFADQVYTKAYLRHLISSKEILGAQIATLHNLHFYIWLVGEAREKIISGEFYDWKKKMVVQLAQRL

SEQ ID NO: 51828 - protein, 389 aa, Arcticibacter svalbardensis
  misc_feature (1)..(389): tr|R9GSV7|R9GSV7_9SPHI Queuine tRNA-ribosyltransferase OS=Arcticibacter svalbardensis MN12-7 OX=1150600 GN=tgt PE=3 SV=1
MEPQSNSYLCVFKMKFKLEASDKFSKARAGEISTDHGTIKTPIFMPVGTAGSVKAVHQRELKDDIKAQIILGNTYHLYLRPGLNTLEKAGGLHKFNGWDGPILTDSGGYQVYSLSDVRKIKEEGVTFRSHIDGSKHLFTPEVAMDIQRVIGGDIIMAFDECTPYPCDYNYAKKSIDMTHRWLKRCCDRFDTTEPKYGYSQTLFPIVQGSVYKDLRIKSAEAIASFEREGNAIGGLSVGEPAEEMYAMTELVCGILPVEKPRYLMGVGTPVNLLENIALGIDMFDCVMPTRNARNGMLFTKNGIMNMRNEKWKNDFSPIEADSELFSDLVYNKAYLRHLITSKEILGAQIATLHNLHFYLWLVNEAREKIISGEFYDWKKKMVIQLAQRL

SEQ ID NO: 51829 - protein, 376 aa, Arcticibacterium luteifluviistationis
  misc_feature (1)..(376): tr|A0A2Z4GGC4|A0A2Z4GGC4_9BACT Queuine tRNA-ribosyltran sferase OS=Arcticibacterium luteifluviistationis OX=178 4714 GN=tgt PE=3 SV=1
MKFELKTTDPGSKARAGKITTDHGEILTPIFMPVGTAGTVKGVHQRELKDDIHAQIILGNTYHLYLRPGLDIIQKAGGLHGFNGWDKPLLTDSGGYQVFSLKEMRKITEEGAKFSSHIDGSKHMFSPEYVMDIQRIIGADIIMAFDECTPYPCDYGYAENSMHMTHRWLKRCIKRFDETEPIYDHTQSLFPIVQGSVYPDLRKQSAEFIAEQNREGNAIGGLSVGEPAEDMYAMLEVVNDILPKEKPRYLMGVGTPENILEGIALGTDMFDCVMPTRNARNGMLFTTEGIINIRNKKWEDDFSPIDPNLDCYSSKFYTKAYLKHLIKCKEMLGSQIASVHNLAFYIWLVEQAREHILAGDFATWKPKAIKQFMTRL

SEQ ID NO: 51830 - protein, 412 aa, Ardenticatena maritima
  misc_feature (1)..(412): tr|A0A0M9UBZ6|A0A0M9UBZ6_9CHLR Queuine tRNA-ribosyltran sferase OS=Ardenticatena maritima OX=872965 GN=tgt PE=3 SV=1
MLTEGFAFETQHRMGAARVGRLQTPHGLVETPAFVAVGTQATVKSLTPEDLHNVGTQIIFANTYHLYLRPGADIVAEMGGLHRFMRWDGPIMTDSGGFQVFSLGASIEQGVGKVASIFPDEDPNTPRPKRKPTEGQSLVKITEEGVEFRSHLDGSRHFFTPELSIEIQRKLGADIILAFDECTSPLHDEAYTRRAMERTHRWALRSLEAFRTSHPLHGYPQALYGIVQGGAYHDLRVASARFIAEQPFDGIAIGGSLGRTKEDMRAVLEWTIPLLPDEKPRHLLGIGEIPDIFDAVARGVDTFDCVAPTRMARNAGILARTLDGKRLPKFRMNLRNARFKRDPRPLVEGCTCYTCRTYSRAYVHHLFRANELLAYRLATIHNLHYLNDLMRQIRAALLQGTFDELRRHWLGE

SEQ ID NO: 51831 - protein, 262 aa, Ardenticatenia bacterium
  misc_feature (1)..(262): tr|A0A3M1BUT9|A0A3M1BUT9_9CHLR Queuine tRNA-ribosyltran sferase (Fragment) OS=Ardenticatenia bacterium OX=20996 65 GN=tgt PE=3 SV=1
HLDGSRHFFTPELSIEIQRKLGADIILAFDECTSPLHDEAYTRRAMERTHRWALRSLEAFRTSHPLHGYPQALYGIVQGGAYHDLRVESARFIAEQPFDGIAIGGSLGRTKEDMRAVLEWTIPLLPDEKPRHLLGIGEIPDIFDAVARGVDTFDCVAPTRMARNAGILARTLDGKRLPKFRMNLRNARFKRDPRPLVEGCTCYTCRTYSRAYVHHLFRANELLAYRLATIHNLHYLNDLMRQIRAALLQGTFDELRRHWLGE

SEQ ID NO: 51832 - protein, 390 aa, Ardenticatenia bacterium
  misc_feature (1)..(390): tr|A0A2U2SFZ7|A0A2U2SFZ7_9CHLR Queuine tRNA-ribosyltran sferase OS=Ardenticatenia bacterium OX=2099665 GN=tgt P E=3 SV=1
MKEDAQCAARAGIIHTPHGDIPTPVFAPVGTQATVKTMTPRDLRTLGATLILSNTYHLYLRPGAELIARLGGLHRFMGWDGPILTDSGGYQVFSLQALRRVDDEGVVFRSHIDGSTHLFTPEKVIAIQEQLGADIIMPLDECTIPNDYAYNLEALARTHRWAERSLAAKRRSDQALYGIVQGGVFQDLRIQSAQFLRALDLPGYAIGGLSVGETKAEMHQVLEWLHPELPRDRPRYLMGVGSPEDLFECVARGIDQFDCVLPTRMARNGAVLTHRGRLNLRNAQYAADPMPIEEGCLCYTCTTFSRAYLRHLIMADEITGLYLTTLHNLHFMLDLMRRIRQSILDGTFMEFRHAFLASYRTAGNAQEAARTPPEHHPEDAHYPDEVTSCR

SEQ ID NO: 51833 - protein, 376 aa, Arenibacter algicola
  misc_feature (1)..(376): tr|A0A221V3X1|A0A221V3X1_9FLAO Queuine tRNA-ribosyltran sferase OS=Arenibacter algicola OX=616991 GN=tgt PE=3 S V=1
MKFTLQHSDSRTKARAAEIITDHGKIETPIFMPVGTVASVKGVHQKELREEINPDIILGNTYHLYLRPKTEILKQAGGLHKFMNWDRNILTDSGGYQVYSLSDNRKIKEEGVKFKSHIDGSYHVFTPENVMEIQRVIGADIIMAFDECTPYPCDYNYAKRSMHMTHRWLERCIKHLEKTPFAYNYEQTFFPIVQGSTYKDLRRQSAEYIAGVGAEGNAIGGLSVGEPAEEMYAMTEVVCEILPEDKPRYLMGVGTPINILENIALGIDMFDCVMPTRNARNGMLFTAHGTINIKNKKWEDDFSPLDEMGTTFVDHEYSKAYLRHLFAANEYLGKQIATIHNLGFYLWLVREARRHILAGDFYEWKSVMVKQMDKRL

SEQ ID NO: 51834 - protein, 376 aa, Arenibacter echinorum
  misc_feature (1)..(376): tr|A0A327QMK1|A0A327QMK1_9FLAO Queuine tRNA-ribosyltran sferase OS=Arenibacter echinorum OX=440515 GN=tgt PE=3 SV=1
MKFTLQHSDSRTKARAAELITDHGKIETPIFMPVGTVASVKGVHQKELREEINPDIILGNTYHLYLRPKTEILKQAGGLHKFMNWDRNILTDSGGYQVYSLSDNRKIKEEGVKFKSHIDGSYHVFTPENVMEIQRVIGADIIMAFDECTPYPCDYNYAKRSMHMTHRWLDRCIKHLEKTPFTYDFEQTFFPIVQGSTYKDLRQQSAEYIAGVGAEGNAIGGLSVGEPAEEMYAMTEVVCEILPEDKPRYLMGVGTPINILENIALGIDMFDCVMPTRNARNGMLFTAHGTINIKNKKWEDDFSPLDEMGTTFVDHEYSKAYLRHLFAANEYLGKQIATIHNLGFYMWLVREARKHILAGDFYEWKSVMVKQMDKRL

SEQ ID NO: 51835 - protein, 376 aa, Arenibacter nanhaiticus
  misc_feature (1)..(376): tr|A0A1M6IEB4|A0A1M6IEB4_9FLAO Queuine tRNA-ribosyltran sferase OS=Arenibacter nanhaiticus OX=558155 GN=tgt PE= 3 SV=1
MKFTLQHTDPKSKARAAELITDHGKIETPIFMPVGTVASVKGVHQRELKEEINPDIILGNTYHLYLRPKIEILKQAGGLHKFMGWDRNILTDSGGYQVYSLSGNRKIKEEGVKFKSHIDGSYHFFSPESVMEIQRDIGADIIMAFDECTPYPCDYNYAKRSMHMTHRWLDRCIRHLDKTPFTYGYEQTFFPIVQGSTYKDLRRQSAEYIASVGAEGNAIGGLSVGEPAEEMYAMTEVVCEVLPEDKPRYLMGVGTPINILENIALGIDMFDCVMPTRNARNGMLFTAHGTINIKNKKWENDFSPIDEMGTTFVDLEYSKAYLRHLFAANEYLGKQIATIHNLGFYLWLVREARKHILAGDFSEWKSIMVKQMDKRL

SEQ ID NO: 51836 - protein, 387 aa, Arenibacter palladensis
  misc_feature (1)..(387): tr|A0A1M5HAU5|A0A1M5HAU5_9FLAO Queuine tRNA-ribosyltran sferase OS=Arenibacter palladensis OX=237373 GN=tgt PE= 3 SV=1
MTIFAALNRFFLKFTLQHSDTRTKARAAELITDHGKIETPIFMPVGTVASVKGVHQRELKEEINPDIILGNTYHLYLRPKTEILKQAGGLHKFMNWDRNILTDSGGYQVYSLSDNRKIKEEGVKFKSHIDGSYHVFTPENVMEIQRVIGADIIMAFDECTPYPCDYNYAKRSMHMTHRWLERCIKHLEKTPFAYDYEQTFFPIVQGSTYKDLRRQSAEYIAGVGAEGNAIGGLSVGEPAEEMYSMTEVVCEILPEDKPRYLMGVGTPINILENIALGIDMFDCVMPTRNARNGMLFTAHGTINIKNKKWEDDFSPLDEMGTTFVDHEYSKAYLRHLFAANEYLGKQIATIHNLGFYLWLVREARRHILAGDFYEWKSVMVKQMDKRL

SEQ ID NO: 51837 - protein, 376 aa, Arenibacter palladensis
  misc_feature (1)..(376): tr|A0A543W2M5|A0A543W2M5_9FLAO Queuine tRNA-ribosyltran sferase OS=Arenibacter palladensis OX=237373 GN=tgt PE= 3 SV=1
MKFTLQHSDTRTKARAAEIITDHGKIETPIFMPVGTVASVKGVHQKELREEINPDIILGNTYHLYLRPKTEILKQAGGLHKFMNWDRNILTDSGGYQVYSLSDNRKIKEEGVKFKSHIDGSYHVFTPENVMEIQRVIGADIIMAFDECTPYPCDYNYAKRSMHMTHRWLERCIKHLEKTPFAYNYEQTFFPIVQGSTYKDLRRQSAEYIAGVGAEGNAIGGLSVGEPAEEMYAMTEVVCEILPEDKPRYLMGVGTPINILENIALGIDMFDCVMPTRNARNGMLFTAHGTINIKNKKWEDDFSPLDEMGTTFVDHEYSKAYLRHLFAANEYLGKQIATIHNLGFYLWLVREARRHILAGDFYEWKSVMVKQMDKRL

SEQ ID NO: 51838 - protein, 376 aa, Arenibacter sp.
  misc_feature (1)..(376): tr|A0A318HY24|A0A318HY24_9FLAO Queuine tRNA-ribosyltran sferase OS=Arenibacter sp. ARW7G5Y1 OX=2135619 GN=tgt P E=3 SV=1
MKFTLQHSDTRTKARAAELITDHGKIETPIFMPVGTVASVKGVHQRELKEEINPDVILGNTYHLYLRPKTEILKQAGGLHKFMNWDRNILTDSGGYQVYSLSANRKIKEEGVKFKSHIDGSYHVFTPENVMEIQRVIGADIIMAFDECTPYPCDYNYAKRSMHMTHRWLDRCINHLEKTPFTYDYEQTFFPIVQGSTYKDLRKQSAEYIASVGAEGNAIGGLSVGEPAEEMYAMTEVVCEILPEDKPRYLMGVGTPINILENIALGIDMFDCVMPTRNARNGMLFTAHGTINIKNKKWEDDFSPLDEMGTTFVDLEYSKAYLRHLFAANEYLGKQIATIHNLGFYLWLVREARRHILAGDFYEWKSVMVKQMDKRL

SEQ ID NO: 51839 - protein, 376 aa, Arenibacter sp.
  misc_feature (1)..(376): tr|A0A372GQW7|A0A372GQW7_9FLAO Queuine tRNA-ribosyltran sferase OS=Arenibacter sp. P308M17 OX=2303391 GN=tgt PE =3 SV=1
MKFTLQHSDTRTKARAAELITDHGKIETPIFMPVGTVASVKGVHQRELKEEINPDIILGNTYHLYLRPKTEILKQAGGLHKFMNWDRNILTDSGGYQVYSLSDNRKIKEEGVRFKSHIDGSYHVFTPENVMEIQRVIGADIIMAFDECTPYPCDYNYAKRSMHMTHRWLERCMRHLEKTPLAYDYRQTFFPIVQGSTYKDLRRQSAEYIAGVGAEGNAIGGLSVGEPAEEMYAMTEVVCEILPEDKPRYLMGVGTPINILENIALGIDMFDCVMPTRNARNGMLFTAHGTINIKNKKWEDDFSPLDEMGTTFVDLEYSKAYLRHLFAANEYLGKQIATIHNLGFYLWLVREARRHILAGDFHEWKSVMVKQMDKRL

SEQ ID NO: 51840 - protein, 387 aa, Arenibacter troitsensis
  misc_feature (1)..(387): tr|A0A1X7LFA5|A0A1X7LFA5_9FLAO Queuine tRNA-ribosyltran sferase OS=Arenibacter troitsensis OX=188872 GN=tgt PE= 3 SV=1
MTIFAALNRFFLKFTLQHSDTRTKARAAELITDHGKIETPIFMPVGTVASVKGVHQRELKEEINPDIILGNTYHLYLRPKTEILKQAGGLHKFMNWDRNILTDSGGYQVYSLSDNRKIKEEGVKFKSHIDGSYHVFTPENVMEIQRVIGADIIMAFDECTPYPCDYNYAKRSMHMTHRWLERCIRHLEKTPFAYDYEQTFFPIVQGSTYKDLRRQSAEYIAGVGAEGNAIGGLSVGEPAEEMYAMTEVVCEILPEDKPRYLMGVGTPINILENIALGIDMFDCVMPTRNARNGMLFTAHGTINIKNKKWEDDFSPLDEMGTTFVDHEYSKAYLRHLFAANEYLGKQIATIHNLGFYLWLVREARRHILAGDFYEWKSVMVKQMDKRL

SEQ ID NO: 51841 - protein, 371 aa, Arenicella xantha
  misc_feature (1)..(371): tr|A0A395JJ30|A0A395JJ30_9GAMM Queuine tRNA-ribosyltran sferase OS=Arenicella xantha OX=644221 GN=tgt PE=3 SV=1
MKFDLLNTDGNARRARLSFARGEIQTPIFMPVGTAGTVKAMTPAELEQVGAQIVLGNTFHLMLRPGTDVIQAHGDLHDFMQWQKPILTDSGGFQVWSLAELRKISEKGVTFRSPIDGSEKFLGPEEAIDIQAKLGSDIVMIFDECTPFPATEQEARTSMELSMRWAKRSKTAHGDSSSALFGIIQGGMFEHLRDESLAGLQDIGFDGYAIGGLSVGEPKEDMYRILRHLAHKMPDQAPRYLMGVGTPENLVTAVHYGVDMFDCVLPTRNARNGWLYTQTGVVKIRNAQYELDTRPIDEACGCDTCKQFSRSYIKHLLKTNEILGARLATVHNLHFFLDLMQQMREAIEQNSFDQFRANFFEMRGQPDPTVA

SEQ ID NO: 51842 - protein, 370 aa, Arenimonas caeni
  misc_feature (1)..(370): tr|A0A2P6MCT6|A0A2P6MCT6_9GAMM Queuine tRNA-ribosyltran sferase OS=Arenimonas caeni OX=2058085 GN=tgt PE=3 SV=1
MSRMRFEKITTDGPARRGRLHFPRGTVETPAFMPVGTYGTVKAMLPESLRAIGAEIILGNTFHLWLRPGMEVIGAHGGLHGFCKWDGPILTDSGGFQVWSLAKRRKITEEGVTFAAPTDGSRVFLSPEVSMQVQRSLDSDIVMVFDECTPYPATEPVARKSMELSLRWAERSKRAHEGNDAALFGIVQGGTHFDLRARSAEGLRAIGFDGYAVGGLAVGEPPEERNATLDALCPLLPEDQPRYLMGVGKPEDIVEAVARGIDMFDCVMPTRNARNGHYFVRGGQVRIRNAKYEKDLRPIEPGCTCYTCASGYSRSYLRHLDRCNEILGSMLATIHNLHHYQQLMREIRTAIEAGTFAQWRAAFHAARAPD

SEQ ID NO: 51843 - protein, 372 aa, Arenimonas composti
  misc_feature (1)..(372): tr|A0A091B988|A0A091B988_9GAMM Queuine tRNA-ribosyltran sferase OS=Arenimonas composti TR7-09 = DSM 18010 OX=11 21013 GN=tgt PE=3 SV=1
MSRMAFALLGTDGAARRGRLTFPRGTVETPAFMPVGTYGTVKAMLPESVRDTGAEIILGNTFHLWLRPGIEVIAAHGGLHGFCKWNGPILTDSGGFQVWSLAKMRKITEEGVAFAAPTDGSRVFLSPEVSMQVQRALDSDIVMIFDECTPYPATHEVAKKSMELSLRWAGRSKRAHEGNDAALFGIVQGGTHHDLRARSAAGLIDIGFDGYAVGGLAVGEPAEEREATLEALCPQLPADRPRYLMGVGKPEDIVEAVARGIDMFDCVMPTRNARNGHYFVRGGQVRIRNAKYEHDLRPIEEGCTCYTCRSGYSRSYLRHLDRCNEMLGSMLATIHNLHHYQQLMRDIRAAIDAGTFAEFRAAFHATRATGSG

SEQ ID NO: 51844 - protein, 367 aa, Arenimonas donghaensis
  misc_feature (1)..(367): tr|A0A087MJX0|A0A087MJX0_9GAMM Queuine tRNA-ribosyltran sferase OS=Arenimonas donghaensis DSM 18148 = HO3-R19 O X=1121014 GN=tgt PE=3 SV=1
MRFEPLGNDGPARRGRLHFPRGTVETPAFMPVGTYGTVKAMFPEGLRELGAEIILGNTFHLWLRPGTRVIEAHGGLHGFCKWNGPILTDSGGFQVWSLAKRRKISEEGVAFASPTDGAKVFLSPEVSMQVQRSLDSDIVMIFDECTPYPATEPVARTSMELSLRWAERSKRAHEGNDAALFGIVQGGTWPELRSRSAAGLIDIGFDGYAVGGLAVGEPAEEREATLDALCPQLPADKPRYLMGVGRPEDIVEAVARGIDMFDCVMPTRHARTGHYFVRGGQVKIRNAKYENDVRPIEEGCTCYTCANGYSRAYLRHLERCGEILGAMLATIHNLHHYQQLMRDIRAAIDAGRFQDFRAAFHAARAPD

SEQ ID NO: 51845 - protein, 372 aa, Arenimonas malthae
  misc_feature (1)..(372): tr|A0A091AVM7|A0A091AVM7_9GAMM Queuine tRNA-ribosyltran sferase OS=Arenimonas malthae CC-JY-1 OX=1384054 GN=tgt PE=3 SV=1
MRFEKLGQDGPARRGRLHFPRGTVETPAFMPVGTYGTVKAMLPESLRAIGAEIILGNTFHLWLRPGMEVIEAHGGLHGFCKWNGPILTDSGGFQVWSLAKRRKITEEGVTFASPTDGAKVFLSPEVSMQVQRSLDSDIVMIFDECTPYPATEPVARKSMELSLRWAERSKRAHEGNDAALFGIVQGGTWNELRARSAEGLKAIGFDGYAVGGLAVGEPPEERDATLEALCPLLPEDQPRYLMGVGKPEDIVEAVARGIDMFDCVMPTRNARNGHYFVRGGQVRIRNAQYERDLRPIEPGCTCYTCASGYTRSYLRHLDRCNEILASMLATIHNLHHYQQLMRDIRAAIDAGRFREFRAAFHAARAQAAPTGG

SEQ ID NO: 51846 - protein, 368 aa, Arenimonas metalli
  misc_feature (1)..(368): tr|A0A091AQ68|A0A091AQ68_9GAMM Queuine tRNA-ribosyltran sferase OS=Arenimonas metalli CF5-1 OX=1384056 GN=tgt P E=3 SV=1
MRFEKLGQDGRARRGRLHFPRGTVETPAFMPVGTYGTVKAMLPESLRAIGAEIILGNTFHLWLRPGMEVIDLHGGLHGFCQWNGPILTDSGGFQVWSLAKRRKITEEGVTFASPTDGSKVFLSPEVSMQVQRSLDSDIVMIFDECTPYPATEKVARTSMELSLRWAERSKRAHEGNDAALFGIVQGGTYPELRARSAEGLKAIGFDGYAVGGLAVGEPPEERDATLDALVPLLPEDQPRYLMGVGKPEDIVEAVARGIDMFDCVMPTRNARNGHYFVRGGQVRIRNAQYEKDLRPIEEGCTCYTCASGYTRSYLRHLDRCNEILASMLGTIHNLHHYQQLMRDIRAAIDAGTFEAWRAAFHAARGVTL

SEQ ID NO: 51847 - protein, 378 aa, Arenimonas oryziterrae
  misc_feature (1)..(378): tr|A0A091B042|A0A091B042_9GAMM Queuine tRNA-ribosyltran sferase OS=Arenimonas oryziterrae DSM 21050 = YC6267 OX =1121015 GN=tgt PE=3 SV=1
MILDDPMSRMQFEKFAQDGNARRGRLTFPRGTIETPAFMPVGTYGTVKAMKPSDIEAIGAEIILGNTFHLFLRPGLDVISAHEGLHRFTGWQRPILTDSGGFQVWSLAKRRKITEQGVTFASPVDGSKVFLGPEESMNIQRVLGSDIVMIFDECTPYPATEKQARDSMELSLRWAARSKAAHAGNDAALFGIVQGGTYPELRTRSAEGLQAIGFDGYAVGGLAVGEPAAEREQTLEAICPQLPEDKPRYLMGVGKPEDIVEAVARGIDMFDCVMPTRNARNGHYFTRFGQVRIRNQKNEKDLRPIEPGCTCHACANGFTRAYLRHLDKCNEILASMLATIHNLHYYQQLMREIRAAIEAGRFEAFRTEFYAARARGED

SEQ ID NO: 51848 - protein, 373 aa, Arenimonas sp.
  misc_feature (1)..(373): tr|A0A2D8BD04|A0A2D8BD04_9GAMM Queuine tRNA-ribosyltran sferase OS=Arenimonas sp. OX=1872635 GN=tgt PE=3 SV=1
MSRLRFEHIGSDGPARRGRLHFPRGTVETPAFMPVGTYGTVKAMLPESLREVGAEIILGNTFHLWLRPGTEVIEAHGGLHGFCKWDGPILTDSGGFQVWSLAKRRKISEEGVAFASPTDGAKVFLSPEVSMQVQRSLDSDIVMIFDECTPYPATEPVARASMELSLRWAERSKRAHEGNDAALFGIVQGGTWPDLRSRSAAGLVDIGFDGYAVGGLAVGEPAEEREATLDALCPQLPGDKPRYLMGVGKPEDIVEAVARGIDMFDCVMPTRNARNGHYFVRGGQVRIRNAQYEKDLRPIEEGCACYTCRSGYSRAYLRHLERCNEILASMLATIHNLHHYQQLMRDIRAAIEAGRFQDFRAAFHAARAGSPPP

SEQ ID NO: 51849 - protein, 372 aa, Arenimonas sp.
  misc_feature (1)..(372): tr|A0A5B2Z9K4|A0A5B2Z9K4_9GAMM Queuine tRNA-ribosyltran sferase OS=Arenimonas sp. 3729k OX=2608255 GN=tgt PE=3 SV=1
MSRMAFELLGRDGEARRGRLRFPRGTVETPAFMPVGTYGTVKAMLPETLREIGAEIVLGNTFHLWLRPGTEVIAAHGGLHGFSRWNGPILTDSGGFQVWSLAQRRKISEEGVTFAAPTDGSRVFLSPEVSMQVQRVLDSDVVMVFDECTPYPAAEPVARKSMELSLRWAERSKRAHEGNDAALFGIVQGGTWPALRARSAAGLVDIGFDGYAVGGLAVGEPAEEREATLSALCPQLPADKPRYLMGVGKPQDIVEAVARGVDMFDCVMPTRNARNGHYFVRGGQVRIRNARYERDLRPIEEGCECHTCRSGYSRAYLRHLDRCNEILGPMLATIHNLHFYLRLMREIRAAIEQGRFAAFREAFHAGYAAGTD

SEQ ID NO: 51850 - protein, 376 aa, Arenitalea lutea
  misc_feature (1)..(376): tr|A0A1M6FR85|A0A1M6FR85_9FLAO Queuine tRNA-ribosyltran sferase OS=Arenitalea lutea OX=1178825 GN=tgt PE=3 SV=1
MKFELHAKDAQSKARAGKITTDHGVIETPIFMPVGTVGTVKGVHQRELKEDINPDIILGNTYHLYLRPQTNILEQAGGLHKFMNWDRNILTDSGGYQVYSLSANRKIKEEGVKFKSHIDGSYHTFTPENVMEIQRSIGADIIMAFDECTPYPCDYNYAKRSMHMTHRWLDRCVNHLEKTPLKYDYNQAFFPIVQGSTYKDLRKQSAEYIANAGAVGNAIGGLSVGEPAEEMYAMTDVVCSILPEDKPRYLMGVGTPINILENIALGVDMFDCVMPTRNARNGMLFTAHGSINIKNLKWADDFSPIDEMGITFVDTEYTKAYLRHLFTVNELLGKQIATIHNLGFYLWLVREARKHILAGDFNTWKDQMVKQMNNRL

SEQ ID NO: 51851 - protein, 362 aa, Armatimonadetes bacterium
  misc_feature (1)..(362): tr|A0A3M2B121|A0A3M2B121_9BACT Queuine tRNA-ribosyltran sferase OS=Armatimonadetes bacterium OX=2033014 GN=tgt PE=3 SV=1
MIRFETVARSTRSHARVGKLHTPHGVIETPVFMPVGTQASVKTLSQDELEQLGFKIILGNTYHLYLRPGDERIARLGGLHRFMSWSGAILTDSGGFQVFSLAGLRQIDDEGVTFRSHLDGSEHRFTPERSIQVQRHLGSDIMMAFDECPPYPASYDAVARATERTYQWAIRSKQAWESTSSLSTNGEGALFGIIQGGVHEDLRLMSLQQITSLELPGYAIGGVSVGEPVEEIRRIVEFVAPRMPAEKPRYLMGVGTPEDILHAVQQGVDMFDCVLPTRMARHGAVFTSRGRLNLRNAKHLEAREPIDPECRCWVCQRYTLAYIHHLFRAGELLGLRLATYHNLAYYARWMAHLREAIKTGAL

SEQ ID NO: 51852 - protein, 368 aa, Armatimonadetes bacterium
  misc_feature (1)..(368): tr|A0A1Y0H5R1|A0A1Y0H5R1_9BACT Queuine tRNA-ribosyltran sferase OS=Armatimonadetes bacterium Uphvl-Ar1 OX=20044 67 GN=tgt PE=3 SV=1
MVAMRLRYELIAVCPHTGARRGRIHTAHGVVETPCFMPVGTQGNVKTLGSEDLESAGFKLVLSNTYHLSLRPGDELVERFGGLHELMSWRGPILTDSGGYQVMSLSDMNRIDDDGVTFKSHLDGREIYLTPERSMEIQARLGVDIAMCLDQCPPYPCSRDEAAVAMERTHKWLPRNLAAKGERVNLFGIVQGGVHEDLRRESAEVVREMDFDGVAIGGVSVGEPTEMQYPVVAFTAPLLPADKPRYLMGVGHPQDILHAVKCGVDMFDCVLPTRMARHHALYTLKGRVNALNAKWAEEKGWFDEDSVFPVTERYSAGYLRHLFKAGEPFGARLASLHNIWFYGRMMQEIRDAIEQGTWPELMDRYAQA

SEQ ID NO: 51853 - protein, 370 aa, Aromatoleum aromaticum
  misc_feature (1)..(370): sp|Q5P720|TGT_AROAE Queuine tRNA-ribosyltransferase OS= Aromatoleum aromaticum (strain EbN1) OX=76114 GN=tgt PE =3 SV=1
MQFELLAQHGAARRGRLTLAHGTVDTPAFMPVGTYGTVKAMTPAALADTGAQICLGNTFHLWLRPGLDVVAAHGGLHRFMNWDRPILTDSGGFQVFSLGALRKISEEGVKFASPIDGAKLFLTPEESMRIQTVLNSDIAMIFDECTPHPATHDEAAKSMQLSLRWARRSRDEFDRLANPNALFGIVQGGMFEDLRDESLAALDAIGFSGYAIGGLSVGEPKEDMARILAHTAPRLPAGRPRYLMGVGTPEDIVAGVAAGIDMFDCVMPTRNARNGWLFTRYGDIKIKNATHKQDTRPLDPSCDCYTCRNFSRAYLHHLHRAGEILGSMLNTIHNLRYYQTLTAELRAAIAAGDLDSHAARFRADRSTGAC

SEQ ID NO: 51854 - protein, 376 aa, Arsenicibacter rosenii
  misc_feature (1)..(376): tr|A0A1S2VCF2|A0A1S2VCF2_9BACT Queuine tRNA-ribosyltran sferase OS=Arsenicibacter rosenii OX=1750698 GN=tgt PE= 3 SV=1
MTFSISAHDPQSKARTGILTTDHGPIQTPIFMPVGTAGTVKAVHQRELEQDIKAEIILGNTYHLYLRPGLDVLSKAGGLHRFNGWNHPILTDSGGYQVYSLSNTRKIQEEGVTFKSHIDGSKHQFTPENVMDIQRTIGADIIMAFDECTPYPCDYSYARRSMEMTHRWLDRCIDRFDSTEGHYGYRQFLFPIVQGSTYPDLRKQSAEVIASKERTGNAIGGLAVGEPAEEMYASIALVNEILPADKPRYLMGVGTPANILEAIALGVDMFDCVMPTRNARHGILFTTEGVINIKNEKWSRDFSPVDPGLEGYASQFYTKAYLRHLIKAEELLAAQIASIHNLTFYLWLVRQAREHIAAGDYVSWKNEMVVKLMQRL

SEQ ID NO: 51855 - protein, 375 aa, Arsenicitalea aurantiaca
  misc_feature (1)..(375): tr|A0A433XFF8|A0A433XFF8_9RHIZ Queuine tRNA-ribosyltran sferase OS=Arsenicitalea aurantiaca OX=1783274 GN=tgt P E=3 SV=1
MTKTKFTLSATDGLARRGRIDMPRGAIETPAFMPVGTVGTVKAMYPEQVRDTGADILLGNTYHLMLRPGAERVASLGGLHDFMDWQRPILTDSGGFQVMSLAKLRKLDERGVTFRSHIDGSAHELTPERSIEIQLLLDSDIIMQLDECIALPAEHKEMERAMELSLRWADRSKAAFGQQPARMLFGIVQGGDDAALRARSAAGLASIGFDGYSVGGLAVGEPQEVMFRVLEDLTPEMPKEKPRYLMGVGKPDDILGAIGRGIDMFDCVHPTRAGRHGHAYTAMGVVNFKNARHKDDPRPLDANSENPNCRRFSRAYLHHLVRTEEILGAMILSQINLHYYQTLVKGARAAIEAGRFADFAAETREGWAKGDLPPV

SEQ ID NO: 51856 - protein, 372 aa, Arsenophonus endosymbiont
  misc_feature (1)..(372): tr|A0A4Q1B706|A0A4Q1B706_9GAMM Queuine tRNA-ribosyltran sferase OS=Arsenophonus endosymbiont of Bemisia tabaci Asia II 3 OX=1868623 GN=tgt PE=3 SV=1
MKYELQSQDGQARRGRLIFERGIVETPAFMPVGTYGTVKGMTPEEVKQTGAQILLGNTFHLWLRPGQEIMKLHGDLPDFMQWQGPILTDSGGFQVFSLGAMRKIKEEGVYFRNPINGERVFLSPEKSMEIQYDLGSDIVMIFDECTPYPAEWDYAKKSMEMSLRWAKRSRQRFDELANKNALFGIIQGSVYPDLRDISVKGLVEIGFDGYAVGGLAVGEPKADMHRILEHVCPQISHNKPRYLMGVGKPEDLVEGVRRGIDMFDCVMPTRNARNGHLFVTEGVIKIRNAKYKSDTSPLDAHCDCYTCSHYSRAYLHHLDRCNEILGARLNTLHNLRYYQRLMADIRQAIEKGEFEAFAVEFYRRINKSISSN

SEQ ID NO: 51857 - protein, 372 aa, Arsenophonus endosymbiont
  misc_feature (1)..(372): tr|A0A3B0MNZ9|A0A3B0MNZ9_9GAMM Queuine tRNA-ribosyltran sferase OS=Arsenophonus endosymbiont of Trialeurodes va porariorum OX=235567 GN=tgt PE=3 SV=1
MKYELQSQDGQARRGRLIFERGIVETPAFMPVGTYGTVKGMTPEEVKQTGTQILLGNTFHLWLRPGQGIMKLHGDLHDFMQWQGPILTDSGGFQVFSLGAMRKIKEEGVYFRNPINGERVFLSPEKSMEIQYDLGSDIVMIFDECTPYPAEWDYAKKSMEMSLRWAKRSRQRFDELANKNALFGIIQGSVYPDLRDISVKGLVEIGFDGYAVGGLAVGEPKADMHRILEYVCPQIPHNKPRYLMGIGKPEDLVEGVRRGIDMFDCVMPTRNARNGHLFVTEGVIKIRNAKYKSDTSPLDAHCDCYTCSHYSRAYLHHLDRCNEILGARLNTLHNLRYYQRLMAEIRQAIEKGEFEAFAVDFYRRINKSISSN

SEQ ID NO: 51858 - protein, 372 aa, Arsenophonus nasoniae
  misc_feature (1)..(372): tr|D2TW97|D2TW97_9GAMM Queuine tRNA-ribosyltransferase OS=Arsenophonus nasoniae OX=638 GN=tgt PE=3 SV=1
MKYELQTQDGQARRGRLIFERGIVETPAFMPVGTYGTVKGMTPEEVKQTGAQILLGNTFHLWLRPGQEIMKLHGDLHDFMQWQGPILTDSGGFQVFSLGAMRKIKEEGVDFRHPINGERIFLSPEKSMEIQYDLGSDIVMIFDECTPYPADWEYAKKSMEMSLRWAKRSRQRFDELANRNALFGIIQGSVYPDLRDISVKGLIEIGFDGYAVGGLAVGEPKEDMHRILEHVCPQIPQNKPRYLMGVGKPEDLIEGVRRGIDMFDCVMPTRNARNGHLFVTEGVIKIRNAKYKSDTSPLDAHCDCYTCSNYSRAYLHHLDRCNEILGARLNTLHNLSYYQRLMAEIRQAIEKGEFEAFAVEFYRRINKSISSN

SEQ ID NO: 51859 - protein, 372 aa, Arsenophonus sp.
  misc_feature (1)..(372): tr|A0A2A2GW67|A0A2A2GW67_9GAMM Queuine tRNA-ribosyltran sferase OS=Arsenophonus sp. ENCA OX=1987579 GN=tgt PE=3 SV=1
MKYELQSQDGQARRGRLIFERGIVETPAFMPVGTYGTVKGMTPEEVKQTGAQILLGNTFHLWLRPGQEIMKLHGDLHDFMQWQGPILTDSGGFQVFSLGAMRKIKEEGVYFRNPINGERVFLSPEKSMEIQYDLGSDIVMIFDECTPYPAEWDYAKKSMEMSLRWAKRSRQRFDELANKNALFGIIQGSVYPDLRDISVKGLVEIGFDGYAVGGLAVGEPKEDMNRILEHVCPQIPQNKPRYLMGVGKPEDLVEGVRRGIDMFDCVMPTRNARNGHLFVTEGVIKIRNAKYKSDTSPLDAHCDCYTCSHYSRAYLHHLDRCNEILGARLNTLHNLRYYQRLMAEIRQAIEKGEFEAFAVDFYRRINKSISSN

SEQ ID NO: 51860 - protein, 387 aa, Arsukibacterium ikkense
  misc_feature (1)..(387): tr|A0A0M2V740|A0A0M2V740_9GAMM Queuine tRNA-ribosyltran sferase OS=Arsukibacterium ikkense OX=336831 GN=tgt PE= 3 SV=1
MKFELDTTDGRARRGRLIFERGIVETPAFMPVGTYGTVKGMTPEELEATGAQICLGNTFHLMLRPGTDIIKKHGDLHDFMHWHKPILTDSGGFQVFSLGELRKITEEGVKFRSPLNGERIMLTPERSMEVQRDLGSDIVMIFDECTPYPATEQQAKKSMEMSLRWAKRSKEAHGDNPAALFGIIQGGMYPELRDVSLQGLEDIGFDGYAIGGLSVGEPKADMINILNHTTGQMPSHKPRYLMGVGKPEDIVEAVRRGIDMFDCVMPTRNARNGHLFISTGVVKIRNAKHKDDTSPLDPECDCYTCKNYSRSYLHHLDRCNEILGARLNTMHNLHHYQKLMQGLRDAIATGTLEQFVSEFYAKRDLPVPVLEQLADSAKSNETAVSTH

SEQ ID NO: 51861 - protein, 387 aa, Arsukibacterium sp.
  misc_feature (1)..(387): tr|A0A0M2VBH4|A0A0M2VBH4_9GAMM Queuine tRNA-ribosyltran sferase OS=Arsukibacterium sp. MJ3 OX=1632859 GN=tgt PE =3 SV=1
MKFELDTTDGRARRGRLIFERGIVETPAFMPVGTYGTVKAMTPEELDASGAQICLGNTFHLMLRPGTDIIKKHGDLHDFMHWHKPILTDSGGFQVFSLGELRKITEEGVKFRSPLNGERIMLTPERSMEVQRDLGSDVVMIFDECTPYPATEQQAKKSMEMSLRWAKRSKDAHADNPAALFGIIQGGMYPNLRDVSLQGLEDIGFDGYAIGGLSVGEPKQDMITILNHTTGQMPSHKPRYLMGVGKPEDIVEAVRRGIDMFDCVMPTRNARNGHLFVHSGVIKIRNAKHKDDIAPLDVDCDCYTCKNYSRSYLHHLDRCNEILGARLNTMHNLHHYQKLMQGLREAIAAGTLEQFVSEFYAKRDLPVPALEHPAVAVDNTETPVTTN

SEQ ID NO: 51862 - protein, 430 aa, Arthrobacter agilis
  misc_feature (1)..(430): tr|A0A1Y3M761|A0A1Y3M761_9MICC Queuine tRNA-ribosyltran sferase OS=Arthrobacter agilis OX=37921 GN=tgt PE=3 SV= 1
MPAAGWQNRVVHPQSQQSSFSFSVRNRLEDTTPGAGNGGHRHGRTGTITTPHGEIRTPAFIPVGTKASVKAVLPGAMAELGAQALLANAYHLYLQPGADILDEAGGLGAFMNWPGPTFTDSGGFQVMSLGSGFKKVITMDVPVDADKAGADDRIAVGKERLAHIDDDGVWFKSHLNGDRHRFTPEISMQVQHQLGADIMFAFDELTTLMNSRGYQEESLERTRLWALRCIAEHERLTGERSHRPYQALFGVIQGAQYEDLRRKASADLGAMNFDGFGIGGALEKENLGTILGWCSDELPENKPRHLLGISEPDDLFTGIENGADTFDCVSPTRVARNSAFYTPDGRWNLSNSRFKRDFTPLVEGCDCYTCTHYTRAYIHHLFKAKEMVSATLISIHNERFVVRMVDDARAAIDDGTFYELKDEVLGRYYA

SEQ ID NO: 51863 - protein, 427 aa, Arthrobacter agilis
  misc_feature (1)..(427): tr|A0A1Y3M908|A0A1Y3M908_9MICC Queuine tRNA-ribosyltran sferase OS=Arthrobacter agilis OX=37921 GN=tgt PE=3 SV= 1
MGWQNGGVHPQSQQSAFSFAVHHRIEDTTPGADGPGPRHGRTGTITTPHGDIRTPAFIPVGTKASVKAVLPEAMKELGGQALLANAYHLYLQPGADVLDEAGGLGAFMNWPGPTFTDSGGFQVMSLGSGFKKVITMDVPVDAEAAGADDRVATGKERLAHIDDDGVWFKSHLNGDRHRFSPEISMQVQHQLGADIMFAFDELTTLMNSRGYQEESLERTRLWALRCIAEHQRLTAERSHRPYQALFGVIQGAQYEDLRRKASADLGAMDFDGFGIGGALEKENLGTILGWCSDELPEDKPRHLLGISEPDDLFTGIENGADTFDCVSPTRVARNSAFYTPDGRWNLSNARFKRDFTPLVDGCDCYTCTHYTRAYIHHLFKAKEMVSATLISIHNERFVVRMVDDARAALEDGSFYDLKAEVLGRYYA

SEQ ID NO: 51864 - protein, 449 aa, Arthrobacter alpinus
  misc_feature (1)..(449): tr|A0A0M4QPY3|A0A0M4QPY3_9MICC Queuine tRNA-ribosyltran sferase OS=Arthrobacter alpinus OX=656366 GN=tgt PE=3 S V=1
MPSPENSTGLLAPAPATAPPTVPGAPASQSEFSFEVTTRLNETCAPAAEAIQRNGGKFQGRTGVITTPHGTIKTPAFIAVGTKATVKAVLPESMAELGAQALLANAYHLYLQPGADILDAAGGLGKFMNWSGPTFTDSGGFQVMSLGSGFKKVINMDAVAASPHAGADDSVAVGKERLAHIDDDGVWFKSHLNGDMHRFSPEVSMQVQHQIGADIMFAFDELTTLLNSRGYQEMSLERTRLWALRCIEEHFRLTEERLGKPYQALFGVIQGAQYEDLRRKASHDLGEMNFDGFGIGGALEKENLGTIVRWCSEELPEDKPRHLLGISEPDDIFTAIENGADTFDCVSPTRVARTSAFYTPDGRFNLSGAKYKRDFTPLSQECDCYTCENYTRAYIHHLYKAKEMVSATLISIHNERFVVKMVDDARLAIEDGTFFAFKAETLRRYYPNR

SEQ ID NO: 51865 - protein, 449 aa, Arthrobacter alpinus
  misc_feature (1)..(449): tr|A0A1H5M711|A0A1H5M711_9MICC Queuine tRNA-ribosyltran sferase OS=Arthrobacter alpinus OX=656366 GN=tgt PE=3 S V=1
MPTPETVTDLITPAHTTEPHSVPGGPASQAEFGFEVTTRLNETCAPDADAIERNGGKFQGRTGVITTPHGTIKTPAFIAVGTKATVKSVLPESMTELGAQALLSNAYHLYLQPGADILDAAGGLGKFMNWQGPTFTDSGGFQVMSLGSGFKKVINMDAAASSPHAGADDSVAVGKERLAHIDDDGVWFKSHLNGDMHRFSPEISMQVQHQIGADIMFAFDELTTLLNSRGYQEMSLERTRLWALRCIDEHFRLTEDRVGKPYQALFGVIQGAQYEDLRRKASHDLGEMNFDGYGIGGALEKENLGTIVRWCSEELPENKPRHLLGISEPDDIFTAIENGADTFDCVSPTRVARTSAFYTPDGRFNLSGAKYKRDFTPLSDECDCYTCENYTRAYIHHLYKAKEMVSATLISIHNERFVVKMVDDARLAIEDGTFFAFKAEALRRYYPKR

SEQ ID NO: 51866 - protein, 426 aa, Arthrobacter crystallopoietes
  misc_feature (1)..(426): tr|N1V4K9|N1V4K9_9MICC Queuine tRNA-ribosyltransferase OS=Arthrobacter crystallopoietes BAB-32 OX=1246476 GN=t gt PE=3 SV=1
MRQNGWVPQSDFSFTVGKRLAETAAPTTSQIEANGGGFNGRTGTITTPHGEIQTPAFIAVGTKATVKAVLPEAMKDLGAQALLANAYHLYLQPGADVLDEAGGLGKFMNWDGPTFTDSGGFQVMSLGSGFKKVINMDAAAAAGSGSDDRVAAGKERLAHVDDDGVWFKSHLNGDRHRFTPEISMQVQHQLGADIMFAFDELTTLMNSRGYQESSLERTRLWAERCVIEHERLTKERSHRPYQALFGVIQGAQYEDLRRKACRDLGAMNFDGFGIGGALEKENLGTIVRWCNEELPEDKPRHLLGISEPDDIFTAIENGADTFDCVSPTRVARNSAFYTPDGRKNLSNARFKRDFTPLVDGCDCYACANYTRAYIHHLFKANEMVSHTLISIHNERFTVKLVDDARLAIEDGSFFDFKAEVLGRYYS

SEQ ID NO: 51867 - protein, 422 aa, Arthrobacter crystallopoietes
  misc_feature (1)..(422): tr|A0A1H1BNX4|A0A1H1BNX4_9MICC Queuine tRNA-ribosyltran sferase OS=Arthrobacter crystallopoietes OX=37928 GN=tg t PE=3 SV=1
MPQSDFSFTVGKRLSETAPPTAAQVEANGGEFKGRTGTIATPHGDIQTPAFIAVGTKATVKAVLPESMKDLGAQALLANAYHLYIQPGPEILDEAGGLGKFMNWAGPTFTDSGGFQVMSLGSGFKKVINMDAAAEAGAGSGADDRVAAGKERLAHVDDDGVWFKSHLNGDRHRFTPEISMQVQHQLGADIMFAFDELTTLMNSRAYQELSLERTRLWAERCIVEHERLTKERSHRPYQALFGVIQGAQYEDLRRKASSDLGAMNFDGFGIGGALEKENLGTIVRWCNEELPEDKPRHLLGISEPDDIFTAIENGADTFDCVSPTRVARNSAFYTPDGRKNLSNAKFKRDFTPLVEGCDCYACANYTRAYIHHLFKANEMVSHTLISIHNERFTVKLVDDARLAIEDGSFFDFKNETLGRYYA

SEQ ID NO: 51868 - protein, 425 aa, Arthrobacter cupressi
  misc_feature (1)..(425): tr|A0A1G8V9E5|A0A1G8V9E5_9MICC Queuine tRNA-ribosyltran sferase OS=Arthrobacter cupressi OX=1045773 GN=tgt PE=3 SV=1
MGSVPFAKHQSAFSFTVGTRLSESCAPSPEQRDANGGEFLGRTGTITTPHGTIQTPAFIAVGTKATVKAVLPESIRGFGAQAVLANAYHLYLQPGPEILDAAGGLGAFMNWDGPTFTDSGGFQVMSLGSGFKKVIDMKSVDAAGPDDAVAPGKERLAHVDEEGVWFKSHLNGDKHRFSPEISMQVQHQIGADIMFAFDELTTLQNSRAYQEESLERTRRWAERCVVEHRRLTLSRAGKPYQALFGVIQGAQYEDLRRKACRDLGAMDFDGFGIGGALEKENLGTIVRWCNEELPENKPRHLLGISEPDDIFTAIENGADTFDCVSPTRVARNSAFYTADGRFNLSGAKYKADFGPLQDGCDCYTCQNYSRAYIHHLFKAKEMLSATLISIHNERFVVRMVDDARHSIESGDFFEFKAETLARYYH

SEQ ID NO: 51869 - protein, 420 aa, Arthrobacter echini
  misc_feature (1)..(420): tr|A0A5D0XPR1|A0A5D0XPR1_9MICC Queuine tRNA-ribosyltran sferase OS=Arthrobacter echini OX=1529066 GN=tgt PE=3 S V=1
MHPQSQQSSFAFAVHSRLEDTTPGGGSGGPRHGRTGTITTPHGQIRTPAFIPVGTKASVKAVLPGAMAELGAQALLANAYHLYLQPGADILDEAGGLGAFMNWPGPTFTDSGGFQVMSLGSGFKKVITMDAPTDAEKAGADDRVAVGKERLAHIDDDGVWFKSHLNGDRHRFTPEISMQVQHQLGADIMFAFDELTTLMNSRGYQEESLERTRLWAERCVSEHERLTVERNHRPYQALFGVIQGAQYEDLRRKASADLGGMNFDGFGIGGALEKENLGTILGWCSDELPEDKPRHLLGISEPDDLFTGIENGADTFDCVSPTRVARNSAFYTPDGRWNLSNARFKRDFTPLVEGCDCYTCTHYTRAYIHHLFKAKEMVSATLISIHNERFVVRMVDDARAAIDDGTFYDLKAEVLGRYYT

SEQ ID NO: 51870 - protein, 420 aa, Arthrobacter echini
  misc_feature (1)..(420): tr|A0A4S5E2Y4|A0A4S5E2Y4_9MICC Queuine tRNA-ribosyltran sferase OS=Arthrobacter echini OX=1529066 GN=tgt PE=3 S V=1
MHPQSQQSSFAFSVQSRLEDTTPGGGNGGLRHGRTGTITTPHGQISTPAFIPVGTKASVKAVLPGAMADLGAQALLANAYHLYLQPGADILDEAGGLGAFMNWPGPTFTDSGGFQVMSLGSGFKKVIAMDAPVDAETAGADDRVAVGKERLAHIDDDGVWFKSHLNGDRHRFTPEISMQVQHQLGADIMFAFDELTTLMNSRGYQEESLERTRLWAQRCVSEHERLTTERSHRPYQALFGVIQGAQYEDLRRKASADLGAMNFDGFGIGGALEKENLGTILGWCSDELPEDRPRHLLGISEPDDLFTGIENGADTFDCVSPTRVARNSAFYTPDGRWNLSNARFRRDFTPLVEGCDCYTCTHYTRAYIHHLFKAKEMVSATLISIHNERFVVRMVDDARAAIDDGTFYDLKAEVLGRYYA

SEQ ID NO: 51871 - protein, 434 aa, Arthrobacter enclensis
  misc_feature (1)..(434): tr|A0A0V8IGM1|A0A0V8IGM1_9MICC Queuine tRNA-ribosyltran sferase OS=Arthrobacter enclensis OX=993070 GN=tgt PE=3 SV=1
MPANPSPATHADAALPAGQSTFSFSVGTRLAESCPPSDAQEAENGGQFLGRTGTITTPHGQIQTPAFIAVGTKATVKAVLPESMADLGAQALLANAYHLYLQPGADILDEAGGLGAFMNWPGPTFTDSGGFQVMSLGSGFKKVIDMKSVDATGPDDAVAPGKERLAHIDDDGVWFKSHLNGDKHRFSPEISMQVQHQIGADIMFAFDELTTLQNSRGYQEESLERTRLWAERCITEHFRLTEERVGKPYQALFGVIQGAQYEDLRRKACRDLGAMPFDGFGIGGALEKENLGTIVRWCNEELPEDKPRHLLGISEPDDIFTAIENGADTFDCVSPTRVARNSAFYTPTGRYNLSGAKYKRDFGPLQDGCDCYTCQNYSRAYIHHLFKAKEMVSATLISIHNERFVVKMVDDARLAIESGTFFDFKAETLGQYYS

SEQ ID NO: 51872 - protein, 449 aa, Arthrobacter glacialis
  misc_feature (1)..(449): tr|A0A2S4A275|A0A2S4A275_ARTGL Queuine tRNA-ribosyltran sferase OS=Arthrobacter glacialis OX=1664 GN=tgt PE=3 S V=1
MSSPETVTNFLAPDPTGAPGTIPARPASQSEFSFDVTTRLNETCSPGADQIALNGGEFQGRTGVITTPHGTIKTPAFIAVGTKATVKSVLPESMAELGAQALLSNAYHLYLQPGADLLDAAGGLGKFMNWQGPTFTDSGGFQVMSLGSGFKKVINMDAVASSPHAGADDSVAVGKERLAHIDDDGVWFKSHLNGDMHRFTPEVSMQVQHQIGADIMFAFDELTTLLNSRGYQEMSLERTRLWALRCIAEHFSLTEERVGKPYQALFGVIQGAQYEDLRRKASHDLGEMNFDGYGIGGALEKENLGTIVRWCSEELPENKPRHLLGISEPDDIFTAIENGADTFDCVSPTRVARTSAFYTPDGRFNLSGAKYKRDFTPLSEECDCYTCENYTRAYIHHLYKAKEMVSATLISIHNERFVVKMVDDARLAIEDGTFFAFKAETLRRYYPKK

SEQ ID NO: 51873 - protein, 443 aa, Arthrobacter globiformis
  misc_feature (1)..(443): tr|A0A328HKX6|A0A328HKX6_ARTGO Queuine tRNA-ribosyltran sferase OS=Arthrobacter globiformis OX=1665 GN=tgt PE=3 SV=1
MPANPEPSLPPAPLSPSAPVPAARQSEFSFRVGKRLTETCSPAPEQESANGGGFLGRTGTIATPHGEIQTPAFIAVGTKATVKSVLPESMAELGAQALLANAYHLYLQPGPEVLDEAGGLGAFMNWPGPTFTDSGGFQVMSLGSGFKKVIDMKTVPVADTAVPDDAVAPGKERLAHVDEDGVWFKSHLNGDRHRFSPEISMQVQHQIGADIMFAFDELTTLQNSRGYQEESLERTRRWALRCIEEHFRLTDERPGKPYQALFGVIQGAQYEDLRRKACRDLGAMAFDGYGIGGALEKENLGTIVRWCNEELPENKPRHLLGISEPDDIFTAIENGADTFDCVSPTRVARNSAFYTPDGRFNLSGAKYKRDFGPLQDGCDCYACLNYSRAYIHHLFKAKEMLSATLISIHNERFVVKMVDDARLAIESGDFFEFKAETLGRYYS

SEQ ID NO: 51874 - protein, 409 aa, Arthrobacter globiformis
  misc_feature (1)..(409): tr|H0QHX4|H0QHX4_ARTGO Queuine tRNA-ribosyltransferase OS=Arthrobacter globiformis NBRC 12137 OX=1077972 GN=tg t PE=3 SV=1
MGKRLTETCNPTPEQETANGGGFLGRTGTITTPHGEIQTPAFIAVGTKATVKSVLPESMAELGAQALLANAYHLYLQPGPEILDEAGGLGAFMNWHGPTFTDSGGFQVMSLGSGFKKVIDMKSVDTSGPDDAVAPGKERLAHIDDDGVWFKSHLNGDRHRFSPEISMQVQHQIGADIMFAFDELTTLQNSRGYQEESLERTRLWAVRCLEEHFRLTAGRPGKPYQALFGVIQGAQYEDLRRKACRDLGAMAFDGYGIGGALEKENLGTIVRWCNEELPENKPRHLLGISEPDDIFTAIENGADTFDCVSPTRVARNSAFYTPDGRFNLSGAKYKRDFGPLQDGCDCYACLNYSRAYIHHLFKAKEMLSATLISIHNERFVVKMVDDARLAIESGDFFEFKAETLGRYYS

SEQ ID NO: 51875 - protein, 432 aa, Arthrobacter humicola
  misc_feature (1)..(432): tr|A0A315TL12|A0A315TL12_9MICC Queuine tRNA-ribosyltran sferase OS=Arthrobacter humicola OX=409291 GN=tgt PE=3 SV=1
MPANPVSDSLPPAPARQSEFSFRVGKRLSEACPPSAGQIAANGGEFLGRTGTIATPHGEIQTPAFIAVGTKATVKSVLPESIAELGAQAVLANAYHLYLQPGADILDEAGGLGAFMNWRGPTFTDSGGFQVMSLGSGFKKVIDMKSVDHSGPDDAVAPGKERLAHVDEEGVWFKSHLNGDRHRFSPEISMNVQHQIGADIMFAFDELTTLQNSRGYQEESLERTRRWAERCITEHFRLTSERVGKPYQALFGVIQGAQYEDLRRKACRDLGAMNFDGFGIGGALEKENLGTIVRWCNEELPENKPRHLLGISEPDDIFTAIENGADTFDCVSPTRVARNSAFYHPTGRFNLSGAKYKRDFGPLQEDCDCYACLNYSRAYIHHLFKAKEMVSATLISIHNERFVVKMVDDARLAIESGNFFDFKAETLGRYYS

SEQ ID NO: 51876 - protein, 448 aa, Arthrobacter livingstonensis
  misc_feature (1)..(448): tr|A0A2V5LDA3|A0A2V5LDA3_9MICC Queuine tRNA-ribosyltran sferase OS=Arthrobacter livingstonensis OX=670078 GN=tg t PE=3 SV=1
MPSPEPATDLLSTDPAAPQRIPGPPASQGEFGFKVTTRMGESCAPSDAAVELNGGKFQGRTGVITTPHGTVKTPAFIAVGTKATVKAVLPESMAELGAQALLANAYHLYLQPGAELLDAAGGLGKFMNWHGPTFTDSGGFQVMSLGSGFKKVINMDAAAASPHAGADDSVAVGKERLAHIDDDGVWFKSHLNGDMHRFTPEVSMQVQHQIGADIMFAFDELTTLLNSRGYQEMSLERTRLWAQRCVEEHFRLTLDRTGKPYQALFGVIQGAQYEDLRRKASRDLGSMDFDGYGIGGALEKENLGTIVRWCAEELPEDKPRHLLGISEPDDIFTAIENGADTFDCVSPTRVARTSAFYTPDGRFNLSGARYKRDFGPLVDGCDCYACANYSRAYIHHLFKAKEMVSATLVSIHNERFVVKMVDDARLAIEDGTFFDFKAETLRRYYPNR

SEQ ID NO: 51877 - protein, 441 aa, Arthrobacter nitrophenolicus
  misc_feature (1)..(441): tr|L8TP09|L8TP09_9MICC Queuine tRNA-ribosyltransferase OS=Arthrobacter nitrophenolicus OX=683150 GN=tgt PE=3 S V=1
MPAKPASVPSPASAEPVVDLPDQSGFSFTVGSRLADSCPPTAAQMAENGGEFLGRTGTITTPHGEIQTPAFIAVGTKATVKAVLPEAVADLGAQAVLANAYHLYLQPGADILDEAGGLGAFMNWPGPTFTDSGGFQVMSLGSGFKKVIDMKTVAAAGAPGPDDAVAPGKERLAHIDDDGVWFKSHLNGDRHRFSPEISMQVQHQIGADIMFAFDELTTLQNSRGYQEESLERTRLWALRCLDEHFRLTTERVGKPYQALFGVIQGAQYEDLRRKACRDLGAMPFDGYGIGGALEKENLGTIVRWCNEELPEDKPRHLLGISEPDDIFTAIENGADTFDCVSPTRVARNSAFYTPHGRFNLSGAKYKRDFGPLQEGCDCYACTHYSRAYIHHLFKAKEMLSATLISIHNERFVVKMVDDARLAIEAGTFFDFKAETLARYYS

SEQ ID NO: 51878 - protein, 441 aa, Arthrobacter nitrophenolicus
  misc_feature (1)..(441): tr|A0A4R5Y360|A0A4R5Y360_9MICC Queuine tRNA-ribosyltran sferase OS=Arthrobacter nitrophenolicus OX=683150 GN=tg t PE=3 SV=1
MPANPASVPSPASAEPVVDLPDQSGFSFTVGTRLADSCPPTAAQMAENGGEFLGRTGTITTPHGEIQTPAFIAVGTKATVKAVLPEAVADLGAQAVLANAYHLYLQPGADILDEAGGLGAFMNWPGPTFTDSGGFQVMSLGSGFKKVIDMKTVAAAGAPGPDDAVAPGKERLAHIDDDGVWFKSHLNGDRHRFSPEISMQVQHQIGADIMFAFDELTTLQNSRGYQEESLERTRLWALRCLDEHFRLTTERVGKPYQALFGVIQGAQYEDLRRKACRDLGAMPFDGYGIGGALEKENLGTIVRWCNEELPEDKPRHLLGISEPDDIFTAIENGADTFDCVSPTRVARNSAFYTPHGRFNLSGAKYKRDFGPLQDGCDCYACTHYSRAYIHHLFKAKEMLSATLISIHNERFVVKMVDDARLAIEAGTFFDFKAETLARYYS

SEQ ID NO: 51879 - protein, 432 aa, Arthrobacter oryzae
  misc_feature (1)..(432): tr|A0A3N0BMK6|A0A3N0BMK6_9MICC Queuine tRNA-ribosyltran sferase OS=Arthrobacter oryzae OX=409290 GN=tgt PE=3 SV =1
MPANSETPAPALQPARQSEFSFRVGKRLTETCSPSAGQVAENGGEFLGRTGTIATPHGEIQTPAFIAVGTKATVKAVLPESVAELGAQAVLANAYHLYLQPGAEILDEAGGLGSFMNWAGPTFTDSGGFQVMSLGAGFKKVIDMKSVDQSGPDDAVAPGKERLAHVDEEGVWFKSHLNGDRHRFSPEISMNVQHQIGADIMFAFDELTTLQNSRGYQEESLERTRRWAERCITEHFRLTTERAGKPYQALFGVIQGAQYEDLRRKACRDLGAMNFDGFGIGGALEKENLGTIVRWCTEELPENKPRHLLGISEPDDIFTAIENGADTFDCVSPTRVARNSAFYHPTGRYNLSGAKYKRDFGPLQDGCDCYACLHYSRAYIHHLFKAKEMLSATLISIHNERFVVKMVDDARLAIEAGNFFDFKAETLGQYYS

SEQ ID NO: 51880 - protein, 409 aa, Arthrobacter oryzae
  misc_feature (1)..(409): tr|A0A495EPV7|A0A495EPV7_9MICC Queuine tRNA-ribosyltran sferase OS=Arthrobacter oryzae OX=409290 GN=tgt PE=3 SV =1
MGKRLSEACPPSSAQVAENGGEFLGRTGTIATPHGEIQTPAFIAVGTKATVKSVLPESIAELGAQAVLANAYHLYLQPGADILDEAGGLGAFMNWRGPTFTDSGGFQVMSLGSGFKKVIDMKSVDHSGPDDAVAPGKERLAHVDEEGVWFKSHLNGDRHRFSPEISMNVQHQIGADIMFAFDELTTLQNSRGYQEESLERTRRWAERCITEHFRLTDQRAGKPYQALFGVIQGAQYEDLRRKACRDLGAMNFDGFGIGGALEKENLGTIVRWCNEELPENKPRHLLGISEPDDIFTAIENGADTFDCVSPTRVARNSAFYHPTGRYNLSGAKYKRDFGPLQEDCDCYACLNYSRAYIHHLFKAKEMVSATLISIHNERFVVKMVDDARLAIEAGNFFEFKAETLGKYYS

SEQ ID NO: 51881 - protein, 420 aa, Arthrobacter pityocampae
  misc_feature (1)..(420): tr|A0A2S5IUG6|A0A2S5IUG6_9MICC Queuine tRNA-ribosyltran sferase OS=Arthrobacter pityocampae OX=547334 GN=tgt PE =3 SV=1
MHPQSQQSSFAFSVHTRIEDTTPGAGSGGPRHGRTGTITTPHGEIRTPAFIPVGTKATVKSVLPGAMAELGAQALLANAYHLYLQPGADILDEAGGLGAFMNWPGPTFTDSGGFQVMSLGSGFKKVISMDVPVGAEAAGADDRIAVGKERLAHIDDDGVWFKSHLNGDRHRFTPEISMQVQHQLGADIMFAFDELTTLMNSRGYQEESLERTRLWAERCIAEHRRLTVERSHRPYQALFGVIQGAQYEDLRRKASADLGVMDFDGFGIGGALEKENLGTILGWCSDELPENKPRHLLGISEPDDLFTAIENGADTFDCVSPTRVARNSAFYTPDGRWNLSNARFRRDFTPLVEGCDCYTCTHYTRAYIHHLFKAKEMVSATLISIHNERFVVRMVDDARAALDDGTFYDLKAEVLGRYYA

SEQ ID NO: 51882 - protein, 455 aa, Arthrobacter psychrochitiniphilus
  misc_feature (1)..(455): tr|A0A2V3DTQ7|A0A2V3DTQ7_9MICC Queuine tRNA-ribosyltran sferase OS=Arthrobacter psychrochitiniphilus OX=291045 GN=tgt PE=3 SV=1
MPSPETLTDLLAPAHAPSEAPCEPPAPGAPASQSEFGFTVTTRLNETCAPNAAAIEKNGGAFQGRTGVITTPHGAIKTPAFIAVGTKATVKAVLPETMAELGAQALLSNAYHLYLQPGADILDAAGGLGKFMNWSGPTFTDSGGFQVMSLGSGFKKVINMDAVAASPHAGADDSVAVGKERLAHIDDDGVWFKSHLNGDMHRFTPEVSMQVQHQIGADIMFAFDELTTLLNSRGYQEMSLERTRLWALRCIEEHFRLTEERTGKPYQALFGVIQGAQYEDLRRKASHDLGEMNFDGFGIGGALEKENLGTIVRWCSEELPEDKPRHLLGISEPDDIFTAIENGADTFDCVSPTRVARTSAFYTPDGRFNLSGAKYKRDFTPLSDECDCYTCENYTRAYIHHLFKAKEMVSSTLVSIHNERFVVKMVDDARLAIEDGTFFAFKAETLRRYYPKRQA

SEQ ID NO: 51883 - protein, 449 aa, Arthrobacter psychrolactophilus
  misc_feature (1)..(449): tr|A0A2V5IR05|A0A2V5IR05_9MICC Queuine tRNA-ribosyltran sferase OS=Arthrobacter psychrolactophilus OX=92442 GN= tgt PE=3 SV=1
MPTPETVTDLLAPAPISEPQSTPGAPASQSEFSFEVTTRLNETCAPTADAIERNGGAFQGRTGVITTPHGTIKTPAFIAVGTKATVKSVLPESMTELGAQALLSNAYHLYLQPGADILDAAGGLGKFMNWQGPTFTDSGGFQVMSLGSGFKKVINMDAVASSPNAGSDDSVAVGKERLAHIDDDGVWFKSHLNGDMHRFSPEISMQVQHQIGADIMFAFDELTTLLNSRGYQEMSLERTRLWALRCIAEHFKLTEDRVGKPYQALFGVIQGAQYEDLRRKASHDLGEMNFDGYGIGGALEKENLGTIVRWCTEELPENKPRHLLGISEPDDIFTAIENGADTFDCVSPTRVARTSAFYTPDGRFNLSGAKYKRDFTPLSDECDCYTCENYTRAYIHHLYKAKEMVSATLISIHNERFVVKMVDDARLAIEDGTFFEFKAETLRRYYPNR

SEQ ID NO: 51884 - protein, 447 aa, Arthrobacter rhombi
  misc_feature (1)..(447): tr|A0A1R4ERM7|A0A1R4ERM7_9MICC Queuine tRNA-ribosyltran sferase OS=Arthrobacter rhombi OX=71253 GN=tgt PE=3 SV= 1
MPETDSPLDVTTTASATGAPPSAPSTVAEPHPRQSAFGFDVGTRLKNADGSPSLGRTGTIRTPHGDIRTPAFIAVGTKATVKAVLPEAVSDLGAQAVLANAYHLYLQPGAEILDAAGGLGAFMNWPGPTFTDSGGFQVMSLGSGFKKVIDMQGSTAAGGDDQVAPGKERLANVDEDGVWFKSHLNGDRHRFSPEISMGVQHQIGADIMFAFDELTTLHNSRGYQVESLERTRRWAERCIIEHFRLTDEREPKPYQALFGVIQGAQYEDLRRKACRDLGDMPFDGFGIGGALEKENLGTIVGWCSEELPEDKPRHLLGISEPDDIFTAIENGADTFDCVSPTRVARNSAFYTANGRFNLSGRRYRADFTPLQDGCSCYTCTHYTRAYIHHLFKAKELVSHTLISIHNEYFVVSLVDRAREAIENGTFADLKASTLAAYYAGAPDPQGL

SEQ ID NO: 51885 - protein, 427 aa, Arthrobacter saudimassiliensis
  misc_feature (1)..(427): tr|A0A078MN67|A0A078MN67_9MICC Queuine tRNA-ribosyltran sferase OS=Arthrobacter saudimassiliensis OX=1461584 GN =tgt PE=3 SV=1
MSSSSSFSFTLGKRLRETAQPTEEQTAANGGEFQGRTGVISTPHGEIRTPAFIGVGTQATVKAVLPEAMAELGAQALLANAYHLYLQPGADVLDAAGGLGKFMNWPGPTFTDSGGFQVMSLGAGFKKVINMNADGSTHATGADDDVAPGKERLAHVDDDGVWFKSHINGDRHRFTPEISMQVQHQLGADIMFAFDELTTLMNSRGYQERSLERTRLWAIRCLEEHRRLTEERADKPYQALFGVLQGAQYEDLRRKAARDLGAMDFDGFGLGGALEKENLGTIIRWCTEELPEDKPRHLLGISEPDDLFTAIENGADTFDCVSPTRVARTSAFYTPYGRINLLKARYKKDFSPLVEGCPCYTCTHYTKAYLHHLFKAKEMLSATLVSIHNEHFTVNLVDDARRAIEDGTFFELKAEVLGRYYGGAKDA

SEQ ID NO: 51886 - protein, 451 aa, Arthrobacter sp.
  misc_feature (1)..(451): tr|A0A0Q9MZK8|A0A0Q9MZK8_9MICC Queuine tRNA-ribosyltran sferase OS=Arthrobacter sp. Soil762 OX=1736401 GN=tgt P E=3 SV=1
MPANPVSAPSVSVSAASADPVAPAAGSAAAADQSQFSFTVGTRLADSCAPSSAQVSANGGEFLGRTGTMTTPHGEIRTPAFIAVGTKATVKSVLPESMADLGAQALLANAYHLYLQPGADILDEAGGLGAFMNWSGPTFTDSGGFQVMSLGSGFKKVIDMKTVSSADAAVPDGAVAPGKERLAHIDDDGVWFKSHLNGDRHRFSPEISMQVQHKIGADITFAFDELTTLHNSRGYQEESLERTRLWALRCLEEHFRLTTSRVGKPYQALFGVIQGAQYEDLRRKACRDLGAMDFDGYGIGGALEKENLGTIVRWCNEELPEDKPRHLLGISEPDDIFTAIENGADTFDCVSPTRVARNSAFYTPTGRFNLSGAKYKRDFGPLQDGCDCYACANYSRAYIHHLFKAKEMLSATLISIHNERFVVKMVDDARLAIEAGTFFEFKAETLAQYYR

SEQ ID NO: 51887 - protein, 409 aa, Arthrobacter sp.
  misc_feature (1)..(409): tr|A0A1G5QKS1|A0A1G5QKS1_9MICC Queuine tRNA-ribosyltran sferase OS=Arthrobacter sp. UNCCL28 OX=1502752 GN=tgt P E=3 SV=1
MGKRLTETCSPSGAQVDANGGAFLGRTGTITTPHGTIRTPAFIAVGTKATVKAVLPESIAELGAQAVLANAYHLYLQPGPEILDAAGGLGAFMNWSGPTFTDSGGFQVMSLGSGFKKVIDMKNVDSSGPDDAVAPGKERLAYIDDDGVWFKSHLNGDRHRFSPEISMQVQHQIGADIMFAFDELTTLQNSRAYQEESLERTRLWALRCLEEHAALTSSRAGKPYQALFGVIQGAQYEDLRRKACQDLGAMPFDGYGIGGALEKENLGTIVRWCNEELPENKPRHLLGISEPDDIFTAIENGADTFDCVSPTRVARNSAFYTPFGRFNLSGAKYKTDFGPLQDGCDCYTCLNYSRAYIHHLFKAKEMLSATLISIHNERFVVKMVDDARLAIESGDFFEFKAETLGRYYS

SEQ ID NO: 51888 - protein, 416 aa, Arthrobacter subterraneus
  misc_feature (1)..(416): tr|A0A1G8HVD2|A0A1G8HVD2_9MICC Queuine tRNA-ribosyltran sferase OS=Arthrobacter subterraneus OX=335973 GN=tgt P E=3 SV=1
MPQSDFLFSIGKRLSETTAAGEGLHGRTGTITTPHGEIQTPAFIAVGTKATVKAVLPESMKEAGAQALLANAYHLYLQPGADVLDEAGGLGKFMNWDGPTFTDSGGFQVMSLGSGFKKVITMDAAAASEHAGADDRVAVGKERLAHIDDDGVWFVSHLNGDRHRFTPEISMQVQHQLGADVMFAFDELTTLMNSRGYQEESLERTRLWAERCIAEHERLTTERADKPYQALFGVIQGAQYEDLRRKASRDLGAMNFDGFGVGGALEKENLGTILGWCADELPEAKPRHLLGISEPDDLFTGIENGADTFDCVSPTRVARNSAFYVPDGRWNLSNARFKRDFTPLMEGCDCYTCTHYTRAYIHHLFKAKEMVSATLISIHNERFVIRMVDDARAAIEDGTYFDLKAEVLGRYYAGAR

SEQ ID NO: 51889 - protein, 437 aa, Arthrobacter woluwensis
  misc_feature (1)..(437): tr|A0A2T3BXF4|A0A2T3BXF4_9MICC Queuine tRNA-ribosyltran sferase OS=Arthrobacter woluwensis OX=156980 GN=tgt PE= 3 SV=1
MSWGNLWQNGRVSSTAESLIDPAVPEREPARQEEFGFTVGTRLADAEPGKQGRTGTIRTPHGEIQTPAFIAVGTKATVKAVLPESMKDLGAQALLSNAYHLYLQPGPEILDAAGGLGRFMNWQGPTFTDSGGFQVMSLGSGFKKVINMDVVDNSGPDDAVAPGKERLAHVDEDGVWFKSHLNGDKHRFTPEISMQVQHQIGADIMFAFDELTTLQNSRAYQEESLERTRRWAERCVTEHFRLTEERVGKPYQALFGVIQGAHYEDLRRKACRDLGAMNFDGFGLGGALEKENLGTIVGWCAEELPEDKPRHLLGISEPDDIFTAIENGADTFDCVSPTRVARNSAFYTPDGRFNLSGRKYKADFGPLYDGCDCYACANYTRAYIHHLFKAKEMVAATLVSIHNERFVVKLVDDARLAMESGDFAAYKAETLGRYYSA

SEQ ID NO: 51890 - protein, 426 aa, Arthrobacter woluwensis
  misc_feature (1)..(426): tr|A0A1H4VVA8|A0A1H4VVA8_9MICC Queuine tRNA-ribosyltran sferase OS=Arthrobacter woluwensis OX=156980 GN=tgt PE= 3 SV=1
MSSTAESLIDPAVPEREPARQEEFGFTVGTRLADAEPGKQGRTGTIRTPHGEIQTPAFIAVGTKATVKAVLPESMKDLGAQALLSNAYHLYLQPGPEILDAAGGLGRFMNWQGPTFTDSGGFQVMSLGSGFKKVINMDVVDNSGPDDAVAPGKERLAHVDEDGVWFKSHLNGDKHRFTPEISMQVQHQIGADIMFAFDELTTLQNSRAYQEESLERTRRWAERCVTEHFRLTEERVGKPYQALFGVIQGAHYEDLRRKACRDLGAMNFDGFGLGGALEKENLGTIVGWCAEELPEDKPRHLLGISEPDDIFTAIENGADTFDCVSPTRVARNSAFYTPDGRFNLSGRKYKADFGPLYDGCDCYACANYTRAYIHHLFKAKEMVAATLVSIHNERFVVKLVDDARLAMESGDFAVYKAETLGRYYSA

SEQ ID NO: 51891 - protein, 375 aa, Arthromitus sp.
  misc_feature (1)..(375): tr|F9VKH8|F9VKH8_ARTSS Queuine tRNA-ribosyltransferase OS=Arthromitus sp. (strain SFB-mouse-Japan) OX=1029718 GN=tgt PE=3 SV=1
MYRLLNVDGRARRGEFKTVHGIIQTPVFMNVGTLGVIKGAISTVDLNKINCQVELSNTYHLHIRPGDENVKKLGGLHKFMNWDKPILTDSGGFQIFSLSNLRKITEDGVEFNSHLDGKKIFIGPEESMRIQSNLASTIAMAFDECIPNPSERSYVINSVSRTTRWLKRCITRLNMLNNMADTINSKQLLFGINQGGIYNDIRIEHAKEISDLDLSGYAIGGLAVGETKEEMYNVIEEVVPYLPVDRPIYLMGVGTPENILEAVYRGVDFFDCVLPARNGRHGQVFTSTGKVNLTNKKFELDDNPIDEKCFCEACKNYSRAYIRHLFKAKEMLAMRLCVLHNLNFYNKLLEEIRKSIELNQFSAFKNQKFREWGIR

SEQ ID NO: 51892 - protein, 370 aa, Arthrospira maxima
  misc_feature (1)..(370): tr|B5W944|B5W944_LIMMA Queuine tRNA-ribosyltransferase OS=Arthrospira maxima CS-328 OX=513049 GN=tgt PE=3 SV=1
MPQSFSFQIQTRCTHTHARAGVFVTPHGIVETPRFMPVGTLANVKTLTPAQLLDTGAQMVLSNTYHLHLQPGEKIVAAAGGIHKFMGWNGPILTDSGGFQVFSLSEMRTVTEAGVRFRSPHDGAIIELSPERSIEIQNQLGADVIMAFDECPPYPASREDVVAATARTVRWLERCIAAHDRPEAALFGIVQGGVYPDLRVAAAKKLVEFDLPGYAIGGVSVGEPTDLMEMVVRVTTPILPDHKPRYLMGIGTYREMAQAIASGIDLFDCVIPTRLARHGAALVAGERWNLKNAQFREDFRPLDPSCPCYTCQNFSRAYISHLVRAKELLAYTLLSIHNVTELIRFTTRIRDAILGDRFTDEFAQYLQVQS

SEQ ID NO: 51893 - protein, 341 aa, Arthrospira platensis
  misc_feature (1)..(341): tr|K1W0A2|K1W0A2_ARTPT Queuine tRNA-ribosyltransferase OS=Arthrospira platensis C1 OX=459495 GN=tgt PE=3 SV=1
METPRFMPVGTLANVKTLTPAQLLDTGAQMVLSNTYHLHLQPGEKIVAAAGGIHKFMGWNGPILTDSGGFQVFSLSEMRTVTEAGVRFRSPHDGAIIELSPERSIEIQNQLGADVIMAFDECPPYPASREDVVAATARTVRWLERCIAAHDRPEAALFGIVQGGVYPDLRVAAAKKLVEFDLPGYAIGGVSVGEPTDLMEMVVRVTTPILPDHKPRYLMGIGTYREMAQAIASGIDLFDCVIPTRLARHGAALVAGERWNLKNAQFREDFRPLDPSCPCYTCQNFSRAYISHLVRAKELLAYTLLSIHNVTELIRFTTRIRDAILGDRFTDEFAQYLQVQS

SEQ ID NO: 51894 - protein, 370 aa, Arthrospira platensis
  misc_feature (1)..(370): tr|D4ZQH2|D4ZQH2_ARTPN Queuine tRNA-ribosyltransferase OS=Arthrospira platensis (strain NIES-39 / IAM M-135) O X=696747 GN=tgt PE=3 SV=1
MPESFSFQIQARCTQTQARAGVFVTPHGIVETPRFMPVGTLANVKTLTPAQLLDTGAQMVLSNTYHLHLQPGEKIVAAAGGLHKFMGWNGPILTDSGGFQVFSLSEMRTVTEAGVRFRSPHDGAIIELSPERSIEIQNQLGADVIMAFDECPPYPASREDVIAATDRTVRWLERCIAAHNRPEAALFGIVQGGVYPDLRVAAAKKLVEFDLPGYAIGGVSVGEPTDLMEMVVRVTTPILPDHKPRYLMGIGTYREMAQAIASGIDLFDCVIPTRLARHGAALVAGERWNLKNAQFREDFRPLDPSCPCYTCQNFSRAYISHLVRAKELLAYTLLSIHNVTELIRFTTRIRDAILSDRMTDEFGQYLQVDC

SEQ ID NO: 51895 - protein, 370 aa, Arthrospira sp.; identical to SEQ ID NO: 51892
  misc_feature (1)..(370): tr|A0A328V5Y5|A0A328V5Y5_9CYAN Queuine tRNA-ribosyltran sferase OS=Arthrospira sp. O9.13F OX=1982223 GN=tgt PE= 3 SV=1

SEQ ID NO: 51896 - protein, 381 aa, Asaccharobacter celatus
  misc_feature (1)..(381): tr|A0A3N0AVV9|A0A3N0AVV9_9ACTN Queuine tRNA-ribosyltran sferase OS=Asaccharobacter celatus DSM 18785 OX=1121021 GN=tgt PE=3 SV=1
MALFDCTCDATSGHARALTYTTAHGDFHTPMFMPVGTSATVKGITTSQLRELGSQVVLANTYHLAMRPGADLVAEAGGIHRFMNYDGPMLTDSGGFQVFSLADTVRLSDDGVTFQSIYDGSRIHWTPEENMRIQELIGADIAMQLDQCAPYPATREFVARAVDYSSAWARRCLAAHKRPDQTLFGIVQGGMHLDLRLESVRRLREIEDESLAASGRRFGGYGIGGYSVGEDHEVMFETLGEVARACPDDRPRYLMGVGNPTTLVRAVREGVDMFDCVLPTRTARMGTAFSSAGRMNMRNAKYARDFTPLDPTCDCPTCRNHTRAYIRHLVKQNEMLGAILLSVHNLHFLLDLMRHAREAVLADAYEEFFEQWMESDAAADY

SEQ ID NO: 51897 - protein, 381 aa, Asaccharobacter celatus
  misc_feature (1)..(381): tr|A0A369P5E9|A0A369P5E9_9ACTN Queuine tRNA-ribosyltran sferase OS=Asaccharobacter celatus OX=394340 GN=tgt PE= 3 SV=1
MALFDCTCDAVSGHARALTYTTAHGDFHTPMFMPVGTSATVKGITTDQLRELGSQVVLANTYHLAMRPGAELVAEAGGIHRFMNYDGPMLTDSGGFQVFSLADTVKLSDDGVTFQSIYDGSKIHWTPEENMRIQELIGADIAMQLDQCAPYPATREFVARAVDYSSAWARRCLAAHTRPDQTLFGIVQGGMHLDLRLESVRRLREIEEESLTAGGRRFGGYGIGGYSVGEDHEVMFETLGEVARACPDDRPRYLMGVGNPTTLVRAVREGVDMFDCVLPTRTARMGTAFSSAGRMNLRNAKYARDFTPLDPVCDCPTCRNHTRAYIRHLVKQNEMLGAILLSVHNLHFLLDLMRRAREAVLADAYEEFFEQWMESDAAADY

SEQ ID NO: 51898 - protein, 373 aa, Asaccharospora irregularis
  misc_feature (1)..(373): tr|A0A1M5J886|A0A1M5J886_9FIRM Queuine tRNA-ribosyltran sferase OS=Asaccharospora irregularis DSM 2635 OX=11213 21 GN=tgt PE=3 SV=1
MYAVRYELIKTCKQSGARLGRLHTPHGVIETPIFMPVGTQATVKAMTPEELKEIGSQIILSNTYHLYMRPGHELVKEAGGLHKFMNWDKPILTDSGGFQVFSLGPLRKITEEGVHFRSHIDGSKHFISPEKAMEIQNALGSDIMMAFDECAPYPADRDYVKNSLERTTRWLERCKEAHKNTENQALFGIIQGGMYKDLREQSAKEVLSIDLPGYAIGGLSVGEPKQLMYEVLEYTTPLMPVDKPRYLMGVGSPDDLVEGVIRGVDMFDCVLPTRIARNGTAMTSQGKVVVRNAKYAKDFTPLDPECDCYCCKNYTRAYIRHLVKANEILGARLITIHNLNFLLKLMEQIREAIMEDRLLDFRAEFFAKYGYEI

SEQ ID NO: 51899 - protein, 390 aa, Asaia bogorensis
  misc_feature (1)..(390): tr|A0A0P0YF04|A0A0P0YF04_9PROT Queuine tRNA-ribosyltran sferase OS=Asaia bogorensis NBRC 16594 OX=1231624 GN=tg t PE=3 SV=1
MTESATKMQWKAEACCGQARAGHLHTAHGTIPTPTFMPVGTVGTVKAMTMDAVRSTGAGIILGNTYHLMLRPGAERVRKMGGLHRMMDWSGPILTDSGGFQVMSLGALRKLDQDGVTFNSHIDGSKHRLTPESSTDIQHALDATITMCFDECPALPATPERLESSMELSMRWAARSREAFVQRPGYGQFGIVQGGTERDLRARSAKALTDIGFEGYAIGGLAVGEGQELMFSTLDFTTPLLPQDHARYLMGVGTPDDLLGGVERGVDMFDCVMPTRAGRTARAYTERGTLNLRNARHAEDNRPISPDCDCLACSRHSRAYLHHLFRANEILGPMLLTWHNLAYYQRLMREIRAAIVDGTLPQKALALRAGWAAGDWTQDEFPQPDWPPVP

SEQ ID NO: 51900 - protein, 390 aa, Asaia platycodi
  misc_feature (1)..(390): tr|A0A060QKU2|A0A060QKU2_9PROT Queuine tRNA-ribosyltran sferase OS=Asaia platycodi SF2.1 OX=1382230 GN=tgt PE=3 SV=1
MTESPTKMQWKAEACCGQARAGHLHTAHGTIPTPTFMPVGTVGTVKAMTMDAVRSTGAGIILGNTYHLMLRPGAERVRKMGGLHRMMDWSGPILTDSGGFQVMSLGALRKLDQDGVTFNSHIDGSKHRLTPESSTDIQHALDATITMCFDECPALPATPERLESSMELSMRWAARSREAFVQRPGYGQFGIVQGGTERDLRARAAKALTDIGFEGYAIGGLAVGEGQELMFSTLDFTTPLLPQDHARYLMGVGTPDDLLGGVERGVDMFDCVMPTRAGRTARAYTERGTLNLRNARHAEDNRPISPNCDCLACSRHSRAYLHHLFRANEILGPMLLTWHNLAYYQRLMRQIRVAIVDGTLPQKALALRAGWAAGDWTQDEFPQPDWPPVP

SEQ ID NO: 51901 - protein, 390 aa, Asaia sp.
  misc_feature (1)..(390): tr|A0A433WZD2|A0A433WZD2_9PROT Queuine tRNA-ribosyltran sferase OS=Asaia sp. W19 OX=2067395 GN=tgt PE=3 SV=1
MTESATKMQWKAEACCGQARAGHLHTAHGTIPTPTFMPVGTVGTVKAMTMDAVRSTGAGIILGNTYHLMLRPGAERVRKMGGLHRMMDWSGPILTDSGGFQVMSLGALRKLDQDGVTFNSHIDGSKHRLTPESSTDIQHALDATITMCFDECPALPATPERLESSMELSMRWAARSREAFVQRPGYGQFGIMQGGTERDLRARSAKALTDIGFEGYAIGGLAVGEGQELMFSTLDFTTPLLPQDHARYLMGVGTPDDLLGGVERGVDMFDCVMPTRAGRTARAYTERGTLNMRNARHAEDNRPISPDCDCLACSRHSRAYLHHLFRANEILGPMLLTWHNLAYYQRLMRQIRVAIVDGTLPQKALALRADWAAGDWTQDEFPQPDWPPVP

SEQ ID NO: 51902 - protein, 382 aa, Ascidiaceihabitans donghaensis
  misc_feature (1)..(382): tr|A0A2R8BDE8|A0A2R8BDE8_9RHOB Queuine tRNA-ribosyltran sferase OS=Ascidiaceihabitans donghaensis OX=1510460 GN =tgt PE=3 SV=1
MGDMTDTQTPFSFSLNATDGKARTGVIQTPRGDIRTPAFMPVGTAATVKAMMPESVRATGADILLGNTYHLMLRPTAERIAKLGGLHKFMNWDRPILTDSGGFQVMSLAGLRKLTEKGVTFKSHIDGSKHEITPERSMEIQELLGSDIVMCFDECPALPADRTRIAESMELSMRWAARSKAAFGDRPGHALFGIQQGGLEQDLRGQSAEALREIGFDGYAVGGLAVGEGQEAMFGCLDYAPDQLPVDKPRYLMGVGKPDDIVGAVARGIDMMDCVLPSRSGRTGQAFTRKGVVNIKNARHADDPRPLDEGCACPACSNYSRAYLHHVFRSHEMISGMLLTWHNLRYFQDIMDGMRGAIAAGTFEAWQKDFHDGRAQGDIDPL

SEQ ID NO: 51903 - protein, 373 aa, Asticcacaulis benevestitus
  misc_feature (1)..(373): tr|V4PYQ5|V4PYQ5_9CAUL Queuine tRNA-ribosyltransferase OS=Asticcacaulis benevestitus DSM 16100 = ATCC BAA-896 OX=1121022 GN=tgt PE=3 SV=1
MSTFPFKIEASQGQARTGVLKTPRGDIPTPIFMPVGTAATVKALTLDMVKRANAKIILGNTYHLMLRPTAERISRLGGLHNFMGWDGPILTDSGGFQVMSLSKISKVKEDAVTFQSHIDGSKHVLSPERSIEIQADLLGSDIVMQLDECVSYPADEKRAQQALQLSARWGVRSKSAFGARDGQALFGIQQGSTFEHLRRESTERLLDIGFDGYAIGGLAVGEGHKAMCDTLDFCAPILPWERPRYLMGVGKPIDLLEGVARGVDMFDCVLPTRSGRHGQVWTWDGPLNMKNARFAEDDAPLDATSDCPASRDYSKAYLHHLVKSEEILGQMLLSWHNIAFFQALMIRIRAAITTGTFDILRADLLSRWLTKDG

SEQ ID NO: 51904 - protein, 371 aa, Asticcacaulis biprosthecum
  misc_feature (1)..(371): tr|F4QR81|F4QR81_9CAUL Queuine tRNA-ribosyltransferase OS=Asticcacaulis biprosthecum C19 OX=715226 GN=tgt PE=3 SV=1
MSAFPFTIHASQGQARTGVLKTPRGDIPTPIFMPVGTAATVKALTLDMVRQSHAKIILGNTYHLMLRPGPERVKRLGGLHKFMGWDGPILTDSGGFQVMSLSKISKVKEDAVTFASHIDGSKHVLSPERSIEIQADLLGSDIVMQLDECVSWPAEEKRAQEALQLSARWGLRSKQAFGTRDSQVLFGIQQGSTFEHLRRESTDRLLGIGFDGYAIGGLAVGEGHRAMCDTLDFCAPLLPWDKPRYLMGVGKPIDLLEGVARGVDMFDCVLPTRSGRHGQVWTWDGPINMKNARFAEDDTPLDATSDCPASRDYSKAYLHHLVRAEEILGQMLLSWHNIAFFQALMIRMRGAIAAGTFDSLRADLLSRWTRD

SEQ ID NO: 51905 - protein, 379 aa, Asticcacaulis excentricus
  misc_feature (1)..(379): tr|A0A3G9G3Y2|A0A3G9G3Y2_9CAUL Queuine tRNA-ribosyltran sferase OS=Asticcacaulis excentricus OX=78587 GN=tgt PE =3 SV=1
MTPPMSAFPFEISASDGQARTGVLKTPRGDIPTPIFMPVGTAATVKALTLDMVRQSHAKIILGNTYHLMLRPSAERVKRLGGLHTFMGWDGPILTDSGGFQVMSLSQISKVTEEAVTFQSHIDGSKHVLSPERSMEIQADLLGSDIVMQLDECVSWPADEARAQKALQLSARWGLRSKQAFGQRDTQALFGIQQGSTFESLRRESTDRLLEIGFDGYAIGGLAVGEGHEAMCDTLEYCAPLLPWDRPRYLMGVGKPIDLVEGVARGVDMFDCVLPTRSGRHGQVWTWEGPINIKNARFAEDDTPLDATSDCPASRDYSKAYLHHLFKAEEILGQVLLSWHNIAFFQALMIRMRSAIAAGEFQAFRKGFHETHLKAPTQN

SEQ ID NO: 51906 - protein, 373 aa, Asticcacaulis excentricus
  misc_feature (1)..(373): tr|E8RS13|E8RS13_ASTEC Queuine tRNA-ribosyltransferase OS=Asticcacaulis excentricus (strain ATCC 15261 / DSM 4 724 / VKM B-1370 / CB 48) OX=573065 GN=tgt PE=3 SV=1
MSAFPFEISASDGQARTGVLKTPRGDIPTPIFMPVGTAATVKALTLDMVRQSHAKIILGNTYHLMLRPSAERVKRLGGLHKFMGWDGPILTDSGGFQVMSLSQISKVTEEAVTFQSHIDGSKHVLSPERSMEIQADLLGSDIVMQLDECVSWPADEARAQNALQLSARWGLRSKQAFGQRDTQALFGIQQGSTFESLRRESTDRLLEIGFDGYAIGGLAVGEGHEAMCDTLEYCAPLLPWNRPRYLMGVGKPIDLVEGVARGVDMFDCVLPTRSGRHGQVWTWEGPINIKNARFAEDDTPLDAASDCPASRDYSKAYLHHLFKAEEILGQVLLSWHNIAFFQALMIRMRDAIAAGEFQAFRTWFHETHLKTSA

SEQ ID NO: 51907 - protein, 373 aa, Asticcacaulis sp.
  misc_feature (1)..(373): tr|V4P0C9|V4P0C9_9CAUL Queuine tRNA-ribosyltransferase OS=Asticcacaulis sp. YBE204 OX=1282363 GN=tgt PE=3 SV=1
MSAFPFEITAHEGQARTGVLKTPRGDIPTPIFMPVGTAATVKALTLDMVRQSHAKIILGNTYHLMLRPTAERVKRLGGLHKFMGWDGPILTDSGGFQVMSLSQISKVTEEAVTFQSHIDGSRHILSPERSMEIQADLLGSDIVMQLDECVSWPAEEARAQKALQLSARWGQRSKAAFGQRDRQALFGIQQGSTFEALRRESTDRLLDIGFDGYAIGGLAVGEGHEAMCDTLDYCAPLLPWERPRYLMGVGKPIDLVEGVARGVDMFDCVLPTRSGRHGQVWTWEGPLNIKNARFAEDDTPLDATSDCPASRDYSKAYLHHLFKAEEILGQMLLSWHNIAFFQALMIRMRAAIAAGEFAAFRKGFHETHVKKGA

SEQ ID NO: 51908 - protein, 375 aa, Asticcacaulis sp.
  misc_feature (1)..(375): tr|A0A2T5XMV4|A0A2T5XMV4_9CAUL Queuine tRNA-ribosyltran sferase OS=Asticcacaulis sp. CF398 OX=2135738 GN=tgt PE =3 SV=1
MSAFPFEISASDGQARTGVLKTPRGDIPTPIFMPVGTAATVKALTLDMVRQSHAKIILGNTYHLMLRPSAERVKRLGGLHKFMGWDGPILTDSGGFQVMSLSQISKVTEEAVTFQSHIDGSKHVLSPERSMEIQADLLGSDIVMQLDECVSWPAEEARAQKALQLSARWGQRSKTAFGQRDTQALFGIQQGSTFETLRRESTDRLLEIGFDGYAIGGLAVGEGHEAMCETLEYCAPLLPWDRPRYLMGVGKPIDLVEGVARGVDMFDCVLPTRSGRHGQVWTWEGPINIKNARFAEDDTPLDTSSDCPASRDYSKAYLHHLFKAEEILGQVLLSWHNIAFFQALMIRMRTAIAAGEFQAFRKWFHETHVKARSEK

SEQ ID NO: 51909 - protein, 372 aa, Asticcacaulis taihuensis
  misc_feature (1)..(372): tr|A0A1G4PR58|A0A1G4PR58_9CAUL Queuine tRNA-ribosyltran sferase OS=Asticcacaulis taihuensis OX=260084 GN=tgt PE =3 SV=1
MTYPFQITAHQGQARTGVLKTPRGDIPTPIFMPVGTAATVKALTLDMVKQAHAKIILGNTYHLMLRPTAERVARLGGLHKFMGWNGPILTDSGGFQVMSLSKISKVKEDAVTFQSHIDGSRHILSPERSIEIQADLLGSDIVMQLDECVSWPAEEKRAREALQLSARWGLRSKQAFGTRDTQALFGIQQGSTFEHLRRESTERLLDIGFDGYAIGGLAVGEGHEAMCETLDYSAPLLPWDRPRYLMGVGKPIDLLEGVARGVDMFDCVLPTRSGRHGQVWTWDGPLNMKNARFAEDNTPLDAESDCPASRDYSKAYLHHLVKSEEILGQMLLSWHNIAFFQALMIRIRAAITAGTFDALRADLLSRWKTKDA

SEQ ID NO: 51910 - protein, 366 aa, Atelocyanobacterium thalassa
  misc_feature (1)..(366): tr|D3EPA2|D3EPA2_ATETH Queuine tRNA-ribosyltransferase OS=Atelocyanobacterium thalassa (isolate ALOHA) OX=1453 429 GN=tgt PE=3 SV=1
MKFSFQLQKKCCNTQARAAIYSTPHGIVETPRFMPVGTIAAVKGITPNQLKNTEVQMILANTYHLHLQPGESIIKKAGGLHKFMHWDGPILTDSGGFQVFSLSKLREISESGVTFRSPKDGRIIKLTPEKSIDIQNALGADVIMAFDECPPGNADYQIVESATNRTYRWLKRCIQAHNRVEDQALFGIVQGGTFPQLRLQAISSLIELNLPGYAIGGVSVGEDSSLIQDIVQFSAPLLPENKPRYLMGVGTYKEIAMAIASGIDLFDCVIPTRFGRHGTALVAGERWNLKNSKFREDFRPLDEKCTCYTCLNFTRAYLNHLVRSQEMLGYTLLSLHNITELVKFTQDIRKSILNNSFTEDFKSWLT

SEQ ID NO: 51911 - protein, 375 aa, Atlantibacter hermannii
  misc_feature (1)..(375): tr|H5V4K6|H5V4K6_ATLHE Queuine tRNA-ribosyltransferase OS=Atlantibacter hermannii NBRC 105704 OX=1115512 GN=tg t PE=3 SV=1
MNFELQTTDGRARRGRLVFERGVVETPAFMPVGTYGTVKGMTPEEVEATGAQIILGNTFHLWLRPGQEIMKLHGDLHDFMQWKGPILTDSGGFQVFSLGDIRKITEQGVHFRNPINGDPIFLDPEKSMEIQYDLGSDIVMIFDECTPYPADWDYAKRSMEMSLRWAKRSRDRFDSLGNKNALFGIIQGSVYEDLRDISVKGLVEIGFDGYAVGGLAVGEPKEDMHRILEHVCPQIPADKPRYLMGVGKPEDLVEGVRRGIDMFDCVMPTRNARNGHLFVTNGVVKIRNAKYKSDTAPLDEECDCYTCRNYSRAYLHHLDRCNEILGARLNTIHNLRYYQRLMAGLRKAIEEGKLERFVADFYQRQDRPVPPLNVD

SEQ ID NO: 51912 - protein, 375 aa, Atlantibacter hermannii; identical to SEQ ID NO: 51911
  misc_feature (1)..(375): tr|A0A447LK34|A0A447LK34_ATLHE Queuine tRNA-ribosyltran sferase OS=Atlantibacter hermannii OX=565 GN=tgt PE=3 S V=1

SEQ ID NO: 51913 - protein, 375 aa, Atlantibacter subterranea
  misc_feature (1)..(375): tr|A0A427UVH0|A0A427UVH0_9ENTR Queuine tRNA-ribosyltran sferase OS=Atlantibacter subterranea OX=255519 GN=tgt P E=3 SV=1
MNFELQTTDGRARRGRLVFERGVVETPAFMPVGTYGTVKGMTPEEVEATGAQIILGNTFHLWLRPGQEIMKLHGDLHDFMQWKGPILTDSGGFQVFSLGDIRKITEQGVHFRNPINGDPIFLDPEKSMEIQYDLGSDIVMIFDECTPYPADWDYAKRSMEMSLRWAKRSRDRFDSLGNKNALFGIIQGSVYEDLRDISVKGLVEIGFDGYAVGGLAVGEPKEDMHRILEHVCPQIPADKPRYLMGVGKPEDLVEGVRRGIDMFDCVMPTRNARNGHLFVTNGVVKIRNAKHKSDTSPLDEECDCYTCRNYSRAYLHHLDRCNEILGARLNTIHNLRYYQRLMAGLRKAIEEGKLEHFVADFYQRQDRPVPPLNID

SEQ ID NO: 51914 - protein, 380 aa, Atopobacter sp.
  misc_feature (1)..(380): tr|A0A421BFZ7|A0A421BFZ7_9LACT Queuine tRNA-ribosyltran sferase OS=Atopobacter sp. AH10 OX=2315861 GN=tgt PE=3 SV=1
MEHAIKYRLIKKEKHTGARLGELITPHGTFETPMFMPVGTLATVKAVSPEELKAMGAGVILSNTYHLWLRPGPDIVEEAGHLHQFMNWDQAILTDSGGFQVFSLSDNRQLTEEGVHFRNHLNGAKMFLSPEKAIQIQHKLGSDIMMCLDECPPFDSTTDYMRHSINRTTRWAERCLRAHDRPEKQGLFGILQGGGDKELRLQHAKDMISLDFPGYSIGGLSVGEPKADMYRVLDFLTPVMPENKARYLMGVGSPDALVEGAIRGIDMFDCVLATRIARNGTCMTSRGRLVVKNAKFERDFTPIDDQCSCYTCQHYTRAYVRHLFKADETFGLRLTSIHNLHFLLNLMKQVRQAIREDNLLEFKEYFFEQYGLNVENPKNF

SEQ ID NO: 51915 - protein, 378 aa, Atopobium deltae
  misc_feature (1)..(378): tr|A0A133XXP8|A0A133XXP8_9ACTN Queuine tRNA-ribosyltran sferase OS=Atopobium deltae OX=1393034 GN=tgt PE=3 SV=1
MSELFSYDVVAQDPNTHARAGVFHTAHGDVQTPLFMPVGTKGTVKGILPQTLEQIGAQVVLANTYHLEMRPSSERICELGGLHEFMQWHKPILTDSGGFQVFSHGEFFKLSDEGVRFRAVDYDGRWVSWTPEDNMAIAQRLGSDICMQLDQCPGYPATRAFVERAVELSSMWAERCWKAHTRPDQALFGIVQGGMHLDLRLRSLHHLEEVGNFPGYGIGGYSVGEDHETMFETLEPLVSEHMPSHKPRYLMGVGNPTTLVRAVGCGVDMFDCVLPTRTARMGTAFSSEGRMNLKNARFSADGTPLDHACDCPVCTSGYTRAYLNHLVRQKEILGGILLSTHNLYYLLELMRRARQAILDGRYAQFMADWMASPAAQDF

SEQ ID NO: 51916 - protein, 378 aa, Atopobium minutum
  misc_feature (1)..(378): tr|A0A1H4NNW8|A0A1H4NNW8_9ACTN Queuine tRNA-ribosyltran sferase OS=Atopobium minutum OX=1381 GN=tgt PE=3 SV=1
MADLFGYEIIAEDPKTHARAGVFHTAHGDVETPLFMPVGTKGTVKGILPQTLEQIGAQVVLANTYHCEMRPGSERIDALGGLHDFMQWHHPILTDSGGFQVFSHGEFFKLSDEGVRFRAVDYDGRWVSWTPEDNMAIAQRLGSDICMQLDQCPGYPSPRPFVERAVELSSMWAERCWKAHTRPDQALFGIVQGGMDLDLRLRSLNHLENVSNFPGYGIGGYSVGEDHETMFQTLEPLVSEHMPKYKPRYLMGVGNPTTLVRGVACGVDMFDCVLPTRTARMGTAFSSEGRLNLKNARFSADDTPLDHACDCPVCTGGYTRAYLNHLVRQKEMLGSILLSTHNLYFLLNLMRKARTAIIAGSYGDFVESWMNSPAADDF

SEQ ID NO: 51917 - protein, 378 aa, Atopobium minutum; identical to SEQ ID NO: 51916
  misc_feature (1)..(378): tr|N2BZ75|N2BZ75_9ACTN Queuine tRNA-ribosyltransferase OS=Atopobium minutum 10063974 OX=997872 GN=tgt PE=3 SV= 1

SEQ ID NO: 51918 - protein, 405 aa, Atopobium parvulum
  misc_feature (1)..(405): tr|C8WA11|C8WA11_ATOPD Queuine tRNA-ribosyltransferase OS=Atopobium parvulum (strain ATCC 33793 / DSM 20469 / JCM 10300 / VPI 0546) OX=521095 GN=tgt PE=3 SV=1
MPDGSKKAQGFTTKISCVYTENWAEKKEDSWFTYELLAEDPKTHARAGVFHTPHGDIPTPIFMPVGTKATVKGLMTDTVRDLGAKIILANTYHLSQRPGDELVAQMGGLHDFMQWHGPILTDSGGFQVFSHEEFMKLSDEGVKFRAVDYDGAWSYWTPETNMQIAQNLGADIVMQLDQCVGYPAERKKVERGVELSSAWAERCFKAHTRPDQALFGIVQGGMHLDLRKRSIEHLESIGDFPGYGIGGYSVGEPHELMFETLAPLCADYMPRNKPRYLMGVGNPSTLIRGVACGIDMFDCVLPTRTARMGTAFSHEGRMNLKNAKYFADAGPIDVKCTCPVCTGGYSRAYINHLVKQHEMLGGQLLSMHNIYFLLELMRQAREAILAGTYSDFVEEWENSEGVVDF

SEQ ID NO: 51919 - protein, 406 aa, Atopobium rimae
  misc_feature (1)..(406): tr|B9CKR5|B9CKR5_9ACTN Queuine tRNA-ribosyltransferase OS=Atopobium rimae ATCC 49626 OX=553184 GN=tgt PE=3 SV= 1
MPHTEKTTTSKFTTEVHCVHQELWASKKDPAWFTYDIVAEDPTTHARAGVFHTPHGDIPTPIFMPVGTKATVKGLLPDTVKSLGTKILLANTYHLSQRPGDELIAELGGLHSFMCWDGPILTDSGGFQVFSHEQFMKLSDEGVKFRAVDYDGAWSWWTPETNMQIAQNLGADIVMQLDQCVGYPSSRTKVERSVELSSAWADRCYQAHTRPDQALFGIVQGGMHLDLRRRSIEHLEQAGDFPGYGIGGYSVGEPHEVMFETLEPLCADYMPRTKPRYLMGVGNPTTLIRSVAAGIDMFDCVLPTRTARMGTAFSYQGRMNMKNTKYVHDSGPIDSACTCPVCTGGYTRAYLNHLVRQHEMLAGELLSMHNIYFLLNLMHQAREAILAGNYGEFVTKWLESGGVKDF

SEQ ID NO: 51920 - protein, 405 aa, Atopobium sp.
  misc_feature (1)..(405): tr|Z4WZA9|Z4WZA9_9ACTN Queuine tRNA-ribosyltransferase OS=Atopobium sp. ICM42b OX=1190620 GN=tgt PE=3 SV=1
MPDGSKKAQGFTTNISCVHTENWAEKKEDSWFTYELLAEDPKTHARAGIFHTPHGDIPTPIFMPVGTKATVKGLMTDTVRDLGAKIILANTYHLSQRPGDELVAQMGGLHDFMQWHGPILTDSGGFQVFSHEEFMKLSDEGVKFRAVDYDGAWSYWTPETNMQIAQNLGADIVMQLDQCVGYPAGRRKVERGVELSSAWAERCFKAHTRPDQALFGIVQGGMHLDLRKRSIEHLESIGDFPGYGIGGYSVGEPHEVMFETLAPLCADYMPRNKPRYLMGVGNPSTLIRGVACGIDMFDCVLPTRTARMGTAFSHEGRMNLKNAKYFADAGPIDAKCTCPVCTGGYSRAYINHLVKQHEMLGGQLLSMHNIYFLLELMRQAREAILAGTYSDFVEEWENSDGVVDF

SEQ ID NO: 51921 - protein, 405 aa, Atopobium sp.
  misc_feature (1)..(405): tr|Z4WX49|Z4WX49_9ACTN Queuine tRNA-ribosyltransferase OS=Atopobium sp. BS2 OX=936550 GN=tgt PE=3 SV=1
MPDGSKKAQGFTTNISCVHTENWAEKKEDSWFTYELLAEDPKTHARAGIFHTPHGDIPTPIFMPVGTKATVKGLMTDTVRDLGAKIILANTYHLSQRPGDELVAQMGGLHDFMQWHGPILTDSGGFQVFSHEEFMKLSDEGVKFRAVDYDGAWSYWTPETNMQIAQNLGADIVMQLDQCVGYPAERKKVERGVELSSAWAERCFKAHTRPDQALFGIVQGGMHLDLRRRSIEHLESIGDFPGYGIGGYSVGEPHEVMFETLAPLCADYMPRNKPRYLMGVGNPSTLIRGVACGIDMFDCVLPTRTARMGTAFSHEGRMNLKNAKYFADAGPLDAKCTCPVCTGGYSRAYINHLVKQHEMLGGQLLSTHNIYFLLELMRQAREAILAGTYSDFVEEWENSDGVVDF

SEQ ID NO: 51922 - protein, 354 aa, Atopobium vaginae
  misc_feature (1)..(354): tr|A0A135PAD4|A0A135PAD4_9ACTN Queuine tRNA-ribosyltran sferase OS=Atopobium vaginae OX=82135 GN=HMPREF3232_011 21 PE=3 SV=1
MPVGTKAAIKGLLPQTVSDLGAKIILANTYHLAMRPGEDLIAEAGGLHSFMHWNKPILTDSGGFQVFSHSEFVKLSDEGVRFKVVDYDGSYVFWTPERNMEIAQKLGADIVMQLDQCPGYPASDAYVRRAVDLSSAWAQRCFEAHTKKDQALFGIVQGGMNLDLRKLSIERLESIADFPGYGIGGYSVGEDHETMFESLAPLVSEYMPRHKPRYLMGVGNPTTLVRAVACGVDMFDCVLPTRTARMGTAFSHEGRLNLKNAAHIHAHVPLDELCTCPVCSEGYTRSYLNHLVRQHEMNAAILLSMHNIYFLLDCMRQARQAIIEGRYKAFLDTWMQYPTAQDGRMQNYRMNHGE

SEQ ID NO: 51923 - protein, 414 aa, Atopobium vaginae
  misc_feature (1)..(414): tr|E1L272|E1L272_9ACTN Queuine tRNA-ribosyltransferase OS=Atopobium vaginae PB189-T1-4 OX=866774 GN=tgt PE=3 S V=1
MTTTSTTAFSPSGAAAGAAPSSYFSYEVIATDPNTQARAGILHTPHGDIPTPIFMPVGTKATVKGLLPSIVDELGAKIILANTYHLSMRPGADLIAKMGGLHTFMHWHKPILTDSGGFQVFSHGEFVKLSRDGVRFKAVDYDGSYVYWTPESNMDIAQKLGADIVMQLDQCPGYPAEKSYVERAVNLSSAWAERCWKAHTKPDQALFGIVQGGMHLDLRIRSIQQLEQIADFIGYGIGGYSVGEDHATMFESLAPLCSDYMPKNKPRYLMGVGNPTTLVRAVGVGVDMFDCVLPTRTARMGTAFSHEGRLNLKNAEHITADIPLDERCSCPVCTECYTRSYIGHLVRQHEMLGSILLSMHNIYFLLETMQHARQAIIDGTYKAFLDDWNATHTADDLRLKHYHMNASAGADNRV

SEQ ID NO: 51924 - protein, 390 aa, Atopostipes suicloacalis
  misc_feature (1)..(390): tr|A0A1M4XAM7|A0A1M4XAM7_9LACT Queuine tRNA-ribosyltran sferase OS=Atopostipes suicloacalis DSM 15692 OX=112102 5 GN=tgt PE=3 SV=1
MNEKSKGRKHLEHPINYHLIKKEKHTGARLGKLETPNGTFETPMFMPVGTQATVKAMSPEELKKIGAGVILSNTYHLWLRPGSDLIEEAGGLHKFMNWDQGILTDSGGFQVFSLADSREITEEGVHFRSHLDGSKLFLTPEKSIQIQNELGSDIMMSFDECPPFDESYDYMKKSIERTTRWAERGLNAHNNWEKQGLFGIVQGGGYKDLRLQHVRDLTSMDFSGYSIGGLSVGETHEEMYEVLDYLTPELPEDKTRYLMGVGTPAALIESVIRGVDIFDCVLPTRIARNGTAMTSQGRVVIKNAVHARDWGPLDPKCDCDTCQNYSRGYLRHLIKTDEILGMRLISIHNLRFLIHLMEQVREAIREDNLLEFKEAFFEEYGYNEPNARTF

SEQ ID NO: 51925 - protein, 332 aa, Aulosira laxa
  misc_feature (1)..(332): tr|A0A1Z4UF73|A0A1Z4UF73_9CYAN Queuine tRNA-ribosyltran sferase OS=Aulosira laxa NIES-50 OX=1541988 GN=tgt PE=3 SV=1
MPVGTLANVKTVTPAQLRDTGAQMVLSNTYHLHLQPGEAIVAGGGGLHKFMGWNGPMLTDSGGFQVFSLSEMRKITEEGVTFRSPHDGQIIKLTPERSIEIQNTLGADVIMAFDECPPYPATRQEVEAATERTYRWLERCIVAHQRSDQALFGIVQGGVYLDLRSQAAVALAKLNLPGYAIGGVSVGEPPELMAQIVQTTAPLLPPEKPRYLMGVGTYKEMAIAIASGVDLFDCVIPTRWARHGTAIVQGERWNLKNAKFREDFTPLDETCPCYACQNFSRAYISHLVRSQEILAYTLLSIHNITELIRFTQRIREAILSDRFYSEFGHWLE

SEQ ID NO: 51926 - protein, 377 aa, Aurantimonas coralicida
  misc_feature (1)..(377): tr|A0A0P0YZU2|A0A0P0YZU2_9RHIZ Queuine tRNA-ribosyltran sferase OS=Aurantimonas coralicida OX=182270 GN=tgt PE= 3 SV=1
MSDTFQFKLIATDGKARRGVITMPRGEVRTPAFMPVGTAGTVKAMYLDQVRELGSDIILGNVYHLMLRPGAERVARLGGLHDFALWPHPILTDSGGFQVMSLASLRELDETGVRFRSHIDGSKHELTPERSIEIQGLLDSDIQMQLDECIRLPAERAEIERAMEMSLRWAERSAKAFGNQPGKAMFGIVQGGDLIDMRVRSAERLAAMDLKGYAVGGLAVGEPQDVMLATLDETLPVMPVEKPRYLMGVGTPDDILQSVARGIDMFDCVMPTRAGRHGLAYTRFGKVNLKNARHADDPRPLDEASDCPASRDYSRAYLHHLVRSNEALASMLLTWNNLAYYQSLMAGMRAAIEAGGFDDFAAATKAGWTRGDLPPYG

SEQ ID NO: 51927 - protein, 377 aa, Aurantimonas manganoxydans
  misc_feature (1)..(377): tr|A0A0P0Z5G3|A0A0P0Z5G3_9RHIZ Queuine tRNA-ribosyltran sferase OS=Aurantimonas manganoxydans OX=651183 GN=tgt PE=3 SV=1
MSETFQFKLIATDGKARRGVITMPRGEVRTPAFMPVGTAGTVKAMYLDQVRELGSDIILGNVYHLMLRPGAERVARLGGLHDFALWPHPILTDSGGFQVMSLASLRELDETGVRFRSHIDGSKHELTPERSIEIQGLLDSDIQMQLDECIRLPAERAEIERAMEMSLRWAERSAKAFGNQPGKAMFGIVQGGDLIDLRVRSAERLAAMDLKGYAVGGLAVGEPQDVMLATLDETLPVMPVDKPRYLMGVGTPDDILQSVARGIDMFDCVMPTRAGRHGLAYTRFGKVNLKNARHADDPRPLDEASGCPASRDYSRAYLHHLVRSNEALASMLLTWNNLAYYQSLMSGMRAAIEAGGFDDFAAATKSGWARGDLPPYG

SEQ ID NO: 51928 - protein, 377 aa, Aurantimonas manganoxydans; identical to SEQ ID NO: 51927
  misc_feature (1)..(377): tr|Q1YHY3|Q1YHY3_AURMS Queuine tRNA-ribosyltransferase OS=Aurantimonas manganoxydans (strain ATCC BAA-1229 / D SM 21871 / SI85-9A1) OX=287752 GN=tgt PE=3 SV=1

SEQ ID NO: 51929 - protein, 376 aa, Aurantimonas sp.
  misc_feature (1)..(376): tr|A0A1X0SW89|A0A1X0SW89_9RHIZ Queuine tRNA-ribosyltran sferase OS=Aurantimonas sp. 22II-16-19i OX=1317114 GN=t gt PE=3 SV=1
MTERFSFQLLATDGRARRGEITMPRGTVRTPAFMPVGTAGTVKAMYLDQVRALGADIILGNVYHLMLRPGAERVARLGGLHDFARWPHPILTDSGGFQVMSLAELRKLDEKGVTFRSHVDGSVHSLSPERSIEIQGLLDSDIQMQLDECIRLPAERAEIERAMELSLRWAERCKVAFGEQPGKAMFGIVQGGDQIDLRQRSAASLAAMDLKGYAVGGLAVGEPQAVMLATLDETVPVLPEEKPRYLMGVGTPDDLIRSVARGIDMFDCVMPTRAGRHGLAYTRRGKINLKNARHAEDHRPLDEESDCPAARDYSRAYLHHLVRSDESLGGMLLTWNNLAYYQDLMAGIRAAIEAKRYADFCDAVSEAWAKGDLPAL

SEQ ID NO: 51930 - protein, 377 aa, Aurantimonas sp.
  misc_feature (1)..(377): tr|A0A0Q6EZ58|A0A0Q6EZ58_9RHIZ Queuine tRNA-ribosyltran sferase OS=Aurantimonas sp. Leaf443 OX=1736378 GN=tgt P E=3 SV=1
MSVPFSFTLLATDGTARRGEIAMPRGTIRTPAFMPVGTAGTVKAMYLDQVRALGSDIILGNVYHLMLRPGAERVARLGGLHEFARWPHPILTDSGGFQVMSLANLRKLDETGVRFRSHIDGSEHFVSPERSIEIQDLLDSDIQMQLDECIRLPAERAEVERAMELSLRWAERSARAFGEQPGKAMFAIVQGGDVIDLRLRSAERLAAMDLKGYAVGGLAVGEPQAVMLKVLDETLPAMPREKPRYLMGVGTPDDILKSVARGIDMFDCVMPTRSGRHGLAFTRRGRVNLKNARHAEDHRPLDEESDCPAARDYSRAYLHHLVRANEALASMLLTWVNLAYYQSLMAGIRASIDEGRFADFAAETQERWARGDIPALS

SEQ ID NO: 51931 - protein, 379 aa, Aureibacillus halotolerans
  misc_feature (1)..(379): tr|A0A4R6TYP3|A0A4R6TYP3_9BACI Queuine tRNA-ribosyltran sferase OS=Aureibacillus halotolerans OX=1508390 GN=tgt PE=3 SV=1
MSAVTYEHIKTCAQSGARLGIVHTPHGSFETPAFMPVGTLGTVKTMSPEDLESMGAGIILGNTYHLWLRPGTDIISEAGGLHKFMNWKHPILTDSGGFQVFSLSNLRDIQEEGVHFRNHLSGEKLFLSPEKAMEIQNILGSDIMMAFDECPPYPATYEYMKASVERTSRWAERCLTAHSRPAEQGLFGIVQGGEFEDLRIQSAKDLTSLDFPGYAIGGLSVGEPKDVMNRVLEWTTPLLPADKPRYLMGVGSPDSLIDGAVRGIDMFDCVLPTRIARNGTCMTSAGRLVVRNAAYKSDFRPIDENCDCYTCRNYSRAYIRHLVKCDETFGFRLTTYHNLYFLLKLMRQVREAIREDRLLDFRESFFEAYGFNQPDAKNF

SEQ ID NO: 51932 - protein, 374 aa, Aureicoccus marinus
  misc_feature (1)..(374): tr|A0A2S7T747|A0A2S7T747_9FLAO Queuine tRNA-ribosyltran sferase OS=Aureicoccus marinus OX=754435 GN=tgt PE=3 SV =1
MKFTIEGKEGKARAGEIQTAHGSIPTPIFMPVGTVASVKGVHQSELEEDTKAPIILGNTYHLYLRPGMEILEQAGGLHQFMSWSSNILTDSGGYQVYSLADNRKITEEGVKFKSHIDGSTHFFTPESVMDIQRRIGADIIMAFDECTPYPCDWDYAEKSMEMTHRWAHRCIEGLEKSPVRYGFEQAFFPIVQGSVYPDLRERSARFIADLDAPGNAIGGLSVGEPAEEMYAMTEVVCAILPEEKPRYLMGVGTPANLLENIARGIDMFDCVMPTRNARNGMLFTAEGTINIKNKKWENDFSPLDENGYSYVDTLYTKAYLRHLFAANEFLGKQIATLHNLGFYLWLVRTARARILAGDFYDWKDELVQKLNRRR

SEQ ID NO: 51933 - protein, 378 aa, Aureimonas altamirensis
  misc_feature (1)..(378): tr|A0A1M6J9Y8|A0A1M6J9Y8_9RHIZ Queuine tRNA-ribosyltran sferase OS=Aureimonas altamirensis DSM 21988 OX=1121026 GN=tgt PE=3 SV=1
MSQEFAFTLTHTDGKARRGEITMPRGTVRTPAFMPVGTAGTVKAMYLSQVRDLGSDIILGNVYHLMLRPGAERVGRLGGLHEFARWPWPILTDSGGFQVMSLASLRKLTEKGVTFRSHVDGSVHELTPERSIEIQGLLDSDIQMQLDECVRLPADRREIERAMEMSLRWAERCAVAFGNQPGKAMFGIVQGGDQPDLRIRSATELAAMNLKGYAVGGLAVGEPQDVMLETLDETLPSLPVDKPRYLMGVGTPDDIVKSVARGIDMFDCVMPTRAGRHGLAFTRHGRINLRNAVHAEDASPLDETSDCPATRDYSRAYLHHLVRTSEALGGMLLTWNNLAYYQSLMAGIRAAIEEGRFAAYAAEVTEGWARGEARRKAA

SEQ ID NO: 51934 - protein, 378 aa, Aureimonas altamirensis
  misc_feature (1)..(378): tr|A0A0B1PXX6|A0A0B1PXX6_9RHIZ Queuine tRNA-ribosyltran sferase OS=Aureimonas altamirensis OX=370622 GN=tgt PE= 3 SV=1
MSQEFAFTLINTDGKARRGEITMPRGTVRTPAFMPVGTAGTVKAMYLSQVRELGSDIILGNVYHLMLRPGAERVGRLGGLHEFARWPWPILTDSGGFQVMSLASLRKLTEKGVTFRSHVDGSVHELTPERSIEIQGLLDSDIQMQLDECVRLPADRREIERAMEMSLRWAERCAVAFGNQPGKAMFGIVQGGDQPDLRIRSATELAAMNLKGYAVGGLAVGEPQEVMLETLDETLPSLPVDKPRYLMGVGTPDDIVKSVARGIDMFDCVMPTRAGRHGLAFTRHGRINLRNAIHAEDAAPLDETSDCPAARDYSRAYLHHLVRTSEALGGMLLTWNNLAYYQSLMAGIRAAIEEGRFAAYAAEVTEGWARGEARRKLA

SEQ ID NO: 51935 - protein, 379 aa, Aureimonas flava
  misc_feature (1)..(379): tr|A0A3A1WE02|A0A3A1WE02_9RHIZ Queuine tRNA-ribosyltran sferase OS=Aureimonas flava OX=2320271 GN=tgt PE=3 SV=1
MSQFTFDVSATDGLARRGTISMPRGVVRTPAFMPVGTAATVKAMYLDQVRDLGSDIILGNTYHLMLRPGAERVARLGGLHDFARWPHPILTDSGGFQVMSLASLRKMSEQGVTFRSHIDGTVHELTPERSIEIQGLLDSDIQMQLDECIRLPAERSEIERAMELSLRWAERCAVAFGDQPGKAMFGIVQGGDDAALRIRSAERLRDMGLKGYAVGGLAVGEPQDVMLAMLGETVPVLPHGKPRYLMGVGTPDDILKSIMRGIDMFDCVMPTRAGRHGLAFTRHGRINLKNARHAEDAAPLDERSACPATRDYSRAYLHHLVRTQETLGAMLLTWNNLAYYQQLMSGARDAIERGAFADFVAETTEGWVRGERERGTARS

SEQ ID NO: 51936 - protein, 378 aa, Aureimonas frigidaquae
  misc_feature (1)..(378): tr|A0A0P0Z3T3|A0A0P0Z3T3_9RHIZ Queuine tRNA-ribosyltran sferase OS=Aureimonas frigidaquae OX=424757 GN=tgt PE=3 SV=1
MTPEFTFQLLATDGRARRGEISMPRGTVRTPAFMPVGTAGTVKAMYLSQVRELGSDIILGNVYHLMLRPGAERVARLGGLHDFARWPWPILTDSGGFQVMSLAGLRKLTEEGVTFRSHIDGSVHELTPERSIEIQGLLDSDIQMQLDECIRLPAPREEIERAMELSLRWAERSAVAFGNQPGKAMFGIVQGGDQPDLRIRSAERLTAMNLKGYAVGGLAVGEPQHVMLETLDGTLPSLPTHKPRYLMGVGTPDDILQSVARGIDMFDCVMPTRAGRHGLAFTRHGRVNLRNAVHAEDPAPLDATSDCPATRDYARAYLHHLVRSNEALGGMLLTWNNLAYYQSLMAGIRDAISQGRFATYAAEVSEGWARGEALRKAR

SEQ ID NO: 51937 - protein, 382 aa, Aureimonas jatrophae
  misc_feature (1)..(382): tr|A0A1H0MGA0|A0A1H0MGA0_9RHIZ Queuine tRNA-ribosyltran sferase OS=Aureimonas jatrophae OX=1166073 GN=tgt PE=3 SV=1
MNAHTPDAPAADFSFRLIAEDGRARRGEIRMPRGTVRTPAFMPVGTAATVKAMYPGQVRELGADIILGNTYHLMLRPGAERVARLGGLHEFARWPHPILTDSGGFQVMSLSALRQMSEKGVTFRSHIDGSTHEMTPERSIEIQGLLGSDIQMQLDECIRLPADREEIRRAMELSLRWAERCAVAFGTQPGKAMFGIVQGGDQPDLRIRSAEALTALELKGYAVGGLAVGEPQSVMLATLDETLPSLPRLKPRYLMGVGTPDDIIQSVARGIDMFDCVMPTRAGRHGQAFTPYGRLNLRNAKHAEDTRPLDETSDCPASRDYSRAYLHHLVKSEETLGSMLLTWHNLAYYQTLMAGIRAAIDAGRFETFRAETTARWTGGEEG

SEQ ID NO: 51938 - protein, 379 aa, Aureimonas phyllosphaerae
  misc_feature (1)..(379): tr|A0A1I2FD03|A0A1I2FD03_9RHIZ Queuine tRNA-ribosyltran sferase OS=Aureimonas phyllosphaerae OX=1166078 GN=tgt PE=3 SV=1
MTEFQFNVSATDGLARRGTIRMPRGEIRTPAFMPVGTAATVKAMYLDQVRDLGSDIILGNTYHLMLRPGAERVARLGGLHEFARWPYPILTDSGGFQVMSLASLRKMSEEGVTFRSHVDGSVHELTPERSIEIQGLLDSDIQMQLDECIRLPAERPEVERAMELSLRWAERCAIAFGNQPGKAMFGIVQGGDVVDLRVRSAERLRAMELKGYAVGGLAVGEPQEVMLRILEETVPVMPVEKPRYLMGVGTPDDLLQSIARGIDMFDCVMPTRAGRHGLAFTRHGRINLRNARHAEDATPLDEHSDCPASRDYARAYLHHLVRTEETLGAMLLTWNNLAYYQTLMAGARQAIETERFGDFVAETTEGWAKGEEARGAFRR

SEQ ID NO: 51939 - protein, 379 aa, Aureimonas sp.
  misc_feature (1)..(379): tr|A0A0Q5HPZ0|A0A0Q5HPZ0_9RHIZ Queuine tRNA-ribosyltran sferase OS=Aureimonas sp. Leaf324 OX=1736336 GN=tgt PE= 3 SV=1
MTEFQFSVSATDGLARRGTIRMPRGDVRTPAFMPVGTAATVKAMYLDQVRDLGSDIILGNTYHLMLRPGAERVARLGGLHDFARWPYPILTDSGGFQVMSLASLRKMSEKGVTFRSHVDGSVHELTPERSIEIQGLLDSDIQMQLDECIRLPAERSEVERAMELSLRWAERCAIAFGNQPGKAMFGIVQGGDVVDLRIRSAERLRAMNLKGYAVGGLAVGEPQEVMLRILGETVPVMPAEKPRYLMGVGTPDDLLQSIARGIDMFDCVMPTRAGRHGLAFTRYGRINLRNARHAEDASPLDDRSDCPASRDYARAYLHHLVRTEETLGAMLLTWNNLAYYQTLMAGARQAIENGRFADFVAETTEGWTKGEEARGVSRS

SEQ ID NO: 51940 - protein, 379 aa, Aureimonas sp.
  misc_feature (1)..(379): tr|A0A0S2EPT3|A0A0S2EPT3_9RHIZ Queuine tRNA-ribosyltran sferase OS=Aureimonas sp. AU20 OX=1349819 GN=tgt PE=3 S V=1
MTTNEFGFRLLATDGKARRGEITMPRGTIRTPAFMPVGTAGTVKAMYLDQVHELGSDIILGNTYHLMLRPGAERVARLGGLHEFARWPFPILTDSGGFQIMSLSSLRKMSEKGVTFRSHVDGSVHDLSPERSIEIQGLLDADIQMQLDECIRLPAERSEIERAMELSLRWAERSAVAFGNQPGKAMFGIVQGGDQPDLRIRSAERLAAMNLKGYAVGGLAVGEPQAVMLETLQETLPSLPTEKPRYLMGVGTPDDILQSVARGIDMFDCVMPTRAGRHGLAFTRDGRVNLKNARHAEDPRPLDDTSDCPATRDYSRAYLHHLVRADEALAGMLLTWNNLAYYQRLMAGMRLAIEEGHFDDFAAETTERWTRGEAARKAA

SEQ ID NO: 51941 - protein, 379 aa, Aureimonas ureilytica
  misc_feature (1)..(379): tr|A0A147DBF1|A0A147DBF1_9RHIZ Queuine tRNA-ribosyltran sferase OS=Aureimonas ureilytica OX=401562 GN=tgt PE=3 SV=1
MTVTEFGFRLLAKDGKARRGEISMPRGTIRTPAFMPVGTAATVKAMYLDQVRELGSDIILGNTYHLMLRPGAERVARLGGLHEFARWPYPILTDSGGFQIMSLASLRKMSEQGVTFRSHVDGSVHELSPERSIEIQGLLDADIQMQLDECIRLPADRNEIERAMELSLRWAERSAIAFGTQPGKAMFGIVQGGDQPDLRIRSAERLTAMNLKGYAVGGLAVGEPQSVMLETLDETLPSLPVEKPRYLMGVGTPDDILQSVARGIDMFDCVMPTRAGRHGLAFTKDGRVNLKNARHAEDPKPLDETSDCPATRDYSRAYLHHLVRADEALAGMLLTWNNLAYYQRLMAEMREAIELGRFQDFAAETTARWSRGEAARKAA

SEQ ID NO: 51942 - protein, 379 aa, Aureimonas ureilytica
  misc_feature (1)..(379): tr|A0A175R5D0|A0A175R5D0_9RHIZ Queuine tRNA-ribosyltran sferase OS=Aureimonas ureilytica OX=401562 GN=tgt PE=3 SV=1
MTVTEFGFRLLATDGKARRGEISMPRGTIRTPAFMPVGTAATVKAMYLDQVRELGSDIILGNTYHLMLRPGAERVARLGGLHEFARWPYPILTDSGGFQIMSLASLRKMSEQGVTFRSHVDGSVHELSPERSIEIQGLLDADIQMQLDECIRLPADRNEIERAMELSLRWAERSAVAFGTQPGKAMFGIVQGGDQPDLRIRSAERLTAMNLKGYAVGGLAVGEPQSVMLETLDETLPSLPVEKPRYLMGVGTPDDILQSVARGIDMFDCVMPTRAGRHGLAFTKDGRVNLKNARHAEDPKPLDETSDCPATRDYSRAYLHHLVRADEALAGMLLTWNNLAYYQRLMAEMREAIELGRFQDFAAETTARWARGEAARKAA

SEQ ID NO: 51943 - protein, 376 aa, Aureitalea marina
  misc_feature (1)..(376): tr|A0A2S7KMZ8|A0A2S7KMZ8_9FLAO Queuine tRNA-ribosyltran sferase OS=Aureitalea marina OX=930804 GN=tgt PE=3 SV=1
MQFNLAAKDPHSKARAGTITTDHGQIQTPIFMPVGTLATVKGVHQRELTEEIDPDIILGNTYHLYLRPQIDILEKAGGLHKFMNWDRNILTDSGGYQVYSLSANRKIKEEGVKFKSHIDGSYHVFTPENVMDIQRSIGADIIMAFDECTPYPCDYDYAKRSMHMTHRWLDRCLNRLEEVPYKYDYSQTFFPIVQGSTYKDLRKQSAEYIASVGAEGNAIGGLSVGEPAEEMYAMTEVVCEVLPEDKPRYLMGVGTPINILENIALGIDMFDCVMPTRNGRNGMLFTAHGTINIKNKKWEDDFSPIDEMGITWVDTAYSKAYLRHLFSVGEMLGRQIASIHNLGFYLWLVREARKHILAGDFASWKDQMVRQMNQRL

SEQ ID NO: 51944 - protein, 376 aa, Aureitalea sp.
  misc_feature (1)..(376): tr|A0A2S0HY07|A0A2S0HY07_9FLAO Queuine tRNA-ribosyltran sferase OS=Aureitalea sp. RR4-38 OX=2094025 GN=tgt PE=3 SV=1
MHFKLEGKDEQSSARAGTIKTGHGSIETPIFMPVGTVGTVKGVHQRELSEDINPDIILGNTYHLYLRPQTQILIKAGGLHKFMNWDRNILTDSGGYQVYSLSANRKIKEEGVKFKSHIDGSYHVFTPENVMEIQRAIGADIIMAFDECTPYPCDYNYAKRSMHMTHRWLDRCLSHLEKTPLKYDYEQAFFPIVQGSTYKDLREQSAEYIANAGAVGNAIGGLSVGEPAEEMYEMTAVVTNILPEDKPRYLMGVGTPINILENIALGIDMFDCVMPTRNGRNGMLFTAHGTINIKNKKWEDDFSAIDEMNITWVDTAYSKAYLRHLFTVNEMLGRQIATIHNLGFYMWLVREARKHILDGDFRSWKDKMVKQMDKRL

SEQ ID NO: 51945 - protein, 382 aa, Auricoccus indicus
  misc_feature (1)..(382): tr|A0A1Q1G0Y0|A0A1Q1G0Y0_9STAP Queuine tRNA-ribosyltran sferase OS=Auricoccus indicus OX=1849491 GN=tgt PE=3 SV =1
MAAITYEHIKTCKQSGARLGKVHTPHGTFETPIFMPVGTLATVKTMSPEELLQVSSQIILSNTYHLWLRPGSDIIKEAGGLHKFMNWDHPILTDSGGFQVFSLSDMRKIEEEGVHFRHHLNGSKLFLSPEKAMDIQHDLGSDIMMSFDECPPFPAEYDYVKQSIERTTRWAHRGLEHHIKSGHDKHQALFGIVQGGEYEALRTQSAKELVAMDFPGYSIGGLSVGEPKDIMYRMLEHTTPLLPFHKPRYLMGVGSPDALIEGVIRGIDMFDCVLPTRIARNGTTMTSNGRVVVKKEQYARDFTPLDESCDCYTCKNYTKAYLRHLIKTDEILGLRLTSIHNLYFLLKLMENVRQAIREDRLLDFKEEFFEQYGLNVENPKNF

SEQ ID NO: 51946 - protein, 459 aa, Auritidibacter sp.
  misc_feature (1)..(459): tr|A0A318AIB4|A0A318AIB4_9MICC Queuine tRNA-ribosyltran sferase OS=Auritidibacter sp. NML120636 OX=2170743 GN=t gt PE=3 SV=1
MADYPQTRRQPSDPTPAVVPTHHPSPRDVSFSIQTRMDSGLGRTGVIHTPHGQIQTPAFIPVATQASVKAVAPEQMSAIGAQALLGNAYHLYLQPGAELVDRAGGLGQFMNWSGPTFTDSGGFQVMSLGSGFKKVIDMSGPHAPDGTGSDDDTAAGKNRLAHVDDDGVWFTSHLDGSKHRFSPEISMNIQHQLGADIMFAFDELTTLHNSRRYQETSLERTRLWAQRCLDHHAGLTAHRSDRPYQALFGVIQGAQYEDLRRKACQDLSAMQADFVTDNGSDRAGFDGYGIGGALEKKNLGAIVSWCAQELPEDKPRHLLGISEPDDLLWAIESGADTFDCVSPTRVARTGAFYTDYGRINLPRAQFKDDFAPLQPGCDCYTCAHYSRAYLRHLIKAKELLVHTLISIHNERFVIRLVETIRTSMIEGTYPELKEQVLGRYYSAEASDPPGASARFSVTP

SEQ ID NO: 51947 - protein, 459 aa, Auritidibacter sp.
  misc_feature (1)..(459): tr|A0A318ADP2|A0A318ADP2_9MICC Queuine tRNA-ribosyltran sferase OS=Auritidibacter sp. NML120779 OX=2170744 GN=t gt PE=3 SV=1
MADYPQTRRQPSDPTPAVVPTHHPSPRDVSFSIQTRMDSGLGRTGVIHTPHGQIQTPAFIPVATQASVKAVAPEQMSAIGAQALLGNAYHLYLQPGAELVDRAGGLGQFMNWSGPTFTDSGGFQVMSLGSGFKKVIDMSGPHAPDGTGSDDDTAAGKNRLAHVDDDGVWFTSHLDGSKHRFSPEISMNIQHQLGADIMFAFDELTTLHNSRRYQETSLERTRLWAQRCLDHHAGLTAHRSDRPYQALFGVIQGAQYEDLRRKACQDLSAMQADFVTDNGTDRAGFDGYGIGGALEKKNLGTIVSWCAQELPEDKPRHLLGISEPDDLLWAIESGADTFDCVSPTRVARTGAFYTDYGRINLPRAQFKDDFAPLQPGCDCYTCAHYSRAYLRHLIKAKELLVHTLISIHNERFVIRLVETIRTSMIEGTYPELKEQVLGRYYSAEASDPPGASARFSVTP

SEQ ID NO: 51948 - protein, 402 aa, Avibacterium avium
  misc_feature (1)..(402): tr|A0A379ARU6|A0A379ARU6_AVIAV Queuine tRNA-ribosyltran sferase OS=Avibacterium avium OX=751 GN=tgt PE=3 SV=1
MTMKFKLHKTDGTARRGTMTFQRPQGEFEVQTPAFMPVGTYGTVKGMTPEEVRATGAEILLGNTFHLWLRPGQEIMRKHGDLHDFMSWHRPILTDSGGFQVFSLGKLRKITEEGVKFQNPINGERIFLSPEKSMEIQYDLGSDIVMIFDECTPYPATFDYAKKSMEMSLRWAKRSRNRFDELGNQNALFGIVQGGVYEELRKVSVEGLVEIGFDGYAVGGLAVGEPKEDMHRILEYVCPQLPADKPRYLMGVGKPEDLVEGVRRGIDMFDCVMPTRNARNGHLFVTDGIVKIRNAKYRDDTSPLDPECDCYTCKNYTKAYLYHLDKCGEILGARLNTIHNLRYYQRLMAQIREAIENDTFEQFVQDFYARIGKPVPPLQSEVQQNAQAANAQSSNPQGEQNA

SEQ ID NO: 51949 - protein, 400 aa, Avibacterium endocarditidis
  misc_feature (1)..(400): tr|A0A2S5AHT2|A0A2S5AHT2_9PAST Queuine tRNA-ribosyltran sferase OS=Avibacterium endocarditidis OX=380674 GN=tgt PE=3 SV=1
MKFKLHKTDGTARRGTMTFQRPQGEFEVQTPAFMPVGTYGTVKGMTPEEVRATGAEILLGNTFHLWLRPGQEIMRKHGDLHDFMNWHRPILTDSGGFQVFSLGKLRKITEEGVKFQNPINGERIFLSPEKSMEIQYDLGSDIVMIFDECTPYPATFDYAKKSMEMSLRWAKRSRDRFDELGNKNALFGIVQGGVYEELRKVSLEGLVNIGFDGYAVGGLAVGEPKEDMHRILEYVCPQLPADKPRYLMGVGKPEDLVEGVRRGIDMFDCVMPTRNARNGHLFVTDGIVKIRNAKYRDDTSPLDPECDCYTCKNYTKAYLYHLDKCGEILGARLNTIHNLRYYQRLMAQIREAIENDSFEQFVQDFYARIGKPVPPLQSEVQQNAQAANAQSSNPQGEQNA

SEQ ID NO: 51950 - protein, 402 aa, Avibacterium gallinarum
  misc_feature (1)..(402): tr|A0A379AUX0|A0A379AUX0_AVIGA Queuine tRNA-ribosyltran sferase OS=Avibacterium gallinarum OX=755 GN=tgt PE=3 S V=1
MTMKFKLHKTDGTARRGTMTFQRPQGEFEVQTPAFMPVGTYGTVKGMTPEEVRATGAEILLGNTFHLWLRPGQEIMRKHGDLHDFMNWHRPILTDSGGFQVFSLGKLRKITEEGVKFQNPINGERIFLSPEKSMEIQYDLGSDIVMIFDECTPYPATFDYAKKSMEMSLRWAKRSRDRFDELGNKNALFGIVQGGVYEELRKVSLEGLVNIGFDGYAVGGLAVGEPKEDMHRILEYVCPQLPADKPRYLMGVGKPEDLVEGVRRGIDMFDCVMPTRNARNGHLFVTDGIVKIRNAKYRDDTSPLDPECDCYTCKNYTKAYLYHLDKCGEILGARLNTIHNLRYYQRLMAQIREAIENDTFEQFVQDFYARIGKPVPPLQSEVQQNAQAANAQSSNPQGEQNA

SEQ ID NO: 51951 - protein, 400 aa, Avibacterium paragallinarum
  misc_feature (1)..(400): tr|S6EF75|S6EF75_AVIPA Queuine tRNA-ribosyltransferase OS=Avibacterium paragallinarum JF4211 OX=1351754 GN=tgt PE=3 SV=1
MKFKLHKTDGTARRGTMTFQRPQGEFEVQTPAFMPVGTYGTVKGMTPEEVRETGAEILLGNTFHLWLRPGQEIMRKHGDLHDFMNWHRPILTDSGGFQVFSLGKLRKITEEGVKFQNPINGERIFLSPEKSMEIQYDLGSDIVMIFDECTPYPATFDYAKKSMEMSLRWAKRSRNRFDELGNQNALFGIVQGGVYEELRKVSVEGLVEIGFDGYAVGGLAVGEPKEDMHRILEYVCPQLPADKPRYLMGVGKPEDLVEGVRRGIDMFDCVMPTRNARNGHLFVTDGIVKIRNAKYRDDTSPLDPECDCYTCKNYTKAYLYHLDKCGEILGARLNTIHNLRYYQRLMAQIRQAIDEDRFDQFVVDFYARIGKPVPPLQSEVQQNAQAANAQSSSPQGEQNA

SEQ ID NO: 51952 - protein, 400 aa, Avibacterium paragallinarum
  misc_feature (1)..(400): tr|A0A4Q7GCT0|A0A4Q7GCT0_AVIPA Queuine tRNA-ribosyltran sferase OS=Avibacterium paragallinarum OX=728 GN=tgt PE =3 SV=1
MKFKLHKTDGTARRGTMTFQRPQGEFEVQTPAFMPVGTYGTVKGMTPEEVRETGAEILLGNTFHLWLRPGQEIMRKHGDLHDFMNWHLPILTDSGGFQVFSLGKLRKITEEGVKFQNPINGERIFLSPEKSMEIQYDLGSDIVMIFDECTPYPATFDYAKKSMEMSLRWAKRSRNRFDELGNQNALFGIVQGGVYEELRKVSVEGLVEIGFDGYAVGGLAVGEPKEDMHRILEYVCPQLPADKPRYLMGVGKPEDLVEGVRRGIDMFDCVMPTRNARNGHLFVTDGIVKIRNAKYRDDTSPLDPECDCYTCKNYTKAYLYHLDKCGEILGARLNTIHNLRYYQRLMAQIRQAIDEDRFDQFVVDFYARIGKPVPPLQSEVQQNAQAANAQSSSPQGEQNA

SEQ ID NO: 51953 - protein, 397 aa, Avibacterium volantium
  misc_feature (1)..(397): tr|A0A3S4HJE6|A0A3S4HJE6_AVIVO Queuine tRNA-ribosyltran sferase OS=Avibacterium volantium OX=762 GN=tgt PE=3 SV =1
MTMKFKLHKTDGTARRGTMTFQRPQGEFEVQTPAFMPVGTYGTVKGMTPEEVRATGAEILLGNTFHLWLRPGQEIMRKHGDLHDFMNWHRPILTDSGGFQVFSLGKLRKITEEGVKFQNPINGERIFLSPEKSMEIQYDLGSDIVMIFDECTPYPATFDYAKKSMEMSLRWAKRSRDRFDELGNKNALFGIVQGGVYEELRKVSLEGLVNIGFDGYAVGGLAVGEPKEDMHRILEYVCPQLPADKPRYLMGVGKPEDLVEGVRRGIDMFDCVMPTRNARNGHLFVTDGIVKIRNAKYRDDTSPLDPECDCYTCKNYTKAYLYHLDKCGEILGARLNTIHNLRYYQRLMAQIREAIENDTFEQFVQDFYARIGKPVPPLQSEVQQNAQASNPQGEQNV

SEQ ID NO: 51954 - protein, 370 aa, Azoarcus communis
  misc_feature (1)..(370): tr|A0A2U8GTD8|A0A2U8GTD8_9RHOO Queuine tRNA-ribosyltran sferase OS=Azoarcus communis OX=41977 GN=tgt PE=3 SV=1
MQFELLTTSGSARRGRLTLAHGVVETPVFMPVGTYGTVKAMTPTMLADIGAQICLGNTFHLWLRPGLDVIAAHGGLHGFMGWDKPILTDSGGFQVFSLGALRKITEEGVKFASPIDGAKLFLTPEISMQIQHTLNSDVVMIFDECTPYPATRDEAAKSMRMSQRWAQRSRDEFDRLENTNALFGIVQGGMYEDLRDESLAALDEIGFHGFAIGGLSVGEPKEDMRRILAHTAPRLPVGKPRYLMGVGTPEDIVEGVAAGIDMFDCVMPTRNARNGWLFTRFGDIKIKNATHKLDTRPLDPTCDCYTCQNFSRAYLHHLHRTGEILGSMLNTIHNLRYYQTLTAELRDAIAVDGFAAFVERFQRDRNAGTV

SEQ ID NO: 51955 - protein, 370 aa, Azoarcus communis
  misc_feature (1)..(370): tr|A0A323V0S9|A0A323V0S9_9RHOO Queuine tRNA-ribosyltran sferase OS=Azoarcus communis SWub3 = DSM 12120 OX=11210 29 GN=tgt PE=3 SV=1
MQFELLATSGQARRGRMTLAHGVVETPVFMPVGTYGTVKAMTPDMLRDIGAQICLGNTFHLWLRPGLEVVAAHGGLHGFMAWDKPLLTDSGGFQVFSLGALRKITEEGVKFASPVDGAKLFLTPEISMQIQHTLNSDVVMIFDECTPYPATRDEAAKSMRLSQRWARRSRDEFDRLGNTNALFGIVQGGMYEDLRNESLAALEDIGFHGFAIGGLSVGEPKEDMQRILAHTAPRLPVHKPRYLMGVGTPEDIVEGVAAGIDMFDCVMPTRNARNGWLFTRYGDIKIKNAIHKADTRPLDPSCDCYTCRNFSRSYLHHLHRSGEILGSMLNTIHNLHYYQTLTRELREAIAVGRFDDYVSRFRSERANGTT

SEQ ID NO: 51956 - protein, 370 aa, Azoarcus indigens
  misc_feature (1)..(370): tr|A0A4R6E0E9|A0A4R6E0E9_9RHOO Queuine tRNA-ribosyltran sferase OS=Azoarcus indigens OX=29545 GN=tgt PE=3 SV=1
MNFDLLASDGSARRGRLTLAHGTVETPVFMPVGTYGTVKAMTPAALNDIGASICLGNTFHLWLRPGLEVVAAHGGLHRFMGWDKPILTDSGGFQVFSLGALRKISEEGVKFASPIDGARLFLTPEVSMQIQHTLNSDVVMIFDECTPYPASRDEAAKSMRLSQRWARRSRDEFDRLGNANALFGIVQGGMYEDLRDESLAALQEIGFHGFAIGGLSVGEPKEDMARILAHTAPRLPREKPRYLMGVGTPEDIVAGVAAGIDMFDCVMPTRNARNGWLFTRYGDLKIKNAVHKADPRPLDPSCDCYACRNFSRAYLHHLHRTGEILGSMLNTIHNLRYYQVLTAEIREAIAAGDFDGFRQRFAADRARGTA

SEQ ID NO: 51957 - protein, 370 aa, Azoarcus sp.
  misc_feature (1)..(370): sp|A1K3W9|TGT_AZOSB Queuine tRNA-ribosyltransferase OS= Azoarcus sp. (strain BH72) OX=62928 GN=tgt PE=3 SV=1
MQFELLSTSAGARRGRLTLAHGAVETPVFMPVGTYGTVKAMTPAMLSDVGAQICLGNTFHLWLRPGLDIVGAHGGLHRFMGWDKPILTDSGGFQVFSLGALRKISEEGVKFASPIDGARLFLTPEISMQIQTVLNSDVVMIFDECTPYPATRDEAAKSMRLSRRWARRSRDEFDRLENANALFGIVQGGMYEDLRDESLGALQDIGFHGFAIGGLSVGEPKDDMARILAHTAPRLPADKPRYLMGVGTPEDIVDGIANGIDMFDCVMPTRNARNGWLFTRYGDLKIKNAVHKADTRPLDPSCSCYTCRNFSRSYLHHLHRAGEILGSMLNTVHNLHYYQTLTAELRDAIAADRFADYVTRFRSERATGAH

SEQ ID NO: 51958 - protein, 370 aa, Azoarcus sp.; identical to SEQ ID NO: 51954
  misc_feature (1)..(370): tr|A0A558DHW5|A0A558DHW5_9RHOO Queuine tRNA-ribosyltran sferase OS=Azoarcus sp. PHD OX=1628740 GN=tgt PE=3 SV=1

SEQ ID NO: 51959 - protein, 370 aa, Azoarcus tolulyticus
  misc_feature (1)..(370): tr|A0A1N6V048|A0A1N6V048_9RHOO Queuine tRNA-ribosyltran sferase OS=Azoarcus tolulyticus OX=34027 GN=tgt PE=3 SV =1
MQFDLITQDGAARRGRLTLAHGVVETPVFMPVGTYGTVKAMTPAALDDIGAQICLGNTFHLWLRPGLEVVAAHGGLHDFMGWNKPILTDSGGFQVFSLGALRKISEEGVKFASPIDGAKLLLTPEISMQIQHTLNSDIAMIFDECTPYPATRDEAAKSMRLSQRWAKRSRDEFDKLGNANALFGIVQGGMYEDLRDESLAALEDIGFHGYAIGGLSVGEPKDDMERILAHTAPRLPQHKPRYLMGVGTPEDIVAGVTAGIDMFDCVMPTRNARNGWLFTRFGDIKIKNAIHKQDTRPLDPSCDCYTCRNFSRAYLHHLHRAGEILGSMLNTIHNLRYYQVLTAELRTAIDAGAFNAYLGRFRGERSTGTQ

SEQ ID NO: 51960 - protein, 376 aa, Azomonas agilis
  misc_feature (1)..(376): tr|A0A562IZI4|A0A562IZI4_9GAMM Queuine tRNA-ribosyltran sferase OS=Azomonas agilis OX=116849 GN=tgt PE=3 SV=1
MSQCHMSFELLATEGRARRGRLVFPRGVVETPAFMPVGTYGTVKGMLPRDLEAIGAQIILGNTFHLWLRPGTDIIRAHGDLHDFAQWQRPILTDSGGFQVFSLGALRKIKEEGVYFASPVDGRKVFMGPEESMQVQRDLGSDVVMIFDECTPYPADEATARQSMELSLRWALRSKQAHADNPAALFGIVQGGMHESLRMRSLEGLCEIGFDGLAIGGLSVGEPKEDMLRILDFLPPQMPADKPRYLMGVGKPEDLVEAVRRGIDMFDCVMPTRNARNGHLFTDTGVVKIRNSAHKHDDTPLDPTCDCYTCKHFSRAYLHHLDKCGEMLGSMLNTIHNLRYYQYLMAGLRDAIQQGTLAAFVDSFYAKRGLPTPALV

SEQ ID NO: 51961 - protein, 370 aa, Azonexus fungiphilus
  misc_feature (1)..(370): tr|A0A495VMT4|A0A495VMT4_9RHOO Queuine tRNA-ribosyltran sferase OS=Azonexus fungiphilus OX=146940 GN=tgt PE=3 S V=1
MQFELLKTDGGARRGTLTLAHGVVQTPVFMPVGTYGTVKAMTPQSLDDIGAQICLGNTFHLWLRPGLEVVKAHDGLHDFMNWRKPILTDSGGFQVFSLGALRKITEEGVKFSSPHDGAKLFLSPEISMQIQKVLNSDIVMIFDECTPYPASHEEAAKSMRMSMRWARRSRDEHDKLENANALFGIVQGGMYEDLRDESIAGLCDIGFDGMAIGGLSVGEPKDDMARILAHTAPRLPTNKPRYLMGVGTPEDLVNGVKNGIDMFDCVMPTRNARNGHLFTRFGDVKIKNARYRADTGPLDPSCSCYTCTQFTRSYLHHLYRNGEILGGMLNTIHNLHFYQTIMAEMRAAIESGKLDEWSSAFARDRTSGEC

SEQ ID NO: 51962 - protein, 370 aa, Azonexus hydrophilus
  misc_feature (1)..(370): tr|A0A1R1HZY9|A0A1R1HZY9_9RHOO Queuine tRNA-ribosyltran sferase OS=Azonexus hydrophilus OX=418702 GN=tgt PE=3 S V=1
MQFELHKTDGAARRGTVTLAHGQVQTPVFMPVGTYGTVKAMTPQSLNDIGAQICLGNTFHLWLRPGLDVVAAHNGLHDFMNWQKPILTDSGGFQVFSLGAMRKITEEGVKFSSPHDGAKLFLTPEISMQIQKVLNSDIVMIFDECTPYPASHDEAAKSMRMSMRWAQRSRDEHNRLENGNALFGIVQGGMYEDLRDESVAGLCDIGFDGMAIGGLSVGEPKDDMARILTHTAPRLPTNKPRYLMGVGTPEDLVNGVKNGIDMFDCVMPTRNARNGHLFTRFGDVKIKNARYKLDTGPLDPSCTCYTCTQFTRSYLHHLFRNGEILGGMLNTIHNLHFYQTIMAEMRAAIESGKLEEWSTAFARDRSAGQC

SEQ ID NO: 51963 - protein, 378 aa, Azorhizobium caulinodans
  misc_feature (1)..(378): tr|A8I5P9|A8I5P9_AZOC5 Queuine tRNA-ribosyltransferase OS=Azorhizobium caulinodans (strain ATCC 43989 / DSM 59 75 / JCM 20966 / NBRC 14845 / NCIMB 13405 / ORS 571) OX =438753 GN=tgt PE=3 SV=1
MTDTFSFKVHATDGTARTGAISTPRGEIRTPAFMPVGTVATVKGIYPEQVRATGADILLGNTYHLMLRPSAERVAKLGGLHKFMRWERPILTDSGGFQVMSLSGLRKITEKGVTFRSHVDGALHEMTPERSIEIQGLLGADIQMQLDECVSLPCEEAEAERAMRLSLRWAERSKKAFELQPKGRALYGIVQGGAVPRLRIESARELAAMDFPGYSIGGLAVGEPQEVMLDMIETVEPHLPKEKPRYLMGVGTPDDMLEAVARGIDMFDCVMPTRSGRHALAFTRFGRINLKNARHAEDSRPLDEESDCPALRDYSRAYLHHLVRCEEMLGAMLISWANLHYYQDLMRGIRGAIAEGRFEDFRRETKEGWARGDIPRLA

SEQ ID NO: 51964 - protein, 367 aa, Azorhizobium sp.
  misc_feature (1)..(367): tr|A0A258K2F7|A0A258K2F7_9RHIZ Queuine tRNA-ribosyltran sferase (Fragment) OS=Azorhizobium sp. 35-67-5 OX=19703 21 GN=B7Y75_01545 PE=3 SV=1
MTDTFSFRLNATDGTARTGIVSTPRGEIRTPAFMPVGTVATVKGVYPDQVRATGADILLGNTYHLMLRPGAERIAALGGLHNFMRWDRPILTDSGGFQVMSLSQLRKLDETGVTFRSHIDGAIHHLTPERAMEIQGLLGADIQMQLDECVRLPCPDAEAARAMQLSLRWAARSKRAFERQPKGRAVFGIVQGGAVEALRVESARALADMDFPGYSIGGLAVGEPQEIMLRMIETVEPHLPTTKPRYLMGVGTPDDLLEAVGRGIDMFDCVMPTRSGRHALAFTRFGRINLKNARHQNDPRPLDEESDCPALRDYSRAYLHHLIRCGEMLGGMLLSWANLHYYQDLMRGARAAIAEGRYDAYRAETKA

SEQ ID NO: 51965 - protein, 374 aa, Azospira oryzae
  misc_feature (1)..(374): tr|G8QJX4|G8QJX4_AZOOP Queuine tRNA-ribosyltransferase OS=Azospira oryzae (strain ATCC BAA-33 / DSM 13638 / PS ) OX=640081 GN=tgt PE=3 SV=1
MQFELLKTDGQARRGTLTLAHGTVQTPVFMPVGTYGTVKAMTPQSLHDIGAQICLGNTFHLWLRPGLEVIKAHGGLHDFMGWNKPILTDSGGFQVFSLGALRKITEEGVKFSSPIDGAKLFLTPEESMRIQHTLNSDIVMIFDECTPYPATVDEAAKSMRLSLRWAQRSIDEHRRLGNGNALFGIVQGGMYETLRDESLAGLDEMGFDGMAIGGLSVGEPKEDMARILAHTAPKLPAHKPRYLMGVGTPEDLVHAVSQGIDMFDCVMPTRNARNGHLFTRYGDLKIKNAIHRQDTGPLDPSCDCYTCRNFSRAYLHHLFRAGEILGSMLNTIHNLHYYQVLMAELRAAIEEGRLQPHMENFHRDRSRGASPAAG

SEQ ID NO: 51966 - protein, 231 aa, Azospira oryzae
  misc_feature (1)..(231): tr|A0A2W5H481|A0A2W5H481_9RHOO Queuine tRNA-ribosyltran sferase (Fragment) OS=Azospira oryzae OX=146939 GN=tgt PE=3 SV=1
MRFELIARDGAARRGRLTLAHGTVDTPAFMPVGTYGAVKAMSPAELKGLGTQIVLGNTFHLWLRPGLEVIKAHGGLHRFIGWDGPILTDSGGFQVFSLGKLRSISEEGVAFRSPVNGDRCFLTPEEAMRIQRVLNADVAMVFDECTPYPADEAQTRASMELSLRWAERSKRAFEGSENALFGIVQGGMFEHLREASLKGLMDIGFDGYAIGGLSVGEPKEEMLRILDHTAA

SEQ ID NO: 51967 - protein, 372 aa, Azospira sp.
  misc_feature (1)..(372): tr|A0A2R5EEE3|A0A2R5EEE3_9RHOO Queuine tRNA-ribosyltran sferase OS=Azospira sp. I13 OX=1765050 GN=tgt PE=3 SV=1
MQFELLKTDGQARRGTLTLAHGVVQTPVFMPVGTYGTVKAMTPQSLHDIGAQICLGNTFHLWLRPGLEVVKAHGGLHDFMGWDKPILTDSGGFQVFSLGALRKITEEGVKFSSPIDGAKLFLTPEESMRIQHTLNSDIVMIFDECTPYPATLDEAAKSMRLSLRWAQRSIDEHRRLGNGNALFGIVQGGMYEELRNESLAGLDAMGFDGMAIGGLSVGEPKEDMARILAHTAPKLPSHKPRYLMGVGTPEDLVHAVSQGIDMFDCVMPTRNARNGHLFTRYGDLKIKNAIHRQDTGPLDPSCDCYTCRNFSRAYLHHLFRAGEILGSMLNTIHNLHYYQVLMAELRAAIEEGRLQPHMESFHRDRARGACAA

SEQ ID NO: 51968 - protein, 400 aa, Azospirillum brasilense
  misc_feature (1)..(400): tr|A0A4D8PT06|A0A4D8PT06_AZOBR Queuine tRNA-ribosyltran sferase OS=Azospirillum brasilense OX=192 GN=tgt PE=3 S V=1
MTGIGFELLKTDGRARRGRVSTAHGVINTPAFMPVGTAATVKAMTSDAVKSTGAEILLGNTYHLMLRPTAERVGQLGGLHRFMNWDKPILTDSGGFQVMSLSDLRTMTEEGVTFKSHLDGTKHHLTPERSIQIQHLLDSNITMCLDECTPFPATEAQAASSMRLSMRWARRSKDAFVERSGYGLFGIVQGGVYADLRAESVAALSEIGFDGYAIGGLAVGEGQETMFTVLDFTEPLMVKERPRYLMGVGRPSDLIGAVRRGVDMFDCVMPTRSGRTGQAFVRRGTINIRNARHAHDERPLDEECGCPACRNHSRAYLHHLFKAGEMLGPMLLTWHNLHYYQDLMAELRQAIEDGRFEEVASALEARLNEGDVPATEDPLAALKVKPAKPAKPAKKESADV

SEQ ID NO: 51969 - protein, 400 aa, Azospirillum brasilense
  misc_feature (1)..(400): tr|G8AKA0|G8AKA0_AZOBR Queuine tRNA-ribosyltransferase OS=Azospirillum brasilense Sp245 OX=1064539 GN=tgt PE=3 SV=1
MTGIGFELLKTDGRARRGRVSTAHGVINTPAFMPVGTAATVKAMTSDAVKSTGAEILLGNTYHLMLRPTAERVGQLGGLHRFMNWDKPILTDSGGFQVMSLSDLRTMTEEGVTFKSHLDGSKHHLTPERSIQIQHLLDSNITMCLDECTPFPATEAQAASSMRLSMRWAKRSKDAFVERPGYGLFGIVQGGVYADLRAESVAALSDIGFDGYAIGGLAVGEGQETMFTINIRNARHAHRDRPRYLMGVGRPSDLIGAVRRGVDMFDCVMPTRSGRTGQAFVRRGTINIRNARHAHDERPLDEECGCPACRNHSRAYLHHLFKAGEMLGPMLLTWHNLHYYQDLMAELRQAIEDGRFDEVAGALEARLNEGDIPATEDPLAHLKVKPAKPAKSAKKESADV

SEQ ID NO: 51970 - protein, 411 aa, Azospirillum doebereinerae
  misc_feature (1)..(411): tr|A0A433J503|A0A433J503_9PROT Queuine tRNA-ribosyltran sferase OS=Azospirillum doebereinerae OX=92933 GN=tgt P E=3 SV=1
MTGIGFELLATDGRARRGRVTTAHGSIETPAFMPVGTAATVKAMTTDAVASTGAEILLGNTYHLMLRPTAERVAQLGGLHRFMNWDKPILTDSGGFQVMSLSDLRTMSEEGVTFKSHLDGSRHHLTPERSIQIQHLLDSNITMCLDECTPFPATEAQAESSMRLSMRWARRSKDAFVERPGYGLFGIVQGSVYPELRAESVAALSDIGFDGYAIGGLAVGEGQETMFTVLDFTEPAMLKQRPRYLMGVGRPSDLIGAVRRGVDMFDCVMPTRSGRTGQAFVRRGTINIRNARHAHDDRPLDAECGCPACRSYGRGYLHHLFKANEMLGPMLLTWHNLHYYQDLMREMRGAIAEGRFEQVASALEARLTEGDVEATTDPIAKPPKPPKQNRPPKPEAKTEAAAETKDTTDEQ

SEQ ID NO: 51971 - protein, 404 aa, Azospirillum humicireducens
  misc_feature (1)..(404): tr|A0A168Y6Q7|A0A168Y6Q7_9PROT Queuine tRNA-ribosyltran sferase OS=Azospirillum humicireducens OX=1226968 GN=tg t PE=3 SV=1
MTGIGFDLLATDGRARRGRVTTAHGTIETPAFMPVGTAATVKAMTTDAVASTGAEILLGNTYHLMLRPTAERVAQLGGLHRFMNWDKPILTDSGGFQVMSLSDLRTMSEEGVTFKSHLDGSRHHLTPERSIQIQHMLDSNITMCLDECTPFPATEAQAESSMRLSMRWARRSKDAFVERPGYGLFGIVQGGIYPEQRAESVAALTDIGFDGYAIGGLAVGEGQETMFRVLDFTEPLMVKDRPRYLMGVGRPSDLIGAVRRGVDMFDCVMPTRSGRTGQAFVRRGTINIRNARHAHDERPLDSECGCPACRSYSRGYLHHLFKADEMLGPMLLTWHNLHYYQDLMRTMRQAIADGNFEEVAGAMEARLNEGDIEATVDPIAKPGKPPKQGRPPKKDRVAEDKTDD

SEQ ID NO: 51972 - protein, 404 aa, Azospirillum lipoferum
  misc_feature (1)..(404): tr|A0A5A9GV11|A0A5A9GV11_AZOLI Queuine tRNA-ribosyltran sferase OS=Azospirillum lipoferum OX=193 GN=tgt PE=3 SV =1
MTGIGFDLLATDGRARRGRVTTAHGTIETPAFMPVGTAATVKAMTTDAVASTGAEILLGNTYHLMLRPTAERVAQLGGLHRFMNWDKPILTDSGGFQVMSLSDLRTMSEEGVTFKSHLDGSRHHLTPERSIQIQHMLDSNITMCLDECTPFPATEAQAESSMRLSMRWARRSKDAFVERPGYGLFGIVQGSVYPEQRAESVAALTDIGFDGYAIGGLAVGEGQETMFRVLDFTEPLMVKDRPRYLMGVGRPSDLIGAVRRGVDMFDCVMPTRSGRTGQAFVRSGTINIRNARHAHDERPLDAECSCPACRSYSRGYLHHLFKADEMLGPMLLTWHNLHYYQDVMRTMRQAIENGNFEEVASAMETRLNEGDIEATVDPIAKPGKPPKQGRPPKAERVAEEKTDD

SEQ ID NO: 51973 - protein, 431 aa, Azospirillum lipoferum
  misc_feature (1)..(431): tr|G7Z201|G7Z201_AZOL4 Queuine tRNA-ribosyltransferase OS=Azospirillum lipoferum (strain 4B) OX=862719 GN=tgt PE=3 SV=1
MTGIGFDLLATDGRARRGRVTTAHGTIETPAFMPVGTAATVKAMTTDAVASTGAEILLGNTYHLMLRPTAERVAQLGGLHRFMNWNKPILTDSGGFQVMSLSDLRTMSEEGVTFKSHLDGSRHHLTPERSIQIQHMLDSNITMCLDECTPFPATEAQAESSMRLSMRWARRSKDAFVERPGYGLFGIVQGGIYPEQRAESVAALTDIGFDGYAIGGLAVGEGQETMFRVLDFTEPLMVKDRPRYLMGVGRPSDLIGAVRRGVDMFDCVMPTRSGRTGQAFVRRGTINIRNARHAHDERPLDAECGCPACRSYSRGYLHHLFKADEMLGPMLLTWHNLHYYQDVMRTMRQAIADGNFEEVAGAMEARLNEGDIEATVDPIAKPGKPPKQGRPPKAGKDSDPPKAGKDSAPPKAGKDSAPPKIGREAEEKTDD

SEQ ID NO: 51974 - protein, 413 aa, Azospirillum oryzae
  misc_feature (1)..(413): tr|A0A1X7H7I4|A0A1X7H7I4_9PROT Queuine tRNA-ribosyltran sferase OS=Azospirillum oryzae OX=286727 GN=tgt PE=3 SV =1
MTGIGFDLLATDGRARRGRVTTAHGTIETPAFMPVGTAATVKAMTTDAVASTGAEILLGNTYHLMLRPTAERVAQLGGLHRFMNWDKPILTDSGGFQVMSLSDLRTMSEEGVTFKSHLDGSRHHLTPERSIQIQHMLDSNITMCLDECTPFPATEAQAESSMRLSMRWARRSKDAFVERPGYGLFGIVQGSVYPDLRAESVAALSDIGFDGYAIGGLAVGEGQETMFRVLDFTEPLMVKDRPRYLMGVGRPSDLIGAVRRGVDMFDCVMPTRSGRTGQAFVRRGTINIRNARHAHDERPLDAECGCPACRSYSRGYLHHLFKADEMLGPMLLTWHNLHYYQDVMRTMRQAIEDGNFEEVASAMESRMNDGDIEATVDPIAKPGKPPKQGRPPKAGKDSDPPKAERVAEEKTDD

SEQ ID NO: 51975 - protein, 413 aa, Azospirillum oryzae
  misc_feature (1)..(413): tr|A0A5A9G5J0|A0A5A9G5J0_9PROT Queuine tRNA-ribosyltran sferase OS=Azospirillum oryzae OX=286727 GN=tgt PE=3 SV =1
MTGIGFDLLATDGRARRGRVTTAHGTIETPAFMPVGTAATVKAMTTDAVASTGAEILLGNTYHLMLRPTAERVAQLGGLHRFMNWDKPILTDSGGFQVMSLSDLRTMSEEGVTFKSHLDGSRHHLTPERSIQIQHMLDSNITMCLDECTPFPATEAQAESSMRLSMRWARRSKDAFVERPGYGLFGIVQGSVYPELRAESVAALSDIGFDGYAIGGLAVGEGQETMFRVLDFTEPLMVKDRPRYLMGVGRPSDLIGAVRRGVDMFDCVMPTRSGRTGQAFVRRGTINIRNARHAHDERPLDADCNCPTCRSYSRGYLHHLFKADEILGPMLLTWHNLHYYQDVMRTMRQAIEDGNFEEIASAMEARMNEGDIEATVDPIAKPGKPPKQGRPPKAGKDSDPPKAERVAEEKTDD

SEQ ID NO: 51976 - protein, 431 aa, Azospirillum palustre
  misc_feature (1)..(431): tr|A0A2B8B3P8|A0A2B8B3P8_9PROT Queuine tRNA-ribosyltran sferase OS=Azospirillum palustre OX=2044885 GN=tgt PE=3 SV=1
MTGIGFDFLATDGRARRGRLTTAHGTIETPAFMPVGTAATVKAMTTDAVASTGAEILLGNTYHLMLRPTAERVAQLGGLHRFMNWDKPILTDSGGFQVMSLSDLRTMSEEGVTFKSHLDGSRHHLTPERSIQIQHMLDSNITMCLDECTPFPATEAQAEASMRLSMRWARRSKDAFVERPGYGLFGIVQGSVYPEQRAESVAALTDIGFDGYAIGGLAVGEGQETMFRVLDFTEPLMVKDRPRYLMGVGRPSDLIGAVRRGVDMFDCVMPTRSGRTGQAFVRRGTINIRNARHAHDERPLDAECGCPTCRSYSRGYLHHLFKADEMLGPMLLTWHNLHYYQDVMRTMRQAIADGTFEEVAGAMEARMNEGDIEATVDPIAKPGKPPKQGRPPKAGKDSAPPKAGEDSAPPKADKDSAPPEAERVAEEKTDE

SEQ ID NO: 51977 - protein, 431 aa, Azospirillum sp.
  misc_feature (1)..(431): tr|A0A2U1WH96|A0A2U1WH96_9PROT Queuine tRNA-ribosyltran sferase OS=Azospirillum sp. TSA6c OX=709813 GN=tgt PE=3 SV=1
MTGIGFDLLATDGRARRGRVTTAHGTIETPAFMPVGTAATVKAMTTDAVASTGAEILLGNTYHLMLRPTAERVAQLGGLHRFMNWDKPILTDSGGFQVMSLSDLRTMSEEGVTFKSHLDGSRHHLTPERSIQIQHMLDSNITMCLDECTPFPATEAQAESSMRLSMRWARRSRDAFVERPGYGLFGIVQGSIYPEQRAESVAALTDIGFDGYAIGGLAVGEGQETMFRVLDFTEPLMVKDRPRYLMGVGRPSDLIGAVRRGVDMFDCVMPTRSGRTGQAFVRRGTINIRNARHAHDERPLDAECGCPTCRSYSRGYLHHLFKADEMLGPMLLTWHNLHYYQDVMRTMRQAIADGNFEKVAGAMEARMNEGDIEATVDPIAKPGKPPKQGRPPKAGKDSVPPKADKDNAPPKADKDSAPPEAERVAEENTDE

SEQ ID NO: 51978 - protein, 413 aa, Azospirillum sp.
  misc_feature (1)..(413): tr|A0A2U1XAJ9|A0A2U1XAJ9_9PROT Queuine tRNA-ribosyltran sferase OS=Azospirillum sp. TSH20 OX=652754 GN=tgt PE=3 SV=1
MTGIGFDLLATDGRARRGRVTTAHGTIETPAFMPVGTAATVKAMTTDAVASTGAEILLGNTYHLMLRPTAERVAQLGGLHRFMNWNKPILTDSGGFQVMSLSDLRTMSEEGVTFKSHLDGSLHHLTPERSIQIQHMLDSNITMCLDECTPFPATEAQAESSMRLSMRWARRSKDAFVERPGYGLFGIVQGSVYPELRAESVAALSDIGFDGYAIGGLAVGEGQETMFRVLDFTEPLMVKDRPRYLMGVGRPSDLIGAVRRGVDMFDCVMPTRSGRTGQAFVRRGTINIRNARHAHDERPLDADCTCPACRSYSRGYLHHLFKADEMLGPMLLTWHNLHYYQDVMRTMRQAIEDGNFEEVASAMEARMNEGDIEATVDPIAKPGKPPKQGRPPKAGKDSDPPKAERVAEEKTDD

SEQ ID NO: 51979 - protein, 404 aa, Azospirillum thiophilum
  misc_feature (1)..(404): tr|A0A0F2KYG4|A0A0F2KYG4_9PROT Queuine tRNA-ribosyltran sferase OS=Azospirillum thiophilum OX=528244 GN=tgt PE= 3 SV=1
MTGIGFDLLATDGRARRGRVTTAHGTIETPAFMPVGTAATVKAMTTDAVASTGAEILLGNTYHLMLRPTAERVAQLGGLHRFMNWDKPILTDSGGFQVMSLSDLRTMSEEGVTFKSHLDGSRHHLTPERSIQIQHMLDSNVTMCLDECTPFPATEAQAESSMRLSMRWARRSKDAFVERPGYGLFGIVQGGIYPEQRAESVAALTDIGFDGYAIGGLAVGEGQETMFRVLDFTEPLMVKDRPRYLMGVGRPSDLIGAVRRGVDMFDCVMPTRSGRTGQAFVRRGTINIRNARHAHDERPLDADCGCPTCRSYGRGYLHHLFKADEMLGPMLLTWHNLHYYQDLMRTMRQAIADGNFEEVAGTMEARLTEGDVEATLDPIAKPGKPPKQGRPPKKDRVEEDKTDE

SEQ ID NO: 51980 - protein, 374 aa, Azotobacter beijerinckii
  misc_feature (1)..(374): tr|A0A1I4C2J7|A0A1I4C2J7_9GAMM Queuine tRNA-ribosyltran sferase OS=Azotobacter beijerinckii OX=170623 GN=tgt PE =3 SV=1
MSHMSFELLATDGKARRGRLTFPRGVVETPAFMPVGTYGTVKGMLPRDIEAIGAQIILGNTFHLWLRPGTEVIRRHGDLHDFMQWQGPILTDSGGFQVFSLGALRKIKEEGVYFASPVDGAKVFMGPEESMQVQRELGSDIVMIFDECTPYPADEEVARRSMELSLRWAKRSKIAHEGNPAALFGIVQGGMHEDLRLRSLEGLNEIGFDGLAIGGLSVGEPKEEMIRVLDFLPPQLPADKPRYLMGVGKPEDLVEGVRRGVDMFDCVMPTRNARNGHLFVDTGVLKIRNAVHRHDESPLDPACDCYTCKHFSRAYLHHLDKCGEMLGSMLNTIHNLRHYQRLMAGLREAIQQGKLAAFVDSFYARRGLPVPPLT

SEQ ID NO: 51981 - protein, 374 aa, Azotobacter beijerinckii
  misc_feature (1)..(374): tr|A0A1H6Y877|A0A1H6Y877_9GAMM Queuine tRNA-ribosyltran sferase OS=Azotobacter beijerinckii OX=170623 GN=tgt PE =3 SV=1
MSHMSFELLATDGKARRGRLTFPRGVVETPAFMPVGTYGTVKGMLPRDIEAIGAQIILGNTFHLWLRPGTEVIRRHGDLHDFMQWQGPILTDSGGFQVFSLGALRKIKEEGVYFASPVDGAKVFMGPEESMQVQRELGSDIVMIFDECTPYPADEEVARRSMELSLRWAKRSKVAHEGNPAALFGIVQGGMHEDLRLRSLEGLEEIGFDGLAIGGLSVGEPKEEMIRVLDFLPPQLPADKPRYLMGVGKPEDLVEGVRRGVDMFDCVMPTRNARNGHLFVDTGVLKIRNAVHRHDESPLDPACDCYTCKHFSRAYLHHLDKCGEMLGSMLNTIHNLRHYQRLMAGLREAIQQGKLAAFVDSFYARRGLPVPPLT

SEQ ID NO: 51982 - protein, 371 aa, Azotobacter chroococcum
  misc_feature (1)..(371): tr|A0A0C4WKA3|A0A0C4WKA3_9GAMM Queuine tRNA-ribosyltran sferase OS=Azotobacter chroococcum NCIMB 8003 OX=132831 4 GN=tgt PE=3 SV=1
MSFELLATDGKARRGRLTFPRGVVETPAFMPVGTYGTVKGMLPRDIEAIGAQIILGNTFHLWLRPGTEVIRRHGDLHDFMQWQGPILTDSGGFQVFSLGALRKIKEEGVYFASPVDGAKVFMGPEESMQVQRELGSDIVMIFDECTPYPADEEVARRSMELSLRWAKRSKVAHEGNPAALFGIVQGGMHEDLRLRSLEGLEEIGFDGLAIGGLSVGEPKEEMIRVLDFLPPRLPADKPRYLMGVGKPEDLVEGVRRGIDMFDCVMPTRNARNGHLFVDTGVLKIRNAVHRHDESPLDPACDCYTCKHFSRAYLHHLDKCGEMLGSMLNTIHNLRHYQRLMAGLREAIQQGKLAAFVDTFYARRGLPVPPLT

SEQ ID NO: 51983 - protein, 371 aa, Azotobacter chroococcum; identical to SEQ ID NO: 51982
  misc_feature (1)..(371): tr|A0A4Q9VLM7|A0A4Q9VLM7_9GAMM Queuine tRNA-ribosyltran sferase OS=Azotobacter chroococcum OX=353 GN=tgt PE=3 S V=1

SEQ ID NO: 51984 - protein, 371 aa, Azotobacter vinelandii
  misc_feature (1)..(371): sp|C1DE76|TGT_AZOVD Queuine tRNA-ribosyltransferase OS= Azotobacter vinelandii (strain DJ / ATCC BAA-1303) OX=3 22710 GN=tgt PE=3 SV=1
MTFELLATDGKARRGRLTFPRGVVETPAFMPVGTYGTVKGMLPRDIEAIGAQIILGNTFHLWLRPGTEVIRRHGDLHDFMQWHGPILTDSGGFQVFSLGALRKIREEGVYFASPVDGAKVFMGPEESMRVQRDLGSDVVMIFDECTPYPADEEVARRSMELSLRWAGRSKIAHEGNPAALFGIVQGGMHEDLRLRSLDGLEEIGFDGLAIGGLSVGEPKEEMIRVLDFLPPRLPADKPRYLMGVGKPEDLVEGVRRGIDMFDCVMPTRNARNGHLFVDSGVLKIRNAVHRHDESPLDPACDCHTCKHFSRAYLHHLDKCGEMLGSMLNTIHNLRHYQRLMTGLREAIQQGKLAAFVDTFYARRGLPVPPLT

SEQ ID NO: 51985 - protein, 371 aa, Azotobacter vinelandii; identical to SEQ ID NO: 51984
  misc_feature (1)..(371): tr|M9YDF8|M9YDF8_AZOVI Queuine tRNA-ribosyltransferase OS=Azotobacter vinelandii CA6 OX=1283331 GN=tgt PE=3 SV =1

SEQ ID NO: 51986 - protein, 381 aa, Bacillaceae bacterium; identical to SEQ ID NO: 51256
  misc_feature (1)..(381): tr|A0A3E0JTL3|A0A3E0JTL3_9BACI Queuine tRNA-ribosyltran sferase OS=Bacillaceae bacterium OX=1889774 GN=tgt PE=3 SV=1

SEQ ID NO: 51987 - protein, 379 aa, Bacillaceae bacterium
  misc_feature (1)..(379): tr|A0A271MA89|A0A271MA89_9BACI Queuine tRNA-ribosyltran sferase OS=Bacillaceae bacterium SAOS 7 OX=2015052 GN=t gt PE=3 SV=1
MSAIKYELIKTCKQTGARLGRVHTPHGSFETPIFMPVGTLATVKTMSPEDLKEMGANIILSNTYHLWLRPGHDIVQEAGGLHKFMNWDRPILTDSGGFQVFSLSEFRKIEEEGVHFRNHLNGDKLFLSPEKAMEIQNALGSDIMMAFDECPPYPAEYDYMKRSVERTSRWAERCLKAHARPEDQGLFGIVQGGEYEELRRQSAADLVSMDFPGYAIGGLSVGEPKDVMNRVLDFTTPFLPADKPRYLMGVGSPDSLIDGAIRGVDMFDCVLPTRIARNGTLMTSEGRLVVKNAKYARDFGPLDENCDCYTCRNYSRAYIRHLIRTNETFGIRLTTYHNLYFLIKLMEQVRQAIREDRLGDFRDEFFEAYGFNRPDAKNF

SEQ ID NO: 51988 - protein, 381 aa, Bacilli bacterium
  misc_feature (1)..(381): tr|A0A0K0GDB7|A0A0K0GDB7_9FIRM Queuine tRNA-ribosyltran sferase OS=Bacilli bacterium VT-13-104 OX=1637974 GN=tg t PE=3 SV=1
MKLTPITYELIKIDKQTGARLGRVHTPHGSFDTPTFMPVGTLATVKTMSPEELESMNANIILSNTYHLWLRPGEDIIREAGGLHKFMNWDGAILTDSGGFQVFSLSDMREIKEEGVHFRNHLNGEKLFLSPEKAMEIQNALGSDIMMAFDECPPYPATHEYMKSSVERTSRWAERCLEAHKRKDVQGLFGIVQGGEFEDLRKQSANDLISLDFPGYAIGGLSVGEPKDVMNRVLEFTTPLLPANKPRYLMGVGSPDSLIDGAIRGVDMFDCVLPTRIARNGTCMTSTGRLVVRNAKYARDFRPIDENCDCHVCKNYSRAYIRHLVKCNETFGFRLTTYHNLYFLLKLMEQVRFAISEDRLGDFREEFFEQYGFNKPDAKNF

SEQ ID NO: 51989 - protein, 381 aa, Bacillus aerius
  misc_feature (1)..(381): tr|A0A3A9DXS6|A0A3A9DXS6_9BACI Queuine tRNA-ribosyltran sferase OS=Bacillus aerius OX=293388 GN=tgt PE=3 SV=1
MSQQPIRYEFIKACKQTGARLGRVHTPHGSFETPVFMPVGTLATVKTMAPEELKEMGAGIILSNTYHLWLRPGHDIVKEAGGLHQFMNWDRAILTDSGGFQVFSLSEFRKIEEEGVHFRNHLNGDKLFLSPEKAMDIQNALGSDIMMAFDECPPYPAEYDYMKRSVERTSRWAERCLKAHKRPDEQGLFGIVQGGEYENLRKQSAKDLISLDFPGYAIGGLSVGEPKDVMNRVLEFTTPLLPADKPRYLMGVGSPDSLIDGAIRGVDMFDCVLPTRIARNGTLMTSEGRLVVKNAKYERDFRPIDEQCDCYTCRNYSRAYIRHLIRCNETFGIRLTSYHNLYFLLKLMGQVRDAIREDRLGDFREEFFERYGFNKPNAKSF

SEQ ID NO: 51990 - protein, 381 aa, Bacillus aerophilus
  misc_feature (1)..(381): tr|A0A410KM96|A0A410KM96_9BACI Queuine tRNA-ribosyltran sferase OS=Bacillus aerophilus OX=293389 GN=tgt PE=3 SV =1
MSQLPIRYEFIKSCKQTGARLGRVHTPHGSFETPVFMPVGTLATVKTMAPEELKAMEAGIILSNTYHLWLRPGHDIVKEAGGLHKFMNWDRAILTDSGGFQVFSLSEFRKIEEEGVHFRNHLNGDKLFLSPEKAMEIQNALGSDIMMAFDECPPYPAEYDYMKRSVERTSRWAERCLTAHQRPEDQGLFGIVQGGEYEELRKQSAKDLVSLDFPGYAIGGLSVGEPKDVMNRVLEFTTPYLPADKPRYLMGVGSPDSLIDGAIRGVDMFDCVLPTRIARNGTLMTSEGRLVVKNAKYERDFRPIDENCDCYTCKNYTRAYIRHLIRTNETFGIRLTTYHNLHFLLKLMEQVREAIREDRLGDFREEFFERYGFNKPNAKNF

SEQ ID NO: 51991 - protein, 379 aa, Bacillus akibai
  misc_feature (1)..(379): tr|W4QT76|W4QT76_BACA3 Queuine tRNA-ribosyltransferase OS=Bacillus akibai (strain ATCC 43226 / DSM 21942 / JCM 9157 / 1139) OX=1236973 GN=tgt PE=3 SV=1
MTAITYEHIKTCKQSGARLGKVHTPHGTFETPIFMPVGTLATVKTMSPEDLKDMNAQIILSNTYHLWLRPGHDIIQEAGGLHKFMNWDKPILTDSGGFQVFSLSDLRKIEEEGVHFRNHLNGDKLFLSPEKAMQIQNALGSDIMMAFDECPPYPAEHDYMKKSVERTSRWAERCLSAHERPADQGLFGIVQGGEYEDLRKQSAEDLVSLDFPGYAVGGLSVGEPKHVMNRVLEFTTPHLPVNKPRYLMGVGSPDALIDGAIRGIDMFDCVLPTRIARNGTLMTSTGRLVVRNAKYARDFRPLDENCDCHVCQNYSRAYIRHLVKCEETFGFRLTSYHNLYFLLKLMEQVRQAIREDRLLDFREEFFEQYGFNKPNAKNF

SEQ ID NO: 51992 - protein, 379 aa, Bacillus albus
  misc_feature (1)..(379): tr|A0A1J9UI85|A0A1J9UI85_9BACI Queuine tRNA-ribosyltran sferase OS=Bacillus albus OX=2026189 GN=tgt PE=3 SV=1
MTAIRYEFIKTCKQTGARLGRVHTPHGSFDTPTFMPVGTLATVKTMSPEELKAMDSGIILSNTYHLWLRPGHEIIREAGGLHKFMNWDRAILTDSGGFQVFSLSDFRRIEEEGVHFRNHLNGDKLFLSPEKAMEIQNALGSDIMMAFDECPPFPATFEYMKKSVERTSRWAERCLKAHERPQDQGLFGIVQGGEFEELRRQSAKDLVSMDFPGYAVGGLSVGEPKDIMNRVLEFTTPLLPDNKPRYLMGVGSPDSLIDGAIRGIDMFDCVLPTRIARNGTCMTSEGRLVVKNAKFARDFGPLDPNCDCYTCKNYSRAYIRHLMKCDETFGIRLTSYHNLHFLLNLMEQVRQAIREDRLGDFREEFFEQYGFNKPNAKNF

SEQ ID NO: 51993 - protein, 379 aa, Bacillus alcalophilus
  misc_feature (1)..(379): tr|A0A094WI64|A0A094WI64_BACAO Queuine tRNA-ribosyltran sferase OS=Bacillus alcalophilus ATCC 27647 = CGMCC 1.3 604 OX=1218173 GN=tgt PE=3 SV=1
MAAVTYELIKTCKQSGARLGKVHTPHGTIETPIFMPVGTLATVKTMSPEDLYDMNAQIILSNTYHLWLRPGHKIIEEAGGLHQFMNWKRPILTDSGGFQVFSLSDLRKIEEEGVHFRNHLSGEKLFLSPEEAMNIQNSLGSDIMMAFDECPPYPADYDYMKQSVERTSRWAERCLTAHKRPEDQGLFGIIQGGEYEELRKQSAADLISLDFPGYAIGGLSVGEPKDVMNRVLEFTTPLMPANKPRYLMGVGSPDSLIDGAIRGVDMFDCVLPTRIARNGTCMTSEGRLVVRNAKYARDFRPLDENCDCHVCQNYSRAYIRHLVKCEETFGFRLTSYHNLYFLLNLMEQVKQAIREDRLLDFREEFFEQYGFNKPNAKNF

SEQ ID NO: 51994 - protein, 381 aa, Bacillus altitudinis
  misc_feature (1)..(381): tr|A0A5K1NCW7|A0A5K1NCW7_9BACI tRNA-guanine transglycos ylase OS=Bacillus altitudinis OX=293387 GN=B4133_2659 P E=4 SV=1
MSQLPIRYEFIKSCKQTGARLGRVHTPHGSFETPVFMPVGTLATVKTMAPEELKAMEAGIILSNTYHLWLRPGHDIVKEAGGLHKFMNWDRAILTDSGGFQVFSLSEFRKIEEEGVHFRNHLNGDKLFLSPEKAMEIQNALGSDIMMAFDECPPYPAEYDYMKRSVERTSRWAERCLTAHQRPDDQGLFGIVQGGEYEELRKQSAKDLVSLDFPGYAIGGLSVGEPKDVMNRVLEFTTPYLPADKPRYLMGVGSPDSLIDGAIRGVDMFDCVLPTRIARNGTLMTSEGRLVVKNAKYERDFRPIDENCDCYTCKNYTRAYIRHLIRTNETFGIRLTTYHNLHFLLKLMEQVREAIREDRLGDFREEFFERYGFNKPNAKNF

SEQ ID NO: 51995 - protein, 381 aa, Bacillus altitudinis; identical to SEQ ID NO: 51990
  misc_feature (1)..(381): tr|A0A5D4PQI8|A0A5D4PQI8_9BACI Queuine tRNA-ribosyltran sferase OS=Bacillus altitudinis OX=293387 GN=tgt PE=3 S V=1

SEQ ID NO: 51996 - protein, 381 aa, Bacillus amyloliquefaciens
  misc_feature (1)..(381): tr|A0A4V7TR92|A0A4V7TR92_BACAM Queuine tRNA-ribosyltran sferase OS=Bacillus amyloliquefaciens OX=1390 GN=tgt PE =3 SV=1
MAEQPIRYEFIKECKQTGARLGRVHTPHGSFETPVFMPVGTLATVKTMSPDELKSMDAGIILSNTYHLWLRPGHDIVKEAGGLHQFMNWDRAILTDSGGFQVFSLSKFRNIEEEGVHFRNHLNGDKLFLSPEKAMEIQNALGSDIMMAFDECPPYPAEYDYMKRSVERTSRWAERCLKAHGRSDEQGLFGIVQGGEYEDLRTQSAKDLVSLDFPGYAIGGLSVGEPKHVMNRVLEFTTPLLPKDKPRYLMGVGSPDALIDGAIRGVDMFDCVLPTRIARNGTVFTNEGRLNMKNAKYERDFRPIDEECSCHTCKNYSRAYIRHLIRCNETFGIRLTTYHNLHFLLHLMEQVRQAIREDRLGDFREEFFERYGYNKPNAKSF

SEQ ID NO: 51997 - protein, 379 aa, Bacillus amyloliquefaciens
  misc_feature (1)..(379): tr|A0A2S4ELK5|A0A2S4ELK5_BACAM Queuine tRNA-ribosyltran sferase OS=Bacillus amyloliquefaciens OX=1390 GN=tgt PE =3 SV=1
MPAVTYEHIKTCKQSGARLGIVHTPHGSFETPMFMPVGTKATVKTMSPEELRQIEAKIILGNTYHLWLQPGNDIIKHAGGLHKFMNWNGPILTDSGGFQVFSLSNLRKISEEGVEFRHHTNGSKLFLSPEKSMEIQNDLGSDIMMAFDECPPMPSEYKYVKDSIERTTRWAERCLKAHARPEDQALFGIIQGGEYKDLREQSAKELVELDFPGYAIGGLSVGEPKPVMYEMVEHTEQFMPKDKPRYLMGVGSPDALIECSIRGMDMFDCVLPTRIARNGTCMTSNGRLVIKNAKFADDLRPLDENCDCYTCKNYSRAYIRHLIKAEETFGIRLTTIHNLHFLLKLMEDIRQAIREDRLLDFKAEFFEQYGLNVDNPKNF

SEQ ID NO: 51998 - protein, 379 aa, Bacillus anthracis; identical to SEQ ID NO: 51992
  misc_feature (1)..(379): sp|Q81LH2|TGT_BACAN Queuine tRNA-ribosyltransferase OS= Bacillus anthracis OX=1392 GN=tgt PE=3 SV=1

SEQ ID NO: 51999 - protein, 379 aa, Bacillus anthracis; identical to SEQ ID NO: 51992
  misc_feature (1)..(379): sp|C3P9A4|TGT_BACAA Queuine tRNA-ribosyltransferase OS= Bacillus anthracis (strain A0248) OX=592021 GN=tgt PE=3 SV=1

SEQ ID NO: 52000 - protein, 379 aa, Bacillus aquimaris
  misc_feature (1)..(379): tr|A0A1J6VXY8|A0A1J6VXY8_9BACI Queuine tRNA-ribosyltran sferase OS=Bacillus aquimaris OX=189382 GN=tgt PE=3 SV= 1
MTAIKYEHIKTCKQTGARLGRVHTPHGSFETPVFMPVGTLATVKTMSPEDLKSMDAGIILSNTYHLWLRPGHEIIREAGGLHKFMNWDRAILTDSGGFQVFSLSKLRKIEEEGVHFRHHLNGDKLFLSPEKAMEIQNALGSDIMMAFDECPPYPAEYEYMKSSVERTSRWAERCLQAHQRPQDQGLFGIVQGGEYEELRKQSARDLVSLDFPGYAVGGLSVGEPKDVMNRVLEFTTPHLPDDKPRYLMGVGSPDSLIDGAIRGIDMFDCVLPTRIARNGTLMTSEGRLVVKNAKYARDFRPIDENCDCYTCKNYSRAYIRHLIKCDETFGIRLTTYHNLHFLLNLMEQVRQAIREDRLGDFREEFFEQYGFNRQDAKNF

SEQ ID NO: 52001 - protein, 379 aa, Bacillus aquimaris
  misc_feature (1)..(379): tr|A0A5D4U9E4|A0A5D4U9E4_9BACI Queuine tRNA-ribosyltran sferase OS=Bacillus aquimaris OX=189382 GN=tgt PE=3 SV= 1
MTAIRYEHFKTCKQTGARLGRVHTPHGSFDTPVFMPVGTLATVKTMSPEDLKAMEAGIILSNTYHLWLRPGHEIIKEAGGLHKFMNWDRAILTDSGGFQVFSLSEFRKIEEEGVHFRNHLNGDKLFLSPEKAMEIQNALGSDIMMAFDECPPYPAEHEYMKRSVERTSRWAERCLEAHQRPQDQGLFGIVQGGEYEDLRRQSAKDLVSLDFPGYAVGGLSVGEPKDVMNKVLEFTTPLLPDNKPRYLMGVGSPDALIDGAIRGIDMFDCVLPTRIARNGTLMTSKGRLVVKNAKFARDFNPIDENCDCYTCRNYSRAYIRHLIKSDESFGIRLTTYHNLHFLLKLMEQVRQAIREDRLGDFREEFFEAYGYNRPDAKNF

SEQ ID NO: 52002 - protein, 379 aa, Bacillus aryabhattai
  misc_feature (1)..(379): tr|A0A1G6M4J1|A0A1G6M4J1_9BACI Queuine tRNA-ribosyltran sferase OS=Bacillus aryabhattai B8W22 OX=1358420 GN=tgt PE=3 SV=1
MTAIRYEHIKTCKQTGARLGIVHTPHGSFETPIFMPVGTLATVKTMSPEDLKAMGAGIILSNTYHLWLRPGHEIVKKAGGLHKFMNWDRPILTDSGGFQVFSLSDLRRIEEEGVHFRNHLNGDKLFLSPEKAMDIQNALGSDIMMAFDECPPYPAEYDYLKRSVERTSRWAERCLEAHSRPQDQGLFGIVQGGEFEDLRRQSAADLVSMDFPGYAVGGLSVGEPKDVMNRVLEFTTPYLPTDKPRYLMGVGSPDSLIDGAIRGIDMFDCVLPTRIARNGTLMTSEGRLVVKNAKYAEDFGPIDPNCDCYTCQNYSRAYIRHLIRCNETFGIRLTSYHNLYFLLNLMEQVREAIREDRLGDFRDEFFEKYGFNGPDAKNF

SEQ ID NO: 52003 - protein, 379 aa, Bacillus aryabhattai; identical to SEQ ID NO: 52002
  misc_feature (1)..(379): tr|A0A0J6Q716|A0A0J6Q716_9BACI Queuine tRNA-ribosyltran sferase OS=Bacillus aryabhattai OX=412384 GN=tgt PE=3 S V=1

SEQ ID NO: 52004 - protein, 379 aa, Bacillus asahii
  misc_feature (1)..(379): tr|A0A398BC49|A0A398BC49_9BACI Queuine tRNA-ribosyltran sferase OS=Bacillus asahii OX=228899 GN=tgt PE=3 SV=1
MTAIRYEHIKTCKQTGARLGIVHTPHGSFETPAFMPVGTMATVKTMSPEELKQMGAGIILSNTYHLWLRPGHDIVKEAGGLHQFMNWDRPILTDSGGFQVFSLSDFRKIEEEGVHFRNHLNGDKLFLSPEKAMEIQNALGSDIMMAFDECPPFPATEEYMKKSVERTSRWAERCLKAHERPQDQGLFGIVQGGEYEHLRKQSAQDLISLDFPGYAIGGLSVGEPKDIMNRVLEFTTPLLPADKPRYLMGVGSPDSLIDGAIRGVDMFDCVLPTRIARNGTLMTSNGRLVVKNAKYARDFGPLDENCTCHVCQNYSRAYIRHLIKCDETFGIRLTTYHNLHFLLNLMEQVRQAIREDRLGDFREEFFEQYGFNKPNAKNF

SEQ ID NO: 52005 - protein, 381 aa, Bacillus atrophaeus
  misc_feature (1)..(381): tr|A0A0H3E4I7|A0A0H3E4I7_BACA1 Queuine tRNA-ribosyltran sferase OS=Bacillus atrophaeus (strain 1942) OX=720555 GN=tgt PE=3 SV=1
MAEQPIRYEFIKECKQTGARLGRVHTPHGSFDTPVFMPVGTLATVKTMSPDELKAMDAGIILSNTYHLWLRPGHDIVKEAGGLHKFMNWDRAILTDSGGFQVFSLSKFRNIEEEGVHFRNHLNGDKLFLSPEKAMEIQNALGSDIMMAFDECPPYPAEYDYMKRSVERTSRWAERCLEAHSRSDEQGLFGIVQGGEYEELRTQSAKDLISLDFPGYAIGGLSVGEPKDVMNRVLEFTTPLLPKDKPRYLMGVGSPDALIDGALRGVDMFDCVLPTRIARNGTVFTAEGRLNMKNAKFERDFRPIDEECDCHTCKNYSRAYIRHLIRCNETFGIRLTTYHNLHFLLNLMEQVRQAIREDRLGDFREEFFERYGYNKPNAKSF

SEQ ID NO: 52006 - protein, 381 aa, Bacillus atrophaeus; identical to SEQ ID NO: 52005
  misc_feature (1)..(381): tr|A0A080ULK6|A0A080ULK6_BACAT Queuine tRNA-ribosyltran sferase OS=Bacillus atrophaeus OX=1452 GN=tgt PE=3 SV=1

SEQ ID NO: 52007 - protein, 381 aa, Bacillus australimaris
  misc_feature (1)..(381): tr|A0A0P7FT66|A0A0P7FT66_9BACI Queuine tRNA-ribosyltran sferase OS=Bacillus australimaris OX=1326968 GN=tgt PE= 3 SV=1
MSQLPIRYEFIKSCKQTGARLGRVHTPHGSFETPVFMPVGTLATVKTMAPEELKAMDAGIILSNTYHLWLRPGHDIVKEAGGLHKFMNWDRAILTDSGGFQVFSLSEFRKIEEEGVHFRNHLNGDKLFLSPEKAMDIQNALGSDIMMAFDECPPYPAEYDYMKRSVERTSRWAERCLTAHQRPEDQGLFGIVQGGEYEELRKQSAKDLVSLDFPGYAIGGLSVGEPKDVMNRVLEFTTPFLPADKPRYLMGVGSPDSLIDGAIRGVDMFDCVLPTRIARNGTLMTSEGRLVVKNAKYERDFRPIDENCDCYTCKNYTRAYIRHLIRTNETFGIRLTTYHNLHFLLKLMEQVREAIREDRLGDFREEFFERYGFNKPNAKNF

SEQ ID NO: 52008 - protein, 379 aa, Bacillus azotoformans
  misc_feature (1)..(379): tr|K6D9F3|K6D9F3_BACAZ Queuine tRNA-ribosyltransferase OS=Bacillus azotoformans LMG 9581 OX=1131731 GN=tgt PE= 3 SV=1
MTAIRYELIKTCKQTGARLGRVTTPHSTFETPVFMPVGTLATVKTMSPDELKEMGAGIILSNTYHLWLRPGEDIVQEAGGLHSFMNWDGSILTDSGGFQVFSLSDLRDITEEGVHFRNHLNGEKLFLSPEKAMQIQNALGSDIMMAFDECPPYPATPEYMKNSVERTSRWAERCLEAHSRKETQGLFGIVQGGEYEEFRKQSAKDLVSLDFPGYAVGGLSVGEPKEVMNRVLEFTTPWLPENKPRYLMGVGSPDSLIDGSIRGIDMFDCVLPTRIARNGTVMTSVGRLVVRNAKYARDFTPLDPNCDCKVCKNYSRAYIRHLIRCNETFGIRLTTYHNLYFLLKLMENVRQAIREDRLGDFREEFFEQYGFNRPDAKNF

SEQ ID NO: 52009 - protein, 379 aa, Bacillus azotoformans
  misc_feature (1)..(379): tr|A0A072NQ81|A0A072NQ81_BACAZ Queuine tRNA-ribosyltran sferase OS=Bacillus azotoformans MEV2011 OX=1348973 GN= tgt PE=3 SV=1
MTAIRYELIKTCKQTGARLGRVTTPHSTFETPVFMPVGTLATVKTMSPDELAEMGAGIILSNTYHLWLRPGEDIVKEAGGLHSFMNWNGSILTDSGGFQVFSLSDLRDITEEGVHFRNHLNGEKLFLSPEKAMQIQNALGSDIMMAFDECPPYPATPEYMKNSVERTSRWAERCLEAHSRKETQGLFGIVQGGEYEEFRKQSAKDLTSLDFPGYAVGGLSVGEPKEVMNRVLEFTTPWLPENKPRYLMGVGSPDSLIDGSIRGIDMFDCVLPTRIARNGTVMTSVGRLVVRNAKYARDFTPLDPNCDCKVCKNYSRAYIRHLIRCNETFGIRLTTYHNLYFLLKLMENVRQAIREDRLGDFREEFFEQYGFNRPDAKNF

SEQ ID NO: 52010 - protein, 379 aa, Bacillus bacterium
  misc_feature (1)..(379): tr|A0A3D0E233|A0A3D0E233_9BACI Queuine tRNA-ribosyltran sferase OS=Bacillus bacterium OX=2053512 GN=tgt PE=3 SV =1
MPAITYELIKTCKQTGARLGMIHTPHGSYETPMFMPVGTLATVKTMSPEELKEMGAGIILSNTYHLWLRPGEDIVEEAGGLHKFMNWDQGILTDSGGFQVFSLSEFREIEEEGVHFRNHLNGDKLFLSPEKAMSVQNSLGSDIMMAFDECPPYPASHEYMKKSVERTSRWAERCLKAHERPEDQGLFGIVQGGEYEDLRKQSAKELVSLDFPGYAIGGLSVGEPKDVMNRVLEFTTPLLPSDKPRYLMGVGSPDSLVDGAIRGVDMFDCVLPTRIARNGTLMTSQGRLVVKNAAYARDFGPLDENCDCYACRNYSRAYIRHLIKCNETLGIRLTTYHNLYFLLKLMKQVRDAIKEDRLGDFRKEFFERYGFNRPDAKNF

SEQ ID NO: 52011 - protein, 379 aa, Bacillus bacterium
  misc_feature (1)..(379): tr|A0A506QDD5|A0A506QDD5_9BACI Queuine tRNA-ribosyltran sferase OS=Bacillus bacterium OX=2053512 GN=tgt PE=3 SV =1
MTAIRYEFIKTCKQTGARLGRVHTPHGSFDTPTFMPVGTLATVKTMSPEELKAMDSGIILSNTYHLWLRPGHEIVREAGGLHKFMNWDRAILTDSGGFQVFSLSDFRRIEEEGVHFRNHLNGDKLFLSPEKAMEIQNALGSDIMMAFDECPPFPATFEYMKKSVERTSRWAERCLKAHERPQDQGLFGIVQGGEFEELRRQSAKDLVSMDFPGYAIGGLSVGEPKDIMNRVLEFTTPLLPDDKPRYLMGVGSPDSLIDGAIRGVDMFDCVLPTRIARNGTCMTSEGRLVVKNAKFARDFGPLDPNCDCYTCKNYSRAYIRHLMKCDETFGIRLTSYHNLHFLLNLMEQVRQAIREDRLGDFREEFFEQYGFNKPNAKNF

SEQ ID NO: 52012 - protein, 379 aa, Bacillus badius
  misc_feature (1)..(379): tr|A0A0C2XUP4|A0A0C2XUP4_BACBA Queuine tRNA-ribosyltran sferase OS=Bacillus badius OX=1455 GN=tgt PE=3 SV=1
MPAIKYELIKTCKQTGARLGRVHTPHGSFETPVFMPVGTLATVKTMSPEELKEMGANIILSNTYHLWLRPGHEIVKEAGGLHKFMNWDRSILTDSGGFQVFSLSDFRKIEEEGVHFRNHLNGDKLFLSPEKAMEIQNALGSDIMMAFDECPPYPAEYDYMKRSVERTSRWAERCLNAHVRPEDQGLFGIVQGGEYEELRRQSANDLVSLDFPGYAIGGLSVGEPKDVMNRVLEFTTPLLPSHKPRYLMGVGSPDSLIDGAIRGVDMFDCVLPTRIARNGTLMTSEGRLVVKNAKYARDYGPLDENCDCYTCRNYSRAYIRHLIRCNETFGIRLTTYHNLYFLIKLMEQVREAIKEDRLGDFREEFFEAYGFNRPDAKNF

SEQ ID NO: 52013 - protein, 379 aa, Bacillus badius
  misc_feature (1)..(379): tr|A0A162X8V6|A0A162X8V6_BACBA Queuine tRNA-ribosyltran sferase OS=Bacillus badius OX=1455 GN=tgt PE=3 SV=1
MPAIKYELIKTCKQTGARLGRVHTPHGSFETPVFMPVGTLATVKTMSPEELKEMGANIILSNTYHLWLRPGHEIVKEAGGLHRFMNWDRSILTDSGGFQVFSLSDFRKIEEEGVHFRNHLNGDKLFLSPEKAMEIQNALGSDIMMAFDECPPYPAEYDYMKRSVERTSRWAERCLNAHARPEDQGLFGIVQGGEYEELRRQSANDLVSLDFPGYAIGGLSVGEPKDVMNRVLEFTTPLLPSHKPRYLMGVGSPDSLIDGAIRGVDMFDCVLPTRIARNGTLMTSEGRLVVKNAKYARDYGPLDENCDCYTCRNYSRAYIRHLIRCNETFGIRLTTYHNLYFLIKLMEQVREAIKEDRLGDFREEFFEAYGFNRPDAKNF

SEQ ID NO: 52014 - protein, 379 aa, Bacillus bataviensis
  misc_feature (1)..(379): tr|K6DD14|K6DD14_9BACI Queuine tRNA-ribosyltransferase OS=Bacillus bataviensis LMG 21833 OX=1117379 GN=tgt PE= 3 SV=1
MTAIRYELIKTCKQTGARLGRVHTPHGSFDTPAFMPVGTLATVKTMSPEDLKEMGAGIILSNTYHLWLRPGQEIIKEAGGLHKFMNWDRAILTDSGGFQVFSLSEFRKIEEEGVHFRNHMSGEKLFLSPEKAMEIQNALGSDIMMAFDECPPFPATFEYMQKSVERTSRWAERCLKAHERTDDQGLFGIVQGGEYEELRKQSARDLTSLDFPGYAIGGLSVGEPKDIMNRMLEFTTPLLPSNKPRYLMGVGSPDSLIDGSIRGIDMFDCVLPTRIARNGTLMTSEGRLVVKNAKFAKDFGPLDPECDCYTCRNYSRAYIRHLIKCDETFGIRLTSYHNLYFLLRLMEKVRQAIMEDRLGDFREEFFERYGFNKPNAKNF

SEQ ID NO: 52015 - protein, 379 aa, Bacillus bataviensis
  misc_feature (1)..(379): tr|A0A561DGK7|A0A561DGK7_9BACI Queuine tRNA-ribosyltran sferase OS=Bacillus bataviensis OX=220685 GN=tgt PE=3 S V=1
MTAIRYELIKTCKQTGARLGRVHTPHGSFDTPAFMPVGTLATVKTMSPEDLKEMGAGIILSNTYHLWLRPGHEIIKEAGGLHKFMNWDRAILTDSGGFQVFSLSEFRKIEEEGVHFRNHMSGEKLFLSPEKAMEIQNALGSDIMMAFDECPPFPATFEYMKKSVERTSRWAERCLNAHQRPQDQGLFGIVQGGEYEELRRQSANDLVSLDFPGYAVGGLSVGEPKDVMNRVLEFTTPMLPTNKPRYLMGVGSPDSLIDGAIRGIDMFDCVLPTRIARNGTLMTSTGRLVVKNAQFARDFGPLDPECDCYTCRNYSRAYIRHLIKCDETFGIRLTSYHNLYFLLRLMEKVRQAIMEDRLGDFREEFFERYGFNKPNAKNF

SEQ ID NO: 52016 - protein, 379 aa, Bacillus beveridgei
  misc_feature (1)..(379): tr|A0A1D7QU04|A0A1D7QU04_9BACI Queuine tRNA-ribosyltran sferase OS=Bacillus beveridgei OX=632773 GN=tgt PE=3 SV =1
MSAVTYEHIKTCKQSGARLGKVHTPHGTFETPIFMPVGTLATVKTMSPEDLLGMNAQIILSNTYHLWLRPGEDIIKEAGGLHQFMNWHRPILTDSGGFQVFSLSDLRNITEEGVHFRNHLSGEKLFLSPEKAMRIQNDLGPDIMMAFDECPPYPAEHAYMKASVERTSRWAERCLEGHQRPQDQGLFGIIQGGEYEDLRRQSAEDLVSLDFPGYAIGGLSVGEPKDVMNQVLEFTTPFLPENKPRYLMGVGTADSLIDGAIRGIDMFDCVLPTRIARNGTLMTSEGRLVVRNAKFARDFRPLDENCDCYVCQNHSRAYIRHLIKANETLGLRLCSYHNLYFLLDLMEKVRGAIREDRLLDFREEFFEQYGFNKPNAKNF

SEQ ID NO: 52017 - protein, 379 aa, Bacillus bombysepticus
  misc_feature (1)..(379): tr|A0A023PBX1|A0A023PBX1_9BACI Queuine tRNA-ribosyltran sferase OS=Bacillus bombysepticus str. Wang OX=1330043 GN=tgt PE=3 SV=1
MTAIRYEFIKTCKQTGARLGRVHTPHGSFDTPTFMPVGTLATVKTMSPEELKAMDSGIILSNTYHLWLRPGHEIIREAGGLHKFMNWDRAILTDSGGFQVFSLSDFRRIEEEGVHFRNHLNGDKLFLSPEKAMEIQNALGSDIMMAFDECPPFPATFEYMKKSVERTSRWAERCLKAHERPQDQGLFGIVQGGEYEELRRQSAKDLVSMDFPGYAVGGLSVGEPKDIMNRVLEFTTPLLPDNKPRYLMGVGSPDSLIDGAIRGIDMFDCVLPTRIARNGTCMTSEGRLVVKNAKFARDFGPLDPNCDCYTCKNYSRAYIRHLMKCDETFGIRLTSYHNLHFLLNLMEQVRQAIREDRLGDFREEFFEQYGFNKPNAKNF

SEQ ID NO: 52018 - protein, 379 aa, Bacillus boroniphilus
  misc_feature (1)..(379): tr|W4RHM7|W4RHM7_9BACI Queuine tRNA-ribosyltransferase OS=Bacillus boroniphilus JCM 21738 OX=1294265 GN=tgt PE =3 SV=1
MSAIRYELIKTCKQTGARLGRVHTPHGSFETPVFMPVGTLATVKTMSPEELVQMGAGIILSNTYHLWLRPGHEIVKEAGGLHKFMNWDRAILTDSGGFQVFSLSEFRKIEEEGVHFRNHLNGDKLFLSPEKAMEIQNALGSDIMMAFDECPPYPAEYDYMKKSVERTSRWAERCLTAHQRPQDQGLFGIVQGGEYEELRKQSAKDLVSMDFPGYAVGGLSVGEPKDVMDRVLEFTTPWLPTDKPRYLMGVGSPDSLIDGAIRGIDMFDCVLPTRIARNGTLMTSEGRLVVKNAKFARDFGPLDPNCDCYTCKNYSRAYIRHLIKTDESFGIRLTSYHNLYFLLKLMEQVRQAIREDRLGDFREEFFEQYGYNKPNAKNF

SEQ ID NO: 52019 - protein, 379 aa, Bacillus butanolivorans
  misc_feature (1)..(379): tr|A0A0M0EZ71|A0A0M0EZ71_9BACI Queuine tRNA-ribosyltran sferase OS=Bacillus butanolivorans OX=421767 GN=tgt PE= 3 SV=1
MTAIRYELIKTCKQTGARLGRVHTPHGSFDTPAFMPVGTMATVKTMSPEDLKQMGAGIILSNTYHLWLRPGHEIIKEAGGLHKFMNWDRAILTDSGGFQVFSLSEFRKIEEEGVHFRNHINGDKLFLSPEKAMEIQNALGSDIMMAFDECPPFPATEEYMKKSVERTSRWAERCLNAHERPKDQGLFGIVQGGEFENLRKQSAKDLVSLDFPGYAIGGLSVGEPKDIMNRVLEFTSPLLPTNKPRYLMGVGSPDSLIDGALRGVDMFDCVLPTRIARNGTLMTSNGRLVVKNAKYARDFGPIDENCDCHVCKNYSRAYIRHLIKCEETFGIRLTTYHNLHFLLNLMEQVRQAIREDRLGDFREEFFEQYGFNKPNAKNF

SEQ ID NO: 52020 - protein, 380 aa, Bacillus caldolyticus
  misc_feature (1)..(380): tr|A0A2H5KKQ9|A0A2H5KKQ9_BACCL Queuine tRNA-ribosyltran sferase OS=Bacillus caldolyticus OX=1394 GN=tgt PE=3 SV =1
MTTPIRFELIKTCRQTGARLGILHTPHGSFETPMFMPVGTLATVKTLSPEELKEMGAGVILSNTYHLWLRPGHDIVEEAGGLHAFMNWDRGILTDSGGFQVFSLSEFRRIEEEGVYFRNHLNGDKLFLSPEKAVEIQNALGADIIMAFDECPPYPATYEYMKQSIERTSRWAERCLKAHRRPNEQGLFGIVQGGEYEDLRRQSARDLVSLDFPGYAVGGLSVGEPKEVMNRVLEFTTPLLPADKPRYLMGVGSPDSLIDGAIRGIDMFDCVLPTRIGRNGTVMTSEGRVVIKNAQYARDFSPLDPNCDCYTCRNYTRAYIRHLIKCDETFGIRLTSYHNVYFLIKLMEQVRQAIREDRLADFREEFFERYGFNKPNAKNF

SEQ ID NO: 52021 - protein, 379 aa, Bacillus camelliae
  misc_feature (1)..(379): tr|A0A2N3LKY7|A0A2N3LKY7_9BACI Queuine tRNA-ribosyltran sferase OS=Bacillus camelliae OX=1707093 GN=tgt PE=3 SV =1
MTAIKYELIKTCKQTGARLGKIHTPHGSYDTPMFMPVGTLATVKTMSPEELKEIGSGVILSNTYHLWLRPGHDIVREAGGLHKFMNWDQAILTDSGGFQVFSLSDFRKIEEEGVHFRNHLNGDKLFLSPEKSMEIQNALGSDIMMAFDECPPFPATHEYMKKSVERTSRWAERCLKSHNRTSDQGLFGIVQGGEYEDLRRLSAADLTSLDFPGYAVGGLSVGEPKDVMNRVLEFTTPLLPANKPRYLMGVGSPDSLIDGAIRGIDMFDCVLPTRIARNGTVMTSEGRLVVKNAKYARDFSPLDKNCDCYACRNYTRAYIRHLMKCDETFGIRLTSYHNLYFLLQLMKEVRQAIMEDRLGDFREEFFEQYGFNRPDAKNF

SEQ ID NO: 52022 - protein, 379 aa, Bacillus campisalis
  misc_feature (1)..(379): tr|A0A0M2SHI4|A0A0M2SHI4_9BACI Queuine tRNA-ribosyltran sferase OS=Bacillus campisalis OX=1408103 GN=tgt PE=3 S V=1
MSAISYELIKTCKQTGARLGRVHTPHGSFETPAFMPVGTLATVKTMAPEELKEMGAGIILSNTYHLWLRPGHETIREAGGLHKFMNWDRAILTDSGGFQVFSLSEFRKIEEEGVHFRNHLNGDKLFLSPEKAMEIQNALGSDIMMAFDECPPYPASFEYMKASVERTSRWAERCLKAHKRPEDQGLFGIVQGGEYEELRKQSAKDLVSLDFPGYAVGGLSVGEPKDVMNRALEFTTPLLPANKPRYLMGVGSPDSLIDGSIRGIDMFDCVLPTRIARNGTLMTSQGRLVVKNAQYAKDFGPIDPECSCYTCRNYSRAYIRHLIKCDETFGIRLTTYHNLHFLLQLMEQVRQAIREDRLGDFREEFFERYGFNKPNAKNF
